United States Patent Application Publication US 2019/0348154 A1 - sequence listing, part 112

SEQ ID NO: 423932 - DNA, 1284 bp, Serratia marcescens
atggccagaccttctttttttcttgatttcagtttgctgagaagcaatgcgcatttccgcgcgattttctgcgcccgcatgctgtcggtgttttccctcggcatgttggcggtgggggtgccgattcagatccaggcgatgaccggctccacgttgcaggtgggcgtggcggtggcgctggacggggtgggcatgtttatcggcctgatgctgggcggcgtgctcgccgatcgctacgatcgccgtaagctgatcctgtttgcgcgcggcacctgcgggctgggctttgtcgccctgagtctgaacgccttcgccccggcgccttcgctgtgggcgctctacctgctggcggcctgggatggcttcttcggggcgctgggcatgacggcgctgatggcggtgatcccgctgctggtcgggcgcgaaaacctggcggcggcgggggccttgagcatggtgacggtgcgcatcggcgcgatcctggcgccggcgctgggcgggatcatcatcgtgttcggcggcgtggggctggcgttcgccgtggccgccgccgggacgctgggcacccttgtcccactggtgcgcctgccgacgctgttgccgcagcagcaggagccggaacacccgctgcgcgcgctcgccagcggcttccagtttgtctggcgcaataaggtggtggggtcggtggtgctgctgggaatgctgatgagcatcgtcggcgccgtccgggtgctgttcccggcgctggcgcaggacgcttaccacgtcggcgcgtcctcaattggcctgatgtattccgcggtgccgctcggcgcgatgctgggcgcgctgaccagcggctgggtggggcgtttctctcggcccggcgtgctgatcctggtcgccgccatcgtcgcgtttaccgctatcgcttcgctggggctgttcagccacctggcgccggcgctgctggcgctggtgtgctacggctacgctaacgccatcgcttcgctcctgcaattcatgctgatccagagcaatacgccggatcatctgctggggcgggtgaacagcctcggcaccgcgcaggacgtaaccggcgattcgatcggcgcgctggggctcggcgtactgggcagggtgtttaccccactaatgagcgtgctgtcgtttggcgcattcgccgctgcgctcggcgtgctggtggccttcagcgtgcgcacgctgcgccagtgccggccggcggacgcgctggtcgagcacgatgagcccgcgccggcaacctcggcggcagcggacaactaa

SEQ ID NO: 423933 - DNA, 360 bp, Serratia marcescens
atgaccgccgaatcccactgcagcccaacgggcatcagcctcgaagacaccggctatggctatacgctgtcggtgatcaacggcaaatataaaatgattattctctactggctggcgttgtataagccggtattgcggttcaacgagctgcagcgctgcatcggcaccatttcctacaaaacgctgagttcgacgctgaaagagctggaaaaagatcggttggtggtgagaaaggaatatccgcagatcccgcccaaggtggagtacagcctgtccgaacgcgggcgttcgctgatcccggtgatcgacatgatgtgcaactggggggaacagcaccggccggaacagccggtgccgtga

SEQ ID NO: 423934 - DNA, 555 bp, Serratia marcescens
atgaaaaccctggtggtggtgacccatcccgatatggcgaactcggtggtcaataaacgctggctggaggagctgaggcgctatccggagcggtataccgtgcacgaactgcatcaggcctacccggactggcagatcgacgtcgcccaagagcagcggctgatcgaagcccatgacaacatcgtgctgcaattcccgattttctggttcagcagcccgccgctgctgaaaaaatggctggacgacgtgctgacctacggctgggcctacggttctcgcagcggctacaagatgcaaaacaagaagctggcgttggcggtcacggcgggggtgcgcgcagaggattatgcgcgcgacgggcgctatcgctactcgctggaggaaatcttccggccgtttgaagtcaccgccggttacgtgcgggccgactatgcctcgttcttcgccttttacggcagggaggccgcttcggacggcacggtggagccgctgcaatcccacgaattggatcgcagcgcacagggctaccaggcatttctcgccgccctgaattaa

SEQ ID NO: 423935 - DNA, 162 bp, Serratia marcescens
atgcaaaagatcactcgttttctggccctgctcggcgagctgatgatcgaaaaagccgaagacgccgcgccgcaggctgctcagcctgacgatcgcgacgacgcgttgccaccgcgtctcgaacgtggggttccgctggccgaccgcttcctgttcatgtaa

SEQ ID NO: 423936 - DNA, 2073 bp, Serratia marcescens
atgtttaaaccgacttataaaaagaacgccgtcacccgcgccattaccaccgccatgccgctgtttctgctggccggccacgcggcgcaggcgcatcaacaccctgccggcgcacaggttaatgatggcgacgtgatcaccgtcaccgcgccgctctactccccgctgaccatcgtcacctcgccgaaaaccccacgccagccggtgccggccagcgacggttcggactacctgaaaaccatccccggcttttcgcagatccgcaacggcggcaccaacggcgacccggtgttccgcggcatgttcggctctcggttgaagatcctcaccgacggttcggaaatgctgggcgcctgcccagcgcggatggatgcaccgacctcttacatctcgccggaaagcttcgatctgttgaccattaccaaggggccgcagacggtgctgtgggggccgggatcgtcggcgggcacggtgcgtttcgagcgtgaacgcccgcgcttcgacaagccgggtatcaagggcaacgccagcgtgctgaccggctccaacggccgctgggacgagaacatcgacgccagcctcggcgccgaacaaggctacctgcgggtgatggccaacaaatcccgttccaacgactatcaggacggcacgaatacgcgcgtgccatcgcgttgggacaagtggaacggcgatctggcgctcggctggacgccggacaacgacacgctgctggaagtgactatggggcgcggcaacggcgaagcgcgctatgccggccgcagcatggacggttcgcagttcaaacgcgaaagcctgggcatgcgggtggagaaatccaacatcggcgacgtgctggataagctggaagcgcaggtctactacaactacgccaaccacgtgatggacaacgtcaccctgcgctcgccgggcagcggtggcatggctgggcacggggggcatggcggcatgagcatggggatgggcggccacggcgggcacatgatgtcctccggcatgacgatgcagctcgatcgccgcaccgtcggcggccgcgtgatgggcacctggcagtggcaggacgtgaagcttgaaagcggcctggacacccaaaccaacacccaccgcagcatgaaccgcggcagctgggaaaaagacgcccagttcaacagctacggcgccttcagtgaactgacctggtccaccagcgaacaggataaactgatcggcggcgcgcgcctcgaccgcaccctggtggagaatttccgcagcgccagcgctgggaaacgttcggacaccctgccgagcggctttatgcgcctggagcatacgctggccgacctgccgctgatgctgtatgccggcgtcggttataccgagcgcttcccggattactgggagctgttctcgccgaagcttggcccgaacggcagcaaggatccgttctccagcgtcaagagcgagaaaaccacgcagctcgacatcggcgcgcagtacaacggcaaacgcttcaacggctgggtctccgcttatgtaggccgcgtcgatgatttcatcctgttcaaatacgatccgcacaacgcgcgcctcagccaggccgataacgtcaacgccaacatcatgggcggcgaaatgggcatgggttatcagctgagcgagcactggaaaaccgacgccagcctggcctactcctggggcaaaaacaccagcgatggccgcccgctgccgcagatcccgccgctggaggcgcgcttggggctgacctatgagtacggcgactggagcggcaccggcctgtggcgtctggtcagcagccaacaccgcgtggcgatcaacgaaggcaacgtggtgggcaaagactttgccgaaagcgccggcttcggcgtgctttccgccaacgccgcctacaaggtgaataaaaacgtcaagctgagcgctggtctggataacatcctgaacaagacctacagcgagcacctcaacctggcgggcaacagcgccttcgggtactcggccaacagcgcggtgaatgaaccgggccgcaccctgtgggccaaggttaacgtcaccttctaa

SEQ ID NO: 423937 - DNA, 315 bp, Serratia marcescens
atggcggattgcggcatggatatgccgatgcatcacgggatgcactcgccgccgcctgagcctgagaaagcctcacagccgctgatgcagcacggcggcggccaccacaacatggcgatgatgatggacgacagcgcctgcggctactgcgtgctgttgctgcacgcgccgctgctggacgtgagccacggcccgctgttctggtcccagtcgctggcttcgcgcccgccgccgatccactatctcgtccctctgtttgcccacgttgttcacaccgaattacagccgcgcgcgccccccatctctttcctctga

SEQ ID NO: 423938 - DNA, 231 bp, Serratia marcescens
atggatttgaccactcaggacgcactggactggcttaatgacggtattgaaacgctcaaaaccggtgagatcaaccgttacagtgcagagggctacgcgcgggggtatgagctcggttttctgtacggaaccttgcgcaccttactggccacgcaaaaaattacccgtgaagagtacgataagttacacagtacactgagccatacccgccacgcttgcatgcgagaatga

SEQ ID NO: 423939 - DNA, 1302 bp, Serratia marcescens
atgaagctatcatcgatcgcgattgcgctttcggccgtgttggcgctggccggctgcgataacagcgccgtcatttcaccggaacaacaaatggggccggatccgacgttgccggcggcgcaagacttcctgatgccgccgatgcaggtgccaaagggcgtcggctggcagcaaaatcagatgccgaaagtggccgaaggcttgaaaatcgataaggtggcggacggtttgctgcacccgcgccagctgcttaacctgcccaacggcgatgttttggtggtggaagccaacgggccgggcaccgaagcggtgagcacgcccaagcagctgatcgccggtttggtgaagggccagtccggtaaaggcggcaaagggggcaaccggattaccctgctgcgcccaaccgccgatggcagctgggaaaagcatatcttcctcgaagggctcgattcgccgttcggcgtccagctgattggcaacaccctgtatgtggccaacaccggcaacatcatgcagtacgcctatcagccgggcgaaacgcgcatcagcgatgcgggtacagagctggccgatctgccggacaccatcaaccatcattggaccaaggccctgctggccagcccggacggtaaaaagctgtatgtcggcgtcggttcaaacagcaacatcaccgaaaacggcctggccgtagagtaccgccgcgccgccgtgctggaagtggacaccgcctccggcgccagccgcatcttcgccagcggcctgcgcaacccgaccgggctgcagtgggaaccgcacagcggcaagctatgggccatcgtcaacgagcgtgacgagatcggcgccgatctggtgccggactacctgacctcggtgcaggacggcggcttctacggctggccttacagctatttcggccagcacgtcgatcggcgggtgcagccggcgcggccggatctggtggcgaaagccatcaagccggactacgccctcagctcccacgtcgcgccgctggggctgctgttctacacggcgaacgctctgccggccgagtatcgcggcggcgccttcgtcagcgaacacggcagctgggatcgctcgccgctgaacggctaccgggtcagctacgtggcgtttgagcaaggcaagccggtcggcaaactcaaagcggtggtcaccggctttgtctccgacgacgagaaggaactctatggcgcaccggtaggattggcggtcgacaagaccggcgccctgctgattgctgatgacgtcggcaacaccgtttggcgcgttaaatcgaaataa

SEQ ID NO: 423940 - DNA, 426 bp, Serratia marcescens
atgaccacgcaaacgacagcaaggccttcagcggtcgcggtggccgtctatgaatggctcaatccgataccctacggatttttcaccgctgcgctgattttcgacattatctatgcctgcacggcgaatattcagtgggtcaacggtgccagctggctgatcgccatcggcctgatttttgccattattccccgtctgattaacctggtgcaggtgtggttcggcagcggccggctgcaggggccatcggtcaagctccatttctggctgaacttgctggccatcgttctcgccatcatcaacgctttcgtgcatagccgggatgcgtatgccgtggtgccgcaaggtctggtgctgtctgcgatcgtggtcgcgctgctgagcctcgccaacattctgctggccgtgggcgcccgcgcaaaataa

SEQ ID NO: 423941 - DNA, 459 bp, Serratia marcescens
atgagtatagagcgcgttcagcgatttctggccgagcacgcgccggaaacggcggtgacggtgctggcaaagaataccgctacggtggcgctggcggcggaagcctttggcgtggagagcgggcagatcgccaagacgctgtcgtttcgcgtgaacgacggcgtagtgctgttggtgatggcgggaaccgccagaatcgataacaagaagtacaaacaattcttcggcgtaaaggcgcgcatgttgccggcggaggaggtggaggcgctgaccggctatccaccgggcggcgtttgcccctttgccgcaccggcagcggtaagaatttactgcgatcgcagcctgtgccgctacggtgaagtgcttccggcaggcggcagcgataactcaggcgtgagaattgcgccacaacgcctggccagcatcaccggagcagagtggattgacgtgacagggtaa

SEQ ID NO: 423942 - DNA, 378 bp, Serratia marcescens
atgtttgaccatgtgaaatttggcgtcagcgactttgcccttagtaaagtgtttttcctcaatgcactcgcgccgctgggcgtaaagatcgttgccgaaggcgaacccggctatggcgtcgaactttgtcacgatcgggataacgtgtcattgtgcctgtttcaaaccgatgaaaaaccggcgcatctgcacctggcatttgccgcaagcagccgtgaacaggtcgatgcgttctaccacgccgcgctaaatgccggcggcaaagacaatggcgcacccggtttacggcccaattaccatgcccactactatgcggcatttgtgatcggcccggatggccacaatatcgaagcggtatgccataacccgatgaactag

SEQ ID NO: 423943 - DNA, 381 bp, Serratia marcescens
ttgatccattttgcagagtggcttagccacatccaggcgcttgaggttgaactgcaccagccaacaacgcgctgcgatccgaagcgtgtcgcggcattgctgcatgaagactttgaagagattggccgctcaggcctacgttatgacaaacgccagaccgttgcggcgctggagatggaaacggattatccgcagattttcgccgaaggttttaagctggcgcaaatcagtgatagcgccgtattgctgacgtataaaagttttcagcgtgacgcgcagggccacgccgtgcgttgcacagagcgttcgtcgatttggcttctgacagccaaggcaggttggcagatgcggtttcatcaaggcacgccgactgatgattga

SEQ ID NO: 423944 - DNA, 663 bp, Serratia marcescens
atgcccgatcggtcattactctttttttatggtttagcctttgctgcggtaatttattttattgttaaattcaggaaggacatcacaaaaaaagatgggttgataaatatagcttcatatctagttatcgctattgcaataatactcttgctcaattcagatctttctgttactggcatcctgattgccatgttttcttttcttgcagcaggttttatttttttatgcgttgccattttcctcaaggatgtatactcaacgaaaaagtatacattaactgccataaagcgaataaaaacggaaaattcaattaatttcaaaggaatgccagaattcaaaagcggcattttttgctataaaaaaacatggtatgccatctgttcaccctctttgaatttactggaaattggcgttaatgcgtttgatagccaacctgagtttggcaaaaaattcaccgttcgaacgttgtctaaacgcgctattacattcattccggaagtaattcctgataaaatcaatgatgacactgaactattcggccaactggtaatattttgtgaaatatctgaaagaaatcagattatggtggaaaattatattgaagccataaaaaatagctctgctacaccctggcttatctctgtgccagataaaacgccataa

SEQ ID NO: 423945 - DNA, 1023 bp, Serratia marcescens
atgatgaaacaccacaaagccaccgccagcgacgtcgccgaaaaggccggcgtctctaaatggacggtatcgcgcgcctttacgcccggcgcctcgatctcggacagcgcgcgtgaaagcgtgctggcggcggcggccgagctgggctatcggccaaatctgctggcgcgcagcctgtcgcaaaaacgcacgcacatcattggcgtggccatcgacgagatgaagaacccgcattcaatgatgatgctcgatatggtgaccaaacagctgcaaacccgcggttatatggcgctgctgctgaacatcaccgccggggaaaactaccgggcggtgatggcgatggccgatcagctgcaggtcgacggcattttgttcctggcgacggtgttaaccaaggagtgggcagcgatcgcgcaagatctgcatcagataccgctggtgcaggtatgccgcaatacggaaagcgaacacattgatgtggtcaatatcgacggctaccgcgccggcgaagagatcgccgcgctgctgatagagcaaggccaccggcgctttggttacatgaaggggccggacacgcaaagcagccatttgctgcgcatggaaggctaccgcgacaaactgatggccgccggctttcagttggatcgagtgctcaccgccggccactacgatcgccaacgcggtttccagctgatgagcgaatacctgcaggcaacgccggaaagcgagcgggttgaggcgctgttctgcgagaacgacgtgttggcgctaggggcgctcgaagcgctcaggcaaacggcgccgtcgtccgcgatggccgtggtaggtttcgatgatatcgacgaggccggctcagccaactgggcgctgaccagctacagccaacgcatcgaccggctggtcgaagaggccttgaatcgcctgatcgacaatcgcgccacggcagacggcgcctggcggcacggggaattgcgggttcggcggtcgcatgtgaagcaagacgaaattcagatcgctgattga

SEQ ID NO: 423946 - DNA, 924 bp, Serratia marcescens
atgaaaaaaaccagactgttgttgatgttagcctgctcgctgtttgtggtgaccgcccaggccaagacctaccaggtcggcgtagcgctggccaacttcgatctcaacttcgtctctatcctgcgcagccaaatggcgcgggaactggctgcgcagcagctgcaaggccagttcgtcgatgccaaaggcgatgtcgccctgcaggtgcaacaggtggacgatctgattaatcagggcgtgaacgccattatcctcaacccggttgatacgcaaggcgtccagccgatgatagcggccgccaaacgcgccgcgatccccctgatcttcgtcaaccgcaaacccgaagtgccgctgagcggcgcgacggcctacgtcggctccgattcggcgctcagcggccgcctgcagatggaggccctggcgaaaaaaatgaattaccgcggcaacgtggcgatcctgatgggcgccctctccaacgaagagacccgcgaacgcacccgcgcggttgaagcggtgatcgccaaacacaaagacctgaaagtggtagaaaaacagaccgcaaaatggcagcgcaatgaagcggtcgatgtggtttccggctggttgctgaacggcgtagcgatcgatgcgatcgccgccaacaacgatgagatggccatcggcgcgatcatggcgctgaagcaggccaaaaagagcggtgtgctggtcgccggtatcgacggcacgcccgacggcctgcaatttatcaaaaccagcgacctggcggtgaccattttccaggatgccaaagcccaggcgatcggcgcggtgcaagtgactcgcgccctgttggatcacgccaaaaccgagccttacaactgggtgccttacgccaccgtaacgcgagaaaactacccgcaatttgcgcagatgaaccagaaataa

SEQ ID NO: 423947 - DNA, 1176 bp, Serratia marcescens
atgttaaatggtgaaagaagcatcccccgcccgctgcgttgggcgatgatcggcggcggccgcctcagccaggtgggctacaagcaccgttccggcgcactgcgcgacaacaccgcctatcggttggttgccggcgcctttgatatcgacgcggcgcgcggacgcgagtttggcgtcaacctcggcgtgcccgccgaacgctgttatgacgactatcaacagctgctggagcaagaagccaaccgcgaagacggcgttgaggtggtgaccatcgccacccctaacggcacccactatgcaatcacgcgcgccgcgctgaatgccggcctgcatgtcatctgcgaaaagccgctgttcttcaccacggcggaggcgagagaaatcaaggcgttggcggcggagaaaggcctgatcgtcggcgtaacctacggcttctccggccatccactgctgatgcagatgcgcgccatgatcgcgaacggcgacatcggcgaaatacgcatggtcgaattgcagtacacccacggcttcaatgccaacgaaagcgcggacacgttcgaggcgcaaaagtggcgcgtcgatccgaaaatcgccggcccctcttttgtgctgggcgacatctccacccacaccttctacatctcgcagttggtgatgcccgatatgaagattgcctccctgctgtgcgatcgccagagctttattccttcccgcgccccgctggaagacaacgccatggtgttgatgcactacgaaaacggcgccgtcggccgcatgtgggcctccgccgtcaacgccggcgcgatggacagccaaagcatccgcgtggtcggctcgctcgccagcctgcagtggagcgacgctgcgcccggcgaattgcgctatgagatccaggggcggcccaaccagatcctgcaccacggcatgccctatctggacgacagcgccctggccgaagagcggctcggcgcgctgcacaccgaaggcctggccgaatcctgggccaatatttacctcaagttcgccatcgccatcagcgccagccagcgcggcgatcggcagacgctggccacgctgatctacccggatatcgacgccgggctggaaggcgtgcgctggattgaaaactgcgttcgttccgccgacaacggcgccacctgggttaattaccaataa

SEQ ID NO: 423948 - DNA, 942 bp, Serratia marcescens
atgagactctcattctgtaccgacagcctgggccatttacccttcgagcagatgctggaccggctgctggaactgggggtgcgcggcgtggaaatgaccaccggcggctggtctccggcgccccatctggatgccgacgatctgctggccaaccccgccaaacgccggcagctgctgcaggcgctggccagccgcggcatggagatcgccgcgctcaacgtctccggcaatccgctcgatcccggcgaactggggcaacgccatcagcgccaaaccgacaatacgctggagctggccgggctgctgggagtgaaaaagatcgtcatgatgagcggcctgccgccggccagcccgcatgacaccatccccaactggatcacttataccgtcagctggccgcccacggtgaaaaactgcctggactatcaatggaatgacgtggcgatcccctattggcaggcgttggtcgcccgagccaaagcgtgcggcgtcgagcgctttgcgctggaaaacttcagcgccatgctggtgtggaacccggaaacgctgttccggctgcgcgaggccgttggcccgatggtgggcctgaacctcgatcccagtcacttgctctggatgggggcagatcccatcgcggtggcccgcgcccttggccccgccattcaccatgtgcatggcaaagacgtgcgccttgagcgcggcgtcgtcgaggttaacgggctgctggagaccaaaccgatcgatgacgtggccggccgcgcctggaactatgtcgccgtcggctgcgggcgggatctgcagtggtggaaggaattcttctcggtggtacgcatgatgggctacaacgactgggtgtcgctggaaatggaagacctgaccatgtcggttgatgccggcatcgtttcttccgttcaggcgctgcagcaatcgattagccaataa

SEQ ID NO: 423949 - DNA, 945 bp, Serratia marcescens
atgaaaactagcaacatgttgccgatagcgcagattatggccctggcagaccaacgcagcccggtgcgccggggtgacgtctggctggtgggcgcagggccgggtgatactgaactgctgaccctgaaagcgctgcgcgttatccggcaggccgatgtcgtggtctttgaccggctggtgtccgatgcggtgctggcgctggcgccggacactgcactgcggatcgatgtcggcaaatccccgcgcaatcatcgccttgaacagcatgaaatcaatatgttgctggttgatctggcgctggcggggcaccgtgtagtgcgcctgaagggcggcgacccgttcatctttggccggggtggggaagaaatggcctgctgccagcagaaggggatagtgtgcaatgttgtgcccggtatcacggcggcaatgggctgtgccgcagccagcgggatcccgctgacgcaccgaaacctggcacagtccgtcaggtttgtcaccggacatggcccggaaggggaaccggacgttgactggtccgtactggccgccgcgcgccagacgctggtcttctatatggggattgccaacagccctgttatcagccagcgcttgattgcccatggcttacccggctcaacgcccgtggcggtgattgaacgcggcactcagccacagcagcgcgtgctggtgggcactctggatgcattaggaaagatcgttgcagaggagcaggtcgaatcaccagccctggtaattattggtgaggtggtgggaatgtaccggccgattgccgaactgcctgagaagatttttccgcagatgggccgttctgaaccggctttgccagccagtctgaagtggccggcgaaaatggacagcataagcgttattctggaatcatcctatggccatatctggcacgcaagagacggtcacaatagctaa

SEQ ID NO: 423950 - DNA, 2667 bp, Serratia marcescens
atgaaaacagcgtctccggtcgtgaaaaccacctgcgcctattgcggcgtggggtgcggcgtcagtatgcagccacaggctgatggcttcgccgccagcggcgacccggcacatccggcgaatcgcggaaggctgtgcgtgaagggcagcgcgctgggtgaaacgctgggcttacaggggcgtctgctccagcctgaaatccatcatcaacccgtgagctggccgcaggcgttagacgctgtcgcacaagggctacaggcgacgattgacgagcatggaccgcagtcggtcgcgttttatggctcgggccagctgctgacggaggattactacgtcgccaacaagctgatgaaagggtttatcggggcgggcaacatggatactaactccaggttgtgcatggcctccgccgtggtgggctacaagcgggcgttcggcgccgatgccgtcccctgcaattatgatgatctggagcaggcagactgcgttattctggtaggttcgaacaccgcctgggcgcatccggtggtgtatcagcggctggcgaaagccaaagcggagaggccggagatgcagattatcgtcgttgatccgcgtaagaccgccacctgtgatattgccgatctgcatctggcactgcgcccgagcagcgatgcggcgctgttctgcggcgcactgaacgagatggcagcgcgcggaaaactggataccgcttttctgcagcaccacacgaacggggcagaagaaaccttacagacagcaaaagcatggagcctggagaagacggcggactattgcgggatcgcctcctcgcaattacaggcgttttatcaacggatagcccggagccagcggctggtcacgctgtattcgatggggatcaaccagtccagttcgggcgtcgacaaatgcaacgcgataattaacctgcatctggcaaccggccagattggacacgctggcagcgggccattttcgataacgggccagccgaatgcgatgggcggacgtgaagtcggcgggctggcaaaccagctggcctgccatatgggatttaccgccgaagagattacacgggtcgggcgtttctggcacagcgataacgtcgcgcagagccctggactcaatgccatcgatctcttccgcgctatcgagaagggagagataaaagccgtctggatcatgggcaccaatccgctggtgtcacttccggatgccgatcgcgtgcgggccggtctggcgcgctgtcctctggttattgtgtccgacattctgcgtgacacggacaccacccgcgccgcgcatatcctgctgcccgccctgggctggggggagaaaaatggcacggtgaccaattcggaacgctgtatctcccggcaacgcgcgtttctggctgcacctggggaggccaaacctgactggtggatcctcagccaggttgcgcagcggctggggtttgcggaggcctttgcctggcagcatccggcagatattttccgcgaacatgcggccttgtccggctttgaaaatgcaggcactcgggcgtttgacatcagcgggctggcgcagttgtccaatgaacaatgggataccctgcagccgatccagtggccggttaatgccgcacggccgaagggtacgccgcgactatttactaataaaaccttttttcaccctgacggtaaagcgcggttgatcgccgtcaccccggcgctgcccgccagccagcccactgcggcttatccgctgatcatgaacaccggaagggtgcgcgaccagtggcacaccatgacgcgaaccggcaagtctgctcgcctgatgcagcatatcagcgagccgtactgtcagtttcatccggatgatgcgccgggcattcaggcgggtgagttgctgcgtgtaacctcatcccatggctggctgctgttacgcgcgcaacccgatcatcttcagcctcgcggcagtattttcgtgccgatccattggaacagccattttagccggcaggctcgggtcgatgcgctgatagctcccgttaccgatcccctttccgggcaaccggaaagtaagcatatgccggtcaatctgacgaaatggaaagcagcttggtatgcagagctgtttattcggggagaggggatcgccgcgcctgccaccgcctactggagccgcatcacccaaccgggcgtcacgcattttacgttagcggattcttcgctccaggaggagtggatggcgtggctgaatgaacattatccgctggaggggaaaacctgccagagcgcccggatgggggatgagggcttcaacctgctggtgtgggcgcagggcgaactgcagctggcattttacgcgcgccgaagcccactgctgccggacaggcaagcgatactgtctgcctttatcaccccgccggacacggcaccgcagcggctggcgttactggcgggccaggccggcagccataaggccgccaccggcaaaatgatttgcagctgtttttctgttggcgaagcgcagattgtcgacgccgtgcggcagggatgccacagcgtgcaacagctcggctcaaagctgaaatgtggcactaactgcggctcctgcgtgccagagctgaaaacgtttattgccggccagctggccgccctgacgatggaagaacgcccatga

SEQ ID NO: 423951 - DNA, 4200 bp, Serratia marcescens
atggctaaaccgactctaatcgttatcggcaatggtatggcaggcgtgcgactggtggaatatctctgtgagctcgcaccagatcgttaccgtatcatgatcatcggcgatgaaaagcacagtgcgtacaaccgtatccagctgacgccggtgctttccggtgagaaagattttggccagatagtcacgcatgacgcgcagtggtatgagcatcacaacatcacattgatcgcaggcacggcggcgacggcaatcgaccgtcacgcttgcaccgtcacggtcgccgggcagatctattcatacgatcatttggttctggccactggctcacggccatttctgccccccctgcctggggtcgaattgccgggtatccacgggttccgcactcagcaggatgtcgaaaatattctgcagggagcctacgcaggccaaccggttgcggtgatcggcggcggcgtgctgggcgtggaggcggcggcggccctggcgcggcgtggaatgcgggtgagcctgctacatcgcggcacacatctgatggatcagcagctggatgaacacgccggaaaactgttgcacgaggggctctcattacgcggcatcaacgtcattttgcaggctgaaacggtgtcattcagcgctgatgccgctggcaacgtcagcagggtgaatcttaatgatgggcgcggaatagcggcggagcgggtcgtgctctctgtgggcgtgcggccgaacatcgcgctggcacaacggtcaggcttgccgtgcgatcgcggtattctggtgaacccgcagctgcaaaccgctgacccacacatctcggcaattggagaatgttgccagtggggcgaactcacttttggcctggtggccccgtgctggcagcaggctgaaacgctggcctcgcggctggcggggggcgacaaagccacttcattcgaggtgcagaatgtcccgctgcgcctcaaggtcacaggcctgaatttgttctgcgccggtgaattacacagccgcgatggcgctcagacccataccacctttgacccgtttgacgggcattatcgccggctggtgctctgcgacaaccaactgaaaggggtgttgctgtggggcgatatcagcgatggcccgcaatacctccagcggatcggcacgcccgctggtcaaccgttgcccttcagcgtcttcagtcccggtaatgagccggatgcctctggcttacagcctgttaaatcagaaccgttacccgtcgaggtggcgaggagtcattcaatgtcgaaacccgtattggttatggccggacacggcatggtaggccatcattttttagagcagttggttgcacgtgagctgcatctgcaataccaggtgattgtgtttgccgaagaggcctcgcccgcctacgaccgtgtgcatttgtccgaatacttctctggccgcacggcggaatccctctcaatggttgaaaagggatttttcgaatcgaccgggattgaactgcgtctggggcacagcatcgggctcgttgatacaaaacaccgttttgtggtcgatcaccagggacggcagacggcttacgatgtactggtgctggcaacaggatcctatccgtttgtgccgccgatccctggcaatgatgcgccgggctgcctggtttaccgcacgcttgacgatcttgcggccattcaggcctgcgcggcaaacggcaaaacgggcgtggttgtcggcgggggattactggggctggaggcggccaacgcgctgaaacagctcgggctggatacgcacgtggtggagtttgcaccgcggctgatgggggttcagctcgacgacggcggtgccgcgatgctgcgccgtaaaattgaagcgctggacgtgaaggtgcataccgggaaagaaacccaggccattactgcgggcgaggagagccattaccggatggtgtttgccgatggcagctatctggaaaccgatctggtgctattttccgcagggatccgcccacgcgatcagcttgcgagagcgtgcgggcttgaagtggggccgcgcggcggcattgtgattgacgatcgctgccagacgtccgacccggctatttatgcgatcggcgaatgtgcgctgtggaacgggcagatcttcggcctggtggcgccgggttatcagatggcccgcgcgctggcggataccctgacgggcggcgacgccgtctttaagggcgcggacatgagcaccaaacttaagcttcttggtgttgaggtggcatcgattggtgacgcgcatgggcgtacccccggtagccagaactacagctgggtagacggtccggcggaagtgtataagaaaatcgtggtatcgcaggatcgcaaacggctgctgggggcggtgctggtgggcgacagcgcggaatacagcacgttgctgcaaatgatgctcaacgatatgccgctgccagccaaacctgaatccctcattttgcctgccgggtcgggcgcagacaaacctgtgctgggcatcgcagccctgcccgatagtgcgcaaatttgttcctgccacaacgtcagtaaaggcgatgtccgtaacgccgtgaagaacggctgccacgatatggcggcgataaaagcctgcaccaaagcggcgacgggctgtgggggctgcgccgcactcaccaagcaggtgatggaatatgcgctgtccgacatgggcgtcgaggtgaaaaaagacatctgtgagcatttcgcgtattcgcgccaggagatttatcacctggttcgggtaggcaatatccgcacgttcggggaactgattgaaaagcacggccacggcagcgggtgtgaaatctgcaagccgctggtcggatcgatactggcatcatgctggaacgactacctgttgaaaccgcagcatttgccactgcaggacaccaacgatcgttatttcgccaatatccagaaggacgggacctattccgtcgtgccgcgcgttccggcgggagagataacccccgaagggcttatcgccatcggcgaagtcgccaggcgttacaagctctacaccaaaattaccggagggcagcgaatcgacctgttcggcgcgcgtctggagcaactgccggagatctggcagcagctggttgatgccggttttgaaaccggtcatgcctacggcaaatctctgcgtacggtgaaatcctgcgtcgggtcgagctggtgtcgctacggcgtacaggactccacctcgctcgcgctgcaattagagcaccgctacaaagggctgcgttcgcctcacaaaatcaaaatggccgtctcgggttgtacccgcgagtgtgccgaagcccaaagtaaagatgtgggggtaattgccacggataagggctggaacctgtatgtctgcggcaacgggggaatgaagccccgccatgctgatttgctggcgcaggacatgagcacagagcagctcattcgtaccgttgaccgcttactgatgttctacatccgcaccgctgaccggctgcagcgcaccagcacctggatggataacctcgaagggggcatcgactacctgcgccaggtgattctggacgacagcctgcaaattgcggatgaactggatcgtgaaatgtctgcggtggtggcgacgtaccagtgtgaatggcagaccactctggcctcgccggatcgcctggcgctgttcagaccgtttgtaaacagcgaggtccctgacgaaggggtcgtgatggtgagcgaacgtcaacaactgcggcctgcaacgcatgaggagcgcagcatgctcgccgtgcctgccgcagaaaatacgcaggagcccgcaccgggctgggtggaagtgtgcagcctgagcgccatcccggcgaatgcgggaatggcggcgcgcctggcgagccagcagattgcgctgttctatctgcccggtcatccacagcaggtttttgcgctgagcaatcatgaaccagacagcgacgccaatgtgctggcgcgcgggctcgtgggcgatgtcaaaggcgaaccggtggtgatttccccgctctataaacagcgcttcagcttacgggacggccgcagcctggacaattcgccgcatgcgctgcgaagctgggcggtgaaagtggaagatggccgcgtctgggttcaggcacaaatgcagggcgttgcgtccaccaaaatcattgaaacggtcaacctatga

SEQ ID NO: 423952 - DNA, 798 bp, Serratia marcescens
atgaaaaaagaaaaatcgattatcagcgtccagagcgtcactcaacgttttccttcagcgaaaaccacctttctggcgctcgataacgtcagctttgatatcgcagaaggcgaaacggtcagcctgattggccactcaggctgcggaaaatcgaccctgctgaatttgattgccgggctgagtcgcccgacggaaggcgtgctgttgtgcgacaacaaagagatttccgggccggggccagagcgcggggtcgtcttccagaaccattcgctgctgccatggttaaccgcttttgagaatgtcgaactggcggtgcggcaggtatttaaagaccagatgaacaaaagcgaaatgcacgactggattttgcacaacctcgaactggtgcacatggagcatgcggccgataagcgcccgggcgccatttcaggcggcatgaagcagcgtgtcggtatcgcccgtgccttggcgatgaaaccgaaagttttgctgatggatgaacctttcggggcgctggatgcgctgacgcgggcgcatcttcaggacgccgttatggacattcaggcgcgtctgaaaaccaccattttgctgatcacccacgacgttgatgaagcggtgctgctgtctgaccgcgtgatgatgatgactaatggtccggcggcgaaagtcggtgaagtgttacaggttgagctgtcacgcccccgcagtcgactggctttgtcgaacgatcctctgttccaccagtatcgccagcaggtgctgcattttctctatgcaaaacaccgggcagtggcctga

SEQ ID NO: 423953 - DNA, 921 bp, Serratia marcescens
atgtccggaaatttgaaaaccaatgtcgtcacgttgacggagcctgccgcggtcagcgttgaatcgcccgccagcgcagaagtgatcacgatcgagagagccgccccggtagccagaacggatacctttattgtccggcttcgcgcgagcgttcgccgcttcatgcagaaaatgatccccgccattctcggggccgtcgtgctgctgctcctgtggcaaatcgccgccagtagcagtaaaggcttcccgacgcccgctcagacctgggaggcggcgaaggtgatttttgccgatccgttctatatcaacgggccaaacgacatgggcattggctggaatgtcctggcctcgctacagcgagttgcgattggtttcgggcttgccgcgctggtcggcatcccggccgggttcctgattggccgcttcagcttcatcgccagcatgttcaacgccattatctcgctgctgcgcccggtcagcccgctggcgtggttgccgattggattgctgttgttccagcgcgcggagcccgcctcgtcctggaccattttcatctgttctatctggccgatgatcctcaataccgcagaaggggtgatgcgcattccgcaggactatctcaacgttgcgcgggtgctgaaactcagcgaattcaccgtaatgcgcaagatcctgtttcctgccgtgctgccgtacattctgaccggggtgcggttgtccatcggtatcgcctggctggtgattgttgcggctgaaatgctgaccggcggcgtgggcatcggtttttggatctggaacgaatggaacaacctcaacgtggaaaacattatcgtcgccattctgctgattggtgccgtggggatgttactggagcaggggctgatggccgttgcccgtcgcttaagttacgacaatcactag

SEQ ID NO: 423954 - DNA, 1263 bp, Serratia marcescens
atgacacaagacgacaaaaagactccgggacaactctcccgccgctgctttcttgcggggagtgcggtgctcggcggcagcatgttgatgtcaggattcatgaaccgggtctgggctgccggttccgacacgccagagaagaaagagattcgcgtcgggttcattcccctgaccgactgctcctcagtggtgatggcggcggtaaagaaatttgatgagaagtacggcattaaaatcatcccgagcaaggagtcgagctgggcgtcagtacgcgacaaactggtgtctggcgagctggatgcggcgcatgttctgtatgggatgctctatggcctgcagcttggcgtgtccggcccgcagcatgagatggcgatgctgatgtctctcaaccagaacgggcaggccattacgctctctgagcagttaaagcaggcgggcgtcacggatgctgcatcgctacaaaaagtggtccaggccagtgcgaaggggacctatacctttgcgcagacgttcccgaccggcacgcacgcgatgtggctttactactggctggcaaacgccggtatccatccctttaacgacgtgcgcaatgtcgtggtgcctccgccgcaaatggtcatgaacatgaaaatcggcaatatgagcggtttttgcgtgggggaaccctggaaccagcgcgcgattcaggacggcattggtttcactgctgtcacctcacaggaaatctggccggatcatccggaaaaagtgctcggcacaacctctgcctgggtgactgaaaacccgaatgcggctcgcgcgctgaccgccgcggtgctggatgcctcccgctggatagacacctctgatgccaatcgtagtgaaaccgctcaggtcgttgcggcgcgggcgtacatcaacacgccactcaagacgattcaggggcggatgctcggcgactacgaaaatgggctggggaaaacgtggaaagatgcccaccgcatgcgcttcttcaacgatggcgcggtcaattatccgtatctctccgatggcatgtggttcctgactcagcagaagcgctggggattgctggacagcgatcctgactacctcggtatcgcccaaaaaattaaccgtattgacgtctacaaacaagctgccgccgcggttggagggatcaatttgccatccagcgacatgcgaagcagcacgttgattgacggcagagtctgggacggcagcaaccctgctgactacgccaacagttttgcaatgaaacgctaa

SEQ ID NO: 423955 - DNA, 1230 bp, Serratia marcescens
atggccctttctgctctgagctttgtacaggcgtcgaaaaaaagcgaaatcgcgggtttgcagcagctgttgcagctgggtgaactggttggtgcggtcagcctgatgatccacgcactgcaacgggaacgaggcacctcgaacatcttcttatgttctcatgggaacacctggggaaagcaactgagtgagcgggcactggaggtccggaaggcagaggaggccgtcagtcagtggcttgcgtctcaggatcttaccggccccaacctggcgaatgcaccgcgattactcagccgcattgcctcggtgttgcatagcctcagtacgttaccgcaactgcgtcagcaggttcttggactgtctatcagtcagcctgatgccatgaatgcctacaacgaggtgatttgctcgcatttgtcactggtcttcgaaacggcggatatctccggcgatccgtcaatttcacgggcattgctggcgatgttcagttttatgcagggaaaagagctggccgcacaggagcgggccacggccgccgccggttttgcggcagggcattttgatgtcatcgcgcaacagcaattcacaggcttaatcgagagccaggagcgctgctttcagaccttcatggaattcgcggctccccgctgtctggcaatgtggcggcagcagatgaaccaggacagcagtgaatttgaacgtttcaggcgaattgcctgcacgcgcgtcaggcctggcggtgagacgacggataccgcattacgctggtttgacgttgcgacggcgcgaatcgatggaatgaaagtggtggaggatgagctgcaagctgcgctgatggcctcctgccgccagcgtatccgtgaagcacaggccgcccttgcgcttcagcagcagaatattgaccaaatcccacagtctgaaagccattacgccgcgctactctcgccgcagcttagtcgttcggttcttgagcttgttgaacagcagtcccgccagctgcaggcgctcgatgcagaactttctcaacttcgcgtcacgctgaccgagcgtaagctggttgagcgggcaaagggcctgctgatgcagcatcagggcttaacggaaccccaggcgcataaggcactgcttgagatggcaatgaatcagaataagaaactttcggaaattgctgacgcgatgcttgccgtgtctgcgctgttaggcaaaaacgggcacaaaccgggccaataa

SEQ ID NO: 423956 - DNA, 1536 bp, Serratia marcescens
gtgataaaaattgtcgtgtatctgattctcgccgtgacgatcgccattattgcggccagagtcatctttcgtttgccgaatatctcccagcgtctgccgcaggcggcattgccggcggatcctgccgcccagctgccggcgcgcgccgccgaactgatggcggcgcatccgggcctgagcggcgtggtgccgctggccagcgggcacgatgcgttcgccagccgcctggcattggcgcggatggcggaaaggtcgatcgacgcccagtactacatctggcataacgacacctccgggcagatcctgctgaaaaccctgtatgacgccgcccaacgcggcgtgcgcgtgcggctgctgctggacgataacggcgtcgccatggacgagaccctggcggcgctgaacgcccaggaaaacgtcgagatccgcctgttcaacccatcaaccgtgcgcacgccgaagctggccggctacgcctttgactttatgcgcatgaatcggcgcatgcataacaagtcttacatcgtcgacggcgccgtggcgatcatcggcggccgcaacattggcgacgagtatttccaggtcggcgacgaaaactatttcctcgatctcgacgtgctgagcgtcggcaacgtggtggcggagaccgcggaggtcttcgatcgctactggaacagcgcgtcggtgttcggcgttgagcagattatccgtggcaaaggtaatctttctgccttcctgacgcaggccaccgcgaccgaaagcagcgagcgggcccgcaaattggcggtgcagctggaaaccagcgcggtgcgctttcgcgatggcgccgtccagccggaattcacccaggtagagctggtggccgacgatccggcgaaagggctgggcaaggcgtcgcgcgatcggttgatggtgacgcagctcggcaagatcatcggcggcgtcggccggcaactggatctggtttccgcctatttcgtgccggggcgggaaggggcgagcttctttgaatcgcttgccaaacaggggaagtccatacgcgtgctgaccaacgcgatgaacaccaccgacgtgctggtggtgcatgccggctacgccaaataccggcgtgaactgctgcaggcgggcgtcgaactgttcgagctgaagctgcgcgccggtcaaccgaccgggcgcaaggaactcaagccgctggggctgtccggcgcggcgctgcacgcgaaaaccttcgccatcgatgataagcgggtgtttatcggttcgttcaatttcgatccgcgctcggcgcacctgaactgcgaaatgggcttcttgatcgacagcccgacgctggcggccgacactcgccaactgtttgatggcccgctcgagtacgccgcctaccgcccggtattgacgcccgagggcaaaatggtgtggaaagaagccttcgaagacggccacaccgaggtgcatcagcaagagcccggcgccggttgggtaaaacgcattattctcaccgtggccggctggctgccgatcgagtggatgctgtaa

SEQ ID NO: 423957 - DNA, 792 bp, Serratia marcescens
atgggattcgaagtcgacaacgccgaaacgaaacgcatcgacctcagcagccacgaaaactcctcgttcgaggtgacggggctggtgaaacactatccggcgggcttcgtcattccttaccactcgcataggcgctgccatttgctctattcgcagcagggcgttatggcggtcgaggcgagcagcgggcgctggatcgtgccgcccaccaccgcagtctggctgcggccgggggtagagcatcagatcgtcatgcagagcaacatctgcgtttacgggattttggtcgatgaaatcaccgccgcgcgtttgccgctgcgcgacggcgtcttgcaggtctcaccgctgctgcgagagctgatcgctcagctggcgacgctggcgcccgaagggacggagacccaacgcaatgcgctgctcagagcgttgttccttgaggagttgagcctgcagccgcagctggcgctgcacctgccttggccggcagaggcgagaatggccgaaatttgccggcagttggtcatcacgccggccgacgatcgcggcattgaagcctgggccgattcactgtcgatcagcgcaaagacttttcaacgccatttcagccaacaaaccggcatcaccttcggccagtggaaacagcgcctacggctgctgtcgtccattccgctgctgttggccggcaactcgatcatccatgccgccttcgaaagcggttacgagagccacagcgcctattcggtggcgttcaaaaaactgtttggcgtttcgccttcgcgctttacgctatag

SEQ ID NO: 423958 - DNA, 318 bp, Serratia marcescens
atgcataagagaacactggcgtcactgcattacgaaaacatgccttacgatggggtacactttcatattttgaaacgggaaacgcctggccatacggcgttgctgaagctggatgcgggcagccggcaaccggcgcgttttcatccgggctgggtgaaactgatggtgctgagcggtgaactgaaggttgacgatcagacgttgcaaccccatgagatgttaatcattcctgccaataccgcctatacggtacaggccattacggaagtgatttgtctggcgatttccgagctggacggcgccgagttggcccgttga

SEQ ID NO: 423959 - DNA, 1023 bp, Serratia marcescens
atggttatcgtgggcgccgggattgtcggggcatcggtcgcctatcatctcgcgcgccaggggcagcacgttgtcgtcgttgagcaggcgcatcccgcggcgggggccacaggcagctcgtttggctggatcagcgaaggcgtacctgagggcgctcccgacgcgtttttgcggcgcgagatcgtcgctgactggatgcgcctggcgcaggagatcccggatctctgggtgaattggtccggcgcgctcagctatggccaggcgccggcgacgcaaaaccccgacaatcggcttttgccctccgccgagatgaacgcgctggaaccggggctcaggcagcccgatagccaagcctattttgcggcgcgtgacggcgccgtcgatccgcaagaagtgacacagcggttgctcgagtgcgttagcgcgtggggcggggagttgctcctggggcgaaccgtcaccggatttttgcgtgaaaaggggcagataatcggcatcgttaccgaggaaggcgcgattgccgccgatcgtgtggtgctcgcctgcggcacgggaatctccgcgctgctggatggcagcgggttctcgctgccgatcgaggcgtcgccggcgattctgttacgctatcgtgcggcggcgctggcagtgaatacgctgattgcgggcgatgacgttgaagtgcgccatacgcaaaacggcgatctgctggcggcggaggattacccgccggagggggacgttaaacgggtggaaaacgacgcgcaatcggcgatgaaaaaccgcctgccggatacggcacccttgcaactgcaggcgtgttcggtggggatgcggccccggccgcgcgacggttatcccatcatcgggccactgggcgctacccggctctatgtggcggtgatgcacccggcagtgatgtgcgcgccaacgcttggccggctggtcagcgacgagctgctgtatggcgttaatcctgccattccgcgcgcttatcgccccgagcgatttgacgacgggaaatga

SEQ ID NO: 423960 - DNA, 1173 bp, Serratia marcescens
atgcgagctttctttctgctttgcctgagccgggccggcctttgcctgggcaccatgatgttcgccggtgcactgccgaccatcagaagcgagtggcagctcgacgccgcctccgccggcacggtgcaaacggtgtttagcctgactaacgcgctggcgctgctggtggcttcctggtggtgtgattcgctgggggcgcgccgggtttacctgctgttttcctggctgggcgccgctgcgctgatgctgttcgccgtgtttgcccattcttatgccggcgcgctggtgttgatggccttcgtcggcctgacgcagggcggcgcctatacgccggcgctgctgctggcgatggggatgaacggcccggcgcggcgcggttacgccatcggcatgatgctggcggccagttcgctggggtattttctgtcggttttcatcgccggttggagcgccatgtgctggggggccggcgtggcgttttccctgtgtgccgccggtgcgttgctgggggcgctggccggttcgttggccctggtcggttatcgggagccgcagccgcgtacgctggggaggcagacgaaacgtgaaagctatgctatcacctatgcgaccctgctgttgctggtcgggtatatcgcccacagctgggaactgctcggtaactgggcctgggcgcccagcctggtcagcgaggcgttgagcggtttctctctggatcctctcagcgccggattgatcgtcgcggcggtgatccacctggccggcatggttgccacgctgattgtcggcaccgtttccgactatttcaaccgtgcatcggtgctgatgtttatgggcgccgccggcgcgttgggatcgctgctgatggggtggtcggcgaactgggggccgggctggacgctgctggccgtcagcgtcggcagtttcttcatcctcggcgactccggcgtgctgtcggccgcgatggcggacaacgtgccgccgcaacagctcggcagcgtgatgggctggcgatcgctgctggggttcggcatcggttcgttcgcccctttatcctttggcgtcgtgatggataccacccagagctggggcacgtcttatgccgtattggcctgcggcggtggagtagcctgtctggcggcctgtctgctttggcggcagcacttgaaatga

SEQ ID NO: 423961 - DNA, 870 bp, Serratia marcescens
atgaaaaaaattcactccctgccgcacctgtccgctttcgaagccgccgcccgccttggcagcttcagcgccgctgcggatgagctgtttctcaccaccggcgcggtcagccgccacattcgcagcctggaagaacagctggggatcacactgttttatcgcggacacaagtccgtgcggctgacgcaggccggcgagaatttttcccgcaccgcgtcccgggtgataagcgaactgtatgccgcggaaagtgcactgaaagcgagcgccggccggcagcggctggtggtgcatagcctgccgacgttcaccatgcactggctgatgccgaagctggcggcgttcaatgagattcatccggaggtcgcgattgatatcaccaccagcacaggagccctcgatcgcaatacgccgtttgatctggcgatccggcgcgatcccgcgcacttctccgggctgaaagcgatcccttttctgcaggaagagagcctgttggtctgcagccagagctacttgcgcgccatgccggtcagtgcgccaggcacgctggccgggcataccgccatccgcatccgcgcccgtgaggatttatggcacagctggctgaatacctacccgacggcgttagacgcctcgccgccgccgctcacgctcgaccataccttcgccgccattcaggcggccgaggacggcctggggctggccgtcgtgccttacctattctgcgccaagcatctgtcgtccggccgactggtgtcgcctttcccggcgttgactatccgaaccggcgtttattccctgctgctgcgcgatcgggacgatgaggtcgtgagaaaattcgccgcctggctgcaggcgcttcaggcgtaa

SEQ ID NO: 423962 - DNA, 684 bp, Serratia marcescens
atgaaaaccgtcctgcagcatattttgatcaataaagcacgttacgcccagcttccgctgtttgagttcctacgcgatgaaaatcgcacacctcaggagcggctggcgtttctgccccatatcgcgttttttattatggctttcgccgatgtgaataagctgatgctgcgcaatgaaacgccggcggccgatatttaccaacggaaagtcaatgcgcatacccatgaagatgatcaccattggccgtggtatctcgaggatttggacaaactcggttacaaccgctgtgtcgacacggtggcgcatctggaaacgctgtggagcgacagcactcaggcgaatcggttattgacctatcggctgtgcgcgctggtaagcggcctcggcggcctggagcggatcgtggtgatcgaggccatcgaagctaccggtaacgtgctatttgggctgacggcgccgctggccacgcgcatgcatcaggcgaccggcgtcgaactgcgctactgcggcgagtttcatctggcgctggagagcgggcatgcccagctgcaggatcatgcggaactggcggcgatcccattgacggatggcatcaggcgccgttgcatcgcccatgtcgaccacgtttttgcctggtttaccgagtggacgcacgaaacgctcgcgcatgtccgggagggctga

SEQ ID NO: 423963 - DNA, 873 bp, Serratia marcescens
atggcgtcaaatcatcaacataaagactggctcgaattgcgacgcgatgacgaaaccggtattgagagcgtcaacgctcactttcaggggcatgcctacgatcctcacgatcatgatgaaatgctggtgggcgtcacgcagcagggcttgcagcgtttccattgccaccgctcgctgcataccagccggccggggcgcgccatgctgatcgagccgggcgcggtgcacgatggccatgcgccgcaggccgaggggtttacctatgcgatgctttatctgccgcagcgctgggtctccgacgcgatgagccgccgcggattgggggacgcttcggtgctggaaggcgccttccacagcacgttgaccgacgatccgatgctggcgaccgcgatccaccaggcgttttttgcgttgcatcagggggaaggccggctggcgcgcgatcaaagcctggatcaactgctgacgcttttggcacggcatattcgcgttcggccaacttcccaaagcgatgacgctttaattgagatgaatcgcttgcgggactatttgcacgagcacatggcggataatcccagcctggatgaacttgctcttcagtgcggcctggaccgtttccgcctgactcgccagttcacccgggctttcggccagtcgccgcacgcttatttagttcggttgaggctgcgggctgcacgcttgctgttggcgcagggggaagaaccggcgcaggtcgccatgatgtgcacgccatgttctcgaccgggcacgatgacgccaatcggcaggtttttctcgctgaagacgcggacaatctggatttggtcggtctggcgctgcgcggaccgaaaaaagcggtggataaggcgataa

SEQ ID NO: 423964 - DNA, 1881 bp, Serratia marcescens
atgctcgaaccctgcttccccgaaaacgaagccgaacgcctgtcggtattgaattcgctgaacgtgctggattcaaactcggtggaaaaactggatcgcatcacgcggctggcggcgaaatacttcggcgtgaccattgcgctggtgtcgctgatcgaccgggatcgccaatggtttttatcgcgctacggtctggatgcccgggaaacgccgcgcaatatctcgttttgcggccatgcgatcttgcaacgcgaagcgctggtggtgcccgataccgccaacgacccgcgatttttcgataatccgctggtgatcggcgggccgcggatcggtttttacgtcgggcagccgctgctgtcgctcgacgggttgccgctcggcaccctgtgcattatcgacagccacccgcagccgttttccccggaacaactgaccgatctgcatgatttcgccgccgtggtggaggagtatctgcaaagtattgagcgccacgtctataccgaaaacctgaagtccgacctgcagcgcacggaggccctgttcgaacagaccttcgcccaggcggcggtagggatggcgctggtttcgctgcaggggtattggctgcgggtgaacccgcgcatctgcgaaatgctgcactattccgagcgcgaactgatggatcgcaccttccaggacattacctatccgctcgatctcaataccgacctggaaaagctgcagcagctgttgaaaaatgaaatcagcacctactcgatggaaaaacgctatttccgcgccgacggctcgatcgtttgggtgcagctgacggtggcgctcaatcgcttgccgaacggcaaaccggaccatttcatctcggttatcgtcgatatcagcgagcgcaaggcggccgaggccgatctgttcgcgttgcagcatgagctggaggaacgcgtcgaaacccgcacgcgggagctgaacgtggtggtcaaaaaactcaacgaagagattgaaacccgcgtgctcgccgaatatcagctcagtgcggagaaggagcgtctgcgcgccattaccgacaacatgccggccttaatcagccagatcgacggcaatgaacgctacctgttcgccaacagcgcctacaaaacctggttcggtctggaggagtccagcctcagggggatgacggtgcgtgatttcatgggggaaagcgtttatcggatagcaaaaccgatgatcgaacgggccctcgcgggcgaaatggtgagttttgagaatgagctgcagacccggcaggggctgctgatgatccacaccacgctggtgccgtgcgaagcgcagggcttttacattctcgccatggacatcaccgaactgaagcggctgcagcagcggctggaatatgacgcgacccacgacatgctgaccggattgaccaaccgccgtgcgtttctgcgccggttgtcgggcacgctgcaggcttgttgccatcagcggcagatggcgctgctgtttatcgatctcgacggcttcaaaacccttaacgacagctatggccatgatttcggcgacgcgatcctgaaaaccttcgccacgttgctcagcgcctgcgccggcgagcgccacagcgtctcgcgtcttgccggtgacgagttcacggtgatcctgtggccgttgacggatccgcggcgcgaggtcagcgagttttgcgaaaacgtgttggcgcaactggccacaattacgcagatcgggccgcagaaggtacggctttccgccagcatcggcgcggccatttccccacgcggcgatgtgacggaggagatgctgctgacccgcgccgacggcgcgatgtatcaggcgaaatcggccgggaagggcacttacgccatctgcgagctgtga

SEQ ID NO: 423965 - DNA, 966 bp, Serratia marcescens
atgaatgaaatctcacgtcttaccccttttccgttccagcccgatgccgccgcgcgggaaatgcccctgtacgttttcggccataaaaatcccgacagcgacagcatctgcagcgcgctggtggtcgcggactggctcaatcacctcggcaaaccggccgtggctttccgcctcggcgacctgacgccggaaacccgctacatactggctgccgccggcgtacaggcgcctgcgctgctgaaaggcgatcttcgtgaccgcaaagtctggctggtcgactttaccgatatcgaacaaggcccggcctcattgctcgacagcgacgtggtcggcgttatcgaccatcaccggctgggcacgttagtcacccgcaacccgcccgatgtctgggtgcgcgccgtcggctgttgcgccaccgtgatcctgcagatcctgacgacagaaaagccaatgccacttaacgccgcccaggccacgctgctgctgggcgccatcctgagcgataccgtcgcgctcagtgcgccaaccaccacggaacaggatcggctggcggtcacccggttacgcgcaatctctcacgtcgactatgacgccttcaccgccgggctgctggccgccaaaaccgatctctcggggcaatccgccgcgcagttgctgcaccgcgacgccaaggattaccgcatccatagcgtctcgctgctgctgtcgcagatagaagtgcgggccatgagcgacatcgatccgctgttgcccgcactgcaacaggcgcttgaacaagcgaagcaggaagccgggctggagatggctgcactattggtcaccgatatcacccgccgccgctccaccctgtatttctcgtcgaaccgggtgctcggcattcgtcaggtatcgctgcccggtatgacgagccgaaaaaaagaggttttaccgtggttaaccctccagatcgctaacgcagggagataa

SEQ ID NO: 423966 - DNA, 429 bp, Serratia marcescens
atgccgctctatcaacatgctttactgctggtacaggatgaacgcgacggccggctgctgttgcgccatgccgaacgcctcaatcagcagatgaatacgcgcattaccgtggcgcacatcagcgccgactatgccgagctggactacctcagcgatgcgcaaaccaaagatcgccagtccagcgaggtgatcgccgccaaagccatgctcagccgcctggtggaagactgctcaatccccctggaggtgcgcgcaatcgtcagcatccatcgcttcaaagacgtcgaagccctgattgcccgtgaaggcgtcgatcttttgttgctcggccatcagaaccgtccgtttggcgtctttgcctccttcggtttcgaattcatcaaccatttatccatcgacgtgctgataaaacacgttcccactccctag

SEQ ID NO: 423967 - DNA, 1284 bp, Serratia marcescens
atgagctatgagattgaaagcgtaaccgccagagagatcctggattcgcgcggcaacccgaccgtcgaagtcgacatgagcgcggcgggcgtcgtggcccgggcttcggtgccttcgggagccagcaccggatcgcgcgaggcggtggagcaccgcgacggcgatccgcgccgtttcggcggcaaaggcgtactggaggcggtgcacagcgtcaaaacggcgatcaacgaggcgttgcgcggagtggatgtgcgccaacaggcggagatagaccgccggctgatcgcgctggacggcagcgagaacaaaagccgattgggggccaacgccctgctcggcgtgtctctggccgccgcccgcctcgcggcgcaattgtcgcagctgccgctgtatcgttatctgggcggcatcggcgccaatctgctgccggtgccctgcatgaatatcatcaacggcggcgtgcacgcccgctggcaaggggcggactttcaggagtttatgatagcccccctgggcgcaccgtcgctgcgcgaggccgtgcgctggggcagtgaagtttatcaggcgctgcgccaaatcctgttggaaaaaggcctgtcggtcggcgtcggtgacgaaggcggtttcgcgccggcggtcgcctcaaatcgccagccgctcgagctgatcgtgcaggcgatagaaaaagccggctaccggccgggagaagatatcgcgatctgcatggatccggcctcgagcgaattctacgcagacggcaagtaccgtctgcgcagcgagaacctcgagttggacgcagcccagatgacggcctattaccaacggctggtgctggacttccccatcgtgctgattgaagacggcttggccgaagacgattgggccggctggcgtattctgagcgatgccctgggcgaccaggtggagctggtcggcgacgatctgttcgtcaccaacgtgaaatacatccagcgcgggattgatgaacggttggccaatgcggcgctgatcaagctgaaccagatcggcacgctgagcgaaaccttcgccgccgtacagctctgccaggcgaacggctggggcacctttatctcgcaccgcagcggtgaaaccgtcgacagctttatcgccgacatgacgatcgcgatgcgagccggccatctgaaaaccggcgcgccgagccgcggcgagcgcatcgaaaaatacaatcagctgatgcgcatcgaagaccagttgggcgccgcggcggtgtatgccgggcgttccgcctttaaacgccgctaa

SEQ ID NO: 423968 - DNA, 423 bp, Serratia marcescens
atgaagatcggagaattggcgcagcgcgccggcatggccgcctcggcgatacgctactacgagcagttggggttgttgccgaaaccggtgcgcggcgtcaacggctatcgggtgtacggcgacagcgcgctggagcgtttgcacctgatccaaatcggccagaatctggggttttcgctgcaggcgatccaacgcgtgctggcgctgcagggcagcgcttatcaggatgggttgatacgtggcgtcgatgaacggctggcggagatcgagctgatgatggccacgctgaatgaacaacgagaaaccttgttgacgacccggctgaccttattggcgtccggtgtggcagggctgtgccaaaccaagggcgaaaaacaggccgacgcatcgccggcccggccggcaaagcttagcggcgtttaa

SEQ ID NO: 423969 - DNA, 1221 bp, Serratia marcescens
atgtttaccccactgacactgcccaacggcagccgtttatccaaccgtctggccaaggcggcgatggaagaaaatctggccgccccgggccaattgcccggcccggcgctgtggcgcttataccgctactgggccgaaggcggcgccggcttgatcatcaccggcaacgtgatgatcgacggccgcgccatgaccggccccggcggcgtggtgctggaacaggacacgccgctcgccccgttcgaaacctgggccaaggccgcgcgccagggcggcgcgcaggtgtggatgcagcttaaccacccgggccggcaggtgatggcgaacatgggcggtaacgcgtgggcgccctccgccatcccgctggcgatgggcaagcacagcaagctgttcgcccagccgcaggcgatggatgaagcgcagatcgccgaggtgatcgcgcgcttcgccgccagcgcgcacgccgccgaacaggccggttttaccggcgtggagatccacgcggcgcacggctatctgatttcccagtttctctcgccgctgaccaaccagcgcaacgatcgctggggcggcgagttggcgaaccgcgcccggttgctgctggaggtagtgcgtgcggtgcgcgagcgcgtctcgccggaattttgcgtggcggtcaaactgaactccgccgatttccagcgcggcggtttttcatcggacgatgcccgccaagtggtgctgatgttgaacgagttgccggttgatctgatcgaactgtccggaggcagctacgaaagcccggcgatgcaaggcgacacggcggacggccgcactctggcgcgcgaagcctattttctgaccttcgcccgcgatcttgccgccgtcgcgcgcatgccggtgatgaccaccggcggcatcgcccgcccgtcggtggcgcagcgggtgctggacagcggcgtcgcggtcgtcggcatcgctaccgccatggcggaagtgcccgatctgccgcggcgctggcaaaccggcgcggccccccatgcgctgcctgccccggtcacctggcgcagcaaggtgatggcgtcgctcgcccgcatggcgttggtcaagcgccggatgcgcgcgttgagtgacgatcggccgcgcaatgtgcgctactcaccgctgttcacgctggtcgtcgatcagtggcgtacccgccgtatcctgcagcgttaccacgcctggttacagcaacgttaa

SEQ ID NO: 423970 - DNA, 1383 bp, Serratia marcescens
atgacggataaagtccgtattgatactttagttgcaaactcattaaacggaaacaatgaaacctatttggcgcgccaagccgaatttgagtcgaatgttaggagttatccgcgcaaattgccgttggcaattgcgaaagcccagggcgtttggatcactgatgttgagaataatcaatatcttgattgcctggccggggcgggaacgttggctcttggacataatcaccccgacgtcctgcaaagcatccaaaatgtcattaccagcggcttgccgttacatactctcgatctcacgaccccgttaaaagatcgtttctccgattacctgctctctctgttgccgggcgaaggcaaagaatattgcctgcagttctgcggcccgtccggcgccgatgcggtggaagccgcgctgaagctggcgaaaaagcacaccggccgttctggcgtgatcagcttctccggcggttatcacggcatgacccacggcgcgctgtcggtcaccggcaacctgtcgccgaaggcggcgatcaacggcatgatgccggaagtgcagttcatgccttacccgcatgaataccgctgcccgctgggcatcggcggcgaagccggcgtcaaggcgctgacctactacttcgacaacctgatcaacgacgtggaaagcggcgtgcgcaaaccggcggcggtgatcctggaagccgttcagggcgaaggcggcgttaacccggcgccggccgagtggctgcagcgcatccgcaaagtgacgcaggagcatggcattctgctgatcatcgacgaagttcaggccggtttcgcccgtacgggcaagctgttcgccttcgaacacgcgggcatcgagccggacatcatcgtgatgtcgaaagcggtcggcggcggcttgccgctcgcggtgctgggcatcaagaaagagttcgacgcctgggaaccgggtcaccacaccggcaccttccgcggcaaccagctggcgatggccaccggcctgaccaccctgcaatacctgaaagagcaccaggtcgccgacaaagtggccgcgcagggcgaatggctgaaaggcaaactggccgagctgcagaaacggtatccggtgatcggtcacgtccgcggcctgggcctgatgatcggcatcgagatcgtcaagccgaacgaagcgcaggatcacatgggctgctacccggccgatggcgagctgtccgcgttgctgcagaaaaagtgcttcgaatccggtttgatcctggagcgcggcgggcgcaatggctgcgtgctgcgtctgctgccttccctgctgatcaccaacgatgagctgggtattttcctggataaatttgagcaggcgctgttggccgccggcgtcaagccagtctga

SEQ ID NO: 423971 - DNA, 1470 bp, Serratia marcescens
atgtccaagttaaacccgattctggcttcctcggcgcacagcgccgaggcttaccgccaggcgatcgcgcagagcagtgaagccgtcgtgcaatggctgcaacagcccgagatgtatcagggcaaaagcgttgccgaactgcgcgagcgcatcaagctcgacttcaccccgcaaggcctgggcaaccaggcggcgatcgatcgcgccatcgagtactttttgaaagacagcctgtcggtgcaccacccgcagtgcgtggcgcacctgcactgcccgagcctggtgataagccaggccgccgaagtgctgatcaacgccaccaaccagagcatggattcctgggatcagagcccgtcggccacgctgatcgaaatgaagctgatcgaatggctgcgcgcccaggttggttaccagcccggcgacgccggggtgttcaccagcggcggcacccagagcaacctgatggggctgatgctggcgcgcgatgcattcttcgcgcgtcagggccactccgtgcagcaggacggcctggtgggcgatctgcgcaagctgaaggtgttctgttctgaaaatgcccacttctcggtgcagaagaacatggcgctgatgggcctcggctatcaatccgtcaccctggtgaaaaccgatcgcttcgcccgcatggacgtgaacgatctgacggaaaaactggcgcaggccaaggccaacggcgagcaggtgatggcgattgtcgccaccgccggcaccaccgacgccggtgccattgacccgctgcgcgacatcgcgcggctggcggcgcagcagcagatttgggtacacgtggatgcggcctggggcggcgcgctgctgctttccgagcagtaccgcgactacctggacggcttggaactggtggactccattaccctggacttccacaagcagttcttccagaccatcagctgcggcgccttcctgctgaaagacgagcgtcactatgagctgatgcgctatcaggcggcctacctgaactccgagttcgacgaagcgcaaggcgtgccgaacctggtgtccaagtcgctgcaaaccacccgccgcttcgatgcgttgaagctgtggatggggctggaggcgctggggcagaagcaatacgccgagatcatcgatcatggcgtgacgctggcgcaacaggtggcgcgttacatcgccgatcaggaatcgctggaactggtgatgcagccgcagctggccagcgtgctgttccgctaccgtccggcgcagctggcggcgaacggcgacgcggccgtcgccttgttcaaccagcgcatcggcgacgccctgctggaatcgggccgcgccaacgtcggcgtgaccgagttcgatggcgtaacctgcctgaagatgacgttgctgaacccgatcgtgacgctggaagacatcaagctgttgctggcgctggtcgagaaaaccgcgcagcagctgccggcgtaa

SEQ ID NO: 423972 - DNA, 924 bp, Serratia marcescens
atgaccgaccctgatttcaacctgttgatcgcgctcgatgccctgctgacggcgggcagcgtcgtcggcgccgcacggcgtctcggtttaagcgcttcggcgatgagccgcaccctcagccgattgcgcgcggccaccggcgatcccctgctggtgcgcgccggccgtcatatggtgctgacgccctatgccgaaacgctgcgcgagcggacgcgaaatacggcattcgaagcccgtgcgctgctgcgcccggcgcagggagcattagatcccgccgagctggatcgtaccttcacgctgcgtgccaacgacggcttcgtcgaagccttcggcccggcgctgatcgccgccgctgccgaacaggcgccgcgggtgcggctgcgctttgcgcccaagccggagaaaagcgaccgcccgctgcgtgaagggctggtcgatctggagataggcgtgctgggtgacatgggcccggaaatccgcctgcaggcgctgttccgcgatcgcttcgtcggcgtgatgagaacctcgcacccgcttgcgcagcagccggagatcggcgccgccgactacgccgcctgcggccacgtggtggcctcgcgcagcgggcgcattctcgggccggtagacgccgcgctggcggagctggggctgacgcgccagattgccgccgtggtgccgagttttccggccgcgctggcggtggcgcaggcctcgaacctgctggcgctgttgcccgcctccttcctgcacgctcaaccggccgacggcccgctgcgcgtctttgagctgccggtgaaaacgccgcctatcaccgtgtcgcaaatgtggcacccgcgcctggacgccgaggcggatcaccgctggctgcggcaattggtgctgtcggtctgtcgccagcgcgtgcaggaaccgtttcgcgaatag

SEQ ID NO: 423973 - DNA, 1050 bp, Serratia marcescens
atgacgcttccccctctctggccggtattcgacggccataacgacctgctgctcaacctgtggctgcagcacgacgacgatccggccgccgccttctattcccgcgtcacgccgggccacctcgatttctcccgcatgcggcgcggcggatttttcggcggactgttcgcggtatttattcccccggtcagctatatcgcccagatgcgcaaccaaacgcaggacgaggcacaggccgccttcgatccgctggcgatcgccgaacggcagatcgccatcctgcagcagttggagcaggcttctcaggggcggctgcgcatctgccgcaccgccaccgagatagaacagtgccgcctcaaccggcaaattgccgcggtgctgcatatcgaaggtgccggcatgatcgacgcggagctgacgcagctggaggccttctaccggctgggcgtgcgcagcatcgggccattctggaatctgccgaacgccttcggcaccggcgtcagcgggccgttcccgggctcacccgataccggccccggcctgacgccggccggcgaggcgctgatccgcgcctgcaaccgccgccgcatcatgatcgacgtctcgcacatgaacgagaaaaccttctggcaaaccgccgcgctgagcaacgcgccgctggtcgccacccactccaacgcccacgccctctgcccccagccgcgcaacctgaccgacgcacagctgggcgccatcgcccagagcggcgggatggtcggcgtcaatttcggcaccgccttcctgcgtgcggacggtaaacgtgacagtgcaacaaccggcttaacagaaattgttaaacacgttgagtatttgatcgctaaacttggtgaagatcgcgtgggatttggctctgattttgacggggtcaacgtaccgcaaccgctggaggacgccgctggcctgccgcgcctgacgcaagcgctggcgcaggccgggttcgataaccggttgctggagaagctgacctggcgcaactggctgaacgcgctcaccgccgcctggggtgaataa

SEQ ID NO: 423974 - DNA, 912 bp, Serratia marcescens
atgcagataaaagttctcggctcggcggcgggcggcggctttccccagtggaattgcaactgcgacaattgccggggcgttcgcgaccacagcatcagcgccacgcgccgcacgcagtcctccatcgccgtcagcgacgacggtaaaaactgggtgctgtgcaacgtttccccggacatttgccatcagctgctggcctcgcccgaattgaataatcccgaggtgctgcgcggcaccggcatcggcgcgatcgtgttgaccgacagccagatcgatcacagcgcgggcttgctcaatttgcgcgagggctgcccgcatcacgtctggtgcacccctgaagtgcatgacgatctcagcaccggtttcccggtatttcccatgctctcacactggaacggcggcctgattcaccacccggtgacgcccggcgagccgttccgcacgatggtctgcccgaacgtgcgctttaccgccattccgctgctcagcaacgcgccgccctattcgccgttccgcgatcgcccgatgccgggccacaacgtggcgctgtttatcgaagataccgcgcgcggggtggcgctgctgtacgcgccgggcctgggtgagccggacgaggcgctgctgccgtggctgcgccgcgcggactgcctgctgatcgacggcacgctgtggcgcgacaacgagctggccaacgccggcgtgggccgcaataccggcaaggacatggggcatctggcgctggcggaagaacacgggctggcggccctgctcgccaccttgcccgccaggcgtaagatcctgatccacataaacaataccaaccctatcctcaatgaagactcggtagagcggcaaagcctgaccgccgccggcattgaagtgagctgggacggcatgaatatcgaactgtag

SEQ ID NO: 423975 - DNA, 756 bp, Serratia marcescens
atgacgcaaccactgcccctgactccgccggcatttgaagcggcgctgcgcgccaaaggcgcttattaccatattcaccacccgtaccacatcgcgatgcacaacggcgaagcgacccgcgaacagatccagggctgggtggccaaccggttctactaccagaccagcattccgatcaaagacgcggcgatcatggccaactgcccacagccggaaacccgccgcaaatgggtgcagcgcatcctggatcacgatggctacggcggcagcgaaggcggcatcgaagcctggctgcgcctgggcgaagccgtcgggctgcagcgcgacgccctgctctctgaagaattggtgctgccgggcgtgcgcttcgcggtggacgcctacgtcaatttcgcgcgccgcgcctgctggcaggaagcggcctgcagctcgctgaccgaactgttcgcgccgcaaatccaccaatcgcgcctcgacagctggccgcagcactacccgtggatcgacgccgccggctacgactatttccgcagccgcctcggccaggccaaccgcgatgttgaacacggcctggcgctggcgctggactattgcgacaccgtagaaaaacagcagcgcatgctggagatcctgcagttcaagctggacattctgtggagcatgctggacgccatgagcatggcctataccctgaaccgcccgccttaccacagcgtgaccgccgcgcgggtatggcacaaccagaggctggtgtaa

SEQ ID NO: 423976 - DNA, 279 bp, Serratia marcescens
atgacgctgaaccctgaacacacccccgtcttccgtcgcggctaccgcctgcaatgggagcaagtgcaaaacagccacgtgatcctctacccggaaggcatggccaagctgaacgacagcgccgccgccatcttgcagctggtcgacggccacaccacgctgaacggcatcatcgcccagttgaacgcccgcttccccggcgccgaagggctggcggaagacgtgctggagtttttccagcgcgcctacgaacaaaaatgggtgaccttccgtgactga

SEQ ID NO: 423977 - DNA, 1137 bp, Serratia marcescens
gtgactgaagcgcgcgcgccggcggtgaacccgccgctctggctgctggcggagctgacctaccgctgcccgctgcagtgtccgtattgctccaacccgctcgatttcgccgcgcaggaaaaagagctgaccaccgcgcagtggatcgaggtgtttcgccaggcgcgggcgatgggcagcgtgcagctcggtttttccggcggcgagccgctggtgcgtaaagacctgcccgagctgatcgccgccgcgcgcgagctcggcttttacaccaacctgatcacctccggcatcggcctgaccgagaagaagctgcagaccttcgccgatgccgggctggatcatatccagatcagttttcaggccagcgatgaaacgctgaacgccgcgctggcgggttccgccaaggcgtttcagcagaagctggccatggctaaggcggtcaaggcgctcggctatccgatggtgctcaacttcgtgctgcatcgccataatatcggccagatcgaccgcatcatcgaactggcgatccagctggacgccgacgacgtcgagctggcgacctgccagttctacggctgggcgcacctcaaccgcgaggggctgctgccgacccgcgagcagatcgccgacgcggaagcggtggtgaaacgctaccgcgaacgcatggccaccgacggcaagctggccaacctgctgttcgtcacgccggactactacgaggagcgccccaaaggctgcatgggcggctggggtgccatcttcatgagcgtgacgccggaaggcatggcgttaccctgtcacagcgcccgtcagttaccgatcgccttcccgtcggtgctggagcacgatctgcagcatatctggtaccactcgttcggctttaaccgctatcgcggctatgactggatgccggagccgtgccgttcctgctcggagaaagagcaagactacggcggctgccgctgccaggcgttcatgctgaccggcaacgccgacaacgccgacccggtgtgcggcaaatcgccccaccacggcaccattctggcggcgcgggaagcggcgaatcgctcgcagatcggtatcgatcagctgcgttttcgcaatcaggccaactcccgtctgatcttcaagggttga

SEQ ID NO: 423978 - DNA, 2316 bp, Serratia marcescens
atgacactcgccggcgcctcctggcagctcgacaacggtttggccgtcaaggcgataagcgatcctgccgccgcgggcgccgccgcgctggtgcgcattgaagcgggcagttttcaggcgcccgtcgcctggccgggcctggcgcatctgctggagcatatgttgtttcgcggcagcgcgaactacggcgtgcaagatggtctgatggcctgggtcgcctcggtgggaggccggctgaacgccaccacccaggccacgcaaaccgccttcttcttcgaggtgagcgcagaccatttggcgccggggctggcgcggctgagcgatatgctcgccgccccgcagctggcggccgaggcgatcgctcaggagattgaggtcatcgacgctgaatatcgcctgctgcgcgccgatgtggaaacccgctgcgaagccgcgcagcgacagatgttcagcggccttgacgcaatgcatcgctttcatatcggcagccgcgccgccttcggcagcgatatttccgcgttgcagctggcgctgcggcagtttcatcagcgctattttcgcgcgccaaacctgacgctgtggctgcaaggcccgcaatcgctggcgcagctgcatgcgctggcccagcgctacggcagccggctgcctgcgggcaacggctcaccgcacgagagctcaccgccgctgaccgctgcggaagattacaccctgacgctgcccggcatgccgcagctgagactggcgtttgccctgccgcgctcccattcgcgcggctggctgcggcggctggagcgcctgctgctggacgaagcccccggcgggctgctggcccggctgcgtgctcaggcgtggtgcgacgccgttcggctcgattattcgcgctgcagcgagaacaacgcgctgctgagttttacctttaccgtcaatcacggttcagccgctgaggctgcctgcatcgaaagcgccctgctggcgtggctgcaggcgctgcaggtgctgacaccggcccagcttgcgcattacgagcggctggcaaatcgcgatttccaccgtttggcgccgctcgaccagctgcgtgccagagcgtttgggctgccgccggcggagccgaacgacgattggccacgacatattgcggcgttgattagcgcgccgcgccgtcgcctggccgtgcggcccgaaggcggcggtgaaacccgtgaaattcaagggctgccgctggcgcttggccccttcgccggcgccgcgctgacggctacgactgaacccttccgctttttctcctcctcggcggcgctgccgcccccgacattgcctgccggcctggcgccggtgcggcatctgcgccccgacgaagcgcagccggtgctgctgctgcggccgacgccgtccagccccttcagtgatgcacaggcctacggcttacaggcggcgctgcgcgccggggcggccgaactggcgcatcgggaaggacatttaagcttcgaacgccaccagggtgcgtggctgctgcagctggcgggcagccccgcgctgctttgccacgggctgagcgaggtgaaccgggcgctggcggcgttgccgtcggccattctcaacgaggcggcgagaaacctgcgccatacgcagttgcaagagcaaaacgacatcgccattcgtcgcctgctggcccaattgcccgcggcgctcagcgcgccgacagcaacagcggtgcagtggcatgccaccttagtcggcggcgatggcgagttaaaacggcagctgtcgcacctgctgtacgacttcccctatcccgtggccgccgagccgccgctgccgatatatcagcatcatcgccccgtcacgctgacggaaagcggcgccgaacacgccttgctgcagttttacccgctgccgaacggcgaagccgaaggccgttgggcgctgcgcgtgctggcccagctttacgcgccgcgctattttcagcggttgcgcgtggatcgcaacgtgggctacgtggtgcaatgcgccttccaccgctgcgccgatgccgaaggcctgctgttcgcgctgcaatccccaacgttcaacgttgaacagctgcggcagttaaccgacgaattcttactacagatgcgtcatgagctggcgcacgtgggcgcaaacgagctggcgcaaacgcaacaggcgctgcggcaaagcgtgcagcgcctcagcgccgagccattgcaacgcgcacgcgaaaccgccctggaaaatcacgcaatcattgccgccgagcccatgacattgacgcaactggcctattggcagcagcggctattcgccacaggctga

SEQ ID NO: 423979 - DNA, 1386 bp, Serratia marcescens
atgaactctcagccagagcagaccgcgtttattgaagacaagtctatcgattttgttcccgccggggagcgtcatggccatgcccgcagcctgtttaccctgtggttttgcaccaatattgcgccgctggcggtcgtgaccggggccatctccacacaaacgtttcatctcaatattctctcggcgctgagcgcgattatcgccggccacctgttcggcggtatttttctggcgctgacctctgcccaggggccacaggtcggaataccgcaaatggtgcagagccgggcgcagtttggccgctacggctcgctgttggtgatcgtgttcgccacggtgatctatctggggttctttatttccaacatcacgctttccggcaaggtcatccataacgtcatcccgtcattgaacatgggcgtggcgacggtgattggcgcggtgttggcaacgttgatcggggtggtgggctaccgtttcatccacaagatcaacaaaatcggcgcctgggtgatgggcagcgcgctgattctcggattggtattgatgttttctcaaccgctgccggcggatttttggcagcggggatcgttcagcattgccggttggttcgccacgttctgcatcggcgccgtctggcaaatcagcttctcgccctacacgtcagactattcgcgttacctgccggcggaagtcggcattgccaaacccttcctgtatacctacctgggcgcctgcagcggcaccattttggccttcgtgttcggcgtggtggcggtcaatctggtcgccggcagcgacgatgccatggaggcggtgcgccaggcgacgggagggctggggccggtgctgatggtgctgtttctgatcaacatcatctgccataactcgatgaatttgtacggcgcggtgctttcactcatcactgcggtacaaaccttcttaccgcagtggatgccgaatgcgcgtatacgcacgctgttctcggcgctgattttgctgggggctgtgtgggtggcgctggttgcctcggccaacttcgttcatctgttcctgaacctgatttttgccttgatttcggtgctgatcccctggtgcatgatcaacctgattgatttttacctgcttaaccgccaacgctatgacatttcggccattttcagcgccgacggcgggcgctacggcctgctaaacacccgcgcgctcggcgtttatttcggcggtattgcggtgcaggtgcctttcgtcgagaacgcattcttctccggcccttacgccaatctgatcccgggcgcagacatttcctgggtgatcagcatggtgctgaccggtatcgcctacccattgtgttgttcgcgacgggctaactgggcggtgcaattataa

SEQ ID NO: 423980 - DNA, 1467 bp, Serratia marcescens
atggaatcgttcaaactctacatcgacggccggtttgacgccggttcggccaccttcgactcgatcaacccggcgagcggcgaaccctgggcgcaggtggcggaagcccgcgcgcaggatgtggatcgcgccgttgcggcggcgcaccgggctttccagggggccgagtggcgcgatatgaccgccggcgcgcgcggcaagctgttgttgcggctggccgacttgctggagcagcacgcccccgagctggcgcggctggaaacgctggataccggcaagatcatccgggaaacccaggcgcagatcgcttatgtggcggaatactaccggtactacgccggcctggccgacaagatggaaggcagcgtgctggcgatcgacaaagccgacatggaaacctgggtacgtcgcgaaccgatcggggtggtggcggcgatcgtgccctggaacagccagctgtttcttgcggcggtgaaaatcggcccggcgatcgccgccggctgcacgctggtggtcaaagcggcggaaaccgcgccggcgccgctgctggcgttcgccagactgatagacgaggccggttttccacgcggagtatgcaatgtgatcaccggttttgccgccgaatgcggtgcggtgctgacggcgcatccgcaggtagaccacatcgcctttaccggcggcgcggaaaccgcgaagcacatcgttcgcggcagtgcggaaaacctcgccagcacctcgctggagctgggcggaaaatcgccgtttatcgttttcgatgatgcggatctgaccagcgcggcgaatgcgcaggtggcggccattttcgccgcgtcgggccagagctgcgtagccggctcgcgcctgcttgtagcggaaagcatcaaggacgcgtttttggcccggctgacggagaaggtgcgcagcatccgcatcgggccgccggatcgcccggacacccagttcgggccgctttgcaccaggcagcagcaagagcggatcgccgccatcgtcagccgttcgctggagcagggggcaaaactggtgattggccacgcggcgatcgactcaccgggcttttactacccgccgacgattgtcgattgcagcgcgcaacccgacgccgagtgcgtgaagcaagagctgttcggcccggtgctgtcggtgttgaccttcagggacgaagcggaggccattcagcttgccaatgattctgcctatggcctggcggccggcattttcacgcagaacctgacgcgcgcgcatcgggtgacccgtcgcctgcgggtgggggtggtgtggctgaatacctatcgagcggtatcgccgctggcgccgtttggcggctacggccagtcggggtttggccgcgagggcgggattgacgccgcgctggaatacaccaccagcaaaacggtgtggctgcgcaccagcgacgatccgatagacgatccctttgtcatgcgctga

SEQ ID NO: 423981 - DNA, 1038 bp, Serratia marcescens
atgaaactgtctttattcgtgcatatggaacgaacgttacccgacgaaccgcaggaaaagctctaccaggagatgatcgagctgtgtgaaatcgccgatcgcggcggcatgcacgccatctggaccggcgagcaccacggcatgaatttcaccattgcgccgaatccgttcatcaatctggcggacattgcccggcgcacctcgcgggtgcggctcggcaccggcaccatcattgcgccgttcaatcacccgatccgtctggcgggcgaggcggcgatgaccgacatcatcaccggcggcaggctggagctgggcatcgcgcgcggcgcctattcctatgaatacgaacggctgatgcccggtttgaccgcctgggatgccgggcagcgcatgcgcgagttgatcccggcggtgaaaaaactgtggcagggcgactatgcccatcagggggaatactggtcgttcccggcgaccacctcgtcgccgctgccgaaacagcagccgcatccgccgatttgggtggcggcgcgcgatcccaacagccacgaatttgcggtgcaaaacggctgcaacgttcaggttacgccgctgcatcaaggggaagaggagatcgtgcggctggtgacctgtttcaacgaggcgcgtgcacgcttcgccgccgagcagccgctgaagatcatgctgttgcagcatggctacgtagcggaagatgaggtggacgcccgcctggcggcggaagagctcaaccgtttctaccactacttcggcgcctggttcaagaaccagcggccggtgcggcaagggctgattcagccgctgagcgacgaagagatcgccgccaatacctattactccgccgagatgatgcgcaccaacctggctatcggcaccgccaatgaggtcattacgcggctgaaaaaatatgaggcgctggggtatgacgagtttgcgttgtggatcgacagcggcatgagctttgcgcgtaaaaaggcctctctggagcggttcattcgctgcgtgatgccggaatttcactga

SEQ ID NO: 423982 - DNA, 930 bp, Serratia marcescens
atggacgcggataaacgcaggcagttgcgcgacgctttcggcgcctttatgaccggcgtcaccattgtgacctcggtagacaaacaggggcggccgattggcttcaccgccaattcgttttcgtcggtgtcgctggatccggcgctgctgttggtgagcatcgataaacgttcggcgaatctggcgcattttacccagtgcagccatttcgccatcaatatactggcggaacagcaaaaagaggcttcaaccatttttgcgcaaaagaacgaagaccgctttgcgcagatcgattggcgctggagcgcgtcacgggtgccgcttatcgataacagttcggcgtggttcgactgctcgctgcatcaggtggtggacgccggcgaccatgccattctgatcggcaaggtcgaagggttcgagtccaacgccaccgccggtctggggtattaccgcggcgcttatttcacgccttatcaaaacgcgcagtcgctgattggtgggccgcaggtggtggtaagcgcgttgatcgagtttgaagggcacgccgtgatggtgcggcaaaatgacggcggctatcaactgccgtccagcgcggtggagaaacgcagcgtcagcgaaacgttgggggagctgctgcaacagctgggcattaatgcccatccgggcttcgtctattccgtctatgacgaccgccaaaagcaccagcaacacatcgtttttctgtgcgcgctgccgaccgacgccggcagcctgacgccgcagctgggcgcggcggaatggttcgacatgccgacgctggcgcggctgccgatcaaggatccggcgctgcgatcgatgctgggccggttcgtcaaagaaaacgccgtgggcaattacggtatctattatggcgatgagcacagcggtgccatcaagcaattcgccggttga

SEQ ID NO: 423983 - DNA, 828 bp, Serratia marcescens
atgatcagaacaatccggcagctgtctgaacccgctctgcgggtggggtatttggaggccgggcgtggcgagccgctggtgttgatccacggcgtaggcatgaacgcggaggcctggtatccccagctcgatgcgctcagcgcgcactttcgggtcatcgccgtcgatatgccgggccacggagaaagcgaaggcttcgcccacgccgcgacgctggaggattacgtgcgttggatggcggccttcttaaacaccctgggcgcgccgagcgcggcggtggcggggcactcgatgggggcgttgatcaccgccggtctggcgatcgattatccggagcgggtcaatcgcgcggtggtgatgagcggcgtgtttcagcgctcagcaaaggccagcgccgcggtcgcgcaacgcgccagcgcgttggccagcggccagacgcagctcgactcgccgctgagccggtggtttggcgccgatcccgccgaacagggtctgcgccggcaggtgggcggctggttgcaacaggtggacgtagcgggctacgcccgcgcctatcaggcgtttgctaccggcgatcgggtgtatgccccgcgttggcaccttatccgctgcccggtgttggtgctgaccggcgagcacgacgccaattccagcccggagatggcgcggcaaatggcgcaggccgcaccgaacgggcgcgcggtaatcattgagaacgccaaacacatggtcagtctgaccgatgcgcaacgcgtcaacgcgctgatgcttgattttctgacctcagagcaacctttgactttaggagcagcaaatggacgcggataa

SEQ ID NO: 423984 - DNA, 603 bp, Serratia marcescens
atgcatcaagacatccgcaagaccctggtttccacagaaaccctctacgccgacggcggcaaatcggccggcaaaccgctggtgatgatcgcggcggcggcggtgatcaaaaacccctgggccgggcaaggctttgtcgaggatctggcgccaaagattcgagaaatggcgccggtgctgggcgagctgctgaccggtttgatcctcaaagaagccggctccggcgagcgggtggaagccttcggcaaaagcgcggtggtggggctgggcggcgagttggaacatgcctcggcgctgatccacacgctgcatttcggcaaccactaccgctcggcggtcaacggcaagagctatctggcgttcaacaatacccgcgggccggccaacgcgccgatcctgatccctatgatggggaaaaacgacgaaggcagccgcgagcactacctgacatttcagttcaacatcaacgacgcgccctgcgacgatgaaatcgtcatcgcactgggcgcggcgctgggggggcggccgcaccaccgcattggcaatcgttatctggatctgaaagagctgggccatgatcagaacaatccggcagctgtctga

SEQ ID NO: 423985 - DNA, 675 bp, Serratia marcescens
atggttcaggcgtcattgaaaattgagaatgcaccggtcaccttgcgcgaattggcattggcgaaaattaggcaggcgattatctcagggtattttcaggccggcgatcgtttggtggaacgcagcctgtgcgaggagctgggcgtcagccgcagcgtggtgcgcgaggtgatccgttatctcgaagcggaggggctcattgaaacgctcggcaagaaagggccgattgtcgctattctgacctgggaaattgccgagcagatttatactattcgcctgctgcttgaacaggatgccgctcacgactgcgccatgaaagccgggccggaagataaaaagaaactgcatgaaaaattaattgcgattaatcaggcgtcggccgggcaggacgatattcagcgcgttgaagcctcgcaggccttttatgaaaccattttccaggtggcccatcacgccattgcctgggaaatcgttcaacgcctgaacagccgcatcagccgcctgcgcgccctgaccctgaaaaccccggagcgccagctggccggcttcgagcgcatgacgcgcatttatcacgccatcgaacaaaacaatccgacgcaggccaggcaagaagtcatcgatcacctgaccgaggccgccgcgctggccaagcgcattctgcaacaggagtcctga

SEQ ID NO: 423986 - DNA, 297 bp, Serratia marcescens
atgcccgcttactggattgcccatgttaccgtgaaagatccgcagcaatatcagcattacatggatttggcgccccaggcgtttcgccagttcaacgcccgttttctcgcccgcagcgaacaggcgcaaacgctggaaggcccatcgtttgtgaaacatgtgctgatcgaattcgacgactacgccaccgcgttggcctgctaccattcgccggcctatcagttggcgaaacaacagcggtgccacgtggcggaagccatgattaccatcgtcgacggcttgccgcccgcccattaa

SEQ ID NO: 423987 - DNA, 315 bp, Serratia marcescens
atggcaagcagtctggtgttaccttccgccgaaacgctatccgggcagtggacggtcagtgataaatcaaagtcttgtgttgtgcagctcaacgcggagagtgtggaatcggccggcggctatagcctgaaatttttatctgattgcacgccagacgtcttgccgcaagagcctgtggcgtggcgtcctgctcccgatggcattgcgctgttggacaaggatgggctgaccgtacttttcttctctcaggaagacgatcattatcgcagccagatctgggctgaaactgggaagatcctgaagagaaataactag

SEQ ID NO: 423988 - DNA, 1440 bp, Serratia marcescens
atgggtaataccatgaatggaaacgaaacgggttgggacagcgttaacgatcttattcactaccatgagcgcggaaatggtctgacgataaataacaaaccgtcttatgacataaatcaggcggggttgcagatcgcgcgcggcgataaaacctggaatggcgtacacgtcacgggaaaagaggcgacggtgacctattccttcccggattgggattataacgaactgaacctgggccaccgctccccggaacgtgatacggggctgagcgcgttcacgcaacagcaacaagaacaggcgaagctgtctttgcaatcctgggccgatgttgccaacatcaaatttgtcgaagttgccacaggccaaccctccaatattacctttggcaattatgaggggacaggacaagcgtatgctttgaaaccgttctcatataatggcaatgattacagggggttcaattctgatgggcaaagttggtacaacattaagaatcactccgaaaatttgcatcctgagctaggtaattacggccgcttaaccattacccatgaagttggccatactctcgggttagatcacccgggcacttataatgcggggcaaggcagcccaaattataccaaggcagtttacgccgaagatacccggcagtttagcgtaatgagttactggaatgaatccattaccaatgcggatcatggccattactatgccgctgcgccgctggttgatgatatcgcggctattcagcatctttacggcgccaatatgaccacccgaaccggcgacaccgtttacgggtttaattcaaatacaggccgagacttctatacgctcaacgacagccacgacaaactggtgatgtctgtttgggatgcaggcggtaatgatacccttgatttctcggggtatagccaaaatcaacgtatcaacttgaacgaaggcgctttctccgacgtcgggggattaaaagggaatgtttccatcgccgctggcgtcaccatcgaaaacgcgatagggggctcaggtaatgacgtcattgttgggaatcacgcagacaatacgctcaaaggcggcgccggcaacgatgtcatttacggtggagcgggccaggatcaattatggggagggcaaggcaacgacatttttgtcttctctgatgtgaatgactcgcctgttcgggctcctgataccatttgggactttgagtcaggcaaggacaagatcgatctgtccttcttcaaccagggcgctaaaggcagtgatttcattcagtttgtcgatcatttcagcgggcaggccggtgaggcgctggtatcctatgatacccagagcaatctgagtgaattggccttcaatatccatggcggtgcaaatccagacttcctggtgcacatcgtcgggcaggccgacgtcgctgttgactttatcgtgtaa

SEQ ID NO: 423989 - DNA, 2094 bp, Serratia marcescens
atgaccctgttgcccaagcagagcaataacaaaaatccgattgatctctatggcgaaatcgtagacgacttgcccggcctgatttgcttcggcaaccgccttggcggttacttcaataaacagtggcgcgactataccggcgccatcgccggtgaacacggcgccgccgactggctcgatgccctgcaccccgacgatcgcgagcggctggccgcgcaatggcgccaggcgatcgtggccctttcctcgttcgccggcgaagcccgcctgcgcgatcgcagcggcgcctaccgttggtttatgttggcgttcaacgcccggcaggacggcatggcgctggagctcagctggtacctcacggcgaccgacatccatccgcaaatgctgcagcgccagcaaaacgttcaggcgctctctatccagcaagacatgctggacgccagcgtcgactgcatcaaagtgatcaatcacgacggcacgctgcgccacatgaaccgctccggcagcctggcccttggccttgatccggcgcaaaaagagtttggcatgccctggctggggctgctgtcgcccgagatccggcgccgcggcagtaaggcgctgcgcagcgtcagagccggaaagaatgcgcgcttcaccggattgagcgtgacgccgcagggtaaaaaacagcactgggacaacattctcacgccggtcagcgacgaacacggcgccgtggccgagatcttgtgcgtctcgcgcgacgtgacttcacagcgcgtgatggaacaacgtctgttgctcgccagcgaatatgatgaattgaccggcctgcccaaccggcgccttttcaagaaaaagctgaagcaagagatgaagcgcgccctgcacggcaacaagtccctcgggctgatgctactggatcttgaccacttcaagctggtgaacgacacgctgggccacgcggcgggcgaccatctgctgcgggttttgggcaaaagactcagcgcctgcatgaatacgcactcgttcgtctcccgcctcggcggcgacgagtttgccgtggtgattagcgacgtcgaaaacgagcaggatattttccgcatcgccaacaagtttctgctgcagctggagacgccgatcacccacggcggcaagacgctgcattgcggcatgagcctcggcggcgccatctaccccaaagacgcgcgcgacgcttcggaactgatgaaatgcgccgataccgcgctgtatgagctgaaagacggcggccgcggcggtgtctatatgttcgaccgcaaaatgatggacaaagcgcgcgcccgcgccagccagctcaactacgcgcgccagatcgtgcgcgacaactgcatccgtcccagctaccagccgaaggtctgcctgaccgacggcagcatcgtcggctttgaagcgctgctgcgctggcactgcccgatcaacggcgtgcagctgccggcaacggtaagcgaggcgttcaacgactacgagctggcgaccaagatcagcgaggccatgcagctgaaggtcttcgccgatatcgcccgctggcgcgcggccggcgtggcggtgcggcccatctcgctgaacgtgtcgccgatcgagtttttacgcgacaactacgccgaaaccttcctgcagcgcctgctgaagttccacattccccaccctctgatcgaactggaagtgaccgaacacgcgttcaacaagcacggctcgaagtacgtgctgcgcgcgctgcaaatgctcaaggagatgggcatccgcatcgcgctggacgatttcggcaccggccactcctccttcagccatatcatggattacccgctggactgcattaagctggactgcgacttcgttcaacggatgaataccgaaccggcgatcctggcgatcgtggaaagcattggcatcctcggccaaaaactgtcgatcgatatcatcgccgagggtgtggaaaccgagcagcagcggcaaacgctgtgcgaagccggtttccatatcggccagggttatttgttcagccgggctgtggaatcccaacgggtgcccgagctgctgcaggcgatgccgcaacttgtcgacggccgttaa

SEQ ID NO: 423990 - DNA, 1197 bp, Serratia marcescens
atgctgtcgcgtttcgctacgttgggccgcataccgcgcggcgtgtgggtattgggtggggtgagcctgttgatggacgtctcctcggaaatgatccacagcctgctgccgctgtttatggcgacgacgctcggcgccagcgtgatcgtcatcgggctgatcgaagggctggcggaggcgacggcattgatcgtcaaggtgttctccggcgtgctgagcgattacctcggcaagcgcaaagggttggcgctgctgggctacgggctgggcgccatcagcaaaccgtttttcgccatcgcgtcgtcgtccggcatggtgatgagcgcgcgcctgctggatcgcgtgggcaaaggcatccgcggggcgccgcgcgatgccctggtggccgacgtgacgccgccggagattcgcggtgcggccttcgggctgcgccagtcgctggataccgtcggtgcctttttagggccgctgctggccgtcggcctgatgctgctgtggcacaacgattttcgcgccatcttttgggtggcggcgatcccggcggcgctggcgattgcgctgctgtttttcggcctgaaagagccggccgccgcgataacccacaagcgcaccaacccgatcacccgcgccaatctgcggctgctggggcgcggctattggtgggtggtgggcatcggtgccgtcttcacgctggcgcgcttcagcgaagcgttcctggtgctgaaggcgcagcagggcggcacgccgctggcgttgatcccgctggtgatggtcgccatgaatctggtctacgcctgctcggcctatccgttcggtaaactgtccgatcgcatgagccatgaaggattgctgaaagccgggctgctggtgctgatcgccgccgatctggtgttggcgctgagcgatcattggggcggggtgctgtttggcgtggcgctgtggggcgtgcacatgggcatgacgcagggactgttggcggcgatggtggcgcataccgcgccggcgcacctgcgcggcaccgcgttcggcatgttcaatctgatcagcggcgtggcgctgctgctggcgagtctcggggctggaaccctgtgggagctgttcggttccgcctccaccttctacgccggggcgttcatctgcgtggtgacgctggtcggcatgcagctggcgccgttcggcgaacggcggggcgcttaa

SEQ ID NO: 423991 - DNA, 918 bp, Serratia marcescens
atgatatatagcaaaaagatgattgtgatggcggcgctgctgagcttttccgccgcggccgcgccaggggtggatctcgtcgccaacgaaacgccgatccacacggtgaagagcgccgaagccgtggccaaaatccccgccggcttccggttcgtggaacccggcacgctgacagtggccatttccctgctgggcagcggcccgccgttcggcctgtacgcccgcgacaataaaacggtgatcggcagcgaggcggacatcgcgcgcctggtggccgacggcttgggattgaaactcaagctggtgcccacctcgtgggaagactggccgctgggggtggcctccggcaaatatgacgccgcggtttacaacatcaccgtaaccaacgaacgcaagaccaaattcgatttcgccacctatcgccaggatacgctggggttctacgtcaaatccgacagtaaaatcacccagattaacaccgcgccggatatcgccggtaaaaagatcatcgtcgattccggcaccaatcaggaagcggtgctactggcctgggacaaggagaaccgcgccaaggggctggcgccgctgcagccggtgtacgtcacagacaaggccgcctccacgctggccattcagtccggccgcgccgatgccaccttcggccccaacgtctccggcgcttatcaggcgcggctgaccggcaaaacccggctggtaggcatcgtacccggcggctggccgaagaccgccaacatcgccgtcacgctgaagaaaggcaatggcctggtggatgcggtgcaggcatcgctcaacagcgccatcgccaacggcagctatctgcaggtgctggatcgctgggcggagagcgacgagaagatcgcccattcggagattaacccgccggggctgggggattga

SEQ ID NO: 423992 - DNA, 1764 bp, Serratia marcescens
atgttgcctgacgaccgcttgcccaccgagggcgccagtccgctggcggaatcctggcagcgcagccggggctacggcctgacgcgcgccgatcgccatatcccgtttatcaaagccggactgctcgaagagctgcgcagccgcaacgactgggtgccgcaacgggtacagccgctgatcgagcagctgggcgcgcaaattacgcgccagcacgccattgtggtgatcgccgacgccgacgggctggtgctggaaacccgcggcaataccgactttttgcacaaggcgtcgcgctttgcgctggcgccgggcaaccagtggggagaagcggagcggggcaccaacgccatcggcaccgcgctggcgctgggcgcgttctgcgaagtgcgcggcgaccagcatttcctcaaccaaaacgccgggttgaactgcaccgccgcgccgatctatcggccggatggccgcattgccggcatactggatctctccgcccccgcgcagcggccgtaccgcgatgcgcagcgactgatcatgcaggcggtgcggcatatcgaacaccgctgggtcagaagcgcgatcgccgatcgtcactggacgctgcgcctgcacgccgatgccggtcgtctgggcagcgcgcaggagctgctgctggtgtttcacgacgaagtgctggtcgccgccaatcggctggcgatgatggagtttcagctctcgccggccgcattcggctccgtcgagttcgcccagctgttccccgatctgttgcgacagccctccggcgcgccgcgtcagacgctggccggcaatcaacggcactattattctctgctcgaggcgccgcagcgccgcgtcagcgccctgcgttccacgccgccggcggaacggcatgacgagcagcatcagaaagcgctgcggatcctcaacgccggcctttcgctgtgcgtgaccggcgaaaccggctgcggtaaagagcacttcagccgacgcctgtttcaagagagccgctggcgcaacggcaacttcgtggcgatcaactgcgcggcgctgcccgagccgctgatcgaatccgagctgttcggctatgcgccgggggcgtttaccggcgccaacccgaaaggctatatcggcaagatccgcgaggcggacggcggcgtgctgttcctcgatgaaatcggcgacatgccggcgggcctgcaaacgcggttgctgcgggtgttacaggaaaaaacggtcacgccgctcggcagccgcagcgcttatccggtcgatttcgcgctggtctgcgccacgcaccacgatctgcatcggcaggttgaggtgggggcgtttcgcgaggatttgctgtaccgcatacaggaatacagcctgcgcattccgccgctccgagagcgggcgcagctggaggcctttattatgcagctgtggcgagagctgggcggtgagcggcgcgacattcgcctgctgccggaagcgctggcgatgctggcgcgctacccgtggcccggcaacgtgcggcagctgttgagtacgctcaaggtgctgctggcgctggcggacgatcatgcggtgctcactctggacgatctgccgcagtccatcgcggtgctggcgccgcgccaggagaacgccgataccggcctggaggcgctgcaggcggcaatcgacagggcgggcggcaacctcagtcgggcggccaaggcgctcggcgtttcgcgcagcacgctgtaccgcaagctgggaaggcagaaagcggcggcggaatga

SEQ ID NO: 423993 - DNA, 1521 bp, Serratia marcescens
atgaaatatgtccaccccggtttgcctggctcgctggtttcgttccgcaaacgctatggcaactacattggcggcaaattcgtcgaaccggtatccggcaactacttcaccaacacctcaccggtgaccggccagccgatcgccgaattcccgcgttccgacgccaaggacatcgagctggcgctcgacgcggcgcacgcggcggcggacgcctggggcaaaaccagcgtgcaggcgcgttccaacgtgctgttggcgatcgccgatcgcatcgaatcgcggctggagatgctggcgctgaccgaaacctgggacaacggcaaaccgatccgcgaaaccctgaatgccgatctgccgctggcggtcgaccatttccgttacttcgccggctgcctgcgcgcgcaggaaggcaccgcggcggagatcgaccagaacaccgtggcctaccatatctatgaaccgctgggcgtggtcggccagatcatcccgtggaacttcccgctgctgatggccgcctggaaactggcgccggcgctggcgggcggtaactgcgtggtgctgaaaccggcggaacagaccccgctcggcatcagcgtgctgatggaagagatcggcgatctgctgccgccgggcgtgctcaacgtggtgcaaggcttcggcgccgaggccggcgaagcgctggcgcgcagcaaacgcatcgagaagatcgcgttcaccggctccacgccgatcggccgccacatcctcgcctgcgcggcggaaaacatcatccccagcaccgtcgagctgggcggtaaatcgcccaacatctatttcgccgacatcatgcaggcggagccggagttcatcgacaaggcggttgaggggctggtgctcggtttcttcaaccagggggaggtctgcacctgcccttcacgcgcgctgattgaagaatctatctatccgcagtttatggagaaagtgctggcgcgcatcgccaccatccgccagggcgatcccttcgacaccgacaccatgctcggcgcgcaggcgtcgcaagaacagtacgataagatcctgtcctacatcgacatcgccaagaatgagggcggcaacatcctcgccggcggcaaacgcacgcagcatggggatgaattgcaaaacggtttctacctgcagccgacgttgattaccggcaacaacagcatgcgcttcttccgcgaggagatcttcgggccggtgatcggcgtcaccacctttaaagacgaagccgaagcgctggcgctggccaacgacaccgagttcgggctgggcgccgggctgtggacccgtgacatcaaccgcgcctatcgcatgggccgcgcgatcaaggccgggcgcgtgtggaccaactgttaccacctgtatccggcgcacgccgcgttcggcggctacaagaactccggcatcgggcgcgagacccacaaggcggcgctgtcgcactatcaacaggtgaaaaacctgctggtcagctacgacgccaaaccgctgggcctgttctga

SEQ ID NO: 423994 - DNA, 1017 bp, Serratia marcescens
atgaaagctgccgtagtgacgaaaaaccataccgtagacattcaggataaagtgctgcgcccgctgaagcacggcgaagcggcgttgaaaatggagtgttgcggggtgtgccacaccgatttgcacgtgaaaaacggcgatttcggcgaggtgccgggcattacgttggggcatgagggcatcggcgtggtctccgccgtcggtgagggcgtcacctcgctaaaagtgggtgaccgcgccagcgtcgcctggttttaccagggttgcggccattgcgaatactgcgtcagcggcaacgaaaccctgtgccgttcggtgaaaaacgccggctacagcgttgacggcggcatggcggaagagtgcatcgtggtggcggactacgcggtgaaagtgccggacgggctcgattctttcgccgccagcagcatcacctgcgccggcgtcaccacctacaaggcggtgaaaatttccgatatcaagccggggcagtggatcgccatctatggcctgggcgggctgggcaacctggcgctgcagtacgccaagaacgtgtttaacgccaaggtgatcgccatcgacgtcaacgacggccagttggagttcgccaaacagatcggcgccgatctgaccatcaattccaaaacgcaaaacgccgaggagatcattcagcagcaaaccggcggcgctcacgcggcggtggtgacggctgtggcaaaagcggccttcaactcggcggtcaatgcggtgcgcgctggcggtaaagtggtggcggtggggctgccgccggagagcatggatctgagtattccgcgcctggtgctggacggcattcaggtggtgggttcgctggtgggcacgcgcgaagatctgaaagaggcgttccagttcgccgccgaaggcaaagtgacgccgaaagtgaccaaacggccattgggcgacatcaacgccatcttcgacgagatgaaggcgggcaccattcgcggtcgcatggtgatcgatctcggcatggcgaagtaa

SEQ ID NO: 423995 - DNA, 1290 bp, Serratia marcescens
atgcgcatccgcacttaccaccctcagctctccttttcgggcgcgcccgaagcgagtgatttcaaggcgctgtctcaacagggctaccgccttatcgtcaacaatcggccggatgaggagccgggggagtatcttgaccatcagcaagagaaagcgttggctgaacaaggggggatgcgctacgtctatctcccttatacgttcgatacgctgacctgggagaccgtttacaccttccagtttctgttgcggcaaggcaagaaaaccctggcgcactgcagaagcggggctcgctctgcctgcctttccctgctgtatgcgttgcgcgaaggtcagatagatgaagcgcagtttcgccgccaatgcgacgaatacggcgcggacgccgataaggcgctcagctggtacggcaagcatcggtccgtgcgggccacggcggaagttcacgcgttttatgagccggaaagcggcagcctgcagtatgtggttgccgatcccgaggcgcgccgctgtgcgattatcgacccggtgctggattttgaccgccgatcgggcacggtctcgcatcaacaggccaacgatatcctgaattttatccatcaacgggggtggggagtggcctgggtgctggatacgcacccgcacgccgatcatttttcggccgccacctggctggcgcagaaaaccggcgccttcaccggcatcggtgaaaaaattaccgccgttcaggggctgtgggaagagatctataacttaaaagacctgcctgcggccaataccgtctgggatgcgctgttcgcggacggcgacgtcttttttatcggcaacctgcgcgctgaagtcctgctgtctcccgggcacacgctggcgtccgtcacttattacattgcggatgcggcgtttatccacgatacgttcttcatgccggacagcggtaccgcaagggccgattttcctggcggcaatgcggaagccttgtgggagtcattgcagcggatcttgagcctgccggcggatacccgcctgtttaccggccatgattaccgcccggcggggcgtgaggcccgctgggaaagcaccgtgagagagcagcgcgagaacaatccctgggtggtcaacatggataaatcccactttattgcgcaaagaaagcagcgggacgccacgctgccgcacccggaactcatgctgatggcgctgcaggtcaatattcgcggtggcgtgttgcctgactgcgaagacgatgggcaacgctacctgaaaattcccgtgaatcgatttaagcggtga

SEQ ID NO: 423996 - DNA, 786 bp, Serratia marcescens
gtggattttttccatttcagtttttatatcgtgatgctgttagtggtcaccgggggaattgtgggatttctcctggccctgaccggcggcggcggctcaatcgtctgcgtgccattattgctgtatatggtgaaagtgccggatacgcatttgattatagggaccagcgccatgtctgtggccattaacgcgctgatcaacctggccgcgcacgcctccaaaggcaacgtcaggtggcagaccgggcttgtcgtttcgctgctcgccgtcatgggggctctggccggctctcagatgggaaaaatcacggacggacactacataaccctgcctttctccctgttgatgctggtggtcgccggattgacgctgaaaagaaatccccttgccggcaaccccttgccgtcctcccatgctgccgttcatcccgccatcgtatggcccagcgttctcgcgctgggcgggctggcgggctttctgggcattggcggcggatttttggttgtgccggcgctggtctggttttttcgcttctcgatggttgaggcggtggcaacctcactggtggtcgtggcggccatggggctatcgaccagcgccagctacgccatgtccggaaaggtgtcgctcgccattacgtgttggctcatcgtcggcggcgttctggggggcgtggtgggggtggcgctcgccgagcgcctgaaaaaacgcgagggcattatcaacgtgctctatgccctcatgctcctggcgctggccctgtatatgttatttaaaagcctatga

SEQ ID NO: 423997 - DNA, 1239 bp, Serratia marcescens
atgaaaccagaaaaaataaccccccagaaaagcgtcgttattattggcggcggatcatccggaataggtatcgcggcaagcataaggaagcgagttaaagacatcgatataacgatagtggagcctaacgattgtcattattatcaaccggcatggactctggtgggcggcgggctctttgatatcacgaaaacacggcgctccatgcatgccgttctgccctcaggcaccgcatggatacaggatagcgtggtcagggttaagcccagccaaaaatacatcgagacccgccaggggcagaaaataaactatgactttcttattgttgcatgcggactgattttacgctgggataaaatagagggccttgaagaaaccctgggattaaacggcgtcacctctaattatcgctttgatcttgccgaatatacctggcaactggtccgcgaaatgaaaggcggccaggcgatattttctcagccaccgctccccatcaagtgcgccggcgcaccgcaaaaagccttgtatctgtcatgcgattactggcgtcgccaaggcatcctgaataatattaacgtcaatttctgccttgcgggcgcggcggttttcggcattccgcaatttgttcccccgctgaccgagtatttgagaaaataccgagcacaggtcaatttcaatcatcatttgatccgcgttgatggcgagaagcggcaagcgacatttgccgtagagacaaatgaagaaggaaaacgcgagttaactctgcccttcgatatgctccacgtggtgccgccccaatcggccccggcgtttatttcgcaaagcggcctcgctgatggtgccggctggtgcgatgtggataaatcgacgctgcagcataagcattggccggatatttttgcggtaggcgactgttgctcgacgccaaatgccaaaaccctggcggcagcccgcaagcaggtggtagtggcggcggaaaacgtcgcggcgctgattcagggcgcgcctctcactgcccattatgatggttatggttcctgtccattgacggttgagaaaggcaaagttgtgctggcggagtttggctatgacggtaaattgctgcccacgtttccgctgctcgacgccacccagcccagccgtctggcctggtggctgaaagcctggtttttaccccgattttattgggcgggcatgctgcgtggggttgaatggtttgccggcagcaagcggccgtga

SEQ ID NO: 423998 - DNA, 294 bp, Serratia marcescens
atgaaaaatgcccccgccgttacgatccactactgttcacaatgcaactggctgctgcgcgccggctggatggcgcaagagctgctgaacactttcggcgacgatctcgcctccgtcaccctgatgccgggcaccggcggggtctatcaaatcagcgtcgatggcgtaatgatttgggatcgcaagattgacggcggtttccccgatgcggcacagttaaagcaacggctgcgcgatcacagcttccccgatcgctctctcggccacagcgacggtaaaaaagcccggcactga

SEQ ID NO: 423999 - DNA, 663 bp, Serratia marcescens
atggtcgacaatgcgtttatcgcgagaacgcgagccgtcaacggctgcttttccatgtttttgctgatgttcctgattacgtttattccgctgttccttgagaacagagccgccttgatgcgacaagggctattgctgccgctgctgtatggaatggaattcgtcgctatcttttcgttatacctgctctttttccgccgcagagaaggattgggcaaaggcgaggttaaacgcagcgattttgcactgctgctgttcgcgctgttggtgattcagtttattttcccgcgtttgatgggcgtggagaaaacggaaacctgggtgacggagcaggtggcattgcctggcgagattttggcgctcaatgccgctttgttggttttcgttgtccccatctatgaagagatcgtatttcgcggctgtctgtttaatgcgctgatgtattggtttaacgacaaggtgctttgggccgcgttaacggtgtctgtcatctttgccgttttgcatacccagtacaccgattggcgcacattggcagctctggtgctcatctcgctggtgttgacggccgcacgagtcaaatccaaagggatctatttgcccatcggactgcatatgaccatgaacggcgtcgtgatggcggccagctatgcgttaagctga

SEQ ID NO: 424000 - DNA, 498 bp, Serratia marcescens
atgattgaacgcttgctcgaaaacacgatgtacgcctcccgttggctgctcgcaccggtttatgtcggcctttcactggctctggtcgccctgtcgatcaagttttttcaggagatcctgcacgtcctgcccaacattttttctatcgccgaagccgatctgatcctgaccctgctgtcgctggtcgacatggcgctggtgggcgggctgttggtgatggtgatgttctccgggtatgaaaacttcgtctcgcagttggatatcaccgaagggaaagaaaagctgagctggctgggcaaaatggatgccacctcgctgaaaaacaaagttgctgcgtctatcgtcgccatctcctccattcacctgctgcgggtgtttatggacgccaagaacgtgccggacaacaagctgatgtggtatgtgatcatccaccttacctttgtgctgtccgccttcgtgatgggctacctggataaagtgacccgctccaagcactaa

SEQ ID NO: 424001 - DNA, 456 bp, Serratia marcescens
atgccattgactggtcaccccctgcaattcaacgatattcaggcgattttgcctcatcgttatccctgcctgctggtcgatcgcgtgctgcccgccggcacctgcattgccgaagggcggctgagcgccatcaagaacatcaccgccaatgagccgacgttctggaacggccacacgcacttcgccggatttcccggcgtgctgttggtggaagcgctggcgcaaagcactggtctgctggcccactactatctcggggcgctgaatgagggggagcattactatttcgccgccattcagcgcgcgcggttttatcgcgccgcccgccccggggaccaggtgctgatggaggtcgcttttgttcgtcggcgcggggcgatcgcccgctttaccggccgcgccagcatcgatggccggcgcatttgcaccgccgatttcatgtgcgcccgtaaatag

SEQ ID NO: 424002 - DNA, 789 bp, Serratia marcescens
atgtctctggttgacagcttactcagaaccctcgatttctctccgcgcggccaggtgatcgctcgcgaagccgacgcctggggcgaaatcatcgtttccgatcacaaggactaccgcacgctgcggtttgacggcatctgcgaacagagcaagatgagcctcagcaaccccacgcagccgatccacaactacatcaaagcgatgctgatggcggtagcctggcaaccgccggcctcggcgttgattttggggttgggcggcggcagtctgctgcgcgcgttgcacgcgctcgatccggccatgcgcctcgacgtcgtcgagctgcgcgctgcggtgatcgccgtcgcgcgccgctattttacgctgccggccaccgacaccatcagcctgcgcaccgccgacgccatggacttcgtgcgcccgcccgtcgagacgcgctacgatctgatcttctccgatctctattcggcgttcgccatggatccgcagcaaggcacccagaccttcctggaaaactgcgccgcgcggctgaacgacgggggctggctggtgctcaattaccacgatctgcctgacgaaaacagcctgctgtaccacagcctgcagcgaatattcggcaccgtactgttttgcgtcgcccccagcggcaacgtgatcatttacgccacgccggcccaggtgacgctgccgctgagcgcgctgcgcagcctggccgccggcagcggcgagctgttcaactgcgaactcggctacctgtcacgcaaaatagagcggttgcatttccgctaa

SEQ ID NO: 424003 - DNA, 195 bp, Serratia marcescens
atggaaaagaaaacggcgcggctaacggtgctgattgacccggacaagaagaaagccctggaggaactgtgcctgcaacaggacgtcaccccttcccaggtggtgcgccagctgatccgcgattatctgcacaagcatcaggtggactatcccagccaaccgactcacgccaatcctcgcgtcgaaagcaattga

SEQ ID NO: 424004 - DNA, 402 bp, Serratia marcescens
atgttcagccatattaccgtcggcgtcagcgatctggacgccgccgccgccttctacgacgccatcctgttgccgctggggttacagcggcgggaagtgacgccggacggcggccccgccgcccgctgctgggtgatgccgggccaaacgctgccgcgtttctatgcttaccaacccttcgacgggcaacccgccagcgccggcaacggcagcatgctggcgtttctcgccgccgatgagctggaggtcaaacgcgcttacgccgccggcctgctggcgggcggcagcggtgaaggcgagcccggcgaacgcgcgcattacggcaagggctatttcggcgcttacctgcgcgaccccgacggcaacaaggtccatgtggtgtaccggggcgatctcgcctga

SEQ ID NO: 424005 - DNA, 1383 bp, Serratia marcescens
atgttatcccatccttcgccgcagggcgtccgcggcatattggccgcactgtctctgagcatgctgctgtcatcgctcggcatcagcatcgccaacgtcgggctgccggcgctcgccgccgcgttccatgcttcgttccaggcggtgcagtgggtattgctctgttatttactggccgtcaccacctgcatcatcggcatcggccgcctcggcgacagccttaatcgccgccgcctgctgctggcgggcatcgcgctgtttaccgccgcttcgctcgcttgtgcgctggccccgcagctttggctgctgctggcggcgcgcatggcgcaggggctggggggcgcggtcatgatgtcgatcgccatggcgctggtgggcgaggcgctgggcacggataaaatcggccgcgcgatgggtctgctcggcacgatgtcggcagtgggcaccgcgctggggccgtcgttgggcggcgcgctgatcgccggtttcggctggcgggcgatgtttcttatcaatctgccgctggggctgctggcgctgtggcttgcctggcgatacctgccgaatgggccgcgcccggcagcgcgccaggaaacgttcgatcgcgccggtacgctgctgctgggcggcgcattgctctgctattcgctggcgatgacccttgggcgcggcaacttcggtgcgctcaacctggcgttgatgctgggggcgctgttggcgggggcgctgttcatcggcgtggaacgccgcgccgcatcgccgctgttggcgccggcgatgttccgccatccggccctgacggcggggctggcggccagcgcgctggtgatgacggtcatgaccgccacgctggtggtcgggccgttctacctgtcgcgcgcgctggggctaagcgcagcgcaggtcgggctggtgatgtcggcggggccggcggtggcgatcctgaccggcattccggccggttatctggtggatcgtttcggatcgcagcgcattggccagtttgggctggcggcggtggccgccggggcagcgttgctgtcgctgcttaaccgctggggcgtgctcggctatgttggccccatcgcgctgctgaccgccggctatgcgctgtttcaggtggccaacaacaccatgctgatgaaggatctgtttcccgaacggcgcgggctggtcgccggcatggtgaacctggcgcgcaatcttggggcgatcaccggcgcttcggcgctgggggcgctgttttatctggcttcgcagcgggtggcgggcgccgccgccgccgcggcttacggcatgcaggtgacctacggcgtggcggcgctgttggcgttggcggcgctgctcatcgccttcggcggccgccgcccgcgtcggcgatga

SEQ ID NO: 424006 - DNA, 1068 bp, Serratia marcescens
atgaacgataccgctctaccgttgcaggtggcgctgattggctacggctttgtcggcaaggcgtttcacgcgccgctgattaacgcggtgccggggctggaactgagcgtggtggcttcgcgcgatgccgccaaggtgcatgccgatctgccgcacgcgcaggtgatagccgatccgctggaggccatccgccggccggcggtggatttggtggtgatcgcgtcgccgaatgacacccatgcgccgctggcgctggccgcgctggaggcgggcaagcacgtggtggtggataagccctttacgctggacttggcgcaggcgcgcacgctgattgcggcggcggaaaaacacgatcgcctgctgtcggtgttccagaaccgccgctgggacagcgactacctgggggtgaagcaggtgatcgaacaggggctgatcggcaaggtgacgcactttgagtcgcacatcgatcgttaccgccccgaagtgcgggtgcgctggcgcgagcagaatctgccgggcagcgggctgtggtttgatctggggccgcacatggtcgatcaggcgctgcagctgttcggtttgccgcacagcgtgcaggccaacatcgccacgctgcgccccaacgcgcaggttaacgactgggcccacgtggtgctcaactacccgacgcaccgcgtgatcctgcacggcagcatgctggtggcgggcggcgtgtcgcgctttaccgtgcacggcgagaaaggcagcgtggtcaaaacgcgcgccgacgggcaggagagccaactgctggccggcgtgacgccgggctcggcggagtggggcaaagacgacgacgcgatgagcctgtttatcggcacggagccggtgcgcacgctgccaacgccgaatggcgatcagcgccagtattacttccaggtacgcgacgccctgcgcggcgccggcagcaatccggttaccgctgcgcaggcgctggcggtgatggcggtgctggaggcggccaccctggcggcggaaaccggcgtcacccaaaccctgccgctcaccgaggcggagatcgccgcctggtaa

SEQ ID NO: 424007 - DNA, 750 bp, Serratia marcescens
atgcacaaagcggcacgacagcgccatttattggatttgctcagcgaacgcgggcaggcggcggtggcggaattggccggcgccatcagcgtttcggtcgataccgtgcgccgcgatctggccgatctcgagcggcaagggttggcgcagaaacatcacggcggggcgatcgcgctcgaaccgtccggcatgccgcgccaggcacgtgcggcgctgttgccgcaggtcaagcagcggctcggccgcgcggtggccgcgcagatcccgcccggcagcaccctgatgctggatgcgggcagcacgctgctggcggtggcgcaggcgctgcgcgggccggccacggtgatcaccgcttcgctggatatcgcgcagtgcctgagcgacaggccggagatcaacctgattctgctcggcggccagtgggatgcgcgccagcggctgttcgccggcagcgccaccctggcgttgctggaacgctaccgcgcggatatcgctttgctgggcgcctgcgcggtgcatgcgcagctggggctgagcgccggcgacgaggccgatgcagaggtcaaacgcgccatgctggccaacagcggcgagcgctggctggtggccgaccatatgaagctggatcgctgcgaaccgcatcacgttgcggatctggcgcagatccaacggctgtttaccgatcgcccgtgggacaacctggacgaacagtcactgattgaactttgtgtcgtcgccgacgaccgctag

SEQ ID NO: 424008 - DNA, 879 bp, Serratia marcescens
atgagcatcgatctgacgtttacagacctgagcgcgcgcgccgtgcaatacaacgcccgcgcttcggtggaagattttgacgcctgcatggcggaatacgccgccctggcccagcgcgccagggcgcagacgccgggcatttacgatctgcgctacggcatgagcgccgccgagcgcctcgacctgttcccggccagcgcacagcccgccccgctgctggtctttattcatggcggctactggcattcacagcgcaaagaggaagcttgctcgatggccgccgcgtttgcccgccgcggcgtggcggtcgccacgctggaatatacgctggcgccggaagcgacgctggcggagatcgtgcacgaggtgcgcagcgccgtcgcctggctctatcatcacggggcgcccttcggcatcgatccggcgcgcattttcgtcagcggcagttcagccggcggccacctgtgcggcatgctgatcgccgacggctggcagcaacgctatcgcctgccgcccgacgcgatcaaaggcgcgctggcgctgagcggcctctacgatctgcagccgctgtgcgatatctatatcaacgactggctgcacctgacgcccgaacaggcgcaagccctcagcccgctgtttttactgccggcgaaatcgcatgcgccgcagatcctgctcgacgtcggccagcgggaaacccaaggcttcaaaaaccagacgcaggcctattatgacgactgcctggcgcgcggcctcgacgtccagctgctggccgatcgccactgcaatcactttacgctggtcaacgaactggccgatgcggaaagcgcgatgtttcggcaggtgatagcgatgattgacgccacagcgcaatcttag

SEQ ID NO: 424009 - DNA, 135 bp, Serratia marcescens
atgttagaaatgattgaaagcttggccaccgtggtggtcctggtgccggtaatggtagccgtcttgctcggcgcgatttacggcctgggtgaagtgttcaacgtcttttccgctattggccgcaaaaacggctga

SEQ ID NO: 424010 - DNA, 471 bp, Serratia marcescens
gtgtctacctctacgcgatttgccgttgccatccatattctgaccaatatcacgctgtgccgtggccagacggtgcgttccgaagatatcgcgcgcagcgtcaacaccaacccgacggtggtgcggcgcatcctcggcgcgctggcggaggccgggctgacctattcacagatggggcaaggcggcggggcgctgctggcgcggccggcggaagcgatctcgttgctggacgtgtatcgcgcggtggaagatcaaccgtatttcatgctgcaccgtacccggcctaacgatgcgtgctatatcggccacgccattaccccggtgctggagcaagagtttgcgcgcgtcggtctcgcgctggaagccagcctggcgcaaaccagcatcgccgaaatggccgggcaggtcgagcggcgcgcaggctatccttttgtcccttgttcgccgcaatatcaagcggatacgcaataa

SEQ ID NO: 424011 - DNA, 552 bp, Serratia marcescens
atgaatgtattcctccgtaagaaaatcgaacaggtaaaaattcttaattttgcggcgctgaaaagtaattgctcgccgaatgcgcggccgccggcaaaaccgctggtctatactgggaagacgcctcgcggcggggcgcacactctggaggccgccatgtccgatctcgtttccgcatccggcaaaccggtgaaaatccccggccctgatcacccgatcaccttgacccgccatccgacgcgggtcgtggtgcgtgccggcggtcagaccctggccgacagccgccatgcgctcattctgcaggaagccagctatccgccggtgttttactttccgcgtgaggacgtgaatatggcgctgttgcagaaaaacgagcacgtcagctactgcccttataagggcgactgcagttatttctccctggcgcttaacggcgagcaggaggccaatgtggcctggagctatgaaatgccctacaacgccgtggtggcgatcaaggatcatctggcattttattccgacaaagtggcggaaatccgtgccgaagcctga

SEQ ID NO: 424012 - DNA, 213 bp, Serratia marcescens
atgaatattaaacgtgccgcaggtgtgttggtggtggtcatggcaacgctttccgttaccgcatgcgggcatatgtccaagcgcgatcgcaacacggcgatcggcgcgggcgtgggcgccgtcggcggcgctgtgctgaccgacggcagtacgctgggcaccctgggcggcgcagcgctgggcggcattatcggccaccagaccggccgttaa

SEQ ID NO: 424013 - DNA, 1623 bp, Serratia marcescens
atgaacataaaactgacgctgggccgcagggtaaaatctgcggcagcgctgccgcgcgcgtttggcttcggcaagagcatgggcctattaagcggcgtaatttgcgttatcgcgctattttctctgctgcaattgttttccaccgtatttatttccaatattttgcgcgacgccaaggttaacctggtgacgggcgacgccttgcatcgccagcaggcgacgatggatcgcgccaggctgtcgctactgacggccagcgacaccctgaaccgtgcgggcatctattatctgcaggacaaagccaccggctccgacggcagctggcacagcctgctggatgagtcgttggcggcgctgcaggcttcagagcaggcctttgcccggttcgagcgcttgagcgcggatgcgccggaagcgccgggcgccctgcaagacagctatcgcctgttctatgacggcctgaaagagcaggcgcaaggattgcagggcaacagcatcgatgcgtttttcgccgtgccgatccaggcgtttcaggcggatttcaacgagaagtatctcgcttaccaggcgctgaatgaacggcgtggcgatgacgtcaacgtgcggcagttggcggcgctggagcaggccagaacctttgcgctcggcgcgttggccgcgctggcgctgatcgccgtgggcgtttggttcggcgtctctcgctgggtgatcgcaccgctgcggcaggcgatcgcgcacctcaacgtactggccgccggcgatctttcgcggccgctgccgcctgggcgcgcgttcaaccgtgagatgcgtcagctgcagaccagcattggccatatgcagggcggcctgcagcgcctggtgagcgaggtgcgcgatgcggcgggcgggatcctgaacggcgtcgggcggctggcggacggcaatcgacagttgacggcgcagtcggcgaagcaggacggcgaattgcagttggcgaccgagcacgtgcggcaactggcggcgcgggtggaagaaaacggccaatatgcgcagcaggccagccaacgaaccgaacaggcccggcagtgcgcgggcgccggtgagcggatgatgcaaaccgtcaatgtttcgatgcaagggatcgtcaaccaatcggccgagatgcgcggcatcgtcgcgctgatcgacagcgtggcgttccagaccaatattctggcgctgaatgcggcgatcgaggccgcgcacgccggggggcacggccgcggctttgccatcgtggccaaagaggtgggcctgttggcgcaaaagagcagccattcgacgcgcgatattcagcagttgatcaaccgttcgctgcagcaaatcgatcaaggctcgcaggcggtggatctactgacgggcaacctgcgccaaattatcgatctggtgaacaaatgcagtgcgctgatgggggacatttccctggcgtcgctcaatcagggggagagcattcaggacgtgacggcgcgcatcgcggcgctgaatcaggtagcgcggcaaaccggcacggtggtgaacgcggtgaccgaggcttcgcagcggttacagggcgagtcggaacggttagaaaaagcgatggcgcgcttcaggctgccggcgcaataa

SEQ ID NO: 424014 - DNA, 1239 bp, Serratia marcescens
atgcgcacgatcacgctttgttttttgcttgtttcaccagtgagttatgcggccaccgtcgcattgcccaacgacgctgccgccaccgcggcaccggtaaaaaaaagccgtccggcattgccgcatattcattggcaaagcgaggataataaaaagaatattgatatcggcggcgcgctgcgtgccaattatcgctatgaagactggcacagcagcaattatcggaatccgccgcatttacgctttgacgcctttcgcatcgatgccgccggccagataaacgacgcgtttttcgatagcggattctggtttcaggatcggcgcaaatacgccatcgaccgcgcctatgtcggttaccacctgtctgaacgttccgccgtgcagcttggcgcgccgttcaaaccgttcggcctgatgccctacccgcagttcggctggtcgtacggcattccgttttacctcggctttggcgtcaacaccgggctgggcgccaaataccaatatcaacatgacgattgggccttcgacgccgcctactacccgcgcatgatgccgaccggcgtgcgttacgcccccgacgtcgccagctacgacgatctgaaaaacaccaactatgcgtcacagcacctgcagcgcaacgaaaaacgcgatcaggtaaacctgcggctgacgcgcgctttccatcagggcggctgggacaatgagctcggcggttcgctggcggcctcgcggctctataaccaggcgaccggcgataacggcagcttctgggcggcgggtttacatacgctggtgaattacgatccctggcatctgtccggccaggtgatccgctacggttacgacgccaaaggcccggccggggccaacaattcggtgatcctgatggggggcaacggcctgacgccggcctatctgatcccgtcgcaggccaccaccgccgccatcaacctggcgcgcgacgtcgacgtgccctgggggccggtgaaaaagctgcggttctacaacgactacagcgtgctatggaaagacaggcacggcggctcagattccaaaatgaacacgctgggggttcaggtgttcgccatgccggtgatgctgtgggtggatctgacctgggcgcagaacgccaacccgtggggcggcgtggaaaacgccaccggctggaccggcacccaatcctccggcagcaataaatggtattttcgcaccaacgtaaacatcggttactacttctga

SEQ ID NO: 424015 - DNA, 1650 bp, Serratia marcescens
atgctggtctgtttttttctgttggcgttcagggtcggttacctgcagctgctggagcaccagcagctggcggatcaggccgaccagcgttcgatccgcacccaggtggtgccgaccaaccgcgccatgatcaccgatcgcaacgatgaggcgctggcggtcagcgtgtcgtccaaagacatcgtgctggatccgaagcatattctcgattcccagaccgacaccggcaacgagcgctggcagagcatggccaacgtgctgaagatcccgctggcggacgtgcagcatctgatccagagcaatgcgcacaagcgtttcgtctatctggcgcgcaaggtggaggacgacaacgccgcctacatcagcaaactgcacctgaccggcgtcagcaccgagcaggatttcagccgcttttatccgatgggccaggatgccgccgggctgatcggcatcgtcggccaggacaaccaggggctggagggcatcgagctgggcttcaacccgctgttgcagggcaaaaacggcctgcgggtctatcagaaggacggcagcggcgcggtgatcggcgtgcttaaaagcgtggatccggtgccgccgccgaacgtgacgctcagcatcgacaaatttatccagtacgtgctctatgcgcagatccgcgacggcgtggtggccaaccaggccgactccggctgtgcggtgctggtcaagatcgacaccggcgagatcctcggcatggccagctacccgtcgttcaaccccaacaactatgccggcaccccggcgaaagacattcgcaacgtgtgcagcagcgacagcttcgagccgggctcgacggtgaaaccggtggtggtgatggtggggctggagcataagctgatccggccggatacggtgctggacaccacgccgtatcgggtgaacggtcacctgatcaaagatgtcggccactggtcgaagttgaccatcaccggcgtgctgcaaaaatcgagcgacatcgcggtatcgcacattgcgctggcgctgccggccacggtgctaccggcggtctaccgtagctttggcctggggcggccgaccgagctcggcatcggcaacgagagcagcggctatctgccgcagcatcgcgaacgctgggccgatatcgaacgcgctaccttctccttcggctatgggctgcgcgtgacgccgctgcagatggcgcgtgagtacgccgcgatcggttccttcggcatttatcggccgctgtcgatcaccaaggtgacgccgccggtgatggggcaacgcattttgccggcggatacggtacgctccgtggtgcatatgatggagagcgacgccttgccgggcggcagcggggtgagcgccgcggtgccgggctaccggctggcgatcaaaaccggtaccgccgagaaaatgggcccgagcggcaaatacgacggcggctacatcaactacaccgccggcgtggcgccggccagcgatccgcaggtggcgctggtggtgatggtcaacaacccgaaagccggcaagcacttcggcggttcggtggccgggccggtgttcggcaagatcatggcccaggtgctggagcacatgaatattctgccggacgcccagccgcttaacgtggtgtcgtcggtcaaggggtaa

SEQ ID NO: 424016 - DNA, 1926 bp, Serratia marcescens
atggccctgttaaaagaaacaattcgcgaccactctgcggaagagaggctgtttatccgccgggcaggcgtggcgctggcgctggtggtggtctgtttcggcgcgctgatcgtcaacctctaccggctgcaaatccgccagcacggcttttaccagacgcgctccaaccagaacgacatcaaaatgctgccgatcgcccccagccgggggctgatcttcgatcgcaacggcacgcctttggtgcgaaacgtgacactgtatcgtatcgagatcacacccagcaaaatcagcgacatggcggcactgctgcaggcgctgacgccgatcgtcgacctgacgccggaagacatcagcgcgtttcgcgacgacatgcaccacaacagccgctacaaaccggtgacgctcaaagccgggctgagcgacaccgaggtggcgcgctttgccgtcaatcaataccgtttcgacggagtgacgatcgatacctatcaacagcgtgaatatccttacggcgcccaactggcgcacgtgctgggctatgtgtcgaagatcaacgacagcgatctcaaacgcctggacaaggcagggttgagcgagaactatgccgccgaccgcaacatcggcaaacagggcatcgaggcctattacgaggccgaactgcacggcaccaccggctatcaggaggtggaggtggataaccacgggcgggtgatccgcctgctgaaggagcagccgccgaaggccggcaagaacatctacctgacgctggatttgccgctgcagcagtacattgaatcggtgctgaaggggcagcgcgccgcggtggtggtggaagatccgcgcgacggcggcatcctggcgatggtttccagccccagctacgatcccaatcctttcgtcaaaggcatcggctatcaggcctataaggcgctgctgaccaacccggatttgccgctgatcaaccgcgtcacccagggcttatacccgccggcgtcgacggtaaagccctacatggccgtttcggcgctgttcgccggcgtgatcacgcccaccaccacctttttcggcgccccgacctggacgctgcccggcaccgagcgccgctaccgcgactggctgaaaaccggccacggcatgctcaacgtcaccaaagcgatcgaggaatccgccgacactttcttttatcaggtggcgtatgagatgggcatcgatcgtatccaccactggctgagccagttcggctacggccagtccaccggcatcgatctgaacgaagagtaccgcggcgtgctgccgagccgcgactggaagctgaaggtgcacaaaaaagggtggtatcagggggatacggtttcggtgggcatcggccaggggtattgggtggcgacgccgatccagatggtgaaagcgctgaccacgctgatcaacaacggccaggtgaaaacgccgcacctgctgtattcgctgcagcagggcaaccgggtgacgcgctacccgccgccggcgaaaacggcgcagatcggcgatccccattcgccttactggggcatcgtgcgcaatggcatgtacggcatggccaatctgccgaacggcaccgggtacaagctgttccacaccgcgccgtatcagatcgccgccaaatccggcacttcgcaggtattcagcctgaagcaaaaccagacctacaacgccaaaatgatcccggtgcggctgcgcgatcacatcttctatacgctgttcgcgccttacaaaaacccacgggtggcgatggctctgatcctggaaaacggcggcggtaacggcgtggtggcggggccgactgcccgcgccatcctcgaccatatttttgacccggccaacgcgccgcagcccggcgatgcggggcaaagtaaaccgcagttaaacgacagtgccgatgtgcaacggtga

SEQ ID NO: 424017 - DNA, 282 bp, Serratia marcescens
atgagtaccattgccaccggtttagtcatgatgcgctgggagttgctgagcgccgtgatgatgttcttcgccagccagttaaacgtcgtttgccgtaaaaccagccgtaacggcatggcgttcatgttcagcagcctgggcctgtttaccgcctgctggttcgtgatgggcctgatgggcatccacctgaccctggaagctttcacccaattctggtcatcggcctgggatcgctatgtggacgtggtcagcaccatgccggtcgattggccgatgccgtaa

SEQ ID NO: 424018 - DNA, 450 bp, Serratia marcescens
atgaaaaaagatcaccctgaagacgtgacgctgctgcgcacgcagttaatgtcgctggtgcgccgtatgcggcgcgaatcgcgtagcgacgaaaaatcctgggcccagctgatgctgttgggggctatcgatcgccacggcggcgaggcgacgccgtcgctgctggcggaatcggagcgcatgcgttcctcaaatctggcggccgcgttgcgtgagctggaggccgatgggctgctggtgcgcacgccggatgccgaagacaaacgccgggtgcgggtgcgcctgacgcacgccgggcttggcctgctgcaggagagccgtacccggcgcgaggcgtggttgctggcggcgatggaaaactgtttaacggagcgggagcaggcgctgttgattgaggcgggggccttgatggcgcggctggcggcggcgccgtcagcggaaacggaataa

SEQ ID NO: 424019 - DNA, 1200 bp, Serratia marcescens
atggaagcgtggaaagtcaatctgatctcggtctggctcgggtgtttcttcaccgggctggcgatgagccaaatcctcccttttctgccgctgtacgtcgaacagctcggcgtcagcgatcaccaatccctcagcctgtggtccgggctggtgttcagcggcacctttttggtctcggcggtggtgtcgccgctgtggggcagcctggccgaccgcaaaggccgcaaactgatgctgctgcgcgcctcgctgggcatggcgatcgtcatcgcgctgcaggggctggccaccaacgtctggcagctgttcgcactgcgcgccctgatggggctgacgtccggctatattcccaacgccatggcgctggtcgcctcgcaggtgccgcgcgataaaagcggctgggcgctgggcacgctttctaccgggcagatctccggcgtgatcgccgggccgctgctgggcgggctgatggccgaccatctggggctgcgggtagtgtttttcgtcaccgccgggctgatgttcgtcagcttcctggtgacgctgtttctgattaaagagcggcgcatcacggtgaaaaaagcggatcagctgagcggcaaggcggtgttccgttcgctgccctatccgacgctgatcctcaccctgttcgtttgcaccctgatgatccagctggccaactcgtccatcagcccgatcctgacgttattcattcgcgagctgtccggcgacgtcagcaatatcgcctttgtcagcggcatgatcgccgccgtgcccggcattgcagcgctgatctcggcgccgcgcctcgggcggctcggcgatcgcatcggcaccgcgcgcatcctgatcgccgcgctgctgttcaccaccggcctgttcgccgtgatggcctgggtcaatacgccgctgcagctgggcattctgcgtttcctgctcggcttcgccgacggcgcgctgatgccggcggtgcaggcgctgctgctgaagtattcctcagatcaggtgaccgggcgcatcttcggctataaccaatcctttatgtacctgggcaacgtggttggcccgctgctgggatcgggcatttcggcgatgatggggttccgctgggtgttcgccgtgacggcggtgttggtgctttgcaatgcgctgcagctgcgccatcagttcaaaaaagtggagagccaacgcgcgggataa

SEQ ID NO: 424020 - DNA, 492 bp, Serratia marcescens
atgaaaaaggcattgatcacctgtgcgatcgtcggcggcttgctggcgagttacccggcgctgtcgacggatcaggcggcgtctgacaaatcggccggcaaaggcggttatcatcatgctcagcagaagctgaaggtggtggaagacctgtacgcgggctttttcaatcgccacgacatcggcgtggcgcagaagctgattgtggaaaactacaagcagcataacccgttcgtcggcgacggcatcaagccgttcctggatttcttcagccagacctttaaagacaatccgcagtacagcgccaaaatataccgcagcgcggtcaacggcgatttggtctacgttcacgtcaaataccaaaataacccgcaggatcgcggcactgccagcgtggatatttaccgggtgaacgatcaggggaaaatcaccgagcattgggacgtcaatcaggatgtgccggaaaaatcggccaacgacaataccatgttctga

SEQ ID NO: 424021 - DNA, 453 bp, Serratia marcescens
atgaaaacagtgaagagaacgggcatcgcgctggcgatagccctgactttccccctcgcattacccgccgctacggcggcgcaaccctccctgactaacagtaaggcggcaacgatgacggaaaaacacgggcagttcattgcggtcggtaaagtggtgcaggtgaccttcggcgatttcgccttcaagctggattttaccgatgacaagaccatgacgttcaccggtatcggtgaggcgtcgcagggcatcaccgacaccgtgcagtacaccgcggtggagatccggccaaaggtctatatggtctattggcatgagccgcagtccggcgacaacgtgacgcatatcgaggactttgagcgcggcgaggtgtacaccaacatcgccgccaaggatggcagcttcacccatctgaaagggcagctgaaaatcgtaggtcactcaggaaaataa

SEQ ID NO: 424022 - DNA, 435 bp, Serratia marcescens
atggatcaacagtgtgccgggctgggcgtgttgtttgtcgccggattcgggcccatcacgcgtgagagcgacgagagcaaggcgttttatgtcgaggcgctggggctgccgctcaagccgatgccgggcaacgaaacctatctgctgtcggagcaaggcgcgctggacggcgtaaagcatttcgccctgtggccgctggcgcaggcggcgcagtcctgctttggcgacgatcgctggccggcggatctcgcgctgccgcaggcgtggatcgagttcgacgtggccgacatggcggccgctacccaggggctggtcgatcgcggttatcggctgttggtcgccaaccgcgaagagccgtgggggcagagcgttacccgtttgctcagcccggaaggggtgctggtcggcgtcacccatacgccctggctgcgttaa

SEQ ID NO: 424023 - DNA, 870 bp, Serratia marcescens
atgtccaactatcaggcgtttgaaacactgcgtgagcacaaggcgcggctgcacggcagcgtgctgctgggcaccggcgtggagctggccgcctggtccaactgcaacgatcgcgtcacgcaggaaagcgccgaccaccataccctgagcctgtacgtcgccgacggctatgagtgctaccagcaggtgccgggcggctggcgcaacggcggcgggccggatcggttctgcatcatgccgcgccaatacgcctccacctgggacgtgcgcagcgatctgtcgttcgtgcacctgtattggaccgacgggcatctgcggcagctggcggagcagacctgggatcgcagcccggcggcgatcaacgtagagccgcgcagcttcggcgaagatccgcagatcacgctgctgtatcgccagtttttgctcaactgcgactggcgggacagcgccaatctgctggcgctcagcagcgcgtcgaacctgctgatgtcgcatctgatccagcgttacagtcagttgcagtggaagctgccgcaggcgcgcggcggcctggcgcctgcggtggccaggcgggtgcgggaatatatcgaaaaccacctcgatcggcctttgctgttggcggatctggcggcgcaggccgggttgagcgaataccatttcgcccgcatgttcaagcacgccaccgggctggcgccgcaccagtttgtgatgcgcgcacggctgcagcgggcggaacggctgctgcggcacagccaacagccgatcaccgagatcgcgctggcgtgcggcttcagctccgccagccacttcagcaaccgcttcaaggcggcctatggatttgctccgctgcaggtgcggcaggggcgctaa

SEQ ID NO: 424024 - DNA, 918 bp, Serratia marcescens
atgaatgcgctgttgtacctcgccgtagtgctgatttggggcaccacctggattgcgatcaccctgcaacaggaaggcccggtggccattcccgtctcgattgcttaccgcttcgccatttccgccgcggtgatgttcgccgtgctgttgctaacacgccgcctgcgccgcctcgccccgcgcgatcatctgttctgcgtgctgcagggctgctgcgtattcggcttcaacttcttctgcttctaccacgcggcggcctacatcagcagcggcctggaatcggtgatcttctcgatggcggtgttgttcaacgccctcaacagcctgctgtttttccgccagcgccccagccccaacctgctgccggcggcgctgctgggtttgaccggcatcgtggcgctgttttggcaagatctggccgccacccgcatggcgccggagctgctcaaaggcatcggcctgagcgcgctcggcacctacggcttctcgctgggcaacatgatcagcacgcgccatcagcgccgcgggctggatatcttttccaccaacacctacgccatgatctacggcgcgctgctgatggcgctgatcgccttggcgcagggcgcatcgttccagatcgaattcagcagccgctatatcggctccctgctgtacctggcgattttcggatcggtgatcgccttcgccgcctacttcagcctgctcggccgcatcggcgccggcgcggcggcctacagcaccctgctgttcccgctggtagcgctgaccatctcaacgatctacgaaggctatcagtggcacttcaacgccgtgctgggcctgtgcctgatcctactgggcaacctggtgatgttcgccaagccggggctgaaatggcgacggccgggtatcgcgaaacaaaactcaaccctttga

SEQ ID NO: 424025 - DNA, 897 bp, Serratia marcescens
atgctcagaagtgatgatgtgacaccccgcgcctacaaacaggtggacgtgtttacccgtacgccgctgcagggcaaccccgtggcggtggtgctggaggccgaggggctgagcagcgcacaaatgctggcattggcccgttggaccaacctttcggaaaccacctttgtgcttaaaccgacgcacccggcggcggattataaggtgcgcattttcaccaccgaaaaagagctgcccttcgccggccacccaacgctgggcaccgcccacgccctgctggaagccggtttgacgcctaaacggcctgggatggtgatgcaggaatgcggcgtcggcctggtggcggtcgatatccagcaggaaggtacattggcgttcgccgcgcccgaagttgagctccgcccaatggcggctgaggaaacagaacggctgatggccgctttacggcccgcggtgatggcagcaagccctctgccggtgattgccgagatgggcattcgctggctgatggtgcgcctgccggacgcacaatcctgcctggcggtgacgccggatcaggccacgattaaacgcctgcaaacgtcttgcaatgtggatggcgtggtgatttatggcgcctgctccgcaaccgaaccggccgattacgaaatgcgcgcgtttatggtggaatgcggcgccttgattgaagatccggtgaccggcagcgccaacgcctgcctggcgcgcttattgaaggccaaccactttcccgacggcagccagaccgcacagggttaccaggtgcgccagggcacccaactgaatcgagatggccgcgtgagcgtgcgctttattgacggcgaaccctggatcggcgggcagtgccgcaccctgattgatggcacattgggtatttag

SEQ ID NO: 424026 - DNA, 651 bp, Serratia marcescens
gtggagtccgataagaattattataaaggtacatgtgaactcatttctggtgaagggaggatctatactgagtttaatggcgatgttgcaacaagacaaataactataataaatgatttgtattattcatcctcatctttggaagattggcacgaagatataggttttttactttatgatggtaagaaaagtgagcttgatctttctgagtcagagttgataactagtcttgaatttgaaagtgaatggaataagacgatcacctctgatgttttgaatgattatgtcagttttagctatggtgatgcatctattccttcgtcaaaatctaaaatgatcattcatattgtgaataacaagggtaagtggggaaaaggttttgttgttcctctatcaaaacgctatccagcagtaaaggaagaatatttaaagtggttctctgaaaaaaaggatttttttctcgggaatgtacaattcatctgtgtgagcgaaaatgagcggatatatgttgcaaatatgttggctcaggatggactaaagaaaagtaaagatgataatgctcagtatgtttcatatgaagcacttaaagaatgtctaagtctggtttctgattatgcattaaaaaaaggcttagtatacaattgcctatga

SEQ ID NO: 424027 - DNA, 402 bp, Serratia marcescens
atgaaagaatttattgagcatgtaactaggagtagcgtcagtgatataattgtcacgggttatatagatggggaaacagtaccagtgtttcatccgatgtatgacagagtttactttatatcagatgaaactatatttgaactgtatattgatgatgatgggattgttaattcacgtttagttgaaaacatcgttccatggtttgaggtggatgaggatgataagttttccatgatgtcaatttatttccagtcatttaaaactgagcaggaggttagcatagttggagtaaattatagtgacgatccgttctcaggggttttcttaaaatataaggcaggtgacgatgagcggctattgtctttagaatcaaataattttttcggttttcttatttcatag

SEQ ID NO: 424028 - DNA, 1125 bp, Serratia marcescens
gtgtacgatttggcggataacctgctaggcgagcgcagcccgcagagcgacatcgacgcgcacctgccgctggcgccgatcgccgataaccggctgacgcactggcaaaaactgttttaccgttacgacgcctggggcaacctgatcagccggcgcaacggcctgtacgaacagcactaccgctacgacgccgacaatcggctggtgcaggcgcacggccgcggcccgcagggcgagttcgaggcgcagtatcattacgacgcgctgggccgccgcagccgcaaggcggtgcgctacaagggcaaaaccgaacagacgacccgtttcctgtggcagggctaccggttgctgcaggagcagcgcgacgacggcagccgccgcagctggagctacgatccggccagcccgtggagcccgctggcggcgctggagcaggcgggcgacagccgctcggcagatatttactggtatcacaccgatctgaacagcgcgccgctggaagtgaccgacgcggcgggcaacctgtgttggtccgggcaatacgataccttcggcaagctgcagggccagacggtggccggcgcggcgaagcggcagggcgcgcagtatcagcagccgctgcgctacgccgggcaatatcaggacgacgaaagcggcctgcactacaacctgttccgctactacgaacccgaggtggggcgtttcaccacgcaggatccgatagggttggaaggcgggctgaatttatatgcatacgcgaaaaatccgctcatttgggttgacccgttaggccttactagttgtagcattcaacctggtaaaaactttaaagatcactttattcggcataaaggtatactagaaggctatttagggaaaaaatatccaaaatggaaagtggatgaaggtgctgagttcttgagagatgttgaaaagttacgagatagcgggaaactggtccatgtaggacaagggacaattaaaaaaggtcagcctgtgatggagatatatagaggcgaagggatgacctatatttctaaaaagctgtctgatggtagggaggaatttgtaactcttattgagtctggcaaaggcatggatcttgggattgttttttcaccatag

SEQ ID NO: 424029 - DNA, 354 bp, Serratia marcescens
atgaagaaattatattttttaaaatatggcagtgttatatcaaaaaaagaagtgagcaaattactggacgataaatgggatgtaacttgctcggagtatgacagttcctattttggtgtttactttgcatatactggcctttatgcagacaagttaaccattactgataattatattcctcactctaatgagtggttagaggaagataacaaagagtttagcacgataattaaggtgtctttcactaatgggaagaatccagaaaaactcagcaggtacaaattcttgaagaatgcgtttaatcaacttgatggattatcgatcataagtgatgagtgcatcgaagaagagtga

SEQ ID NO: 424030 - DNA, 4299 bp, Serratia marcescens
atgaccgaagcggctcgcgtcggcgataccatcgggcattcccatgccctggccggcatgattgccggcaccattgtcggcggcctgatcgccgccgcaggcgcggtggcggcgggtgcgctgttcgtcgccggcctggcggcttcctgtatcggcgtcggcgtgctgctcatcggcgccagtctggcggtggggtatctcaccggggaggcggccaccgcggcgcgcgacggcattgccgacgccggcgccggtagcctgacccccaaaggcaatatcgtcaccggctcccccaacgtcttcatcaacggcaaacccgccgcgctcgccaccaacagccaggttgcctgcagcgacgacggcccgagcatgcagatggcgcagggctccgacaaggtcagcatcaacggccagcccgcctcgcgcgtgggggacaaaaccaactgcgacgcgcaggtgatggaaggttcgcccaacgtgtttatcggcggcggcaccgtcaccaccttgccgatcaagcccgaagtgccggattggctgtacaaggtctctgacctgacgctgctgttcgccggcttggtgggcggcgtgggcggcgccgccggcaagctgggggcgctcggcaaactgctgggcaagctgcccggcatcaacaagctggcgcgcatcgcctgccgcgccggcaccctgatgaccgcgaccgccgccgtcggcattatcgcccggccggtggatatcgtcagcggccagaaattcctcgacggcgaagacgatctcgatttcgtgctgccttcgcgcctgccggtcgcctggcagcgctattggcgcagcggcaaccccggcgacggcgtactgggccgcggctggaacctgttctgggagagcagcctgcagccgtatcaggacggcctggtgtggcgcgcgccttccggcgacttcgtcgctttccccagggtgccgcgcggccacaaaacctactgcgaagccgaaaaatgctggctgatgcacaacgacgacggcagctggcagctgtttgacgtcggcgaacagattttccactacccgccgctggcgggcgatcagccgagccggctcagcatgatcaccgacgcgatcggcaacgccacctcgctgttttacgacgacgaggggctgctgagcgaactggtggacagcgccgggcagcgcctgatgtgccgctatgcgcagggccgcctgcgcgaagtggcgctgcaaaccgccgaaggcgaacggacgctggcgcgctacgattacgatgagcagggccaactgacgacggtcagcaaccgcgccggtgaggtgacgcgccgctttggctggcgcgacggcctgatgatcagccaccaggacgccgccggactgctgaacgaataccaatggcaagagatcgacggtgtgccgcgcgtgacggcctaccgcaacagcgccggagaatcgctggagttcggttatgacttcgccggtgggcgccgcagcgcggtgcgcggcgacggcaaacgggcggagtggcggctggatgacgacgacaacgtggcgcagtacaccgacttcgatcagcgccgctacggttttatctaccaacgcggcgaactgtgcagcgtgctgctgcccggcggcgcgcagcgccagagcgaatgggatccttacggccgcctgctgtcggagaccgatccgctcggccgcgtcactcgctatcaatattcgcgcaacagcggccggctgttcgccgtcgcgtacccggacggcagcagcgaagcgcagcactgggacacgctggggcgcccgacgcgctatgtcgatgcgctgggcaatgccacgctgtaccgctacccggatgacgaagagagcctgccgggcagcgtgatcgacgcgctgggcggggaagtgaagctggagtgggacgcccgcggccagctgacgcgctacaccgactgttccggcagcgtgacagcttatacctacgatgcgctggggcaactgacggcgcagaccgatgccgaaggccaccagacgcgctacctatgggataacggtgggcgcctgcacaccctgatccacccggacggcggcgaagagcgctttaactggaatgcacacggccagctggccgagcatcaggacgcgctgggcagcctgacccgctggcagtacaacgccctggggctgccggtcagcatcaccgatcgcatcaaccgcacacggcgctatcactacagcccgcagggctggctgacgcggctggagaacggcaacggcggcgaataccgcttcagctacgatgcggtgggccgcgtgctggccgaagagcgcccggacgacacccgccactattatcgctacggcgcggccgggctgctggaggagcaccgcgaggtcggcctgcctggcagtgcgggtgagctgacgcagcgcgaacagcgcttccgcttcgacgaggccgggcagctggtctggcgcggcaacgccagcgcggaatggcattaccgcttcgacgccatggggcggctgcgcgagctgaaccgcctgccgacggcgagcggcgcggcgctgggcattgagccggacagcgtgcagatgcgctatgacgccgccgggcggctgctcggcgagcagggcgtgaacggcgagctgcaataccagtgggatgcgctggccaacctgcaggcgctgacgctgccgcagggcgatcgcctgcagtggctgtattacggctccggccacgccagcgccatcaaattcaaccagcaggtggtgagcgagttcacccgcgatcgcctgcatcgggagaccggccgcagccagggcgcgctgcagcagcagcggcgttacgacgccatgggccgccgcagctggcagagcagcgccttcggccacgacaaactgacccggccggaagacggcgtgctgtggcgcgcctatcgttacaccggccgcggcgagttggccggggtgagcgacgcgctgcgcggcgaagtgcactacggttacgatgccgaaggccgcctgctgcaacaccgcgaacccaatcagggcaaaccgggcgcgcggctggtgtacgatctggcggataacctgctgggcgagcgcagcccgcagagcgacatcgacgcgcacctgccgctggcaccgatcgccgataaccggctgacgcactggcaaaaactgttttaccgttacgacgcctggggcaacctgatcagccggcgcaacggcctgtacgaacagcactaccgctacgacgccgacaatcggctggtgcaggcgcacggccgcggcccgcagggcgagttcgaggcgcagtatcattacgacgcgctgggccgccgcagccgcaaggcggtgcgctacaagggcaaaaccgaacagacgacccgtttcctgtggcagggctaccggttgctgcaggagcagcgcgacgacggcagccgccgcagctggagctacgatccggccagcccgtggagcccgctggcggcgctggagcaggcgggcgacagccgctcggcggatatttactggtatcacaccgatctgaacagcgcaccgctggaagtgaccgacgcggcgggtaacctgtgctggtccgggcaatacgacaccttcggcaagttgcagggccagacggtggccggcgcggcgaagcggcagggcgcgcaataccagcagccgctgcgctacgccgggcaatatcaggacgacgaaagcggcctgcactacaacctgttccgctactacgaacccgaggtggggcgtttcaccacgcaggatccgatagggctgcgcggcgggttgaacctttatcagtatgcgccgaacccgctgatgtgggtggatccgttggggttatctgtagaaggagttccacatggctttaatagtttcggccaatttaaacaattcggtgaagcattacaggcaggaatgagtaaattaggatatcccggcacagtttcatatatgcaaggaagctccgtatcgggggtaagtttctctacaggtcaaccatttgatgttggccgtgttagtgattttgacgttgctatttcacatcctgagctatatcaaaaagcagaacagctgggaataggaaaaggagggcgcactggaccaattgatatgggtagtgaaatggctaagaaattaggtattgatgatacattgcaaaaattatctaaaatgtcaggaggtagacctgtgaacgcaatggtctttgagtctgctgctgaagttaaggctaaaggaaagggaactagaatacctggtaaatgtggtggataa

SEQ ID NO: 424031 - DNA, 432 bp, Serratia marcescens
atgtccgctttatcccgctgcgctttcagcgaaggcagcgtcgctttgccggaaggctatgccgatcgcaccgtcaacgtgctgttggccggcgatgatgtttccccctcaatcaatatttcccgcgatgcgctgcagccggcggaaaacctggaaagctacgtcacccgccagctcgatgcgctggcgcaggggctgaaaggctgggcgttcaaaagccgcgagccagcgacgctgggcgatggattaaccgccggtgaatgggtgcgcgccagctacctgcgcgacggcaagcgcatctggcaaaaccaggtggtgttcgcgctggcggagggccgggtgctggtgttcaccctggcgatggcgcgcaagctgacgccgcaagatgacgccctgctgcagcaggtgctgagcagctaccgggcggcataa

SEQ ID NO: 424032 - DNA, 1002 bp, Serratia marcescens
atgctgagattcacccgtcgcgcgctgctgtgcgccacgctggccgcgttccccgccgccgccgaaacgcctaagttcggcccggagctgcagggttttcactacccttatccgttgcagcagttcagcttcacctcgcaggggcagccgttaaaaatgggctatatggacgtgccgccggaaggcgccgccaacggccgcaccgcgctgctgctgcacggtaaaaacttctgcgccgccacctggcaggacaccatcaaggcgctgagcaaggccggttaccgcgtcatcgcgccggatcaaatcggcttttgctcctccaccaaaccggcacattatcagtacagcttccagcagctggcgcaaaatacccacggcctgctgcagaacctgaaaatcagtaaggccatcatcatcggccactccaccggcggcatgctggccacgcgctacagcctgatgtatccgcaggcagtggaacggctggtgatggtcaacccgatcggcctcgaggactggaaggcgaaaggcgtgccgtggcgcagcgtcgatcaatggttcgagcgcgagctgaacaccaccgccgagggcatccgcaactatgagcagcgcacctactacggcggccgctggaagccggagtacgatcgctgggtggatatgcttgccgggctgaacaacgggccgggccatcgcctggtggcgtggaactcggcgctgatctacgacatgatcttcacccagccggtgtactacgagttcaaggatctgcaaacccccaccacgctgatgatcggtaccgccgacactaccgccatcggcagcgatatcgccccgccggcggtcaaggccaggatcgggcattatgacgtgttaggcaaacaggcggcgaagctgatcccgcacgccacgctgatcgagttcgccgggctgggccatgcgccgcaaatggaggagccggagcgtttccaccaggcgttgctcaaggcgctgcagccctga

SEQ ID NO: 424033 - DNA, 651 bp, Serratia marcescens
atgcgacagattattgccagcgccttcgtcagcctcgacggcgtgatgcaggcgcccggcgggcaggacgaagaccgcagcggcggctttcgcttcggcggctggacagccccctactgggatgacgccattgcggaaacgatgggcgatcttttctctgcgccgttcgatctgctgctggggcggcgcacctacgacattttcgccggctactggccgcagatcaccgacgaggccgacccgttatccgccgatatcgcccgcgtgttcaatcaggccaccaagtatgtcgccacccaccacggcgagacgctggcgtggcagaacagccagtggctggggcgggacatcctcgcccggctgcgcgagctgaaacgcgcgcaggggccggtactgctggtgcagggcagcagcacgctgatgcaacagctgctggccaacgatctggtggacgaactgcgcctgctcacctacccggtgctgctcggcggcggcaaacggctgtttgatgacaacgcggcgccggcggccttcacgctggcccaatcggtggtctcgcccggcggcgtgatcgtggcccactaccgccgcgccggcgcggtggcaaccggctccttcgtggcggaaagcgcggcggtggcccagccgtaa

SEQ ID NO: 424034 - DNA, 1617 bp, Serratia marcescens
atgagcagccgccacaacgatattttgcaagatgacgatgagttcaccagcctgtccgccacatcccccaacgatcataactatcagttttactatcaccagcccggcagcctctatgatgggttagggtacggcgcgctgtttacgctggacaacgccaacctgtacagcaaccagcgcggcggagccgccatcaacaacctgggtaaaatccgcgataacttcagcttcgatcgcgccgccgatcagctgacacggccgggcctgacgcacaacggcgatcaggtctatcaccagccggtggcgctgacctattccttcctgacgcagagcgcgctgaaccgcatcggccagaccggtgacggtgacaaggggctgcaaccgctgactcaggcggcgcagactcaggcgctgaaatcgatgcaggcctgggccgacgtggcgaatgtgacctttaccgaggcggcgtccaccgatatcaaccaccgcgcggacatcaccttcgcatacttcacccagcgcgccgacggcagcaccgccgccggcagcggcccgaatgccattaacgcgtacgcctattacccgccgagctccaagccgggcagcgataacgcctttgccggcacggtgtggttcaacaaaaacttcgccacccatcaggcgccggttagcggtgacttcagcagccagaccttcacccacgagctggggcatgccctggggctggcgcacccgggatcttatgacgcgtcgttgggcaacccgagctaccagaacgatgccgcttactatcaggattcgttgcaatactcgatcatgagctatttcaacgccggttacaccggcgccgacaccaaaggggtgtatggctatggcccgatggtggatgacatcgccgcgatccaaaaattgtacggcgccaacatgagcacccgcaccggcgatacggtgtacggcttcaactccaacaccgggcgcgatttcctgaccgccacggcggacaacggcaaaccggccaacttcgcggtgtgggacgccggcggcaacgacacgctggacttctccggctacagccagcagcagatgatcaacctgaacgacggcgcgttctccagcgtcggcggcggcacgcagaacgtcgccatcgcgcgcggggcgatcattgagaacgccatcggcggcagcgggcgcgatgtgatcatcggcaacgatcaggacaacctgctggcgggcaacgccggttccgacatcctgtacggcggcctgggggcggatcatctgtggggcggcaaagacgccaacaacttcaccgactatttcgtctatctcaatgccaaagagtcctcggtggcggcgttcgacgtgattgaagacttcgagcacggcatcgacaagatcgatctctccggcctgcgcttcaacaacagcctgagcgagctgcgctttatcgacagcggcagcgccttcagcggccagaaaggcgagatccagctaaacttcgacgccttcaacggcaccaccgatctgttgatgaacacccaaagcaacagctatgccgccgacttcaagatccacgtggtcgggcaggtagagcagagcgatattctgtttgcctga

SEQ ID NO: 424035 - DNA, 411 bp, Serratia marcescens
atgccaaccttttttcttatgcgtgccttgcgccgcgccagcctgacgggagtcgttatgagcgtattgtgcagcagtgccctgggcagttcactgccgttgctggaacccgccgcgctgaagggcgactggcagctcgccgccatcggcgacggtaaagccgtctgcgaggtgcagctgagcgacgaagcggtggccaacaccaacgccttccgcttcagcgcctccgcccagtgcctgcagccgctggcgctgcaaacgttgccggtcgcctggcggccgacgccggacggcatgacgctgaccgacgccgaaggcggcatggtggcgtttctggccctgaccgcgccgaagcgctatgagctgatcgaccgcaacggcccttcacgctttatgctgatcccgcgctaa

SEQ ID NO: 424036 - DNA, 522 bp, Serratia marcescens
atgagcggggttttaattgcgctggcggtgatctttaccgagctttctctgctggcgtttggcggcggcatgaccattctgccggagatgcagcggcaggtggtggaggtgcatcggtggatgagcgcccaggagttcagcgcgctgttcgccatggcgcaggccgcgccggggccgaacatgatgatcgtgccgctggtcggctggcacgtggccggttgggcggggctgctggtttcttcggtcgccaagttcgggccgtcttccatcgttacgttgctggtgatgggcgcctggcggcgctttaaggatcgcccgtggcgccgcatcgtgcaggccggtctggtgccgctgactgtggggctggtggcggccagcggcatcttgatcgccgaggcttctgcgcccagctggcggttggcggcgatcgtggcgctggcgacgggattgagcatgagcaagcgcctccatccgctgtgggtgctggcgggcggcgcgctgctcgggttgctgttcgcctga

SEQ ID NO: 424037 - DNA, 567 bp, Serratia marcescens
atgtcagatatcaatacgttaaaaccgcacccggcggcagcgccgggcaacgcggagctgtttgtgggctttctgtggctggggctgatcggcttcggcggcgtgctgccgttggcgcgcagcatgttggtagagcgccggcgctggttgagcggcgaacagttcaccgagctgctggggctgtgccagttcctgcccggcggcaacgtgatcaacctgtcggtggcggtgggcatggaatttcgcgggctgcgcggcgcgctgtgcgccttgctgggcctcatcagcgcgccgacggcgatcgtggtggggttgggcgtggtctacgcccgcttccaaaacgatccgcacgtgcagcatgtgttcgccgggctggccgccgccgctgccgggctgctgctgtcgaccgggatcaagatgctgctgccgctgcgcggtaaatggccggcgctggcgatcgtcgcgctggcgctgatcgccatcgcctggctgcgcctgccgctgctgccgaccatgctggtgctggcgccgctgagcattctgctgatgtggcggtggccgtcatga

SEQ ID NO: 424038 - DNA, 906 bp, Serratia marcescens
atgatcgaactgcgtcgcctgcgggcgttcgtcaccgtggtggaagaaggcaacatcacccgcgccgccgagcggctgtttatccagcagccgccgctgacccgcctgctgcaggggctggaagacgaactgggcgtaaccttgttgcagcgcctgccgcgcggcgtgcgcgtcaccgaggcgggcggcgtgctgttcgaagaggcccgcgccctgctggcgcgcgccgaacgcctgcgcgaagcggtgcagcgcgccgcccgcggcgagcaagggcacatcgccatcggcttcaccagttccgccgcgctgcacccgttcgtgcccaacctgctgcgccgctaccgcgacatcctaccgggcatcactacccagttggaagaagccggcagcggcgaactgatgaaggcgttgctggaacagcacctcgacgccgccttcgtgcgctcgccggccaacggcattcccggcctgagcgtggagccagtgctcagcgagccgatgatcgtcgccctgccgctgggccaccggctggcgcatgagacgcagcaaccgctgccgctggccgaactggcccacgaagcgtttattctctatcgccgcccggccggccaggggctgtacgacgccatcctggccgcctgccaccgcgccggcttcagcccgcgcatcgtgcaggaagcgccgcgcctgccggccaccctcagcctggtcggcgccggactggggctgtcagtggtgcccggctcgatgcggcggctgggcggcgacggcatcgtctaccgcaccctcgccgaagaagcgcagctcagcgccccactttacctggcgctgcgccgcagcccggcttcgccgatcgtcgagcgctttcgtcagctggtgttggagaccgtggcgcagtcttaa

SEQ ID NO: 424039 - DNA, 1170 bp, Serratia marcescens
atgctatcgcgtcgtgatatattgaaagtctccgccgtcagcgcggccgccgccggcatgatcggcggcatcgtaaaaaatgccgctgccgacgatcatcgcaatatcgtcccccccagcagctatcagccgcctgccgatgcgcagcatctctataaatacaaattcaccgacagcaagaagcgcagcctgcccagcggctgggcgcgcgaagccaccgtcgagcaattcccgatctccgaaggcgtggcgggcgtggacatgacgctggagccgggcggcgtgcgcgagctgcactggcacgccatcgccgccgaatgggcgtttatgctggaaggccatgcgcgcatcaccatcctcgatcccgagggcaaatgcgaagtggcggatttcggccccggtgacgtgtggtatttcccgaaaggctatggccattccattcaggcgctggcagatggcgcgcattttattctggcgttcgataacggccatttctccgagttcggcaccttcagcattaccgattgggtggcgcatatgccgaaagaggtattggaaaaaagcgtcaacatgccggcggcggtattttccaaggccaaacagggcgaggcttatattgtcgacggcgccgttccgcccaccttgccattgccgaaaaacgacggcggattaaataacaccccgctgacccaccgctatgaattaatgaagcaaaaaccgttctttgaaaatgacgccggcagcgtccatttggtgtcatcgaaagaatttcccatttccaccaccatgaccggcatcatcgagatcgtgaaacccggcgcgatccgggaattgcactggcaccccaatgccaacgaatggcaatactatattgccggcaaaggccggatgacggtgttcagctcacacggccacgcgcagacggaagagtacgccccttcggacgtcggttacgtgccgcagggcttcggccattacatcgagaacatcggcgatgaggatttgaaggtattgatcgtgatggacaacggcatttatcaggacatttcgctatccgactggctggcgaaaaccccggcctacctgctggcggacaacttcaataatcagattgaggactggcaggatagaccgaaagacaaacgggtgatgtcgcgccgcagccgctga

SEQ ID NO: 424040 - DNA, 411 bp, Serratia marcescens
gtggaaaatgaaaatttaacgttgcattatgacaatgatgcacgctcctttctggagggccagctcgatagatttaattcaaagttcatggggttaaatgctcacgagtatggtgtttattataaagacggcgatgagaaaataatcgcgggactttatgcagagtcttacggggccgttttttacatccattatctttggattgatgaagcgcagcgcggccgtcgtttaggccaccgtctgctggaagctgcagaggctcatgccagacagttgggatgcgtcagcgtcgccgtggacacgtttagctttcaggcgcccaatttctacctgaaacagggttttcaaatgattggcgagttggattgcggcaatgaaataacacgctcctatctgaacaaacaactgtaa

SEQ ID NO: 424041 - DNA, 966 bp, Serratia marcescens
gtgagcgagaagaaaataaaattatattttgactgcgataccggcatcgatgatgcgatggcgctgggctatttgctcgcagaaagcgacaaggtggatattctggcgatcggcacggtttgcggcaacgtcgccgccgatgccggagccagaaatacgctggagcttgcccgcctggccggttttcccgcgatccccgttgccgtgggggaacgggactacctgcgccaggcgtatctttgcgatgtgcagcatatacacggagacaacggcatcggcgacatcgcgctggaagcctcaaacgccaagctggcgccgctctcggcccccgaactgctggttgagctggccagagcgcacccgggggagctggacatcttggcgaccggcccgctgaccaacatcgccaaagccttgcagcttgagcccgcgctaggagagcttatcggcacgctgacgatcatgggcggtgcggctctggcgcccggcaacagaacgcccgttgcggaggcgaatattgcctgcgatccggaggcggcggccatggtgtttaaggcgatgaagaatatcgtgatggtgccgcttgatgtcaccatgtcgcatacctttgaagaggcggatcggctcaaactgctgtcggccgagagccggtttgcgcaggccttagggcaaatgctggagcggtatatccagttttatatcaatacctacggccgcaaagcctgcgcactgcacgatccggtggctgcggtgttggcggtgcagggcatcggcgcctgccttgcgcctaacgtgaaggtgacgatcgatgattccgacgggccaagccgcgggcaaaccctgtgcgatatgcgggggcgatatatgaactatccgccgcagcgcgatgccaactgccatgtggtattaagcaccgagcttaatatgtcggagttgctgctcgcgaagctgttgtcattagcgtaa

SEQ ID NO: 424042 - DNA, 1056 bp, Serratia marcescens
atggaatggaatgtaaaccaaaccacgctctctcgagcgcagatggtttccctgccgaaggcggaagtgcatgtgcatctggagggctgctttgagccggaacagctctcggcatgggcgttatcctcggggataccgatgcccagaaagcaggacgagctgctgaattttaacgggcttgccgactttctcgatttcctcgattggtcctgcagcctggtgagcagccgtgaacgcctggcgcagttaagctactcctatgcacaacggctgtcgcgggatggcgggctgtacgccgatctgattttcaacccgacccattggaaagcgtggcgcggcaggctcggtgacatgatcgacgcgattgacgccggtttgcgtgcggccgaagaggatggattggcgtccgtggggctgtgcgtcagtttgctccgccggcaaaccgccgccgaggcgagtgagctggtggattttttaaccgcgctgcggcaccccagagtggtcgcgctgtccgtcgatggcaatgaggccgtcaccaaaggcagcggtgcgcgtttcgcgcaggctttcgcccaagcgggcagggccgggttgaagcgaaccgtgcatgccggggagtccagcggcgctgagggcgtgcgcgacgccatcttgctgctcggggccgaccgcatcgatcacggcgttcgggcgatagacgacccggccgtcgtggaactgttggccgaacggcgcatccctatcggcgtatgcctgacctcgaacatcaaactgggcgtctatcccggctacgcggagcatccgctgcgccggctgcgggatgccggggtcatcgcgaccatcaataccgacgacccggtcttattgcacaccacgttggtggatgaatatctgatctgtcagagcgaatttgcattttcaacccaggatatcgtcgatgtggccctgaatgcttttgccgccagttttgccggcgacgaggccaaaatgacgtatcggaagaaaatggatccttgggttgcctctcttaatacagaaaatggagacaagcggtga

SEQ ID NO: 424043 - DNA, 1203 bp, Serratia marcescens
atgacttctgaccagacaaaccgcagccaggtgagcctattggcggcgttgacgatcgctttattttttatcttgttgaacagcggttctcccacgccgttatatcccctctatcaagaaacccttggcctaagtaatatcgacctgaccttcattttctcttcctacgggtttggcgtattgctggccttgtttttatcacgcaggctcaccatcaccgataaaaatgcccggttgctggtggtggtgtcgctgatggtggtggtggtgccaacgctgtgtttttcctttgctcgttctttgcaggcgctgtgcctgttcaggtttatttccgggttaggggccggtacggccacggccatcatcaacatcctgttgattaacgtcagccgcggcgacagcgccaaacgcgccgcgctgttgggcagcttggctttggtgaccggcctggcgctgggcccggtgatcagcagcgtttacgcccagttggcgttttacccgctcacttcgccggcggtgaccatcgccgcgttggttttcctctccgcgatcgccatcgtcctgctttggccgaagaagggattgcctaccctcggcgttgcggacacgaaaacggcagaaaagggcgccggttttagccaaccgctgttctatctgcttgcgctgtgcgtgtttatctcctggtcatacgccgcgctgatcctgtcgttggggccgacggccgcgatccaggtcttcgggcttcagtcacccgcgggctttggctatatcgccaccggttatttactggtggccggcgtggtgcagttcacgatcccgcgttttctgaagcctgagttttctttggtgttagggctgattgcgcaggttttctccatggtgatgatgaccatggcgctcgaaagcagttctgtggccagcgcggcggtgagtctggtgctgtccggcttctcgtacggcgcggtttttgtgggcggtgccatcctggtcaataagctctctcttgcggcgccagggtggaacgcggtgtcgaagttttactttatcgtctatttgttcaatatcatgccgccggccgcaggttggctggcggataaaataggggtagtgagcgccttgttcgccgccattgtcctttttatggcgatatacatcgcctttgccgtgctggcgctgtgggcgctgttgctgagaaaggcctga

SEQ ID NO: 424044 - DNA, 915 bp, Serratia marcescens
atggatccgttatccgatattgtttccaggctaaaaatcagcagccagaaaattgtgacgtttgacatgagcgccaataccaaagcgctgtttcccgactattccgggatgaaaatttatatcgccaagcgcggatcttttttcattaaactggcgggcgacgccaacagttacccgattgaacaaggcgatgtgctgatcttatccagcgggcgcgaattcagcatttttgatagccctaacgcgccggccatcgatataacaaaagttcacgtgatgaaagaccgctcttcctgcttcagcaacggcgggtgcgatttctcctttgtgggttgccgcttcgtctttcagatcaacgataccttccgctttatcaccagcctgcccgaacccatcgtgatcaaaacgcagcgggaggagaacgccggcatcaaggatttcctgagccgtctctcgtcggagatagaaaatcccggcccgggcagtgagctcatcaccgagcatctgctgcagatcattttgacgcaggcgctgcgcatgctgctctcttcaggcgcgctcggccgcggcgagggctggttttacgcgatggcggacaaacatatcggcctggcgctgacccgcatacacgaccagccgggcaggaaatggcgcctggacgagctcgccggcgtggccggcatgtcgcgcaccgccttcaccacccgcttcagaaagctggccggctacagcgtcaacgaatacattcgcatctggcgttttagcctggccattgagcgaatggtcgccaataaagaaaaaatatcccagatcgcctttgacctgggatatgaatcggaaagcgccttcagcaccgcgttcaaaaaaagcatgggcgcgtcgccaaggagttatatcggcagccatatttcctga

SEQ ID NO: 424045 - DNA, 1464 bp, Serratia marcescens
atgacattagacaaagcctacgggccactgattaacggcgtattcgaactggatggcacggacattcatcccgttatttccccctcgagcggggagcgcctggcggatttgcactactgcaacgaacgggacgtcgagcgcgccgtgttggcggcggaagcggctttccccgcctggaaggcattagggcagcaggcccgcgctcgcctggtggcgcagctggcggatgtgctggaaagcgatctggaaagaatggcgcaaatcgacgcgcgggatgtgggccgctgtatcagcgaagtgcgccgcgattatcaaacggcggtcagacactatcgctatttcgccgcggttgtcatggggcacgaagacagcggcagaagcatcgcggacggctacagcctggcgaaacgcgagccgctcggcgtctgcgggcaaattattccctggaatgcgccggcgatcatggcggcgttcaagctggcaccggcgctggtgaccggcaacactgtggtgctgaaggccgatgaaaacgcctcgctctccacgctggagctgggcaagatgatcgccaatattttccctgccggcgtcgtcaacatcattaccgggctcgggagcgtggcgggggcggcactgaccggcaaccgcaaggtgcgcaagctttcgttcaccggcagcacggaggtgggcaagcgggtggccaaggccgccgcggagcggctggtgcccgtcacgctggagctgggcgggaagagccccaatattgtgttcccggacatcgaagacctggacgcggtggtggacaacgtgacctttgccgccatccacaataacggtcagtcctgcctggcgggcacccggctgttcgttcacgcagacatttacgaccgtttcagcgccaaactggtgacggctttcgaacgggtgcgcgtcggttcaccgctggccgagcaatcccgggtcagctgcctggtttctgagaagcagggcgagcgggtgctggcttatattcggaccggcctcgaggagggcgctaccctgctgaccggcggcaaacgccgcgccgttgccggctgcgagcacggctacttcattgagccgacgatttttgctgcggaaaatggcatgcgcatttgtcaggaagaaattttcgggccggtgctgacgctgatcaaatggtcagactacgacgagatgatcgcccaggctaacgacagcgaatatgggctggcgtcggggatttacacccgcagcctgaaaaacgccctggcgaccgcagaccggctggaggccgggtccgtgtggatcaaccgctattcaaacattaccgatggcaccgcgtttggcggttacaagaacagcgggatcggccgcgagttctgcaaagaaacgctcaatgcctacacgcaaataaaaaccatcacgctgcagacggatctgcccgcggcctggtttgcagaataa

SEQ ID NO: 424046 - DNA, 750 bp, Serratia marcescens
atgaaacgctttgaaaataaagttgccctggtgacgggcagttcaaagggaattggcgcagccattgctaaacgcctggcggcggaaggcgccgtggttttcattaactattcccgcgggcgtgaagatgccaaccggttggttaaagagatcaatgagcagggcggcgtcgcttttccgctgcaggccaatgtcggcattgaggccgaagtcaacggcctgatgcaaaacattgtcgagcagtatggtcgcctggacgtgctggtcaataacgccggggtttatgccaccaatagcctggaagccttcagcgacgcggaatatgaaaggcacttcaatttaaatgtcaaagggctgatttattgctgcaaggcggcggtcgccgctatgcctgaatcgggcggcagcattgtcaatatcagctccagcgtgacctcgtttacgccggccaattcgctggtttataccgcttccaaagccgcggtggactcgatcaccaagacgctggccaacgagcttggcgggcgcaagatccgggtcaatgcggtcaatcctggcttggtcatcacggaaggcgtacatgacagcggctttttcgataccgatttcaaaacgcacattgaatccatcaccccgctggggcgcatcggcacaccggaggatatcgccccggccgtggcctatctcgcctctgacgaggcgggttgggtgaccggtgagagcctgatcgtcggcggcggtttgcattaa

SEQ ID NO: 424047 - DNA, 633 bp, Serratia marcescens
atggtcatcgaactatccacgctgggtttatttgccctttcggccgccgtcttaacgcttattcccggcgccgatatgctttgcgcactgtccaatgccgtcagccagggaacaaaagcggggctgattaccgtattgggggcggtcaccggggtgatatgccatgtctgttttgcgattgtcggcgtcacggcgctgatcgcctcttcgccgctgctgtatcagcttttcgtcatcggcggcgcgctgtacatcatgtgggtcgggttgggcatttttacccaggcaaatgcgattggcctggaaaaccacggcgagcgcaaaagccgcaaaaggctctattcgcaaggattcctgaccaatctgcttaaccccaaggccattattttcatgctggcgtttattccgcagtttattcgggtggaggcgggcaggccgggaattcagatgctgatattaggcattgaactcatcctcatcatgtttctgattgaagttcccctggtatttctggcgggaaggattgcgctgaggataaaacggcgtccggccatcgggatttatatcaataaatgcttcggtggcgtcattctgttattagcctgcgccattttggccgcgcggttatgctaa

SEQ ID NO: 424048 - DNA, 816 bp, Serratia marcescens
atgggcaattcggcatttatgcatcgttttgacgcattgggcgggcttgaactgctcgtcgcggacttttcagaccatcggtttgacgtgcattggcatgatacctggtcgattggcgttgtcctgcgcggcgccaataacaacagcgccaaaggcgatgccgacggtatcgtcagccgtgggcaagtcagcctcatcgcgccggggcagatgcatgccgggacggtgctgggagaagagggatgccattatttcatgttttaccccagccacgagatgctgctggacgcggcggaaaacatggagatgcccctgccgccggcagtgaaggggaagcatatcgaccatgcgcctttcgccaaccggttgtgtgaggccgcgacggtattaaccgcggcgcaatccagccgtttcgatcgggaggtggcctggagccactgtgtggcggatctgctggcggtgtgttccccgcggcgcgcgccattggcagacgccggcatcgcgccgggcttgcgcagggcgaaagagtatctgcacgataacccggcgcgggaagtgcgtctggagaggctggcgcaggccgccggtctgtccaggtttcacctttgccgccagttctcggcaacattcggcttgtcgccgagccgctatcagcggcagcttaggttgcagcaggcgaaggccttgctatcccggggcggcgacatcgcggaaatcgccgtcgtctgcgggttcgccgatcagtcgcatctgggcagggcgttcaagtcgagttacggcgtgacgccgcgcggctatcgcgatcgctgcctgtga

SEQ ID NO: 424049 - DNA, 957 bp, Serratia marcescens
atgcgtatgcgtcgcaatctgcttattggcgcctttttcgccgctttttctgccgctgcaatggccgcggcgcctttttctgcaatagacaatcccgggttctaccggatcatgctgggcgatgtggaagtgacggccctgtctgacggcatcagcccgatgcccgccgataaaatcttgatcaacacccggccgcagcagcttgaaaaggcgatggcggccaacaacctgtcgctgccgttgccgacctcggtgaacgcctacctgatcaataccggaaacaagctggttctggtcgatgccggcaccggcgcgctgcatggcgaaacgctgggcaaaatgatgaaaaacctgaacgcttccggctatcaggcggagcaggtggatgagatttatttgacgcacctgcatcccgatcatgtgggcgggttgatggcggacaagcgtctcgccttcccgaacgccaccgtctgggtggaaaaagacgaagtcgccttttggctgagcgaagagaaaaaacggcaggcggaagagagagataaacgtttcttcgatgccgccatcgcctcactgcagccttacgtcacggcggggaaactcaaaacgtttgcagggaatcaggcgctcaccccgggcatttcggctatcgatacgcgtgggcacacgccagggcacagcgtgttcgccgtcgaaagcaaagggaaaaagatggtgattctgggggatatgatccacgtcgcctccgtgcagtttaccgatccgaatgtcgccatcgcctatgacatcgacgtccccgccgccgttgcgcagcgcaagcggctgttcgatgacctcgcgcagcaaagggcgctggtcgcaggggcgcatttgtctttcccgggccttggctacatcaataaacaagggaaaggttacgactggcagccgttgaactatggcgcgatgaatccacattaa

SEQ ID NO: 424050 - DNA, 744 bp, Serratia marcescens
atgaaccgtatttcaggcaaagtggtggtgattaccggcgccagcagcgggctgggcgaggcgaccgcaatacatctggccgcgcagggggcaacgatggtggtggcggcgcgcaggaaagatcgtcttgacgcactggttcggaaaatcgttggcgacggcggcaccgcgttggcgctgcaggcggatgtgacgaagcgtcaggaggtcgaagcgatgatcgcccaggccgtcaggcagtttggcaagattgatgtcttggtcaacaacgcggggctgatggcgatcgcaccgctgagtgccgtgaaggtcgatgaatgggaacggatgatcgatatcaatgtgaaaggcgtactgtacggcatcgcggcaaccttgccgctgttcgaaaagcagcaattcggtcattacatcaccatttcctccattgccggcaagaaggtgttcagccccggcggcacggtctatagcggcacgaaattcgcggtcagcgcgatcgccgaaggtttgcgtcacgaagtcggcggcaagatccgaaccacgacgatcgcccccggcctgatcgacaccgaactgaaacaaggcagttcgcacgcggaaagtttgcaggccgtcggcgaactctaccagagccaggcaatttccgccgatgccatcgcgcgcgccatcgcctatgcgatcgagcagccttcggacgtggacgtgagtgagattgtcatcaggccgaccgtgcaggagttttaa

SEQ ID NO: 424051 - DNA, 945 bp, Serratia marcescens
atggaagtgttatgctttgagaattccattttttggaacaaagaggtcaacgtgcaaaacagacaagaagccttgcgcattttctgcgccgccgccgaggagatgaactttaaacacacggcgaccaggctcggcatttccccgcaaaaagtcacccgagccatcaaagagctcgagtcggtgctcggtgagcagctgttccaccgcaatacccgcagcgtgagaatcacggatttcggcctcggctttcttgagcaggctaaagcggcgatggatcagttgaacaggctgtttcagccgcaggggaaagcggcggaagatctcggcggcgtggtgcgcattacggcgccgcatacctatggcagcgaggtcgtcatgccgatactggcggaattcgcgcgccagtatcccgcgatcacgatcgagttccacctgtcgaatatccacagcgatctcgtcgaagaaagaattgatatcggcattcgcatcggttttctgcacgaccaaacctgcatcgttcgccaacccagaaccatgcctttccatctggttgcttcgccggcgttgcttgatcgcctgccgccgccggagcaggtagaccagcttgcccatctgccgattgtcgcgctggtgaaccgcaaaaccgggcgctactggccctgggagtttagccaaaaacgttatttctacccgaagtccgccgccttcgtcaccgatacgcccgatatagagcgtaaagcggtgctcgccggtttaggctttggccaactggccgggtatttggttgaaaaacacctcgccgcgggtgagctggtggccgttctgccgggcgacgctccgccgccctggccggtcaacctctatcatacgcatcagcatgcctgctcggcgcgcgtgcgcgtagtctttgactatcttttcaatcaattaagccagggcgattaa

SEQ ID NO: 424052 - DNA, 585 bp, Serratia marcescens
atgacagggaatatgattgatttggtttcatacacttttgcaactgccttcacgcctggccccaacaatatcgttgcgttggcatcggtcatggcgctcggccttaggcgcagtgtcccctttttattgggaataggcgccggaatgggcgtgaccatgttggtcacgggtacattgacctcttggatcttgctcacctttccggcggctgtcgtttatttaagagggctgggttttatttatctggtctggcttgcgtataaaattgccaccagccgccgttttgacgaggaacaacgtgaaggcggttatggtttcctcagcggttttgttcttcaggttatcaatgcaaaaatcatactgttcaccataacggccatttccgcttttatcattccggtcggtagcggcctgttgttcattttaggggcatgcctggtcactgcattgatagcgtgtttgggcacgctgacctgggcggtcgcaggggcgtttctcaaaaaagcttatctgaggcactttagagcggtaaatatcaccatggccgccgtactgatctatttcgcctgcaaaatgattatttaa

SEQ ID NO: 424053 - DNA, 1305 bp, Serratia marcescens
atgagcaacgccttgaaagggctgttatggctgattatcgccgtggtggtgttggcgggaggatatgcgctgtacacgctgctgcggcccaccggcgcggagcctgcggcgccgatcgccggagcgccggccggcatcaccgataaactggcgcgcggcgagtacctggcgcgcgccgccgactgcgtggcgtgccacaccgcgccgggcggcacgccttatgcgggcggcttcgccttcaaactgccgttcggcaccatttacggcaccaacatcaccgccgacaaggagaccggcatcggcaactggagcgacgatcagttcgtgcgcgcggtgcgtgagggcatcggcccgcagggcaacctgtatccggcgatgccgtacacctcctacaccgggctgagccgcgacgacgtgctggcgatcaaagcctatctgttcagcctgccgccggtgaagcaggccaacccacaaaacgatctgtcgttcccgttcaatcagcgttggggcatgaaattctggaacctggcgttcttccatgagcaacgctttacgccggatctcaacaaggacgagcagtggaaccgcggcgcctatctggcaactgcgctgggccactgcggcgagtgccacacgccgcgcaatctggggttcggcctcaaccagagcaagcacctgagcggtgaagtggtgcagggctggttcgccgccaacatcacgccggacaaacagaccggcatcggcggctggagcgaccaacagctgtcgcaatatctggccaccggccatgcgccggggcgcagcagcgccgccggcccgatggcggaagcggtggaaaacagcctgcagttcctgacgccggaagataatctggcgctggtgaaatacctgcgcgatatcgaaccgatcgccggcgacgccgccgcggcggtgaatctgcagccgaagggcgcgggggcttccaccccgatcctgccgggcgggcaagagcagtcgctcgggcggcgggtgttcgccaacgactgcagcggctgccaccagtggaacgggccgggccgccagagcgagtatgcgtcgctggtgggcagcacggcggtgaacgatccgcaggggcgcagcgtggtgcaggccatcctgaaggggacgagcatcagcatcggcgatcggcatgaaatgatgccggcgttcggcagcgcctattccgacgaagaagtggcggcggtcgccaacttcgtggtcggccacttcggcgataagcagggcaacgtcaccgccaaacaggtggcggagcaacgcaagcagtag

SEQ ID NO: 424054 - DNA, 459 bp, Serratia marcescens
atgattcaattaaccgtaaacgagcagccgctgaccttcgagggcgatccgcacatgccgctgctgtggttcttgcgtgacgaagccggcctgaccggcaccaagttcggctgcggcatcgccatgtgcggcgcctgcactgtgcatctggacggcgtgccggtgcggtcgtgcatgacgccgatttcggccgccgtcggcaaaaaaatcaccaccatcgaagccgtgggcgccacgccggaaggcaaggcggtgcaggaggcctggcttgatctggatgtggtgcagtgcggctactgccagtccggccagatcatgagcgccagcgcgctgctggcgcaaagtaaaaatccgagcgatgcggacatcgacgcggcgatgggcggcaacgtctgccgctgcgccacctatgtgcgcattcgtgccgccatccaccaggccgccaaggcgttgggttag

SEQ ID NO: 424055 - DNA, 2223 bp, Serratia marcescens
atgagcatatcccaagttccgctttcgcggcggcggtttatcgtcggcgccggggcgttggtgatcggcgcctatctgccgtccaccggcgcgctggcgcggtcgaatgccccggccgcctccggcgcggcagcgtttgatgccaacgccttcgttcagatcggcgccgacggcgtcgtcaccgtcatcagtaaacacaccgaagtgggccagggggtctataccggcatggcgacgctggttgccgaagagctcgatgccgactgggcgcaggtgcgggtcgtcgccgcgccggtggacacccatatctacaaaaacctgagcttcggattccagggcaccggcggttccagctcggtggccaatgcctatgagcaaatgcgccgcatgggcgccatggcgcgtgcgctgctggtgcaggccgccgcgcagagctggaaaacctcggcgcaggaaatcaccgtgcaggcgggcaggattcgccatgccgccagcggacgcgaagcgggcttcggcgaattcgccgcgctggccgccacgctgccgccgcccgatcccgccagcctgacgctgaaggatccggctaatttcaccctgatcggcaaaacgcgcggcctgcatcgcgtcgattcgctggcgaaaaccaacggcagcgcgcagttctcgcaggatatccatgagccggacatgctgaccgtcaccatcaagaaaccgccgcgtttcggcggtaaggtggcggccttcgacgccgaacgcgcgctggcggtgccgggggtggtagcggtgaagcaaatcgccaccggcgtggcggtttacgccaaaaatacctgggcggcgatccaggggcgggagcggctgaaggtgacgtgggacgatgcgcaggccgaacggcgcaacaccgaggagatctacgccgaattccgccaggtcgcgcagaaaaccggcgtggtggcgaagagccacggcaagccggacgaggtgttcgacaaggccgacaaggtgatcgaggccgaatacaccttcccgtacgtcgcccacgcgccgatggagccgctggacggctatctgttctgggacggcgagagcgtcaaggcgcgctacggctgccaaattcaaacgctcgatcacaagcagctgtgcgatctgttcgagttgccgccggacaaggtgcagattgaaaccattctggcgggcggcagcttcggccggcgcatcgatttaggcaacccgacgctggggccggatctggcggccgacatggcggcggcggccaagggcatcggccccggccacggtgtgaaggtggtatggacgcgcgaggacgacatccgcaacggctggtatcgcccgatgatcctgcaccgcctgcgcggcgccatccgcggcggcaaggtggtgggctggaccgataccgtggtcggccactcctggacgcggcacagcgcgatggatgcgctggtggtcaacggcctcgatcagatgatggtcgagggcgccagcgaggtgtcatacagctttgaagccttccgctgcgatgcgcacatcgtgccgggcaaggtgccgaccacctcgctgcggtcggtcgccagcacccacaccggccacgcggtggagagctttatcgatcaactgctgcaggaaaccggccaggatccgatcgaagggcggctggcgctgatgggcgacgcgccgcgcgcggcgggcgcgctgcgggcggtagcgaaagccgctgactggcagggcgccaaggtggtggacgggcgcgcgcgcggcgtgggcgtcgccaaggcgttcgatacctatgtggcgcaggtggccgaggtgtcgatcggcgaaggcggcatcccgaaagtgcacaaggtgtggtgcgcggtggactgcggcgtggcggtgaaccccgatgtgatccgcgcgcagatcgagggcggcatcggctacggcctcagcatggcgctgtacggcaatatcacgctgaaagacggcgtggtcgaacagtccaacttcaataacttccgcccgctgcgcatcgatgagatgccggagatcgaagtgatcatcgtgccctcgagcgagaaaccgaccggcgtgggcgagctgggggtgccgaccatcgccccggcggtcggcaatgcgctggcgctgctcgggcggccgcgcacctcgctgagcctgccgctgcataatcccaccgcgaacccggcgtctgacaaggagagaacctga

SEQ ID NO: 424056 - DNA, 231 bp, Serratia marcescens
atgttcatcggctaccacagcgccgccggtgagcatggcgtgctggcgcataccatcaacggccgggccttttaccgcgtcagcctgaacggcgaagcggtgggcgaaagcgatctgtacgcggcggcggccgagttgaacgtgccgctgtggctggtgagcggcgacaacatggcggcgccaatccgcctgctcagcgtcttttcgtatctggcgacgacgcagaattga

SEQ ID NO: 424057 - DNA, 1056 bp, Serratia marcescens
atgacggacagccaggcgtttgaacaacaaagcctcgacaatctgctgagctattggcggcgccatcgccgcctgccgggcgcgcgctatccggccggcccgaccgacaccctgtgcgacgtgccgggcgtcagcgtcgggcatcacaccttggccgacggcgaatgccagaccggcgttaccgccatcctgccgccgggcgatctgttcaaccagccgttgccgtgcggcagcgcggtgctcaacggcttcgccaaaccgctggggctggtgcagctgaacgagctgggggtgctgcaaacgccgatcctgctgagcaacactttcgccgtcggcacgctgttcaatgccatggtgcggcgcagctgtctgcgctacccgcagatcggccgcggcagcgccaccatcaacccgctggtgctggagtgcaacgacggctacctcaacgatattcaggcgatggcggtgcgtgaggagcacgtcttcagcgcgctggataaccattccacccgctttgcgcgcggcagcgtcggcgccgggcgcggcatgagcagcttcggcctgaaaggcggcatcggcaccgcctcgcgctattgcccggggcttggcaccacgctcggcgtgctggtgctggccaacttcggcaccctcgactcgttgacgctgagcggcgtgcgcgttggccaggcgctgggcaggctgctggcggatccgccgccgcaggtggacgccggttcggtcattatcatcatcgcctgcgatcgggcgctggacagccgccagctgaaccgcatcgcccgccgagcgggcgcgggcctggggcgagtgggcagccattgggggcacggctccggcgatatcgcgctggcgttttccacccggttgctgggggcgacgctgccggacgaacggctggagccgctgtttgcggcggcggcggacgccaccgaatacgcggtgttggatgcgttgctgagcgccgagggcgtcagcggtttccagcggcacgatcgcatggcgctggggccgctgctcgatcggctggcggaaaattaa

SEQ ID NO: 424058 - DNA, 2100 bp, Serratia marcescens
atgagtaagcccacgttcaaacagcggatcagccagctggatctgcggctgcgccaccgggttccgatggtgcaccagaccgagtcgtcagaatgcgggctggcctgcctggcgatgatctgcggttactatggtaaaaacgtcgacctgatcgcgctgcgtcggcagttcagcctgtcgacccgcggcgccacgctggccgggttaaccggtatagccgaacagctgggcctggccactcgccctctatcacttgatattgacgagctcagcgcgctgaaactcccctgtattttgcactgggagttcaaccatttcgtggtgctggtcagtatcaaggggcaccgcgcggtgctgcatgatccggcgcgcgggcgccgggccatcagcctgacggaactgtcgcacagttttaccggtgtggcgcttgaggcctggcccggcagcgccttcaccgccgacagcgtccgccaccgcattcacctgcgcacgctgattggcagcgtacacggtcttaagggggcgctcggcaaaatcttttgcctgtctctggtgttcgaaaccatcaacctggtgatgcccatcggcacgcagctggtgatggatcacgctattcccgccggcgatcgcgggttattgacgctcatctgcgttggtctgatgctgttcatcctgctgcgggcagctgtcggcatggtgcgcgcctggtccgggctggtcatgtcgacgctcatcaacgtgcagtggcaatccgggttgtttacccacctgttgcgcctgccgctgggctactttgaacgacgcaagctgggtgacattcagtcgcgcttcggctcgctggatacgctgcgcagcaccttcaccacgagcattgtcggcgccatcatggacggcatcatggtgatcggcgtgctggtgatgatggtgctgtatggcggctggttgacctgggtggtgattgcgttcaccgcgatctacgtgctgatgcggctgctgacctacggctattatcgccaactgtccgaagaagcgctggtcagggaggcccgcgccggctcgtattttatggagacgctgtacggtatcgccaccgtcaagatgcagggcatggcggaacgtcgcattgcccattggctcaaccttgaaatcgacaccatcaataccggtatccgggtcacccgcatggacatgctgtttggcgggatcaacaccttcattgccgcctgcgatcaggtcgttattctttggctgggagccagcctggtgatcgataaccagatgaccctcggcatgttcgtggcgttcggcgcctttcgcgggcagttttccgaccgcatcgggtcgctgacggaatttttgctgcagctgcgcatgatgagcctgcataacgagcgcatcgccgatatcgccttgcacccacgagaaaaccgtaaaccggaccttccttacgcggcgggcctgcaacctttgggattgtcgacccatgccctgagctatcgttacgacagccagtcaccggcggtctttgatgccttggacatcagtgttgcgccgggcgagagcgtggccatcgtgggcccgtcgggcgccggcaagaccacgctgatgaaggtgctgtgcgggttgtttcccccggactcagggcgggttgaggtgaacggcgtcgatatccggcagcttggcatcaacaactaccacaagatgatcgcctgtgtgatgcaagacgacaaactgttctccggctcgatccgggaaaatatctgcgggttcgcggacgaggtggacgacgcctggatggaagcctgtgcccgtgccagctatctgcacgacgtgctcatgcgtatgccgatggggtatgaaaccccgatcggcgagctgggggaaggattgtccggcgggcagaagcaacgcctgttcattgcccgggcgatttacaagaagccggcgattttgttcctggatgaggccaccagtgcgctggataaggagagcgaagctgtggtgaatcaggccatcaagagactcaatatcacgaaggtgatcattgcccaccgtgaaacgaccattgcgtcggcagatcgggtcatccattttggataa

SEQ ID NO: 424059 - DNA, 1275 bp, Serratia marcescens
atgtttcgccaggaagcgatcgataatcagaaaatgaaatggcgtggtcgggccctcctgctacccggtattcccttttggctcacggcagggctctgcctgttttttctcattgcttttctcaccttcgcaatcgccggcacctatacccggcgggtcaacgtgaccggcgaaatcagcacctatccccgagccgccaacgtctattccgccgtccagggggtggtggtcaaacaattcgtcaccgaagggcaggtgatcgccgccggcgcgcccatttaccagattgacgtcagcagaagcacccgcagcggtgtagtcagcgataaccagcagcgggatatcgacggccagctggcgcacattgcgcaaatcatcagccggctggaaagcagcaagcaggccacgcttaccatgctggaacagcagaaggcgcaatacaccgctgcattcacccgttcaaccgacatcctcaaacgcgcccaggaagggatacgcatcatgaaggaaaatatggagaattaccggcactatcaaaccaagggattgatcactaaggatcagcttaccaaccaggtggcgctgtattaccagcagcagaacaacctgctgggcctgtccggccagaacgaacagaatgcgctgcagatcaccgcgctggaaagccagatccatatccaggccgccaacttcgacaaccagatttaccagatggagctgcagcgccacgagctgcagaaggagcggctcaacattgatgccggcggggcgatcatcgttcgcgcgctggccgacggccgcatcgattcgctgagcgtcacggttggccagatggtcaacgtcggtgacagtctgctgcaagtgatcccccacaatatcgctcactacgccctggtgctatgggtgcccaacgacgccatcccctacatcgccgccggtgacaaagtcaatgtgcgttatgacgcctttccggcggagaaattcggccagtttgccgctacggtatccgtcatctccaaagccccggcctcaccgcaggaaatgctgacctaccagggggcgcccaaagcggcgctgaccgccgccgtgccgtactacaagacgatcgtcattccggaaaaacagatcattgcctatgacggtaaacgtctgagcctggaaaacggcatgaaagcgcaaagcaccctgtttttggaaaaaaggcagatttatcagtggatgttgtcaccgttctacgacatgaaacacagcgcgacggggccgatcaatgagtaa

SEQ ID NO: 424060 - DNA, 1278 bp, Serratia marcescens
atgagccatcaggcattgggtattgatttatcaaaggtagaaaggttatccgttccaaatatcctgcattttgtatggattggtgacttaaatgaagtaaatacgcattatatcgacatatggaaaaaaacaaacaaagataagcagatattcttttggtatgaccaagactcttcactgtgccatttgctaaacaatgccatacgcgatttcgtcagcgtcaaaaaaattaaaaataaagacaaggctgaattaaaaataaaaaatcatgccttcaaatatatatatccaaaaataaaggcaggtttttcttttgatgagctcgttattgaattcttaaccaagcatgaaatcccttatcagaggccgccaaaagcgattgaagactcatggtttggcaacagaggttttataaaaaagcctataactgagctttttttcaacgatttcgatgattttatgaagtattattactatgagattatactaaggcataacattgccagtgcaagtgacattgtcaggcttttaattatctatcagtatggcggcacttatatagatgttgatacgctcccatatattgacaatatatatcataaattaaacaaatatataagaaaaaagggcattgtcgagagtgactcctttctattgtttaaaaccgtatgttttttaaaaaagacaaattcagaaggggtgctgcctgaagtcgtgatcggctgcgatgaaaatgagttaggggtagatgctgttggatttgaagaaatcaaaaggcttatcgaactggatctcactgatttttctctggatatgatattgccattgggtgagacatacgttcataaaaatttattggcgctaggatcactcagaagatttaaaggtgtttattttaataacttcatatcctctcaccaaaaatccaaggcggtaaggatcattcttagagtaatgaaaaaaagataccgctttttagaaaaaaataattgcatatttgactgttatattgatgatgggtcaaggtgttatctgaccaggatcttaccatggaggaatgagttaacaacaaggaactattgcgttacctcggtcttaactgggccgggtttaattgttgaggttttattggggttggcttataaggcctttaatattggatatctgatagagccctccagcattgcggaatatatgcaaaatcctgattttggaattgcattgtttcaacacaccatagataccccagatggcgcctattccacgtggcgcaaataa

SEQ ID NO: 424061 - DNA, 279 bp, Serratia marcescens
atggggtatatgatgaatagatatgttgtttttataaagagtgatgaatcaaaagtgctaagaaaggacgtggttacacgcgaaattattaaggatatgaagcggaaaggcttcagaaagcatcatgtcgaagtagaggctgataacgaaagcgatgccattaacaaattaaataagaacagcaatgactatttggattcattgaaaaatttttccggtgatttattgctctgttctatttgtgttattgtgatggcgatcgtctatttttttagctaa

SEQ ID NO: 424062 - DNA, 747 bp, Serratia marcescens
atgtcgctgacgttactcgaaattgccgccctgacgggcatttttacgctggccggcacggtcaaaggggcgatcggtttgggattaccgacggtgtcgatggggctgctcagcctgatgatgccgccggggcaggccgccgcgctgctgctgttgccctcattgatcaccaacctgtggcaactgctgtgcgggccgcggttgggggcgctgtgccgtcggctctggccgatgatgctgtgcgtcacgctgggcaccttgctgagcgccggcacgctcaccgccatcgacggccgcctggcgccgctggcgctgggcatttgcctgaccggctatgcgctgttgggttttacccgtttcgactggcgggtttccgctgcggcggagccttggctggggccgctgtgcggcctgttgaccggcgtgctgaccggcgccaccggcgtgttcgtcataccggcggtgccctatctgaacggattgggtctggcgcgtgacgatctggtgcaggcgctggggctgtcgttcaccgtctcgacgctggcgctggccgccggattagcctggcatcaggcgctgcccggcgcgctgctcggcgtttcgctgttggcgctgctgccggcgttggccggcatgtggctgggcgggatcgcgcgtcgtcacagcagcccgctgatttttcgtcgccttttctttattgggttattcatcttgggcgttgagattatttggcgttcaattaattga

SEQ ID NO: 424063 - DNA, 906 bp, Serratia marcescens
atgcattttgactttatcgatctgcggctgttggcggcggtgctcgagaccggcagcatcaccgccggcgccgagcgcgtcgggctgtcgctggccgccgccagcgcacgcatgcgcgggctggagcaacaggccggcgtggcgctgctgacgcgcaatccgcgcggcgtccaggcgacgcccgccggtgaacgcctgttgcaacacgcgcgcgtgctgctgcagcagcgcgaccggctgcgcggcgacatggccgagttcgcgccgggccagcgcagccagctgcgcatcgtcgccaataccgtcgccgccgacgcttttctgccggaactgctggcggattttctggtgctgcacccgtacaccgacatcgcgctggaggagctgcccagcccggccatcgcgcaggcgatcgccgaacgggcggcggatatcggcatcgtggcggatcatgccgatctgcgcgggctggcaagctaccccttccggcaggatcgtctggtgctggcgctgccgccggggcatgcgctcagcggccgccgccagctcagctttgcggacgccctgcctttcgactttatcggcctgccggaacagagcgcgctgcaacagcatttggagcagctggcgatacgcagcggcggcccgatgcggctgcgggcgcgcgccgccaatttcgacgccatctgccgcatggtgctgcgcggcgccggtctggcggtggtgccggaagagagcgctcggcggctgcccgagatcctgcgcaacgccctgccgctgacggacgactgggcgatccggcgtctgtcgatcgtggtgcgcgaacgggcgcagctgccattgccggcgcagcggctggtggcatttctgcgccaggaggaggacggtattacaggtgctcgttga

SEQ ID NO: 424064 - DNA, 861 bp, Serratia marcescens
atggcattaaccacgcataaaatggaaagcggcctggccgtaacagttcgtttacctgagaatcaggccaaggttccggcgattattctgtgtcacggcttctgcggcattcaggagctgttgctgccggcctttgccgaggccttcgtcaacgccggttttgcggcggtgacgtttgactatcgcggcttcggcgctagcgagggtgaacgcgggcggctggtgccggcgctgcagattgaggacattctggcggtgagccgttgggtgcaaacgcagccgcagatcgacagtgagcgcatcggcctgtggggcacatcgtttggcggttgccacgtgttcggcgctgccgcggccgaaccggccatcaagtgcatcgttagccagctggccttcgccgacggggaaaccatcgtgacggggaaaatggccgccgatgaaaaacaggcgttcatcgccacgctggacaaaatggcggagaagaaacaggccaccggcaaagagatgtttgtcgccgtcacccgggtgttgagcgatgacgagtcgaaagcgttcttcgaggagaacaaggcgcgctacccggcgatggacatcaagatcccgttcctgaccgtgcgcgaaacgctgcgctatcagccgcgcgacaatgcggcgcgcgtcacatgcccggtgctggtggtggtggcgggcaacgataccgtcaacccgccggagcagggcatcgcgttgtatgaggcggtaggcagcgcgaaaaaggcgctgcacgtcgagcagaatgcgaagcactacgacatgtacgccggcccgcatttcgccggcatcatcggccgtcagatcgcctggttcaacgagcacctgtaa

SEQ ID NO: 424065 - DNA, 3573 bp, Serratia marcescens
atgactgattcccgtccctcatcgccgagccaggccgaattgctgcagcgcgacggcgtgctgctgatcgtcgacagcgtgcaaccgccttcggggccggtgcccaaagggcaagcgccggtgctgaagcccagggagcaggggctgtttatcgccctgtgcgacagcggcgaaatctatgcctttaacggccatgtcgatctcggcaccggcgtgcgcaccgcgctcggccagatcgtcgccgaagagctgtacctgcgcatggatcaggtgcaaatggtgttgggcgataccgagcgcgcgccgaatcagggcgccaccatcgccagcgccacgctgcagatctccgccgtgccgctgcgcaacgccgccgccgaagcgcgccgttggctgttgcgccaggcggcgcagcgcttcgatgcgccggtggaacagctgacgctggaggagggcgtgatccgcagcccgcaggggcaggcgctgagctacgccgagctggtggccggcggtcatgtcgagctgtcgatttccggcgacgcgccgctcaaaccgcaggcggagtatcgcctggtgggcaccagcgccgcgcgcgtcgatattccggccaaggcgaccggcgaaaccacctacgtacacgatatgcgcctgccgaacatgctgcacggccgggtggtgcggccgccctatgccgggtacgacagcggcgaattcgtcggcaccagcctgctggcggtggacgaaacctcgatcgcgcatattcccggcatcgtcaaactggtggtgatcggcgatttcatcggcattgtcgccgagcgcgaagagcaggcgatcaaggcggcgcaggcgctgcaggtcagctggaaagactggcggcgcaatttgccgcagatgaccgacgtggcgcaggcgctgcgcgacaacccgcactcgacccgggtggtgcacgataccggcgatgtggacgcggcgctggcggcggccgacaggcgtttcacccgcagctacctgtggccgtatcagctgcatgcctcgattggcccttcctgcgcgctggcggactaccggccggagcgcctgcaggtctggtcgggcagccagaacccgcacctgctgcgcgccgatctggcctggctgctggaatacccggaagcgcagatcgagatcgttcgcatggaggcggccggttgctatggccgcaattgcgccgatgacgtctgcgccgacgcggcgctgctgtcgcgtgcggtgggcaggccggtgcgggtgcagctgacccgcgagcaagagcatgtgtgggaaccaaagggtaccgcgcagctgatggaggtggacggcgggctggacgccgccgggcatccggtcgcctacgattttcgcacctattatccttccaacggcgcgccgacgctggcgctgctgctgaccggccgggtcgagccgctgccggtggcctatgaaatgggcgaccgcacctcggtaccgccttacgaatatccggcgctgcgcgtcagcatcgaggacatggcgccgatcgtgcgcgcctcctggatgcgcggcgtttccgccttgccgaacaccttcgcccacgaatcttatatcgatgagctggcccacgccgccggcgtcgatccgctggaatatcggctgcgctatatcgatgacgaacgcgccagtgagctgatgcgcagcacggcagaacgcgccggctggacgccgcataccgaaccgatgcagaccccggcggaagacggcgtgctgcgcgggcgcggctttgcctacgcccgttacatccacagcaagtttcccggctttggcgcggcctgggccgcctgggtggccgacgtggcgatcgacaaagccagcggcgaagtggcggtgacgcgcatcgtggtcggccacgacgcgggcatgatggtcaacccggacggcgtgcgccaccaaattcacggcaacgtattgcaatcgaccagccgggtattgaaagagcgcgtgacctttgaggaatcgacggtctccgccaaagaatggggagcttacccgatcctgaccttcccggaggtgccggaagtggacgtggtgatgatgccgcgcccttacgatccgccgctgggcgccggggaatcggcgtcggtgcccagcgcggcggccatcgccaacgcggtattcgacgctaccggcattcgttttcgcgagctgccgatcacctcggacaaactgcgcgaggcgctgaacgggccggacaccgagcggcaggccgccccgcccaagaaaaagaagcgcggcaaatggtggttcggcggcgcggcggggctgttcggcgcggtgctgggcatcgccggcagcgccttgccgtggcgggcggagatcgcgccggtggcgacgcccggcgccggcacctggtcggcggccacgctggagcgcggccgccagttggccgctgccggagactgcgcggtttgccataccgcgtcggaaggggcgaccaacgccggcgggctggcgatggcgacgccgttcggcacgctctacagcaccaacattaccccggacgtggcaaccggcatcggcaactggtcgtttaccgcgttcgatcgggcgatgcgccagggcatcgcccgcgacggccgccatctgtatccggcatttccttacaccgccttcagcaaaatgaccgacggcgacatgcaggcgctgtacgcttatctgatgtcgcaaccggcggtgcgccagagcaatccggccaatcagatgcgcttcccgtttaacctgcggccgctgatggccggctggaacgcgctgttcctgcgtcagggggaatttcaacccgatccgcaacaaagcgcgcagtggaaccgcggcgcctatctggtcaacgggctcggccactgcgccgcctgccattcgccgcgcaatctgctgggggcggaaaagggcggcgcggctttcctggcggggggaatggtggacgggtgggaagcgccggcgctgaatcaattggccaatgcggacaagccctggaccgaggaacagctgtttcagtacttccgcagcgggcattccgccgagcacggcgtggcggccgggccgatggggccggtggtcagcgaactggcgacgttgccgcagagcgatctgcgggcgatggccaactatgtgatgtcgctgagcaccaaggcgacgctgaatgtggaaccgcaggcgcagttggcggcccgcgccttgccggcggcggggcaactggccggcgagcggttatttcagggcgcttgccaggcctgccacagcgccgccgccggcgggccgcagctgttcggcgtcagtcccgatctggccaataacaccaatatcttcagcgatcgccccgataacctgatcaaggtgatcctgcaagggatccccaaaccggctaccgccgaattgggctttatgccgggctttaaggacagcttttccgatcggcaggtgacggcgctggtgaattatctgcgccaacgctatgccggcgacaaaccggcctggcgcgacgtggaggagcaggtggcgcggctgcgcgcggagccgggaaatcattaa

SEQ ID NO: 424066 - DNA, 543 bp, Serratia marcescens
atggcgatatctgaagtgcagtcgcccagggaaggcgcgaaaaccacgctgacggagcatccgctgatgctgtcggtgaacggcgaacagcttcatgcgcaggtgatggcggatacgccgctcttgctggtactgcgcaacgatctggcgctcaacggcccgaaatacggctgcggcctgggcgaatgcggcgcctgtaccgtgttgatcgacggcgtggcggcgcgctcctgcgtgatcccggcgctcggcgtgtccggccgggcgatcgtgaccctggaaggccttggcgatcgccagcgcccgcacccggtgcagcgcgcctttatcgaagagcaggcggcgcaatgcggctactgcctcaacggcatgatcatgaccaccaaagccctgttggatcgcaatcccgccccgagcgaggcggagatccgtcaggcgctgtccggcaacctgtgccgctgcggcacccatctcgaaatcctgcgtgcggttcagcgcgccatcattctctgccgcgatgagggcgcccacgcttatgactga

SEQ ID NO: 424067 - DNA, 474 bp, Serratia marcescens
atgacgccccccgaatacccgtcagccgtgagcggccaacccgaaaattatcattttaccgagcaagtcgggcacctgctgcgcaaggtttatcagcgccacctggcgatttttcagcaaaacgtcggcgattcgcagctgacggcggtgcagttcatcaccctgtgcgcggtgcgcgatatggggccgagctcgctgaccgagctggtgcaggtgacggcggtggatcaggccaccatacgcggcatcgtcgagcggctaaaggcgcgcgatctgatcacggtgacgccggatccggtggatcggcgcaaggtggtggtcggcctgaccgacgccggcgccgtgctgctgacggaaacggtgccgcaggcggcgaaaatcacagagctgacgttcggcacgctcaacccggccgaacggatagcgctgatattcctgctgaataaaatgctggaagatccgcccaccggctga

SEQ ID NO: 424068 - DNA, 1059 bp, Serratia marcescens
atggcggtcaatgaaacccagttggtacagctgttcgagcaggtgcttacgctgtcgaaggtcgatgcttcgcagagcgtggcgattttgaaaagccattattccgatgcgcgcacggtgcgcgccgcgaccgacgcggcgctgcggctgggcgccagggtgtatgccgtcgagctgccggcgttcaaccatccgcgggcgatgggcaacgacatgaccgcctattgcggcgataccgcgctgaccggcaacctggcggcgcagcgtgcgctggaagccgccgacctgatcgtcgataccatgatgctgctgcattcgccggagcaggagcagatcctgaaaaccggcacccgcatcctgctggcggtggagccgccggaggtgctggcgcgcatgttgcctaacgcggaggacaaggcgcgggtgctggccgccgccgccgtgctggagcaggcgaagctgatgcaggtgacctccgccgccggcagcgatttccgcgcgccgctcgggcaatacccgacggtgaccgagtacggctatgccgatgaaccggggcgctgggatcactggccgagcggtttcctgttcacctggccgaatgaggagcaggcggaaggggtgctggtgctggaggtcggcgatatcttgctgccgtttaaaagctacgcgcgcgaacgcatcacgctggagatcgaacaagggttcgttacccgcattcacggcggcttcgaggcggaatacctgcgcgaatacatgaaatacttcgacgatccggaggtgtacggcatctcgcatatcggctggggcctgcagccgcgcgcccagtggacggcgatgggcctgcacgacaagaacgacggcatgtgcatggacgcgcgcgcgttctacggcaacttcctgttctccaccgggccgaacaccgaagtgggcggcacgcgcaaaacgccttgccatatggacatcgcgctgcgccgctgcgacatccgcctcgacgggcaaacggtggtggcggatggggaagtggtggcgccggaggcctcgcgcgcgcgtcgggcttaa

SEQ ID NO: 424069 - DNA, 1152 bp, Serratia marcescens
atgatgagcaaacaaccacgcatcgccgtcgtcggcgccgggctggggggcgccgccgccgccgggctgctgcaaaaagccggctttaccgtcgatctgtatgaacagagcccggcgttctcgcgcctcggcgccggcattcacatggggccgaacgtactgaagattttccgccggctcggtattgagcagcggctggagcagatggcgtctcatcccgatttctggttcagccgcgacgccgaaagcggcgactacctgtcgcgcatcgaactgggcggctttgcccgccgggagtacggcgccgcctatgtgacggtgcaccgcggcgatttgcaggcgttgcaactttccgcgctgcagcccggcaccctgcacttcggcaaatgcctgagcaagattgaagatcgcggtgacgaggtggtgctgaacttcgtcgacggcacctcggcccatgccgacatcgtgatcggcgccgacggcatcaattcgcgcatccgcgaacatctgctgggcgccgaagcgccgacctacagcggctgggtggcccaccgcgcgctgatccgcggcgagaagctggcgaaatacaacctgacgttcgaagactgcgtgaagtggtggtcggcggaccgccatctgatggtctactacaccacccaacggcgcgacgagtattactacgtcagcggcgtgccacacccggcctgggatttccagggcagcttcatcgacagcagccgcgaagagatgttcgagaccttcgccggctaccacccgatcgtgcaggcgctgatcgaatccagcgagcaggtcaccaaatggccattgctgaaccgcaaaccgctgccgctgtggagcgaaggccgcctggtgctgctcggcgacgcctgccacccgatgaagccgcacatggcgcagggcgcggcgatggcgatcgaagacgccgccatgctgacccgctgcctgcaggaaaccggcctcggcgactaccgcaccgccttccagctgtatgaagccaaccgcaaggagcgcgcttcacgggtgcaggcggtgtccaacgccaacaccttcctgcgcacccaggaagatccggcctgggtctacggctatgacctgtacgcgcaagcgctgaaatcggagaacgccgcatga

SEQ ID NO: 424070 - DNA, 795 bp, Serratia marcescens
atgagcaccttcctctacggcgcccacgttcacgccaacggcattcgccaacactacctgcgctatggcggccacggcccggcgctgatcctgatccccggcatcaccagcccggcgatcacctggggtttcgtcgccgagcggctgggggaaaaatacgacgtctacgtgctcgacgtgcgcggccgcggtctgtcgtccagcggcccggaactggcttatgacgcggagacctgcgcgcaggacgtcaacgccttcgccgccgcgctgagcctggacagttacgccctgctcggccattcgatgggcgcccgcttcgccctgcgcgccgccgttttgcagcccgccggcgtgcggcggctggtgctggtcgatccgccggtttccggccccggccgccgcgcctatcccggccaatggccgtggtacgccgactcgatccggcagtcgctgccgggcatgagcgccgagcagatgcgcgccttctgcccgacctggagcgaagagcagcgccggctgcgcgccgagtggctgcacagctgctacgagccggcgatccaacgcgcctacgacgattttcatcaggtggacagccaccgcgactacccgctgctgaccatgccgacgctgctgatggccgcaggcaaaggcggcgtcattcagcccgaagaccgggcggagatccgcgcgctgcagccggagatcgccatcgtcgaggtcgagaacgccgggcacatgatcccgtgggacgatttcgacggcttcttccgcgccctgggcgattttctggattaa

SEQ ID NO: 424071 - DNA, 753 bp, Serratia marcescens
atgagcaaccactaccgcatcggccagatcgtgcccagctccaacaccacgatggaaaccgagatcccggcgatgctgggcgcgcgccagctgatacgcccggagcgtttcacctttcattccagccgcatgcgcatgaaacacgtcaataaagaagagctggcggcgatggacgccgagtccgatcgctgcgcgctggagctgtccgacgcgcgggtcgacgtgctcggctacgcctgcctggtggccatcatggcgatggggctgggctaccaccgcgaatcgcaggcccggctggcgcaggtgacgaaagacaatcaggccgccgcgccggttatcagcagcgccggcgcgctggtcaacggcctgaaggtgatcggcgccaaacgcatcgcgctggtggcgccctacatgaaaccgctgacccagctggtggtggactacatccagcacgaaggcattgaggtcaaggtgtggcgcgcgctggagatcccggacaacctcgaagtcggccggcacgatccggccaggctgccggggatcgtcgccgagatggatttacgcgaggtcgatgctatcgtgctgtccgcctgcgtgcagatgccttcgctgccggcggttccgacggtggaggcccaaaccggcaagccggtgatcaccgccgccatcgccaccacttacgcgatgctgaccgcgctggagctggaaccgatcgtccccggcgccggcgccctgctgtccggcgcctattga

SEQ ID NO: 424072 - DNA, 630 bp, Serratia marcescens
atgaacgacaccctcagcgacaactaccgcggcgtctggggccagcgcatcggcttcggccggcgcccggcgctgctggcgatcgactttatgcaggcctacaccaccgaaggcgcgccgctgttcgcgccgggcgtggtgagcgcggtcgaggagagccgcgagctgctggcctgcgcgcgccgcacgggaattcctgtcatccacacccacatccgctatcatgcaggccattttgccgatggcggcctgtgggtgaagaaagcgccggtgatgaaggacatggtggcgggcaacccgctggcggcgttttgtccgccggtggcgccgctggccgatgaggtggtgctgagcaagcaatacgccagcgccttcttcggcaccgcgctggcgccgctgctggtggcgcaagggatcgacacgctgctgatgatcggctgctccaccagcggctgcatccgcgccagcgcggtggacgcggtgcagcacggctttcgcgccatggtggtgcgcgagtgcgtcggcgatcgtcaccccggcccgcacgaagccaacctgttcgatatcgacagcaaatacggcgacgtggtgcacaaacgggaggcgctcgactacctgaaccggttatga

SEQ ID NO: 424073 - DNA, 1311 bp, Serratia marcescens
atggccattgtcgacaccccgctggcggggaaagcggacgcagaatcgctgctgctgtaccgcaaaatcacctggaaactgatcccgtttctttgcctgtgttacctggcggcctacctcgatcgcatcaacgtcgggctggccaagctgcagatggccgacgcgctgcagctgagcgaagcggccttcggcctcggcgccgggctgttcttcgtcggctatattctgttcgaggtaccgagcaacttgatcctgcagcgcgtcggcgccaagatgtggatcgcccgcatcatgatcacctgggggctgctgtccaccgccaccatgttcgtcaccacgccgacccagttctacgtcattcgtttcctgctcggcgtggcggaggccggtttcctgcccggcgtgctcttttacctgacgctgtggttcccgacctatcgccgcggccgtatcatcgcgctgttcatgatcggcctgccgctgtccagcgtgatcggcgggccgctgtccggctggatcatgggccatttcgacatgcttcacgggctgcacggctggcaatggctgtttttgctggagggcattcccagcgtgctgttgggcgtgctgaccttttggctgttgcctaacacctaccagcaggccaagtggctgacacccgaggagaaacagcgcatcgccgacgatctggcgcgcgacgacgccgaggccgatcacggcaagcacagcttccgcgacggcttcttcaacctgaaagtctggatgctcggcggcatcgacttcgccattctgctcagcgcctacgccatgggcttttggatgccgaccttcatcaaaaccgccggcgtcaccgacatcaccaccatcggctacctgacggcgatccccagcgtcgccgccctgctcggcatgctgctgatcggcagcagttccgaccggctgcgcgaacggcgctggcatatcatcgtgccgtttatcgtcggcgcggtggcgatggccggcagcaccttctttacccacaacgcgctggccacggtgctgctgttctccatcgcccaggcggcaatcatcggcgcggtgccggtgttcttcagcctgccggccaccttcctgcgcggcacggcggcggcgaccggcttcgcgctggcctgttcgctggccaacatcgccgggctggtgagcaattcgctgatggggctggcgctggatctgaccggcaagagcggcggcgcgctctgggccttcgccggctgcctgctgctcagctcgctgctggtagtggccctgccggccaaggtggtgaaccgctga

SEQ ID NO: 424074 - DNA, 2202 bp, Serratia marcescens
atgcgtttatccacattggtgctggcgatcggcatggcgctgggctcgcaggcacaggcagcagaaacccaacctcacgccgaccatagcgcactgcccagcggccaggcgaaggaggctaacgtgaccggtgaagccaatcagcacgacaagcaaaagactcaaaatccgttcttctatcaaagccgtctgccgttccaggcgccgccgttcaacctgatcaaggagagcgactacgcgccggcgatcgcagcgggcatcaagcaaaagcgggaagaggtggagaagatcgccaacaacccggccaagcccaacttcaaaaataccttcgtggcgctggagcaggctggttcgttgctgacgcgggtgatgaacgtgttcggcgccatgacctcggccaacaccagcgacgcgctgcaaaagctggatgaagaaacctcgccgaagctggcggcgctgaacgacgacatcatgctcaacggcaagctgttcgcgcgcatcaaggccatctatcaggatcgcgatgcgctgaagctggatccggagtcgcgccggctggtggaagtgacctataagaacttcgagctggcgggcgccaacctgtcggacgccgataaggccaagctgaaggcgctgaaccaggaagcggcgacgctgagcacccagttcaccaacaagctgctggcggcgagcaaaaacggtgcgctggcgataaccgaccaggcgaagctggacggcctgtcggaaggcgagctggctgcggcggcccaggcggccgccgaacgcaagctggagaaacagtggctgctggtgctgcaaaacaccacgcaacagccgttgctgcagagcctgaaagatcgcgacacccgccaggcgctgttcgacgcctcctggactcgtgcggagaagggcgacggcaacgatacccgccagaccatttcccgtctggccaaggtgcgcgccgagcaggccaagctgctgggctacccgaactacgccgcctggaaactgcaaaaccagatggccaagacgccggatgccgcgctgagctttatgcgcaacatcgtgccggcggccaccgcgcgcgccgagcgtgaagccaaagacattcaggcggtgatcgaccagcagaaaggcgacttcaaggtgcaggcctgggactggcagttctatgccgaacaggtgcgcaaggccaagtacgatctggacgagtcgcagatcaagccttacttcgagctgaacaacgtgctgaacaacggcgtgttctacgccgccaacctgctgtacggcatcagcttcaaggagcgcaaggacatcccggtctaccagccggacgtcaaggtgtacgaagtgttcgacaaggacggcaagtcgctggcgctgttctacaccgactacttcaagcgcgacaacaagggcggcggcgcctggatgagcaacttcgtcgatcagtcgaagctcaacggcaccaagccggtgatttacaacgtcgccaacttcaccaaaccggcgccgggccagccggcgctgctgtcgtatgacgacgtaatcaccatgttccacgagttcggccatgcgctgcacggcatgttcgccgatcaggaatacccgagcctgtcgggcaccaacaccgcgcgcgacttcgtcgagttcccgtcgcagttcaacgagcactgggtcagcgatccgaaagtgttcagccacttcgccaagcactaccagaccggcgaggcgatgccgcaggaactggtcgacaagatcaagaaagccgacaagttcaacaagggctacagcatgaccgagctgctgtccgccgcactgctggacatgcactggcacatgctgacggccgaccagccgcagcaggacgtggacaagttcgaggccgagtcgctgcaaaaagacaaggtcgatctcagctacgtgccgccgcgctaccgttccagctatttccagcacatctggggtaacggctacgccgcgggctactacgcctatctgtggacggaaatgctggcggacgacgccttccagtggttcaccgaacacggcggcctgaccgccgaaaacggccagcgcttccgcgacatgatcctgtcgcgcggcaacagccaggatctggagaagctgtacatcgactggcgcggcaaagagccgagcatcgaaccgatgctgatcaaccgcgggctggaggacgagtaa

SEQ ID NO: 424075 - DNA, 276 bp, Serratia marcescens
ttgcagcttataacggaaatagttcttattgtcattttcatcctcattatcagtgcaacttataaaaacgcgaagaaaaaaggcttgcgcacgtaccatatcgtcatgctgttcttgatattcccccttgccgtatttttagactactgcctgcagcgccaagcgatccttttggatacggccgcccttaaaatcacggcaatgtatggtttgtcgatggcagttattttttcgcttgtgttatctattacctctcgcaagaaggagcttaaatga

SEQ ID NO: 424076 - DNA, 1527 bp, Serratia marcescens
atgaaaaacctcgccatgcttcacgaaagcttgattccttttgtcgcaaaaaagacaggttctcaattactctggcacaacgaattaagccctgccgagcaggacgaactgaaaaatgaggccagctatctcatcgaagaaaataatcgtcatgctatttttgatgacggcacgccgctcttaaacgatgaaaaagtctttttcgccgaacgttatggcggcggggctatttcgcgcaacggcggtggcgcacgctgtggctttgatgggctatggcaggttaaaggcatcggagccaatgcgttagtgggtcaaggggcaaagcatgtcgatggcgagttgacaatgaccggcgcagtattggaggcattgtggggaaacgtcatggccaaactgctgccttatggcgccgtgcccaataaggcgatcttgctgaccgacaaccccatcgccaccctctctcctgcatcggcgggagatgtccataaccgcaaggcgttgctggtgcgcgaacccgtcgtgcgccctgcacatttttgccgcgcgccctactatcatcctcatgatgcgatgcaaaggcagccttcggatattgagcggaccgaaaaactcattgtcgccgcaccgtcctttctgcctcgtccctctgagtttgacgctgtgcgctggttggcattgccgcaggaagaacgagcattctacgggctctgcgagcttgcccggcgccttgcgacgcagatagcttactgccgtacccgccatttggtgatgatgacctcaccctccaattgcgatatggccggcaggctgctggactttcatggtgttcgcagcgtttttcccgcagaacgtcgagatcccggccgcagctacattcagcacaacaaactcaacgaagacgcccctttgttgctgagaggcatgcaagatctcgctttttatttagccaagcatcaatttggcccggcatttctcgcggcagcgcaccaaggcatcggcgcggcctttagtatggcctacaagcgagcctgcctgctggataatctcggtatggcgggttttgcccctgcatttttacaacgcctgcctctcaccgccgaatggttcgccttaggcgaacgcttgcaaaaaatgttcgatttggctcccggcgtctttagccgtcgacaaggtctgggccaggggaatgctcatccggcgattgccctgttgcatcggctcatcgactcgcccgtaagggtttccgccgaacaacagggtacgacagcggaggagaaattttctctggcattccagcggttatacgcgaagtaccttcaggaaacatcagcggatcaaaccgccgccggattacaacaggcgatgaagcagaccgtcacccgaaggttgggctcccgcgcgttcatgcgccgtgaagtgatttttcaagaaattgccggctggcgcggtgaagtcagcgagatcagcgaacagttgcaaacctatctggatcgtttcgagcgccaggcgatcaacgtattacaataa

SEQ ID NO: 424077 - DNA, 441 bp, Serratia marcescens
gtgagttttatcaaagaaaaccagcagggtaaaagtaagttcagtcaatacgagagcctgggcttcgccgttaactgtatgctgatgaataaaaattacagtttgtaccatataaaaacgttgcagctatggactcaggaagcgattaatcaaaaccaattcaaaatattattcgaccatttggacaatccgttaggatatataacctgggcctacctgagagatgagacgctgggtcgatttattaacgatccgcagtttcttctccatacctcagaatgggatgagggcggcacgctgtgtattttagatttttgctgcaaaccaggcagcgcgcatttatgtttggaacaccttaaaacagttcacccaatcgcagaacgtcgcacggttgtatggcgttcccgccgaacgggcaaactgatgacgttaaaaaaataa

SEQ ID NO: 424078 - DNA, 3807 bp, Serratia marcescens
atgagcaagcatcaactattggattcacaggcgggattttactacggcaccaaggtcggcgatgacaaatcgagctataatatcgcggaatatgtcgaaataaatcacactctcgatatcgcaagaatgaaacgtgtcattcatcgcgtcatcagccaaacgccgacgctgcacgttctgtttgatgaagataacggtacgccttatcaatatcccgtcaccgccaacatctcagtggaatgggtagatctttcgcagcgcgccaacaatatggccaccgctatcgaattaatggaagcggataccaagcgcccgttctcgttgaacgctgcgccgttattcagacaaaaaatcattagactgggtgagcaacgctttctgtggtatttctgcagccaccatctgctgcttgatggttacggcacttatttgctgatccaccaagtggcacaggcctaccgaggccaaacgcagcaaccgcaagacgtacctgcgatcgatgccttgctcagggctgaatctgagtataaacagtcagccgcctatcaagcggaccgacatttttggcaagcagccagcgcctcactgccagacccgatgacattagcctgcgccaatattccctcgggacaaacgatccgccatgtgacttcgttgccctatcctgccgagcgccttgcgctgcaaaccgggcacccttcttggctggcgcgcactttcgtggtagtgatggcatatttgtacttgtgtaccggcgagaaacagcaaacgatcggcgtcccaatgatggcgcgaacagactccctgacgaggcaggcgctgacttgcaaaaccaacgttgttcctttgacgctcgatattgaggacacggcctcatgccgacagttggcgcaaaccattgaacgcatgctcaggcaactcaaaaaacatcaagcgttccgttacgaagagataaaaagtctgaggagcgtcaccagccgctcgccgctgttcaacatcgtggtcaatatcattccctttgaagcggcagcctcattttcttccgcgcagcgcagcgaaatccgtaatttacgctcaggaggcgcgcaggatctggtcttcaacatgcgtcccgatctcgataaccaaacgcttcggctggagatcgatgccgactcagggctttacgatgcggccagcctggtgcggcacagccaggggatacagaccttgtgcgacttgctgtatcacgacccggaaaatctttccgtcgcggcattgcgacaacgtttcccgctctcgctgcagggtaaagcagccaacgagaacgtggtcgatataatgcaacgtatcgatcgtgccgtcgttcaagcgccgcaacgcacggcgatcctcacgcccgcacacgcttcgttgtcgctaagagcgctgtcttatgccgttttgcagcaacagtggcgtgcgctggccgataccctggcccccgcccgtgctgcatacaccgtgctgttgctcgacttgccgcaagggccggaagccatcatctgcatgcttgctgcgctgcagttgaaaatgccgttcgtcaacctgaatgccaaaggggatggagcggctcatcgtcaactgcttgaacagtttagcgacgctatcctgattaccgatcgcacacttccctcctttcattccgaacctgacgtattggcgcattggcgcgcatcgacactcgatatgccggcggatttcgcgcacttcaccgtgtttcgccggcaaacagcggcagaggcgccgccattcccggccggaaccggctatatcatgtttacctccggctcgacgggaatgcctaaaggcgtgataggcgcccgacatgctctcaacgtttttgtcgatgcggcgataaaatgctatggcattcaaccgcatgaacgcgtgttgcaatttgcgcccttgcatttcgatgcgtgcattgaagaaattttcatgacgctgggtgccggcgcccacctgtgtatcgcccctgaggccgtcaagcacagttttgccgctttcttcacattctgcgccgatcatcaaatcagcctgctggatctgccgaccgcctactttaatgagatgctgttcgcctccggcggcgaacagacgctgccgccggccgtcacgaccgttatcatcggcggcgaaagcctttcaccgcgagccaaagaaagctggttcgcgcactatcccaaaggcagaaagttattcaactcctacggcccaaccgagacaaccgtggtggcgacggtcgccgaaatcaaaaacgatggcgccgccgtgacgataggcgcaccgttggacggtatatacacggcgatcgtcggcgaggatctcaggctgttgccgctcggctgcagcggcgaattactgatagccggagcgaccgtcagcctgggatatttgcatcagccaacgctgagcgcggaaaagttcgtcacccttgaggttaacggccatcccatgcccgcctttcgcaccggcgatatcgcctgccagcgccaggatgggcagttggtgttccttggccgcaaaattcgtgaagcgaaaatcgccgggcagcgcgtcaatatgggtgagatagaaagctgtctggcccggttgcccgcaattgtcgaaattgccgtgctggccaaaagcggcgacgcgggaacggaactgtacgcgcattatcacagccggcagccgctcagcgaggcaatgcgccgcacgctgtatggcgaactgcccaatgcacatattcctcagcgcttcgtgcatcacccaacgccgctggccaaactggctaacggcaagattgattatcgcaccctggaaagacaatcccggctgcctgaacccacacgggaattgcgttcgacgacattcaacaccctggtgaatgaggtttggctcgcgacgctgggcagtgacgatggcgacttcttcacgctcggcggcgagtcgctgcaggccataaaaatcattaacgcgcttaacgcccactgtcggttggatctgaacctgagcgacatttttgaacatccaagactcgccgatttctgccgacacctaacgcagctggcccatgcacgctatggcctggatccgcagcatctggacatccgctgcgctatcggccgccgcctatcaaccgaggcgccggccagcagccggctgtttattcaatctcccgaaggcgcagatgaacgacttttgttggccgccctcgccgacaaacacggtgtggacattctgtcaccgcaggcgctgccgttgcatgctgaatggccgctgaacgcggccatattcaacgtaccgaacgaagccacgcaatatgccagctggcttgatgcgctttcggccctgctgctcgtcctgcccggccgagttaactacatgatctttatgcatgatacagccggcggcgccagactcacgcaaagcctgctgcgcgattttcggcatgagcggctgctgttgctgcataaaaccgattcgcgccgccaagccgtcgacgccggcgttactgagttgatagccttttccgcgcggcttggctatttcccgcacatccggttcgatacggccaatgagcgattgaacggctgcgtactgaggatcttcggcttcgatgatggcgagaatatcgatcatcgcgccgccttcacaatggcacagcggagaaacccgggagtgcagttgtgtagcttgtcgcattggctgaatttgatttccgcccacagcgacaaacgcccgaataaaagcggtcgaacagggaaagctatcgacgtcaacatggaaggagtgcactga

SEQ ID NO: 424079 - DNA, 4146 bp, Serratia marcescens
atgagcgtcatcggcctgatcaatctgatggaaatggcgaaacagggagcaacattcggcgagctgtcgcctcgacgccaaaccattgagcatgtcgacgccgccgccctcagtgcggtgcaggaagacatcaccgcatttttatctgtctgtacgccagataatgcagtgcgagacaccggggagaagccttgttacaccgtcaatcaccacgcggggcaatacctgtggctgtatgaaaacttcaccaagaacagcccgctgtataacattccgatcgccaaagagatcctggggccctttgaacccacgcgtttgctcgccgcgctgaaaaaactactcaagcggcacggtgcgctttgcggccgctatcggctagacggggaagccatcaccgttgacatcgtgcatcctgatgaaaccattttcgaacacagtctcgaggacatcagcgggcagaatagtgaggagcagcaaaaaagtatgctggcggcgcttaacgcccagtgcacgattccgtttgatctcggtgccgagtatcccctgcgctgccggatcttgagaaagagcgcgcagcaccactatctgttcttgacctttcaccattgcgtggtcgacggctggacggccaatttgctggtggatgaactgagccgtggctatcacgcgcacgaagagcattgccattatgacaacggccaggcgtttttccgctaccttgaagaccctttcctcgccgtcgccaatgtcgatgacagcatggcgttttggcgcgatgaactggatggtgcgccggaaaaacacgcgcttgaatacgatattgccatcaccgcggcaggaaaaacacagaatatcgtcagaacatcgctgacgaacgaactgcagtcggctctggcccagttagccaaacataacggtacgacgctgtttacgctgttgcactccgccttcgcgttactgattgccagagaatctgcgacggatcgcgtggtcatcggtagcccgatcgccaacaggaacgagccaacgttaaacgatgccgtgggcagcttcgtcaacacgatcgctcaccaatttatcatcactggcgacgacagtttcaccgcgctgctgcaaaagaacgcgaataaatttgcgcgcgctttcaaacatcagggtttgccattctcttacctggttgaacaactcaagcccacgcgcggcaagtttcaccccatttttcaaatcatgttcgtctgccaacatcgcaaaagcaatgagctaaatgttggcggtgcgcaggttaacaccctgccgagaggctatgcgccgcccaagtttgatctggttctggaagtgatttccagcgcagagggcattcagttggaatggcaatacaacgccaagctgtttacgccggagcgcattgatggattggcgcaagcttacgcattgctgctgcagcaaattgcctgcgatccctcgcgggccgtcggccactattcgctggcgtcaatggccgataaccggcaattgcgtcagctctccatcggacaggcaatgccggcattcttgcggcaacctctttccgatcggctgttacgcactgcccaccagcatgcggatcgcccggcgttgtacgagggcgatagcgtatggcattacgatcgactgttgcggcacgccggcctcgtggcgcattggctgatcgcccataccgccccaggcgcgctcatcgccatcgatcttccacgcggcgctcatcaagctattgcggcgctcggcgtgatcctcgccggacgcgcctacttgccgttggccgaaggattgccggatgcccgcgcagcggccattatgcggatatcaggttgcgcctgggttttgagcaaccaggctcaccatcgcgcccgctatccgcagactacccgcattcaagatctggaggcgctgttttcccctcatgtcacagacacagcgaccttcccgccaggcgaagcggaagcgctcgcctatgtcatttatacgtcggggacgaccggcacgccaaaaggtgtggctatggaacagggtgccgtcaccaataccttgctgaccatgaaccggcagtttaacgtttctcatcgtgacaacgtattggcgctcgccgatctggccttcgatttatcggtctatgacctgttcggcagctggctagccggcgcatcggtaacggtgctatcgccgcatgaagcgaaagagccgtcagcatggctaaatgcgatacgccagcggcaaatcagcatctggaactcggttcccgccatcttgcaaatgctggtgcaatattgcgcacaagaaaacatcctgtcgctgcctcaactgcggcatatttggctgagcggcgatcgcatctcttcgcggctgatcgccgaggcacatcggctttgccccaacgccaccatcaccagccttggcggtgcaaccgaaggggctatatggtcaatttatcatccggttacacgagatacgcactacagaaacgccatcccctatggaaccgcattgccaaatcagagcatgtgggtgttggatgaaaaactcgagccgtgcggtttcggcgttaccggcgacatttatatcggtggcgttggggttgcccgcgagtattggcgcgatagccaaaccaccgtcggcagctttgtgcttttcccaaccaccggagaacgcgtgtaccgcaccggcgatcgcggccgttggcatcgcagcggttacatcgagtttctcggccgcgaagaccaacaggtgaaactgcagggttttcgcgtcgaattaggtgacgtcgaattcgcgctcaaaagcagcgagctggtcgctgaagcgtgtgtcgtctgtcgcgatgaaaccgggaacggcacaccgcatctggaggcttacatcacattgaccgaggcggggaaaacctgcattcaagcagagcaaagaatacgcgagctggttacggccgcattgcccacgtatatggcgccatcccgctatcatctcattgaacgtttcccactttcacgcaacggcaaattggatcgcaccttgctatcgccaggcaccgaacggagtcaggccagcgatgttgcacccgcggcgtccgcggaactcatgctgctacgagagctgttggcgaatacgttaggctgtaccccagacaagatcgacccccatgccagcttcttcagcaatggcggcagctcgctttccggcatcacgtttttgggcaacatcaagcgcgcccttaatgtggaattaaccctggcggaaatccttggctactcacagctcgataaacttgtcgagcgtctgcgcgcgaatgcgcccctgccgttatcgatgctgtccggctcagccgatcgcccctctctgcccaccttgtatttggtgcatggcgccggcggccaggtacatcaatatgcaaagtggacaaaacagctttgcgcctgcgccaacatcattaccatcgccagcccggggttggccgcgccaggcgcagacgacacactcaccctgcagcgattggccgcctcccacttggcggccataccgcgtgccaaacgcgacacggccgttatcgccggctggtcattgggtggccaattagctgtccatatggcggcgctggccacggaacaaggcgcgccctttgcgcatgcggtggttgtcgacagcggttttcccgcccagcagcccgcagtgaagcgacgtttcagcgtggcccaaagttacctcagtctgttcgactccctcggtattgcgcgccatttgtgtcggcgtcaagaaacgaatgcgatagacagcttcgccaacgagataaaaatgcactatgcgctgaatcagagcgtgcttgcggagaagatcacgctggaacatgccgaaaccttctgttgggcgctgaaaaaatcgttcgaactaacgaataacgccggccccctgccgcagatagcgataccgctaacgctttggctcagccagcaacgtcagcgtaaacacccccatcttgcacaacgctgggagatgcaatcctcgcatagcgttcaactcagttattgtgcagaaacgcattacagcattttaaacaacgctcaacttcttcgagcgctgacgcaattgctgcacgcgttgtcaacatcattggaataa

SEQ ID NO: 424080 - DNA, 186 bp, Serratia marcescens
atgaaattaccaagcagttggatttttttgttctgcttttactacacatttatggatattttttattctttatttttttccgaagacaggaagtttaccagcacaatcattcaatcctttatcttttcaaccttgctagtggcatttttctggtatcggaaaactgcaaaaaccaaaaaccaataa

SEQ ID NO: 424081 - DNA, 288 bp, Serratia marcescens
atgcgcaatcttacctctgaagaatgttcaatcatttccggtgcaggagatcgcagcggtacattgacggtttccgcagaaactgtcggcgcagcgatcggcggcggcatcggctctatcggtggcgtggcgggcggcgttgtcggcactattgtcggcggtgctgtcggtaactatgtcaccggcgatcgtgcccccggctcagttggcccatcaggcattccctggggcgggagcaacggcggcggtaccatgtgggggaacaacaacaataccgattcgaactga

SEQ ID NO: 424082 - DNA, 2100 bp, Serratia marcescens
atgactgaatcttatttcgacacgctaaagggcaaactcaatttgtcgctgcgccgcaaagtgccgcagatcctgcaaactgaagcctcggaatgtgggctggccagtctggcgatggtatgccattaccatggcttgcaaatcgatctgtttaatctgcgcagccgctacggcttttcttcacgcggggcgacgctgtccgcgctgattgacatcgcgagcgcactgaaactgcaatccagagcgttatcgctgaatatcgatgaacttaaggcattgaaaatgccttgtattctgcattgggacatgaagcatttcgtggtgcttgtcagtgtcagccgagggcgggcggtgatccatgatcctgcctttggccgtaaagtgctggggttgcatgaactgtcgcggcattttaccggcgtagcgcttgagctgtggccagacagtgaatttcagccgatcaaacagcaaagcagattgcgttttcgcaagctgatgagcaatgtgcgcggcctcaagggggccttgctaaagatcttctgtctgtcgatcgtgattgaaacggttaatctgctgttgcccgtcggtacgcagttggtcatggaccatgtgattctggccggcgatcatgatcttttagcgctgatatgcataggattgctgttttttattttattccgtaccggcgtatccatgttgcgctcgtggatctctatcgtcatgggcgcgttgatagacgtgcaatggaaggcgggagtgttcgatcatctgatgaaattgccgctttccttctttgagaagcgcaagttgggtgatattcaatcccgtttcggctcattggatacgataagagcgactttcactaccagcatcgtcagcagtattattgatggcatcatgtccgtaggcgtatttatcatgatgctgctctatggcggctggttggtttgggtggtgctcggctttacggcgatatacgttattctcaggttgtcgacctatcaatattatcggcagctgtcggaagagcagttggtgaaaggggcacgagccgggtctcatttcatggaaacgttgtatagcgtcagtacgttaaaggcgctggggttatctgaaacccgttcgcagtattggctgaatctaaacgtagaaacgatcaatgccggtatcaagctgaccaaattaaacatgatgtttggcggcctgggggcgtttatcgccacctgcgatcaggtgatcatcctttggctaggcgcggcattggtcatagacaatcaaatgacgatcggcatgtttatcgcgtttaacgcctaccgcgggcagttttcggagcgtgccagcagcctgatcgacatgatgcttcagctgcgaatgctgagtttgcataatgaaagggtggcggacattgtgctttcgtcaccggaatcgcaaatgcccgcgcgccagctcttcacaaaaggcaaagccgcggagcttcgggtgcggaatctgcgctaccagtatgatcgcttggcgaaacccattatcgcggatttgaatctcagcattgcagcgggagaaagcgtggcgattgtcggtccctccggcgcgggtaaaaccacgttgatgaagttaatgtgtgggttgctgtcgccggatgaaggggccgtgctggtcgacggtatggatatcagcaacattggcgttaataattatcgccaatgtatcgcttgcgtgttgcaggatgacaagctgctggcgggatctatcgctgaaaatatttcaggatttgatgccgaaatggatctgaagcgtattgaggcgtgcgcacgacgttgcaatatgcatgatgatattcaaaacatgccgatgggctatgaaacattgatcggcgaactgggggggagcctttctggcgggcagaaacagcgcttattgatagcccgtgcgctctatcgtcgccccagcattctgtttatggacgaagcgactagccacctggatctagataatgaaacacatattaaccgcgctatttcacaactgaacattacccgcgtgattattgcgcaccgtccgtcgacgattgcctctgcggatagagtcattcgactcgggtaa

SEQ ID NO: 424083 - DNA, 1287 bp, Serratia marcescens
atgcgtgatttgtttcgacaggaagccacggatcatcagcgggcgaaatgggcgggtaaggccttattgataaacggcttgcccgcctggtgctttggtcttttatcgtttttatttattcttgttttcctctcttttcttatattcagtcattatacgcgccgcattaatgtttatggtgaaatcaccaccttcccccgctcagtcaatgtgtttgcaccccagcagggttttatctcggaacgcttcgtcgaagtgggcgacgtggttaaaaaaggccagcgtctttatcagattgatgtcagccgggtgacggataacgggaaagtgagcgccaatacgcgcctggcgctggaaaaccagttaaaacacgttgacagcatcatccttaagttgcaagacaacaagcgcatgacgctggaaaatctacgcgcgcaaaaaaaacagtatgaattggcgcacatgcagtccaaacagctgttggataacgcacgagaaggggtggcatttgctcaggacaacatgcgttcctataaggaatatcagcagcgcggtctgattaccaaagatcagcttagcggacaaacctattcgttttatcaacaacaaagtctgttccaaaacctgcatagccaacacattcaggaatcgttgcaaattacgaatttggaaagcgacatcgttacgcgcgcggcagatttcgataatcaaatttcacagtaccagtttcagcgtaatgatttgcaacggcagttagcggaagccgatgccagcggcgcattgatcgtgaacgccccgagcgatggccgcattgaatctctcagcgttaccccgggtcagatggtcaatagcggtgacagtctggtacagattattccacgtaatggcgcgatttatcagctagttttatggttgccgaacgccagtgtgccttatgtttcagcgggggacgccatcaacattcgttatgatgctttcccctatgagaagtttggccagtttcccggcaggatagaaagcatcgcttatgtgccggcctccatgcaagaaatgtcaacttacagcagttctcccgtgcatcagcccaacgcgcaaacggcatcttattacaaggtcaccgtttccatggatgaaacgcatatcagttaccagggcaaggcgttgcagctcactaacggcatgcgggctcaatccacgctgtttctggaaaaaaggcctttatatcaatggatgttctcgcctttctacgatatgaaaaacagcctgatggggccaatcaatgactga

SEQ ID NO: 424084 - DNA, 1323 bp, Serratia marcescens
atggcactgcaattcaccacggctattcgtggcaatttttttgatatcgcggcctgcgtggaggaaccgcaacagcttgacgaacgcctgcggcacattcccgacggtttgttgctgctgaatgggggcgtcatcgcctggttcggcagctggcagcagggtgaggcgctgttgccgccgggtttcgcggtcacggagtatcgcgacaaaccgatcgtaccgggctttatcgacacccatatccactatccgcaaaccgaaatgattggcgcctatggcgaccaactgctggactggttaaataattacaccttcccgaccgaaagccgctatggctgcgagcggcacgccgacgcgatgtcggccttctttctgcgggagttgctgagcaacggcaccaccaccgcgctggtgttcggcagcgtgcatccgcagtcggtcgatgcgctgttcagccaggcgcaaacgctgaacatgcgcctgatcgccggtaaggtgatgatggatcgccatgcgccgcaggcgctgctggaaacgccggagcagagttaccgcgacacgcgcgagttgattgaacgctggcacggcaaaggccgcctcggttacgccattacgccgcgctttgcgccaaccagcaccccggcgctgctggcgcaggtgcagcggctgcgcgaagaattccccgacgtgtggctgcagacgcacctgagcgagaatccgcaggaagtggcctgggtaaaatcgctgttcccgcaaagccaaagctatctggacgtttaccatcgctacggcatgaccggcggcaaaagcgtgttcgcccactgcctgcacctggaggagcaggagtgggactgcctgtgcgagacccgctcggcgatcgccttttgccccacctccaacctgttcctcggtagcgggctgttcgacctgcagcaggcctggcgcaagcgggtgaagctcggcatcggcaccgacgtgggggcaggcacctccttcaatatgctgcgcacgctgggcgaggcgtacaaggtcggccagctgcagcattaccggctctccgccgtagaagcgttctatcacgccaccctgggcggcgcccgcgcgctgtcgctggacgacaaaatcggcaacttcgacgtcggcaaagaggcggatttcgtggtgctcgatccggcggtgacgccgctgcagcagttacgctacgccaacagcgccacgccggcggaacaaggcttcgtgctgatgacgctgggggacgatcgcaatatttatcgcacctatgtggacggcaaggtggtttatcaggcggcggtgtcagactga

SEQ ID NO: 424085 - DNA, 525 bp, Serratia marcescens
atgtccgccaccgcttccgccccgcacgccgcgctgtcgcgcctttacgccacccatcacgcctggttgcagggatggttgcgccggcggctgggctgcgctttcgacgcggacgatgtggcgcaggacacctttatgcgcctgctgaaaagcgacgccgcggagaccctgcgcgagccgaaagactttctggtcaccgtcgccaagcgggtgatggtcgatctgttccgccgcagaacgctggagcgcgcctatctggagatgctgacgctgatcccggaaggctacgccccgtcgccggaacagcgccagagcctgttggaaagcctgcagcagatcgacgccatgctcgacggcctggggccgaaagcgaaacaggcctttctgctgtcgcagctcgaaggcctgggctatgcggacatcgccgtgcgcctcggcgtgtcggtcagttcggttaaaaaatacatggccaaggccaccgaacattgcctgctgttcagcctggaaaacgacgttttctcatga

SEQ ID NO: 424086 - DNA, 957 bp, Serratia marcescens
atgagcaacgccattacccccgagcagcgccaggcgctgaagatggccgcacactggtatgccctgctgtgcgatgagcacgtcaccgaccgccagcgcctacagtggcaagcctggcaccagcagcacgccgatcaccgctgggcctggcagcgcgtcgaagcgctgcagagccagctgcagggcgtgccgggcaagttcagctaccgcgcgctcgatcgcgccggccgccagtcggcaatcgatcgccgcaccctgctgaagagcctgctgctgttgcttggcgtgggcggcggcggtttcctttaccaatcgccgttcggccgggaactgcgtgccgactaccgcaccgccaccggcgaaatcaaacccattgtgttaagcgacggcacccaactggtgctcaacaccgccagtgcggtggacgtgcattacgacgatcgtcaacggttgatccgtttgcacgccggagaaatcagcctgattaccgggcgcgacccccggccgctgtgggtgcaaagcccacagggggcgatgcgcgcgctcggcacccgctttttggtgcgcgagatcggcggcgagacgcgcctgacggtgctggagcatgcagtcgaagcgcagctggcgcaggatccgcagcaaacgcgccgggtggacgccggggaacaaatcggcttcagcgcctcggccttcagcgacaagcaaccggctgcggcgcaggacggctggctgcgcggcgtgctgagcgtcagccaatggcggctggaccgggtgatcgccgaactggcgcgctaccgacgcggccacctgagctgcgatccggccgttgccggcctgcgcgtcagcggcagtttcccgctcaacgataccgatcgcgccctcgccctgctcagccaaacgctgccggtgcgcctgcaaagctttacccgttattggctgcaaatcgttcccgcctga

SEQ ID NO: 424087 - DNA, 2358 bp, Serratia marcescens
atgaacaacgcttggggaaaagtagcgccggcttcgctttggggaaaacgcgccacgccgctggccgtggccattggcctggccttcgccgcaccgctgacggcgagcgccgccagcgccgccgcagcctatcatattccggccggtgagttggacggcgcgctgaacgctttcgccgcgcgcgccggcatcgcgctctcggtggacggcacgctgaccgccggtaaacgttcgccgggcctgagcggcagctacggcgtcgatgacggcctgaacgccctgctggcgggcagcggcctgcaggctatagcgctcggcaacaacggttacacgctggccaaacggccgcagccgcagccgcagaaggaagaagacatcaccgtggtcggtgactggctggcggaaggccgccaggtagacgtgttcgaacatcccggtgcgcgcgacgtggtgcgccgcgaagaattcgccaaaaccggcaccaccgccgtgcgcgaagcgttgaaccgggtgccgggcgtggtggcgccggagaacaacggcaccggcagccatgacatggcgctgaacttcggcattcgcggcctcaacccgcgcctcgccagccgctccaccgtactgatggacggcatcccggtgcccttcgcgccttacggccagccgcagctgtcgctggcgccggtctcgctcggcaatatggacgcgatcgacgtggtgcgcggcggcggcgcggtgcgttatgggccgcagagcgtcggcggcgtcgtcaacttcgtcacccgcgccatcccgaaaaccttcggcatggaggccggcatgcaggggcagctcagcccgacttcgcgccaggatcacccgaaaggcaccggcaacctgatgatcggcggcactgccgacaacggcttcggcgcggcgctgctctactccggcacccgcggcagcgactggcgcgagcacagcacaaccaagattgacgacgtgatgctgaaaagccgttacgccccgaacgaggtgcacaccttcaatagcctgctgcaatactacgaaggcgaggcggacatgccgggcggcctgagccgggcggactacaacgccaacccgttccagtcgacgcgcccgtacgacaagttctggggccgccgccagctggcgaacttcggctatcagtatcagccggatcaacagcacaagttcgacgtgcagagcttctacacctacaccctgcgcagcggctatctggatcagggcaaaaatctgacgctgtcaccgcgcgaatactgggtgcgcggcgtggaaccgcgctacagccagagcttccgctggggagactcggcgcatgaggtcggcgtcggctaccgctacgtcagcgaatccacccacgagctgcgctacaccagcaaggccagcaccggccggctgccgtccagcgccagcccgtacgatcgcgatacccagtccggcaccgaggcgcacgccttctatatcgacgatcgcatcgacatcggcgactggaccatcacgccaggcatgcgctacgagtacatcaagtcgtatcagaacaactacatcaagaacaaccgcctcgacgtcagctataacgcgccgctgccggcgttgaacgtgatgtatcaccttaacgaatactggaacctgtacgccaacaccgaaggctccttcggcaccgtgcagtacagccagatgggcaaagcggtcgacagcggcaagattgaaccggagaaggcgcgcacctgggagctgggcacccgctacgccggcgatgcgctgaccggcgagatcgggctgttcctgatcaacttcaacaaccagtacgactccaaccaggtgaccgacagcgtgaccgcgcgcggcaaaactcgccacgccgggctggagggcagcctgcgttacgatctgtcgcagctgacgccgaaactggacgatctgaccgcctacgccagctacgcctacgtcaacgccactatccgcgaagacggcggctacaagggcaaccaggtgccgttctcaccgaaacataaaggcacgctggggctggactacacgccgggcaactgggcgtttaacctcaacggcgagttccaatccagccagttcgccgataacgccaacaccgtggcggaaagcgccgacggcagcaccggccgcattcccggctatatgctgtggggcgtgcgcgccgcctatgattttggcccggaaatggccggcctgaatctgggcgtcggcgtgaaaaacctgttcaaccacgagtatttcacccgtgcctatgacgataataacaaaggtctgtacatcggccagccgcgtacgatctatctgcaaggctcggtgaagttctga

SEQ ID NO: 424088 - DNA, 522 bp, Serratia marcescens
atgaatcataatgacctttctcagtgccgcgtggacaccgaccgtttgttgattgccccctttaccgcagcagacgccgacgatgtttaccaggcgatcacccccactctgacgcgctttatggcctttgagccggaggcgtcgccggaagatttcgccaacgtctggcaaggctggctgccgctgatgcgcgaaggcgaagaagtgatcttcgtcgcccgtcggcgcgaagaccggcagtttgtcggcgtcgacggcgcgcacaacctgcgcagccgcaccccggagctgggcatctgggtgaaagagagcctgcacggccagggctacgggcgcgaaatcgtgcagggcatcgcgcactgggtcagcgagcgctttcagcctcagcaccttatctacccggtggccgagcaaaataccgccagccgccgcctcgccgagtcgctgggcggcgtgctggccggcaagcgtgaaaacatcaagtatgacgccgtggtctaccacctgccgcctcagcgctaa

SEQ ID NO: 424089 - DNA, 750 bp, Serratia marcescens
atgattatttttgttaccggcgccacctccggtttcggcgaggcaatcgcacgccgttttatccgtgaaggccatcaggtgatcgccgccgggcgccgccttgagcgtctcgaagagctgcaggacgaattagggcaagcgctgcacatcgtgcggctcgacgtgcgcaaccgcgctgccattcaacaggcgatcgaagcactgccggccgagctgcgccagatcgacgtgctggtgaacaacgccggcctggcgctggggctggagccggcgcacaaggccaacgccgatgactgggaaaccatgatcgacaccaacgccaaggggctggtgaacatgacgcgcgcgctgctgccggccatggtcgagcgcaacgtcggccatgtgatcaacatcggctccaccgccgccaactggccttacgccggcggcaacgtgtacggcgccaccaaggcgttcgtcaaacagttcagcctggggctgcgcgccgatctgcacggcacgcgcatccgcgtgaccgatatcgagccgggcctggtgggcggcaccgaattctccaacgtgcgcttcaagggcgatgacggcaaggtcaacaaaacctacgaaggcgccgatgcgctgacgccggaagacatcgccgagtcggtgttctgggtcgcgacgttgccggcgcgcgtcaacatcaacacgctggaaatgatgccggtcagccagtccttcgccgggctgaacatccaccgcggcgcctga

SEQ ID NO: 424090 - DNA, 795 bp, Serratia marcescens
atgaacagtaacttcagacgtcacctgttgagtctgtcgttactggttggcgtagcggccccctgggccgctactgcccaagcgccaatcagtaatgtcggctccggctcggtcgaagaccgcgtcacctcgcttgagcgcatcagcaatgctcaaggccagcttttaaatcaactccagcaacaactctctgataaccaacgcgacattgattctctccgtgggcaaatccaggaaagccagtatcagttgaatcaggtggttgaacgccagaagcaaatctatcagcagatggatagcctcagccagggcggcgctcagagcgcctctgcggccgcgggcgctgccggcggggcagccgcaggcgcatcttccgatgcgggcggcagcgctcccgcagccgcctccgccacgccgagcggcggtgatgagaacagcgactacaacgccgctgtttctctggcactggaaaaaaaacagtatgaccaggcgatttccgcctttcagtccttcgtaaaacagtacccgaagtctacttaccagcccaacgccaactattggctgggccagttgttctacaacaagggtaaaaaagacgacgcggcctactattttgcggtggtggtgaagaattacgctaaatcaccgaaggcgccggacgccatgtacaaggtgggtatcatcatgcaggagaaagggcaggccgataaagccaaagccgtgttccagcaggtgattaaacagtacccaaccagtgcggcggccaaacaggcgaaaagtcgcgtaggcggttaa

SEQ ID NO: 424091 - DNA, 510 bp, Serratia marcescens
atgcaactgaacaaagtgctgaaagggcttctgctggcactgccagttctggctgtagcagcttgtagttctaacaaaagcgcaaacaacgaccaatctggtatgggcgctggcactggtatggaaaacggcagcagcaacctgtcttccgaagaacaagctcgtctgcagatgcaagaactgcagaagaacaacatcgtttacttcggcctggacaagtatgacgtaagctccgaattcgctcagatgctggacgcgcacgctgcattcctgcgtaacaacccgtcttacaaagtgaccgttgaaggccacgctgacgaacgcggcacgccggaatacaacatcgctctgggtgagcgccgtgctaacgccgttaaaatgtacctgcagggtaaaggcgtttccgctgaccagatctctatcgtttcttacggtaaagaaaaaccagcagtactgggccacgacgaagcggcttatgctaaaaaccgtcgtgccgttctggtttactaa

SEQ ID NO: 424092 - DNA, 1293 bp, Serratia marcescens
atgaagcaggcatttcgagtagcgctaggttttttaattctgtgggcgtccgtgctgcacgcggaagttcgcattgaaatcacccaaggggtcgactccgctcgtccgattggcgtggtgccgtttaaatgggcgggcccaggcacgccgccggaagatattggcaagattgtcggcgcggatctgcgcaacagcggaaaattcaacccgatcgacgtggcgcgcatgccgcagcaaccgacctccgcgtctgaagtgaccccggcggcctggactgcgctgggcatcgacgccgtggttgtcggccaggttcaacctggcgccgacggtagctacctgatctcctaccagctggtggacacctcgggttcgccgggcaccgtattggcgcagaatcagtataaagtgaccaaacagtggttgcgttattctgcccataccgccagcgacgaagtgttcgagaagctgaccggcatcaagggcgcgttccgtacccgtatcgcctacgtcgtgcagaccaacggcgggaaattcccgtatgagctgcgcgtagcggattacgacggttacaaccagtttacggtgcaccgttcgcctgagccgctgatgtccccggcctggtcgccggacggcagcaaactggcttacgtgaccttcgagagcggccgttccgcgctggtggtgcagaccctggctaacggcgccatccgccagatcgcctcgttcccacgccacaacggtgcgccggcgttctcgccggacggcagcaaactggccttcgcgctgtccaagagcggcagcctgaacctgtacgtgatgaacctcggctccggccagatcacgcagctgaccgatggccgcaacaacaacaccgaaccgacctggttcccggatggccagtctctggcgtttacctccgaccagggcgggcgtccgcagatttataaaatcagcgccagcggcggtgccgcacagcgcctgacgtgggaaggctctcagaaccaggattctgaagtcagctccgacggtaaattcctggtgatggtcagcaccaacagtggtgcgcaacacatcgccaaacaagatcttggatcgggcgccgttcaggttttgaccggtaccttcctggatgaaacgcctagtattgcgccaaacggcaccatggtgatctatagctcgacgcaaggtatgggctccgtgctgcagttggtgtcaactgatgggcgtttcaaagcgcgtcttccggcaactgatggacaggtcaaattccctgcctggtcgccgtatctgtga

SEQ ID NO: 424093 - DNA, 1203 bp, Serratia marcescens
ttggtaaaggcaactgagcaaaacgataagctgaaccgcgccgttattgtttcggtcgttctgcacttcatactgattgccctgctgatttggggatcgctgcaggaaaatgtcgacatgggcgccggcggtggcggtgatggcaccgtggtgggcgcggtgatggtcgatcccggcgcggtggtggagcagtacaatcgccagcagcagcagagcaacgatgcgcagcgtgccgaaaagcagcgccagaaaaaggcggagcaacaggccgaagagcttcagcagaagcaggcggagcaacagcagcgcctgaaagagctggagaaagagcgtttggcggcgcaggagaaagccgcgcaggacgccaaagcgcaggctgagcaacagcagaaggcggcggagcagcagaaacaggcagccgagcagcaaaaagcggcggaagccgccgcagccaaggccaaagagcaacagaaggtcgccgaggccgccgccgcgaaggcgaaggctgaagcggacaagatagccaaagcgcaggcggacgcgcagaagaaagccgaagcggaagccaagaaagaagcggccgccgctgccgccgccaagaaacaggcggaagaggcgaagaaagccgcggccgccgccgcagagcaaaaagccgcagaagctgcggagaagaaagcggccgctgaagccgagaaaaaagccgcagcggaagccgagaagaaagctgcagccgagaaagccgctgccgccaagaaagccgccgcggacgccaagaagaaggccgccgctgaggctgcgaagcaatcggaggaggtcaacgatctgtttggtggcctggcggacggcaagaacgcgccgaaaggcggcggtgccaaatcgaagggcgacggtaaaccggccgggcagggcaatgccaaaacggctggggccagcggggcggatatcagcggttatatggggcaaattcagggggcgattcagagcaagttctatgacgccagctcgttcgccggcaaaacctgcgatctgcgtatcaagctggcgccggacggcctgctgataagcgtacaagcggcgggcggcgatccggcgctgtgtcaggccgcggtgtctgccgccaagttggcgcatataccgaagccgccgagcgatgccgtttatcagcactttaagaattctatccttgaattcaaaccgaaataa

SEQ ID NO: 424094 - DNA, 429 bp, Serratia marcescens
atggcgagagtacgtggacgtagtcggcgcgagctgaagtccgaaattaacatcgttccgctgctcgacgtgttgctggtgctgctgctgatctttatggcaaccgcgccaatcatcacgcagagcgtggaggttgacctgccggacgccaccgattccaaaacggtgtccagcgatgacaatccgccggtgatcctcgaggtttccggcgtaggtcaatacaccctggtggtggatcacaaccgtatggagctgttgccgcctgagcaagtcgcggccgaagccaagtcgcgtttggcggctaacccgaaaacggtctttttgatcggcggtgcgaaggaagtcccttacgatgagattatcaaggcattgaatattctccatcaggcgggcgtggcttccgtggggctgatgacccagccaatctga

SEQ ID NO: 424095 - DNA, 684 bp, Serratia marcescens
gtgactgacatgaacatcctagatttattcttgaaggcgagcctgctggttaagcttatcatgttgattttgatatgcttctcggtagcctcctgggcgatcatcattcagcgcacccgcatcctcaatgcggcgacgcgtgacgccgaagcctttgaagacaaattctggtccggtatcgagctttcccgtctgtaccaggaaagtcaggcgcgtcgcgatagcctgaccggctccgagcagatcttccattccggcttcaaagagttcgcccgcctgcaccgcgccaacaaccatgcgccggagtcggtgatcgaaggggcgtcgcgcgcgatgcgcatttcgatgaaccgcgagctggaaacgctggaaacccatattccgttcctcggcaccgtcggttcgatcagcccgtacatcggcctgttcggcaccgtgtgggggatcatgcacgcctttatcgcactgggcgcggtgaagcaagccacgctgcagatggtggcgccgggtatcgccgaagcgctgatcgccaccgcgatcggtctgttcgccgccatcccggcggtcatggcctataaccgtctcaaccagcgcgtcaacaagcttgagcagaattacgacaactttatggaagagttcaccgctattctgcatcgtcaggccttctccagcgacagcaaataa

SEQ ID NO: 424096 - DNA, 297 bp, Serratia marcescens
atgagctcgtccgtgattgacaagctgtacgctgtcaccgacaagggcccgatccgggccctttccctggtgctggcgttggttttggcggggtgcgtgttctgggatccgacgcgtttcgccgccaaaaccagctcgctggagatttgggaagggctgctgctgatttgggcggtgtgcgccggggtgatccacggtttcggattccgcccgcagcgcagcatttggcgggcctttttcgcgccgcttcccgcaattgtgatcttgtgcgcaggattactttacgtttctttataa

SEQ ID NO: 424097 - DNA, 1140 bp, Serratia marcescens
atgtttgactatgaagtactgcgatttatttggtgggtcctggttggcgtactgctgatcggcttcgccgtcaccgacggtttcgacatgggcgtcggcattctggtgcgcatcatcgggaaaaccgataccgagcgccgggtgatgatcaactccatcgccccgcactgggacggtaaccaggtgtggctgatcaccgccggcggcgcgctgttcgcagcctggccgatggtctacgcagcggccttctccggcttctacgtcgccatgatcctggtgctggccgccttgttcttccgcccggtcggtttcgattaccgttccaagctggagagcagccgctggcgcaatatgtgggactggggcatcttcatcggctcctttgtgcctgccgtggtcttcggcgtggcgttcggcaacctgctgcagggcgtgccgttccacatggacgagtacatgcgcctgttctacaccggcaacttcttccaactgctgaatccgttcggtctgttggcgggcgtggtcagcctgaccatgctggtcacccagggggcgacctacctgcaaatgcgcaccaccggcgagatccacctgcgttcacgcgccgcggcgcagatcgcgacgctgatcatggcggtgtgcttcctgctggcgggcgtatggctggtgaaaggcatcgacggcttcgtcgtgacgtcggcgctggacaccctggcggaatccaacccgatgcgtaaagaagtggcgcatcaggccggggcctggctgatcaacttcaacaagtatccgctgctgtgggcgttgcctgcgctgggcgtggtgctgccgttgttcaccatcctgttctcgcgtctggagaaaggcgcgctggcgttcgtcacctcgtcgctgaccatcgcctgcgtcatcctcaccgccggggtcaccatgttcccgttcgtgatgccgtccagcaccgtgcctaacgtcagcctgaccatgtgggacgcgacgtcgagcctgttgacgctgaaagtgatgaccgtcgtggcggcgatctttgtgcctatcgttttggcgtacaccagctggtcgtactacaaaatgttcggtcgcctcgacaagaactacatcgaaaacaacaagcattcgctgtactaa

SEQ ID NO: 424098 - DNA, 1569 bp, Serratia marcescens
atgtttgatattgtcgaactgtcgcgcttacagtttgctttaacggcgatgtaccatttcttatttgtcccattaacgctcggtatggcgttcttgctggcaattatggaaacggtatatgtcctgtctggcaaacaaatctataaagacatgaccaaattctggggaaagttatttgcgattaactttgctctgggtgtggccaccggtttgaccatggagttccagttcgggactaactggtcgtatttctctcactacgtcggcgatatcttcggggccccactggctatcgaaggtctgatggcgttcttccttgaatcgacgctggtcggcctgttcttcttcggctgggatcgtctgagcaaggtgcagcacatggcggtaacctggtttgtggccctcggctccaacctgtccgcgctgtggatcctggtcgccaacggctggatgcagaacccgatcgcgtcggatttcaacttcgaaaccatgcgcatggagatggtcagcttctccgaactggtgcttaacccggttgcgcaggtgaaattcgttcacaccgtggcttccggctacacctgtggcgcgatgttcgttctgggcatcagctcctactacctgctgaaaggccgcgacatcgcctttgccaagcgctccttcgccatcgctgccagcttcggtatggctgccattctgtccgttatcgttctgggtgatgaatccggctacgaaatgggcgacgtgcagaaaaccaaactggccgctatcgaagcggaatgggacacccagccggcgccagcgtccttcaccctgttcggcattcccgatcaggacaagatggaaaactccttctctattcagatcccgtatgcgcttggcctgatcgccacccgctccacggacactcaggtcaccggcctgaaagatctgatggcgcagcatgaagtgcgcatccgcaacgggatgaaagcctaccagctgctggaagagctgcgcggtggcaacaccgatcctgcggtgcgcgccgaattcaacaaaaccaagcaagacctgggctacggcatgctgctgaagcgctataccccgaacgtcaccgacgcgacggaagcgcagatccagctggcgaccaaggactccattccgcgcgtggcgccgctgtacttcgccttccgcatcatggtggcctgtggcgtgatcatgctgttgatcatcggcctgtcgttctggaacgtgatccgcggccgcatcggccagaaaaaatggctgcaccgcgcggcgctgtacggtttgccgctgccttggatcgcgatcgagtccggctggttcgtggcggaatacggccgtcaaccgtgggcgattggtgaggtgctgccgacggcggtcgccaactcttcgctgaccgcgggcgacattctgttctcgatggggctgatctgcggcttgtacaccctgttcctggtggctgaattgtacctgatgttcaagtttgcgcgtctgggtccaagcagcctgaaaaccggccgctatcactttgaacaaccgactgccgccgtgcaggaagcgcgctaa

SEQ ID NO: 424099 - DNA, 1899 bp, Serratia marcescens
atgaaaaaaatcatctttgcctctgtcttgggactctcgggaaacgccatggccgccgaaacggtaaatatcaccctgctgggcacctccgatctgcacggcaccttcgtgccctgggactacgccagcgacacggagaatctggcgggcagcctgagccagatagccacccaggtcaaaaaggtgcgcgccgagcagcccaacctgatcctggtggacgccggcgacaccattcagggcaacttcgtcgaaaccttcaagcatgaggccgtcagcccgatgatgctgggcctcaacgcgctcaattatgacgtctgggtgatgggcaaccacgagttcgacttcggcctgccggtgctggctacgccgctcaagcagttcaagggcgcggcgctggcgggcaatatcgtctgggacaacggcaagccctatctgccggcctacaccatcgtcgaacgccagggcgtgaagatcggcattatcggcatggacacgccgatgaccgcggaattcgccaagggcaccgatcgcatcaaagggctgaacttcaccgatccggtgcaggcggtgaagcaggtcatcaggcaaatcgacggccaggtcgacgccatcgtgctggtggcgcatatgggcatcgacaatgagaaccagcgccccggcaccggcgtggccgacatcgccaacgccaacccggagctggcggcgatcgtcgccggccatatgcatgtgaagatcgacaaagcggtggttaacggcgtcatcatcaccgagccggataaatacggtcgcgcgctgtcgcgcatcgatctgcagtttgaacgccgcgacggcaaattcacgctgatcgacaaaaacagctacacctaccccatcaaggggatgacgccggacagcgccatgcaggcgctctaccagccgtaccatgacattttgcgcgccaatgccaaccgggtcgtggcgaagctgagcggcagcgatctggtgcccgccgacgaattccgcggcattccccaggtgcacgtgcaggataccggcatcagcgcgctgttccagcaggccgcccgccactatgcgccgctggcgcaggtgatcgccctgcagatcgacaacgatcgcgccaaactggacgtcggcgacatcaaggccaaggatatcgcctttaactaccaatacgccggcggtgagatcaccgtgtatcagctcaacggcaaagcgcttaaacgctacatggagtggtccgccgactatttcaatcagctgcagccgggcgacgtcacctacagctttaacccggcgcggcgatcgtccaaatattccaccaacgatttcttcgacggcgtcacttacaccatcgatctgcgccaacccgccggcgcgcgcattgtcgatctgcgcctgacggacggcacgccggtcaccgacgatatgccgatccgtctgggcatgaacagttaccgcatgggccacctgacgcaaaagggtggcgcgctggaggggcaatccttcccggtgctgttcgacagcaaagcgcaatacggtgaagaagaaggcaccatccgccacctgaccctgcgctacctgacggaggtgaaacacggccagtatcagggcgtgccgccgcagcgctggaagctggtcggcatggagggttacgaaccgcagcgggcgatcgtcaaacggctgctcaatgagggcgttatccaggtaccgaccaccgacgacggccgctacaccaacatcgcgtcgatcaacgtcaaaaacgcgctgttccgcaacgccgacgattaccgcgccgccctcacctcgctggagcaacaacgccaagccgccgtggatccggtgcaacagcgccgcctgcaggatcggatcgcgctgatcaaggcgctcaacgacttctga

SEQ ID NO: 424100 - DNA, 873 bp, Serratia marcescens
atgtccattttaatcgataagaacaccaaagtaatttgccagggcttcaccggtagccaggggactttccactccgaacaagctatcgcttacggcaccaaaatggttggcggcgtaaccccgggcaaaggcggcactcagcacttgggtctgccggtgttcaacaccgtgcgcgaagcggttgaagcgaccggcgccactgcctcggtgatctacgttccagcgccgttttgcaaagactccatcctggaagcgatcgatgccggtatcaaactgatcatcaccatcaccgaaggcatcccgaccctggacatgctgaccgtgaaagtgaagctggacgaagccggcgtgcgcatgatcgggccgaactgcccaggcgtgatcaccccaggcgagtgcaaaatcggcatcatgcctggccacatccacctgccgggcaaagtgggcatcgtttcccgctccggcaccctgacctatgaagcggtgaaacaaaccaccgatgccggtctgggccaatccacctgcgtgggcatcggcggcgacccgatcccgggctccaacttcatcgatatcctgaagatgttccagcaggatccgcagaccgaagcgatcgtgatgatcggtgagatcggcggcagcgctgaagaagaagcggcagcttacatcaaagaacacgtcaccaaaccggttgtcggctacatcgccggcgtaaccgcgccgaaaggcaagcgcatgggccacgcgggcgccatcatcgcaggcggcaaaggcacggcggacgagaagtttgctgcgctggaagcggcgggcgtgaaaaccgttcgcagcctggcggacatcggcgacgcggtaaaagcggtgctgaagcgctaa

SEQ ID NO: 424101 - DNA, 1167 bp, Serratia marcescens
atgaatttacacgaatatcaggcaaaacagctgtttgctcggtatggcatgccggcaccgaccggttacgcctgtaccactccgcgtgaagcagaagaagccgcatccaaaatcggctccggcccgtgggtggtgaaatgtcaggttcatgctggcggccgcggtaaagcgggcggcgttaaagtcgtcaacagcaaagaagatatccgtgccttcgcggaagcctggttgggcaagcgtctggtgacttaccagactgacgcgctgggccagccggttaaccagatcctggttgaagcggcgaccgacatcgataaagaactgtacctgggcgccgtcgtagaccgtgcgacccgtcgcatcgtgttcatggcgtctaccgaaggcggcgtggaaatcgagaaggtggcggaagaaaccccagaactgatccacaaaatgaccatcgatccgctggcgggtccacagccttatcagggccgtgagctggccttcaaactgggcctgaccggtaagcaagtcagccagttcgccaagatcttcatgggcctggcgacgctgttcctggagcgcgacctggcgatggttgagatcaacccgctggtgatcaccaagcagggcgatctggtgtgcctggacggcaaactgggcgccgacggcaacgccctgttccgccagccggaactgcgtgaaatgcgtgacccttcccaggaagacgagcgcgaatcccgtgcggctcagtgggaactgaactacgttgccctcgacggcaacatcggctgcatggttaacggcgccggcctggcgatgggcaccatggacatcgttaaactgcacggcggcgaaccggccaacttcctggacgttggcggcggcgcgaccaaagagcgcgtgaccgaagcgttcaaaatcatcctgtccgacgacaaggtgaaagcggttctggttaacatcttcggtggtatcgtacgttgcgatctgatcgccgacggcatcatcggcgcagtggccgaagtgggcgttaacgtcccggtggtggtgcgcttggaagggaacaacgccgaactgggcgccaagaaactggcggacagcggcctgaatatcattgctgcgaccagcctgactgatgcggctcagcaagttgttgcagcagtggagggtaaataa

SEQ ID NO: 424102 - DNA, 1218 bp, Serratia marcescens
atgagtagcgtagatattctggttcctgaccttcctgaatcggttgccgatgcgaccgtagccacctggcacaaaaaaccgggcgacagcgtgcagcgtgatgaagtcctggttgaaatcgaaaccgacaaagtggtgttggaagtgccggccagtgaagcgggcattctcgatgctatcgtggaagaagagggtgcgaccgtactgtctcgccagctgctcggccgcatccgtccgggcgacagctccggcaagccgaccgctgagaagagccaggagaaagaagccacgcctgcacagcgcgctaccgcgagcctggaagaagaaagcaatgacgcgctcagcccggcgattcgccgcctgatcgccgaacacgatctcgatgccagcgccatcaaaggcaccggcgtgggtggccgcatcacgcgtgaagacgtggaagcgcacctggccaaaggcgccgccgccgccaaaccggccgccgccgctgaagccgcgccgcagcctgctctggccggccgcagcgaaaaacgcgtgccgatgactcgcctgcgcaaacgcgtcgccgagcgtctgctggaagcgaagaacagcaccgcgatgctgaccaccttcaacgaaatcaacatgcagccgatcatggatctgcgcaagcagtacggcgaagccttcgagaagcgccacggcgtgcgtctgggcttcatgtcattctacatcaaggcggtggttgaagcactgaagcgcttcccggaagtgaacgcgtcgatcgatggttctgacgtggtttaccacaactacttcgacatcagcatcgcggtttcgactccgcgcggcctggtgacgccggtactgcgcgatgtggacgccatgagcatggctgacatcgagaagaaaatcaaagagctggccgttaagggacgcgacggcaaactgaccgtggaagagctgaccggcggtaacttcaccattaccaacggcggcgtattcggctccctgatgtctaccccgatcatcaacccgccgcagagcgccatcctgggcatgcacgccattaaagatcgcccaatggcggtcaatggtcaggtggtgatccagccgatgatgtatctggcgctgtcttatgaccaccgcctgatcgacggtaaagaatccgtcggttatctggtgacggtcaaagagatgctggaagatccggctcgtctgctgctggacgtctag

SEQ ID NO: 424103 - DNA, 2808 bp, Serratia marcescens
atgcagaacggcgcaatgaaggcctggctggattcctcctatctggcgggcgcgaaccagtcttacatagagcagctctatgaagacttcttaaccgatccgggttccgttgaagatagctggcgttccatttttcaacagctaccaaccgcgggtgtcaaacccgatcagcttcactctcaaacgcgcgattacttccgccgcctggcgaaagactccgcgcgctacaataccaccatcaccgatccggaaaccgacgccaaacaggtcaaggtactgcagctgatcaacgccttccgcttccgcgggcatcagcatgccaacctcgatccgctcggcctgtggcagcgcgagcaagttcctgaccttgatcccgcttaccacaacctgaccgaagccgatttccaggaaaccttcaacgtgggctctttcgccatcggcaaagaaaccatgaagctgggcgatctgtacgccgcgctgaagcagacctattgcggctcgatcggcgctgagtacatgcacatcaccaacaccgaagagaaacgctggatccaacagcgcatcgagtcggtggtggggcgcgccagctttaccgccgacgaaaaacgccgtttcctgaacgagctgaccgcggcggaaggcctggaacgctacctgggcgccaaattcccgggcgccaaacgcttctcgctggaaggcggcgacgcgctggtgccgatgctgaaagagatggtgcgccacgccggcaagaacggcacgcgcgaagtggtgctgggcatggcccaccgcggccgtctgaacgtgctgatcaacgtgctgggcaaaaagccggccgatctgttcgacgaattcgccggcaagcataaagaacacctcggcaccggtgacgtgaaatatcaccagggcttctcttccgacgtcgaaaccgaaggcggcatggttcacctggcgctggcgttcaacccgtcgcacctggagatcgttagcccggtggtcatgggctcggttcgcgcccgtcgcgatcgcttggacgaagcgcgcagcaacatggtgctgccgatcaccattcacggcgacgccgccatcaccggccagggcgtggttcaggaaaccctgaacatgtctcaggctcgcggctacgaagtgggcggcaccgtgcgtatcgtcatcaacaaccaggttggtttcaccacctccaacccgctggatgcgcgctctaccgaatactgcaccgacatcgccaaaatggttcaggcaccgatcttccacgtcaacgcggacgatccggaggccgtggccttcgtcacccgcctggcgttggatttccgtaacacctttaagcgtgacgtgatgatcgatctggtctgctaccgtcgccatgggcacaacgaggccgacgagccgagcgctacccagccggtgatgtatcagaagatcaagaaacaccctacgccgcgcaaaatctacgctgacgttctgaccgaacaaaacgtggccagcctggaagatgccacggaaatggtcaacctgtaccgtgacgcgctcgaccgcggcgattgcgtggttgaagaatggcgtccgatgaacctgcattccttcacctggtctccgtacctgaaccacgagtgggacgaagagtacccgagcaaggttgagatgaagcgcctgcaggagctgggccgccgcatcagcacggtgccggaagcgatcgaaatgcagtcgcgcgtggcgaaaatctacgcggaccgcgccgagatggcagcgggcaacaagccgttcgactggggcgccgccgaaacgctggcctacgccaccatggcggatgaaggcattccaatccgcatctccggcgaagacgccggccgcggtaccttcttccaccgtcacgcggtggtgcacaaccagaaaaacggttccgtctacgttccgctggcgaacatccacagcggccagggcgaattcaaggtctgggattccgtgctgtccgaagaggcggtgctggcgttcgaatacggctacgccacggcggaaccgcgcacgctgaccatctgggaagcgcagttcggcgacttcgccaacggcgcgcaggtcgttatcgaccagttcatcagttccggcgagcaaaaatggggccgtatgtgcggcctggtgatgctgctgccgcacggctatgaaggccagggcccagagcactcttccgcgcgtctggaacgctatctgcagctgtgcgcagagcagaacatgcaggtgtgcgtcccgtccacgccggcgcaggtttaccatatgctgcgccgtcaggcgctgcgcggtatgcgccgtccgctggtggtgatgtcgccgaagtcgctgctgcgtcacccgctggcgatttcttcgctggacgaactggccaacggcaccttcctgccggcgatcggcgagatcgacgacttggatccgaaagcggtcaagcgcgtcgtgctgtgctccggcaaggtctactacgacctgctggaacagcgtcgcaagaacgagcagaaagacgtggccatcgtgcgtatcgagcagctgtatccgttcccgcatcaggccgtgcaggccgtgctggagcaatactcgcacgtgcatgatttcgtctggtgtcaggaagagccgctgaaccagggcgcctggtactgcagccaacacaacttccgtgaagtggtgccgttcggggcttctttacgctacgcaggacgtccggcctccgcttctccggcggtgggctatatgtccgtacaccagaagcagcagcaggctctggtgaacgacgcgctgaatattgactaa

SEQ ID NO: 424104 - DNA, 717 bp, Serratia marcescens
atgaaactcgaattttccatttatcgctacaacccggatgtcgatgacgcgccgcacatgcaggattacaccctggaagcggaagaaggtcgcgacatgatgctgctggatgcgttgatccagctgaaagaaaaagacccgaccctgtcgttccgtcgctcatgccgcgaaggcgtgtgcggttccgacggcctgaacatgaacggtaaaaacggcctggcgtgcatcaccccgatttcgtcgctgcgcaaaggtaacggcaagatcgtgatccgtccgctgccgggcctgccggtggtgcgcgatctggtggtggatatgggccagttctatacccagtatgaaaagatcaagccatacctgctgaacgacggcaagaacccgccggcgcgcgagcacctgcagtcgccggagcagcgcgccaagctggacggtctgtacgagtgcattctgtgcgcctgctgctcgacctcttgcccatcgttctggtggaacccggacaagttcatcgggcctgccggtctgctggcggcgtatcgcttcctgatcgacagccgtgacacggaaacgcaagaacgtttagatgatctggacgacgcttttagtgttttccgctgccatagcattatgaattgtgtcagtgtatgtcctaaaggcttgaacccgacgcgtgcgatcgggcatatcaagtccatgctgctgcaacgcggcgcataa

SEQ ID NO: 424105 - DNA, 1767 bp, Serratia marcescens
atgaaactgccagtcagagagtttgatgccgtcgtaatcggcgccggcggtgcgggcatgcgtgccgcgctgcaaatttcccaagcgggctcgacctgtgccctgctgtccaaagttttcccgacccgttcccataccgtgtccgcacagggcggcatcaccgtcgcgctcggcaacagccacgaggacaactgggaatggcatatgtacgacacggtgaaaggttccgactatatcggtgaccaggacgccatcgaatatatgtgtaaaaccggcccggaagcgattctggaactggaacacatgggcctgccgttctctcgtctggacgacggccgcatctatcagcgcccgttcggcggccagtcgctgaacttcggcggcgagcaggcggcgcgtaccgcagccgcagccgaccgtaccggccacgcgctgctgcacaccctgtaccaacagaacctgaaaaaccacaccaccatcttctccgagtggtatgcgctcgatctggtgaaaaaccaggacggcgcggtggtcggcaccacggctatctgcatcgaaaccggtgaagtggtttacttcaaagccaaggccaccgtgctggcgaccggcggcgcaggccgtatttaccagtccaccaccaacgcccacatcaacaccggcgacggtgtcggcatggcgctgcgcgccggcgtgccggtgcaggacatggaaatgtggcagttccacccgactggcatcgccggcgcgggcgtgctggtgaccgaaggctgccgcggcgaaggcggttacctgctgaacaaacacggcgagcgcttcatggagcgttatgcgccgaacgccaaagatctggcgggccgcgacgtggttgcccgttcgatcatgatcgaaatccgcgaaggccgcggctgcgacggtccttggggcccgcacgccaagctgaagctggatcacctgggtaaagaggtgctggaatcccgtctgccgggcattctggaactgtcccgcaccttcgcgcacgtcgatccggtgaaagagccgatcccggttatcccgacctgtcactatatgatgggcggcattccgaccaaggtgaccggccaggcgttgaccgtgaacgagaaaggcgaagacgtggtgatcccggggctgttcgcggtgggcgaaatcgcctgcgtatcggtgcacggcgccaaccgcttgggcggcaactcgctgctcgacctggtggtgttcggccgttccgccggcatgcacctgcaggaatcgctggaagagcagggcgtgagccgtgacgccagcgactccgacgtggaagcctcgctggatcgtctgaaccgttggaacaacacccgttccggcgaagacccggtcgaaattcgcaaggcgctgcagtcttgcatgcagcacaacttctcggtattccgcgaaggcgatgcgatggccaagggcctggaagaactgaaagtgatccgtgaacgtctgaagaacgcacgcctggacgatacctccagcgagttcaacacccagcgcatcgagtgcctggagttggataacctgatggagaccgcgtattccaccgccgtgtcggccaacttccgtaccgagagccgcggcgcacacagccgcttcgactacccggaacgcgatgacgccaactggttgtgccattcgctgtatctgccgcaatcggaaagcatgacgcgtcgtgaagtgaacatgcaaccgaagctgcgcccggcattcccgccgaaagtgcgttcttactaa

SEQ ID NO: 424106 - DNA, 348 bp, Serratia marcescens
atggtaaacaacgtttctgcattagggcgcaacggcgtgcacgattggctgctgctgcgcgcttccgctatcatcatcaccctgtacgtcctgtatatcctgggttttttcgtcacggccccggaactcacttatgacatctggcgcggtttcttcgccacttccattacgaaagtgttcactctgctgaccttgctgtcgattctggtgcacgcctggatcgggctgtggcaggtgctgacggactacgtcaagccgctggcggttcgcctggtgttgcagctggctgtcgtggtcgcgttgctggtctatttactgtacggaacaatcgtagtgtggggtgcttaa

SEQ ID NO: 424107 - DNA, 270 bp, Serratia marcescens
gtgggtatcctcctctggctgctgagcctgtcactctcttcccaagaggggttcctgcaggcggccgccatcatgaatagcttcatcgtcaaattcatattctggggcatcctcacggcgctggcctatcacatttgcggtggcatccgtcacttgttaatggattttggctacatcgaagagagtttggccgccggtacccgttccgcccaggtggcgatcggtctgaccgtcgtgctgtcagttctggctggagtcctcgtatggtaa

SEQ ID NO: 424108 - DNA, 1293 bp, Serratia marcescens
atgactgataagaaagcgacgctaaccattaacgacagcgaagctccgatcgaactgggcgtattgacaccgacactgggccccgatgtcctcgatgtccgcgctctgggttccaaaggttatttcacatttgatcccggctttacctccaccgcttcttgcgaatccaagattaccttcatcgacggcgacaaaggcgtgctgctgcaccgcggcttccctatcgagcagctggcgaaagaatcttcctacctggaagtgtgctacatcctgctgtacggcgagaccccaacgccggaagagttcgagaccttcaaaaccaccgtcacccgccacaccatgatccacgaccagatcacccatctgttccgtggcttccgtcgcgactcgcatccgatggcggtgctgtgcggcgtgaccggcgcgctggcggcgttctaccacgatgcgctggacgtcaacaacgagcgtcaccgtgaaatcaccgcgttccgcctgctgtccaaaatgccgaccgtggcggcgatgtgctacaaatactccctgggccagccgttcgtttacccgcgcaacgatctgtcctatgccggcaacttcctgcacatgatgttcgccaccccgtgcgaagagtacgtggtgaacccggtgctggaacgcgccatggatcgcatcctgatcctgcacgccgaccatgagcagaacgcctctacctctaccgtgcgcaccgccggctcttccggcgccaacccgttcgcctgcatcgcggccggtatcgcctccctgtgggggccggcacacggcggcgccaacgaagcggcgctgaaaatgctggaagagatcaagaccgtcgagcacattccggaattcatcaagcgcgccaaggacaagaacgactccttccgcctgatgggcttcggccaccgcgtgtacaagaactacgatccgcgcgctaccgtgatgcgcgaaacctgtcacgaagtgctgaaagagctgaacaagaaggacgacaacctgctgcaggtcgcgatggagctggaacacatcgcgctgaacgacccgtacttcatcgagaagaaactgtacccgaacgtcgacttctactccggcatcatcctgaaggcgatgggcattccttcttccatgttcaccgtgatcttcgccatcgcgcgcaccatcggctggatcgcccactggaacgaaatgcacgacgaaggcatcaaaattgcccgtccgcgtcagctgtacaccggctatgccgagcgtgatttcaaatcccagctgaaaaacaagtaa

SEQ ID NO: 424109 - DNA, 792 bp, Serratia marcescens
atgccggaaggaccggagattcgccgggcggcggacaaactggcggcggcggtgatcgatcagccgctgaccgccgtcgatttcgcttttccccagctgaaacactaccgccagcgtctgctcggcgagcgcatcgtcgccatcgagccgcgcggcaaggcgctgctgacccatttctccaatgggttgacgatgtacagccacaaccagctgtacggcgtgtggaaagtggcggcggccggggagacgccggagacccggcgcgatctgcgggtgcggctggaaaccgcccgcagcgcgatattgctctacagcgcttccgacattaccgtcgggccgcgcgaggagatagagcagcacccgtttttgcaacgcatcggccccgacgtgttggacatgtcgttgacggtggaagatgtggcggagcggttgctgacgccgcgttttcgccgcaggcagctgggcggcatgctgctcgaccaggcgtttcttgccggattgggtaactatctgcgcgccgaaatcctgtggcaggccgaactggcgccgcagcacaaaccgcaggatctgccgccggaagcgctgcgccgcctggcggacgcattgctggcggtgccgcgcctttcctaccagacgcgcgggcaggcggatgacaaccggcatcacggcgcgctgtttcgcttcaaggtgtttcatcgcagcggcgagccctgcgaacgctgcggtgagatgatcgtgcgtaccgatctgtcgtcgcggccgttttattggtgcccgggctgccagaaataa

SEQ ID NO: 424110 - DNA, 645 bp, Serratia marcescens
atgcaaaaagtattgattaccggctttgagccgtttggcggcgagcgccttaacccctcctgggaagtggtgaagcagctcaatgatatggagctggtcggcacgcgcatcgtggcgcgccagttgccgtgcgtgttcggtgcggcgctggaggcgctcaatgcggcgatcgacgaggtgcagccggtgatggtgctggctatcggccaggccggcggccgcaccgacatcacgattgaacgggtggcgatcaacgtcgacgacgcgcgtatccccgacaatcaggggcagcaaccggtggacgagccgattgtcgccggcggcccggcggcctatttcagcaccttgccgatcaaggcgatggtcagttcgatgcgtgaggccggcattccggccgccgtttcgcagaccgccggcacctacgtgtgcaaccatgtcatgtatggcttgctgcaccgtttgagcggccagcgcgaggtgaagggcggctttatccatatcccgtatctgccggagcaggcggcggcgcaccccggcgcgccgagcatggcggcttcgacggtgctgtttgcattggagctggccgtttccatcgctttgcaggtggagcacgatctgaaagtggtgggcggcgcgacgcattaa

SEQ ID NO: 424111 - DNA, 1020 bp, Serratia marcescens
atgaacttccagcaacaatatctctactggctggccggcgcggtgctgctgattgtggcggtgatgtccttccgcgatcgcgccaacccgcgccgcatcaccaccgggctgttttgggggctgtacggcctggtgttcctggtcggcgactggacttaccgcctgttgggcgacgtgctgggcgagggcagcaacgaaaaacgcatgctgcacatcatcgttggcgtggtggtggtggtgatggctctgattgccggctttggcggtgtgcgcctcggcagctatcatcaacggacgccgcaggagcgcgaggccagcgccaagcgcctgggcaacaagctgtttattcccgctctggcaatcccggtggtgacggtgatcggcgtgctgctgttcaacaacgtgccggcgttgcaaagcgcggtgttcggcagcggtaaccacgcgacgctgatcaccctgttctcgatgaccgtcggctgcctgattggcctggcgatcgcggtgaaaatgacccatgagaaggccctgcagccgatacaggaagcgcggcgcttgctggattcgatcggctgggcgttcattctgccgcagatccttgccacgctggggctgctgtttaccgtcgccggcgtcggcaccgcgatctcgcatttgacccaggagtatctggcggtcgataaccgctttatcgccgtggcagtctacgctatcggtatggcggtgctgaccatggtgatgggcaacgccttcgccgccttcccgatcgttaccgccggcatcggcattccgatcctggtgttgcagcacggcggcaacccggcggtgatggcggcgatcggcatgttctccggttattgcggcaccctgatgacgccgatggcggcgaacttcaacatcgtgccggcggcgctgctggagctgccggacaagaatgcggtgatcaaggcgcaggtgccgaccggcgtgctgctgctgctggttaacgtgttcctgctgtatttcctgatgttcctgtag

SEQ ID NO: 424112 - DNA, 732 bp, Serratia marcescens
atggaacaggccgtgaatctctggccactgattggcatcgccgccatcgtggtcgggtttgtattgcgtttcaacccggtgctggtggtgatcgccgccggcatcatcaccggtttggcggcgctgatgccgctggacgtcattctggaaaagctcggcgagggctttctcaacacccgcaacctgccgctgatcctgctgttgccgctggcggtgatcggcctgctggagcgccacgggctgaaagaacgggcgcaggcgtggatcgccaggatcaaaagcgccaccgccggccgtctgctgatcgtctacctgttcgtgcgcgagattaccgcggcgatggggctgaccagcctgggcgggcatccgcagatggtgcggccgctgctggcgccgatggcggaaggggcaacggaaaaccgctacggcgagctgccggagcgcacgcgccaccgtttgcgcgccatgtcggccgcgaccgacaacgtcgggctgttcttcggcgaggatatcttcgtcgccttcggcgcgatcatcttcatgcacaactttatgctggagtccggcggcattcagaccgagccgctgcatatcgcgctgtggggcattccgaccgcgattttcgctttcctgatccacgcgttccggctgtatcggatggataaacagctgagcgccgagctggcgcagctgaatcaggcggcgctgcaggcgaagggggaggcacgatga

SEQ ID NO: 424113 - DNA, 741 bp, Serratia marcescens
atgatcgttgatttgaacgccgatctcggcgaaggctgcgccaacgaccaggcgctgttgcaactggtgagctcggccaacatcgcctgcggctttcacgccggcgatgcgcagaccatgcgtcagtcggtgcgctgggcattgcagtacggcgtggcgatcggcgcccacccgagttttcccgatcgggagaacttcggccgcacccgcatgcagctgccgccggaaacggtgtacgcgcaggtggtgtatcagctcggggcgctggcggccatcgcccgcgccgagggcggggtgatggtgcacgttaagccgcacggcatgctgtacaaccaggcggcggttgagccggcgctggcggaagcgatcgcccgggcggtgcaggcggtcgatccggcgctgcggctggtggggctggccggcagcgagctgattcgcgccggggaacaactcggtctgaccacccggcaagaggtgttcgccgatcgcggctatcaggccgacggcacgctggtgccgcgcggtttgccgggggcgctgattgaggatgacgaacaggcgctggcgcaaacgctggagatggtgcgccatcaccgggtgcgcagcgtggatggcgtctggactgccgttcaggcggaaaccgtctgcctgcacggggacggcgagcatgcgctggcgtatgcgcgcaagctgcgggacagttttgttcagcagggcatccgcgtcagcgcggagcagtaa

SEQ ID NO: 424114 - DNA, 933 bp, Serratia marcescens
atgctgattattctgcgtgccggcatctataccacggtgcaggatttgggccgcgagggattccgccgcctgggcatcagcaccggcggggcgctggatcaaccggcgctgaagatcgccaacctgctggtgggcaatgcgccggaggccgccgggctggagatcaccctcggccagttcagcgccgagtttacccgccctggctggatcgccttgaccggtgccggctgcgacgcgcagctggacggcaagccgctgtggaccggctggcgctacccggtgaaaaaggggcagcggctggcgctgggcacgccgaaacgcggcatgcgcagctacctggcgatctcgggcggcatcgccgtgccggaaatgctgggctcgtgcagcaccgacatgaaagccgcctttggcggccacgaaggccgtaatctgaaggacggcgatcggctgccgctgggcaaatccaccgtgctgccgcaacaccgttgcggcgtgaagcagctgctgttcaccaaccgcattcgcgcgctgccggggccggagtacgctgagttcagcgaagaggcgcaggacacgttctggcgcaccgcctggcagctcagcccgcagagcaaccgcatgggctaccgcctgcacggcggcacgccgctggagcgcaccaccgatcgagagatgctgtcgcacggcctgctgtccggcgtggtgcaggtgccgcacaacggccagccgatcgtgctgatggccgatgcgcaaaccaccggcggttacccgcgtatcgcctgtgtgatagaggccgatctctaccacttggcgcagatccgtctcggcgaaccgatccacttcgttctctgctcactggccgaggcgcagcgcgccaaagccgagcaggatctcttccttcgacagattgcctgggggttacatgatcgttga

SEQ ID NO: 424115 - DNA, 657 bp, Serratia marcescens
gtgcaacaagcacgttattacctgttgggtgaaagagcggtagtgcttgaactgtcgccgccggtgaccttaccgagccagcagcgcatctgggcgctggcggaaaagctgaatcaccaccccgacgtgcgggaagtggtgccggggatgaacaacctgacgctgttgctgcatacgccgcaggccgacgccgaagcgatgctcgcgctgctgcagcaaggttgggaaagcaaagagagcctgacgccggaatcgcgccaggtggatattccggtggtctacggcggggagcaaggccccgatctggatgaagtggcgcgccataccggcatgacgccgcggcaggtggtggaatgccacgcggcggcggcctacgtggtctatttcctcggctttcagccgggcttctcctatttgggcggcatgccggaacttctggcgacgccgcgccgcgcggaaccgcgtctggcggtggcggccggctccgtcggcatcggcggcggccagaccggtatctatccgctggtgacgcccggcggctggcagctgatcggccgcacgccgctggcgctgttcaatccgcatgaaatgccgccgacgctgctgcgcccgggcgataacgtgcgcttcgtgccgcagaaggagggcgtatgctga

SEQ ID NO: 424116 - DNA, 744 bp, Serratia marcescens
atgcgtaacctcgatctggaacaactgatcaacacggaactgaacgctgcggcgtttcaggactacgcccccaacggattgcaggtagaaggccgcccgcacgtgcagcgcatcgtgaccggcgtcaccgcctgtcaggcgctgctggacgccgcggtggcgcatcaggccgacgcgattatcgtgcaccacggctatttctggaaaaacgaggcgccggcggtgcgcggcatgaagcgcaaccgcctgaaaacgctgctgacccacgatatcaacctgtacggctaccacctgccgctggacgcgcatccggtgctgggcaacaacgcgcagctggcgcaggcgctgggcattcgggtgattggcgacgtcgagccgctggtgccgcacggcgaatttgaacagccgctgaccggcgaagcgctgcagcaacgtatcgaaagccggctggggcgcgcggtgctgcactgcggcgataacgcgcctgagcacattcgccgggtggcctggtgcaccggcggcggccagggctttatcgacagcgcggcgcgcttcggcgtcgatgcgttcatcagcggtgaagtgtctgagcagaccattcacagcgcgcgcgaaatgggcgtgcatttcttcgccgccggccaccacgccaccgagcgcggcggcgtgaaggcgctgggcgactggctggcgcagcaccacggctttgatgtgacctttatcgacatcccgaatcccgcctga

SEQ ID NO: 424117 - DNA, 978 bp, Serratia marcescens
atgaaaaaggtgctggccctgtgcctgagcggctattccgcgctggcgatcgccggctttgacgtggtggcgctcggcgtcgacggcggcgtcagcgacggcaacctgacctcctacctgatccgcagcgacaatcagccgcggtatgtggcgctggacgccggttcgctgttgccgggcattgccaaagggctggagaagggcagcttcccgcaggtgacgcccgagctggccgcgccttacacgccgcagggctatgtgttccggcagttgatcggcagctactttatcagccacggccacctggaccacgtggcggggctgatcctcggctcgcccgaggacaataaaaaaaccgtttacgcccaggcggacaccgtactgaccctgcgtaatcactacttcaactggaaggcgtggccgaactttaccgacgccggcaacggctcgcggctgggcacctaccggctgcaaacggtgcggccgcagcagcggtttaccctcggcctgaccggattgaccggcgtgatgtacccgctcagccacgatcgctatccgtcgtcgatgctgctgatttccaacggcaatgagttcttcgcctacttcggcgataccgggccggataaggtggagcagtcgcgcgatctcgataccgtctggcgcgcgctggggccgcttgtcgagcagaagaagctcaagggcatgattatcgaaacctcttaccctaacggggtggaggataaacatctgtacggccatttgacgccggcctggctgctgaaggagctgaagaacctgacgcagtacagcggcggcgaaggctcgctgaacggtttgccggtggtgatcagccacatcaagcccagcctgaagcagggcgaagatgtgcgcgccgccattgcgcaacagctggcgcagggcaacgatctgggggtgaaattcatcctgatggcgcagggcgaccggcagacattttga

SEQ ID NO: 424118 - DNA, 1431 bp, Serratia marcescens
atgaccacgcatctggtctggttgcgtaacgatctgcgtatcaccgacaacaaagccctgcacgccgcctgcagcgatcccgaagcccgggtgctggcggtgtttatcgccacaccgcagcagtggcggcaacatgagatggcgccgcggcaggcggcgctgatccatgccagcctgcaggcggtgcagcaggcgctggcgcacaagggcattgcgctgcattgccattcctgtgcggactttgccgcgtcgatcgactggctggcggactattgcgagcgagagcaggtggatgcgctgttttacaatcgccagtacgaactgaacgaacggcggcgcgatgcgcggctggaacagcggttgagtggccgggtgaggtgtcacggtttcgatgacagcctgctgttgccgccaggcagcgtactcaccggcggcggcgagatgtacaaggtctatacgccgtttcgcaacgtctttcttcaacgcctgaccgagtccgacgtgagctgcctgccggcgccgaagactcgcgccggtggtgcgttacctatgcctgaagcgccggcggcgttcgattaccctacggcggagactggggatggctatcccgccggcgaggaggccgcgttgcagcggctgcgcgccttttgccgcgagcaggtgcaggattacctccggcagcgcgatctgccggccctcgccggcaccagtagcctgtcgccctatctggcgatcggcacgctgtcgccgcgccagtgcttcaaccgcctgcgcgccgaatgcccgcagctgctggaagatcgcgaaagcggcgccttcgcctggctaaacgagctgatttggcgcgagttctatcgccatctgctggtggcctatcccgatctgtgccgccatcggccgtttattgcctggacggacaaggtgcgctggtgcgatgacgcggcgaagctgcacgcctggcagcggggcgaaacaggctacccgatcgtcgatgccgccatgcgccagctgaacgccaccggctggatgcacaaccggctgcgcatgatcagcgccagttttctggtgaaggatctgttgatcgactggcgcgccggggagcgctatttcatgtcgcaactgctggatggggatctggcggccaataacggcggctggcagtgggcggcatccaccggcaccgacgccgcgccgtatttccgcatcttcaacccgacgactcagggtgaacgttttgatccacaaggcacttttatccgtaaatggttgccggaactggcggatgtgcccgacaatgacatccatcatccccatcgctgggcggaaaagcagcgatgcacgctgaactacccgctgccgatcgtcgatcataagcaagcccggctggagacgctggcggcgttcgaggcggcaaaacggggagagtcttga

SEQ ID NO: 424119 - DNA, 957 bp, Serratia marcescens
atgagcgacaagatccctatcggcatcagcgcctgtttactgggcgacgcggtgcgtttcgacggcggccacaaacggctggcctttgcggtggaacagttggcgccctatgtgcgctttgagcccgtttgcccggaaatggcgatcggcctgcctacgccacgcccggcgctgcgcttggtgaagcaggcgcagccgtggccggcgatgcgctacagcaacgacgccggcgtggatctgaccgaggagatgcgcggcttctccgcgcagcgcgtggcggccttgcagcatctgtgcggctatatcgtctgcgccaagtcaccgagctgcggcctggagcgggtgcgggtctacagcgaaaacggcaaggactcgcgtaaaaacggcgtcgggctgtttaccgcggaactgctgcgccagatgccgtggctgccggtggaagaagacggacgattgcaggatgcggcactgcgggaaaactttatcgagcgggtgtacgcgctgtacgagttgaacatgctgtggcgccaggggctgtcccgcggcgggctgatcgcgtttcacagccgctacaagctgtcgctgctggcgcattcgcagccggcgtatcgcgaattggggcgcttcgtcgccgatattcaccgctgggattcgctggaggccttcgccgtggaataccgcagccgcctgatggcgctgttggcgcacaaagcgacgcggcgcaaccacaccaacgtgttgatgcacgtgcagggctacttccgccgtcagctcagtacggcgcagcgccaggagctggcgcacctgatcgaccgctaccggcagggcatgcagccgctgttggcgccgatcgcgctgctcaagcattacatggcggaataccccgatcgctatctggcggaacaacgctatttcgaaccttatccggaggcgctgcgtttgcgttacggccattga

SEQ ID NO: 424120 - DNA, 210 bp, Serratia marcescens
atgtctacgacctatcacgcttattcactgcatcggattctcctgcgccgcagcgcagtggttatcgcgggcattttggccctgccggtgatgctgttccgcagcgatcgcgggcgtttttacagctacctgcaccgcgtctggtcaaaaaccagcgataagccggtctggctgcagcaggcggaactggcgtcctgcgatttctactga

SEQ ID NO: 424121 - DNA, 1689 bp, Serratia marcescens
atggcggcttcagcctttttactgatcgccagcttcctgctggtgcttctgctgctggcccggccgctgggcggctttatggcgcgcctgatcgaaggtgaaccgctgcctgcgctgcgcggggtggaagccggcgtctggcgcgcctgcggcatccgcgccaccgagatgaactggtggcagtacgcgctggcaatactggcgttcaacctgctcggcctggcgctgctgttcgccctgctgatgacgcagggctcgctgccgctcaacccgcaaggcttcccgggcctctcctgggatctggcgctcaacaccgccgtcagcttcgtcaccaacaccaactggcaagcctacagcggcgaaagcgccctcagctatttaagccagatggccgggctggcggtgcagaacttcgtctccgcctccaccggcatcgccgtggcctttgcgctgatccgcgcctttacccgccgcgccggcaacaccgtcggcaacgcctgggccgatctgttccgcatcacgctgtatgtgctgctgccgatcgcgctgctgatcgccctgttcttcgtcagccagggcacgctgcaaaacttcctgccttacctgcacgtcaccacgctcgaaggcgcgcagcagacgctgccgatggggcctgtggcctcgcaggaagcgatcaagatgctcggcaccaacggcggcggcttcttcggcgccaactcggcgcacccgttcgagaacccaaccgtgctgaccaacttcgtgcagatgctggccatcttcctgatcccctgcgcgctgtgcttctccttcggccagttggccggtgaaaaccgccagggccatgcgctgatctgggcgatggcgctgatcttcgtggcggcggtggtggcggtgatggtcgccgagctggcaggcaacccgcacctgagcgcgctgggcgccgacagcaacatcaatatggaaggcaaagagtcgcgcttcggcattctcgccaccagcctgttctcggtagtcaccaccgccgcgtcctgcggggcggttaacgccatgcacgactccttcaccgcgctgggcggcatggtgccgatgtggctgatgcagatcggcgaagtggtgttcggcggcgtcggctccggcctgtacggcatgctgctgttcgtgctgctgacggtgtttatcgccggtctgatgatcggccgcaccccggaatatctgggcaagaagatcgacgtttacgacatgaagatgaccgcgctggcgatcctggtcacgccgacgctggtgctgctgggcagcgcgctggccatcggcaccgacgcgggccgcgccggcatcctcaacccgggcgcccacggcttcagcgaagtgctgtacgccctgtcctccgccgccaacaacaacggcagcgccttcggcgggttgagcgtcaatacgccgttctacaacctgctgctggccttcgccatgttcgtcggccgcttcggggtgatcctgccggtgctggcgatcgccggctcgctgagcgccaagcagcgccagccggcgggcaacggcaccctgccgacctatgggccgctgtttatcggcctgctgatcggcaccgtgctgctggtgggcgcgctgaccttcgtgccggcgctggcgctgggcccggtggccgagcatttgcagctttggttggcaaactaa

SEQ ID NO: 424122 - DNA, 2070 bp, Serratia marcescens
atgactcgcaaacaacgcgcgctgtttgaaccggctctggtgcgcaccgcgctgatcgatgcggtgaaaaaactggaccctcgcgttcaatggcgcaacccggtgatgttcgtggtgtatatcggcagcattctgaccaccgccatctggctggcgatcctcaccggccaaaccgacggcgccgccgccttcaccggcagcgtcgccctgtggctgtggttcaccgtgctgttcgccaacttcgctgaggcgctggccgaagggcgcagcaaggcccaggcggaaagcctgaagggcaccaagaaaaccagctgggcgaaaaagctggccggcccgcgccgcgacggcgccacggagaaagtggccgccgagagcctgcgcaaaggcgatatcgtgctggtggaagccggcgataccatcccgtgcgacggcgaagtgctggaaggcggcgcctcggtggatgaaagcgccatcaccggcgaatccgcgccggtgatccgcgagtccggcggcgacttctcctcggtcaccggcggcacccgcgtgctatccgactggctggtggtgcagtgcagcgtcaacccgggggaaaccttcctcgatcgcatgatcgccatggtggaaggcgccaaacgccgcaaaacgccgaacgagatcgcactgactatcctgctggtggcgctgaccatcgtgttcgtcctggccaccgccaccctgttcccgttctcgcaatacagcgtggaagcggccggcagcggcagcgtggtcaccatcaccgtgctggtcgcgctgctggtctgtctgatccccaccactatcggcggcctgctgtccgccatcggcgtggccgggatgagccgcatgctcggcgccaacgtgatcgccaccagcggccgcgcggtggaagccgccggcgacgtggacgtgctgctgctggataaaaccggcaccatcacgctgggcaaccgccaggcttcggagttcctgccggcgccgggcgtgaaagagcaagagctggcagacgccgcgcagctggcctcgctggcggacgaaacgccggaaggccgcagcatcgtggtgctggccaaacagcgcttcaacctgcgcgaacgcgatctgcaggcgctgaacgccaccttcgtgcccttctccgcccagacccgcatgagcggcgtcaacgtgcaggagcgcatgatccgcaaaggcgcggtggacgccattcgccgccacgtcgaaaccaatcagggccacttcccgcgggcggtggacgatctggtggaaagcgtggcgcgcaccggcggcacgccgctggtggtggcggaaggcgcccgggtgctgggcgtggtggcgctgaaggatatcgtcaagggcggcatcaaggaacgcttcaatgagctgcgcaagatgggcatcaaaacggtgatgatcaccggcgataacccgctgaccgcggcggcgatcgccgccgaagccggggtggacgatttcctgtcggaagccacgccggaagccaagctggcgctgatccgccagtatcagggagaaggccgtttggtggcgatgaccggcgacggcaccaacgacgccccggcgctggcgcaggccgatgtggcggtggcgatgaactccggcacccaggccgccaaagaggcgggcaacatggtcgatctggattccaacccgaccaagctgatcgaagtggtgcacatcggcaaacagatgctgatgacgcgcggctcgctgaccaccttcagcatcgccaacgacgtggccaaatacttcgccatcattccggcggcgttcgcggccacctacccgcagctgaacgcgctgaacgtgatgcacctgcactcccccgcctccgccatcatgtcggcggtgatcttcaacgccctggtgatcgtgttcctgatcccgctggcgctgaaaggggtgagctataaaccgatgagcgccgcggccctgctgcgccgcaacctgtggctgtacggggtcggcggtctgctggtgccgttcgtcggcatcaaattgatcgacctgatcctggtcgcgctgcacgtcgccggttaa

SEQ ID NO: 424123 - DNA, 570 bp, Serratia marcescens
atgacttatttacgacctgcgctggtgatgctgattttgctgacgctgatcaccggcatcgcctatccgctgctgaccaccgggctggcgcagctgctgtttccggccgcggccaacggctcgctgctgtaccaaggcgacaaggcggtcggctccgcgctgatcggccagaactttacgcgcgccgactatttctggggccgcccgtcggccaccggcgattcggcctataatccacaggcctccgccggcagcaacctggcggccaccaacccggcgctggataaggctatcgccgaacgcgcagcgcagctgcgccaggccaacccggcaatgagcggcccgatcccggtcgatctgctgaccgcctccggcagcgggttggatccgcagatctcgatcgccgccgcgcaatatcagctggcgcgggtcgcggcggcgcgtcatctgccgccggaacaggtcgccaaactgatcgacgacaataccgatcgggccacgcccaacttcatgggggaatcggtggtcaacgtgctgaagctgaacctggcgctggatgcgttgaagtaa

SEQ ID NO: 424124 - DNA, 2697 bp, Serratia marcescens
atggtcgaagaagagcagcagcgccccgatcccgatagcctgctggcgctggccaatgaaaagccgcgcggccggttgaaggtattcttcggcgcctgcgccggcgtgggcaaaacctacgccatgctgcaggaggcccagcgtttgcgcgctcaggggctggacgtgctggtcggcgtggtggaaacccacggccgcagcgagaccgccgccctgctcgacggcctgtcgctgctgccgcaaaaacgcatccagcatcgcggccggctggtgcatgaattcgatctcgacgccgcgctggcgcgccacccggcgctggtgctgatggacgaactggcgcacagcaacgcccagggttcgcgccaccccaaacgctggcaggatgtggaagagctgctggacgccggcatcgacgtgctgactaccgtcaacgtgcaacatctggaaagcctgaacgacgtcgtgggcggcgtgaccggcgtgcgggtgcgcgaaacggtgcccgaccacgtgtttgacgaagccgccgaagtggtgctggtcgatctgccgccggacgatctgcgccggcggctgcacgaaggcaaagtgtatattcccggtcaggccgagcgcgccatcgagcacttctttcgcaaaggcaacctgatcgccctgcgcgagctggcgctgcgccgcaccgccgatcgggtcgatgatcagatgcgcgagtttcgcgatacccaggggcgcgagaaagtgtggcacacccgcgacagcattctgctgtgcgtcggccacaacagcggcaacgaaaagctggtgcgcatcgccgcccggctggcggcgcggctcggctgccactggcatgcggtctatgtggaaacccccaagctgcaccggctgccggaaaaccagcgccgcgccattctgcgcgcgctgcggctggcgcaggagctgggggcagaaaccgccaccctggccgatccgtccgaagagcgcgcggtgctgcgctacgcccgcgagcataacctcggcaaaatcatcatcggccgccgcagcgaacagcgctggaagctgcgcggcagcttcgccgatcgcctcggccggctgggcccggatctcgatctggtgatcgtggcgctggagaacgacgccgcgctgccgccgccgggcaaggagcacgacggccgcagcttcaatgagaaatggcgcatgcaactgcgcggctgcgcggtggcggtggcgctgtgcgcgctgatcaccctgctctcgcagtggctgctgccgggcttcgatcaggccaacctggtgatgatctatctgctcggcgtggcgatcgtcgcgctgttcttcggccgctggccgtcggtgctggcggcggtgatcaacgtcgccagcttcgatctgttcttcgtccagcccgaatggtcgttcgccgtcagcgatatgcagtatctgctgaccttcggcgtaatgctcgccgtcggcatcatcatcggcaacctgaccgccggggtgcgttatcaggcccgggtggcgcgctaccgcgagcagcgggcgcgtcacctgtacgaaatgtcgcgcgggctgagccgcgcgctgaccgtggccgacatcgccaacaccagccgtcatttcctctccagcagtttccaggcgaaaaccgtgctgctgctgccgcaggaagacggccgcctgcaacagatggtcggcgaggaaggcgggctgctgtcggttgatgaagccatcgcgcgctggagcttcgacaaaggcctgccggcaggtgccggcaccgacaccctgcccggcgtgccttaccagctgctgccgctcaatacccccaagcagaccttcggcctgctggcgatcgagcccaacaacctgcgccagctgatggtgccggaacagcagcggctgctgcagaccttcgcggtgctgatcgccagcgcactggagcggctgcacctggcgcgcagcgccgaagaagccaagctggacgccgagcgcgaacagctgcgcaactcgctgctggcggcgctgtcgcacgatctgcgcacgccgctgaccgtgctgttcggccaggcggaaatcctcacgctggacctggcggccgaaggctccaatcacgccacccaggccagccagatccgccagcaggtgctgagcaccacccggctggtgaacaacctgctggatatggcgcgcatccagtccggcggtttcagcctgcgcaaagagtggcagtcgctggaagagatcgtcggcgcctcgctgcacatgctggagccgctgctcagccagcatccgatcgtggtcgagctgccgccggaacagatcctggtcaactgcgacggcagcctgctggaacgggtgttcaccaacctgttggaaaacgccaataaatacgccggcgccgaggccaccatcggcattcgcgcgcgcacgctgcccgagtggctggaagtcgaggtctgggataacggccccggcatccccgccgatcagctgcagctgattttcgacaagttttcacgcggcaataaagagtcggcgatccccggcgtcggcttggggttagcgatttgccgtgccattattgaagtgcatgatggccgcatctgggcggaaaacggcgccaacggcggcgccagcttccgcttcgtgctgccgctggaaaaaccgcccgagatcgacggtgacgccttcgatctgtaa

SEQ ID NO: 424125 - DNA, 690 bp, Serratia marcescens
gtgagcataacgccaaccaacattctgattgttgaagatgaaaaagagatccgccgcttcgtgcgcaccgcgctggagagcgaaggcctgcgggtgtttgaaagtgaaacgctgcagcgcgggctgattgaagccggcacgcgcaaaccggatctgatcatccttgatttggggttgccggatggcgacgggctgagttacatccgcgatctgcggcagtggagcgccattccggtgatcgtgctgtcggcacgcaacgccgaggaggacaagatcgccgcactggacgccggcgccgacgactacctcagcaagccgttcggcatcggcgagctgctggcgcgggtgcgggtcgcgctgcgccgccactccgccagccagcaggaaagcccgctggtgagtttttcagcgatcaccgtcgatctggtgaatcgccgggtgctgcgcaacgacgaagatttgcacctgacgccgatcgagtttcgcctgctggcggaactgctggccaacgccggcaaggtgatcacccaacgtcagctgttgagccacgtctgggggccgaactacgtggagcacagccactacctgcgcatctacatgggccatctgcggcagaagctggaagccgatccggcccggcccaaacacctgctgaccgaaaccggcgtcggctaccgcttcatgccttaa

SEQ ID NO: 424126 - DNA, 300 bp, Serratia marcescens
atgcccggccaccgttttactattaccgttgaagccctgagcgatcgccagggcaatcccgtcgagaaagcgccgctgagttttgaagtgaccaaccatgacgatattctcgagatcgtcgagcgcatccgggcgcgtgacgatctgaacttcggccccgagcagagcgcggccttcgccgtggggttgaagctgttctccgaagtgatgatcgaaaaccgtaaacacccggtgttcgctccgctgcgcgatgcgtttaaggaatttatggtcggattgaagaaaggcccggcggcgtaa

SEQ ID NO: 424127 - DNA, 636 bp, Serratia marcescens
atgtttaatcgattaggtttacaccggcatcaccatcatgaatgtgaagagggccgccgtcatcgcggcgggcgccatcatttcggcggcgacggcgaagagcacggccggggtgggcgcggcggccggggcgggcgtcatcgtctgttcgaacacggcgatctgcgcctggtgttgctggcgctggtggcgcgcaagcccagccacggttatgagctgatcaaggcgatcgaggaagcctcttccggcctgtacgtgccgagcccgggggtgatttaccccacgctgacgctgctggaagagcaggatttccttgagccgctcaccaccggcaacggtcgcaaaagctaccgcatcaccgcggcgggcgagggcgagctgcaaaagcatcaacaggcggttgacgtcattctagcgcgcctggcgggcgccggccgcgagcatcatcggcacggcaacctggcggaaggcatctacgacgccatgaaccgcctgcgcagcctgctgcgcggcaacgtgatgcgcgccgatcttacgccgcagcaggtggagcgcatcaacgccgcgttgctgaccgccgtggcggcgatcgaaagcgaaatgcatattcaacccacgcagcaggagaagaactga

SEQ ID NO: 424128 - DNA, 1650 bp, Serratia marcescens
atgtcgatggcgaataatccacgtgccgggcagcccgcccgccaaagcgatctgatcaacgtagcccagctgacgtcgcagtactatgtgctgcaacctgaagccggcaatgccgcacacgcggtgaagtttggcacctccggccaccgcggcagcgcgcagcgccacagcttcaacgaagcgcacatcctcgccatcgctcaggcgatcgccgaagttcgtcatcagcagggcaccaccggcccgtgctacgtgggcaaagacacccatgcgctgtctgagccggccttcatttccgtgctggaagtgctgaccgccaacggcgtcgatgtgatcgtgcaggaaaataacggtttcacgccaacgccggcggtatcgcacgccattctgtgccacaaccgccgcggcggcgcgcaggccgacggcatcgtcattacgccgtcccacaacccgccggaagacggcggcatcaaatacaatccgccgaacggcggcccggctgacaccaacctgacgtcggtgatcgagaagcgcgccaacgaactgctggcgcagcagctgaaaggcgttcagcgccagtcgctggacaaggcctggaacagtggccacctgcacgccaaagacctggtgcagccttatgtcgaaggcctggttgaggtggtcgacatgccggccattcaacgcgccggcctgaagctgggcgtggatccgctcggcggctccggcatcgcctattggcagcgcgtggcggaacactacaagctggatctgacgctggtgaacgattccatcgatcagaccttccgctttatgcacctggatcacgacggcatcatccgcatggactgctcgtccgagtcggcgatggccggcctgctggcgctgcgcgacaaattcgatctggcgttcgccaacgatccggattacgaccgccacggcattgtcacgccgaaaggcctgatgaacccgaaccactatctggcggtagccatcaactacctgttccaacatcgcccgcagtggggcgccgatgtcgcagtcggtaaaacgctggtgtccagcgcgatgatcgaccgcgtggtggccgacctgggccgcaagctggcggaagtgccggtcggtttcaaatggtttgtggacggcctgttcgacggcagcctgggcttcggcggcgaagagagcgccggggcttcgttcctgcgcttcaacggccagccgtggtcgacggacaaagacggcatcatcatgtgcctgctggcggctgaaatcaccgcggtaaccggtgagaacccgcagcatcactatgacgatctggccaagcgtttcggtgcgccgagctataaccgcatccaggcgccggcaacccatgcgcagaaagcggcgttgtccaagctgtcgccggagatggtcaaggccagtacgctgggcggggatccgatcaccgcacgtttgaccgcggcgccgggtaacggcgcctcgatcggcgggctgaaagtgatgaccgacaacggctggttcgcggcccgtccttccggtaccgaagaggcttacaagatctattgcgagagcttcctcggcgcggaacaccgcgagaagattgagcatgaagcggtcgaaatcgtcagcgaagtgctggcttccgccaagtaa

SEQ ID NO: 424129 - DNA, 543 bp, Serratia marcescens
atgaaaactattgaagtcgacgaagagctttaccgttatattgccagccacacgcaacacatcggtgaaagcgcgtccgatattttacgccgcatgttgaaattcaccgccgggcagccggtgcgcgcgttgcctgccgccagtgccccgcagtccgtcgagctggaaaaagcggcgccggcgcagcgtccgcgcgatcgcgtacgcgccatgcgtgagctgctgttatcggatgaatacgccgagcagaacaaagcggtcaaccgtttcatgctggtgctgtccacgctgtacaccctcgatgccgccggtttcgccgccgccacagaggcgttgaccggccgtacccgcacctatttcgccggcgatcagcagaccctgctggccaacggcacgcataccaagccgaagcatgtaccgggcaccccttactgggtgatcaccaataccaataccggccgcaaacgcagcatgatcgaacacatcatgcaggcgatgcagttcccggcggaactgatcgagaaagtttgcggtaccgtctaa

SEQ ID NO: 424130 - DNA, 774 bp, Serratia marcescens
atgaacttcgccatgaaattacattatcaactgctggccgccgagtcagacgcgctgcctgtgctgctgatccacgggctgttcggcaatctggacaacctgggcgtgctggcgcgcgatctgcataaacagcacacggtgatcaaggtcgatctgcgcaatcacggcctctccccgcgcgccgacgacatgaactatcccgccatggcacaggatctgctggcgctgctcgacgaactgcagctggagaaagcgatcgtcatcggccattcgatgggcggcaaagcggcgatggcgctgaccgccatcgcgcccgagcgtgtcgccaagctgatcgttatcgacgtcgcgccggtggattaccagacccgccgtcacgacgagattttcgccgcgctgaaggccgtcagcgccgccggcatcacccagcgccaggcggccgccgagctgatgcgcgactacctgcaggaagaaggcgtgatccagttcctgctgaagtccttccacaacggcgaatggcgcttcaacctgccggtgctgatcgcacgctacgaagacatcaccggctggcaggaagtcccgccctggccgcacccgaccctgttcattcgcggcggcctgtcgccgtacgtgcaggacagttaccgtgcggacatcgcccgccagttcccgcaggcccgcgcgcacgtcgtcgccggtaccggccattgggtgcacgccgaaaaaccggaagcggtgctgcgcgccatccaccgtttcctcggcgaagcctga

SEQ ID NO: 424131 - DNA, 288 bp, Serratia marcescens
atggcaaaagaacaaacggatcgcacgacgctggatctgttcgcagatgaacgccgtccggggcgcccgaaaaccaacccgctctcccgcgatgaacagcttagaatcaataagcgcaatcagttacggcgcgataaagtgcgtggattgcggcgcgtagagctgaaaatcaacgcggatgcggtggacgccctgaacaaactggcggaacagcgcaacatcagccgcagcgaactcatcgagcagatgctgttggcacaactggcggaagaacagccggaacattga

SEQ ID NO: 424132 - DNA, 540 bp, Serratia marcescens
atggctactgtaggcattttctttggcagcgacactggcaataccgaaaacattgccaaaatgatccagaaaattctccagaaacagtttggcgacgacgtctctgaagtgcatgacatcgctaaaagcagcaaagaagacctggaagggttcgatatcctgctgctgggtatcccgacctggtactacggtgaagcacagtgtgactgggatgatttcttcccgacgctggaagaagtcgacttcaacggcaaactggtggcgctgttcggctgcggcgaccaggaagactacgcggaatacttctgtgacgcgatgggtaccatccgcgacatcatcgaaccgcgcggcgcggccatcgtgggtcactggccgaccaaaggctaccacttcgaggcctccaaaggcctggcggacgacgatcacttcatcggtttggcgatcgacgaagaccgccagccggagctgaccaacgagcgcgtggacgcctgggtcaaacagatcgtcgaagagctgagcctggccgatatcgtcggctaa

SEQ ID NO: 424133 - DNA, 447 bp, Serratia marcescens
atgaccgacaacaacatcgcactgaagaaggccggcttaaaagtcacgcttccgcgactcaaaatcctggaagtactgcaaaatccggaatgccatcacgtcagtgcggaagatttgtacaaaaaactgattgatatgggcgaagagatcgggctggcaacggtttatcgcgtactgaaccagtttgacgatgcgggcattgtgacacgtcacaatttcgaaggcggcaagtccgtgttcgagctgacccaacagcatcaccacgatcacctgatttgcctggactgcggcaaagtgattgaattcagcgacgaatccatcgaagttcgccagcgtgatatcgccaagcagcacggcatcaagctcaccaaccacagcctgtacctgtacggccactgcgaaaccggtgactgtcgtgaagacgaaacgctgcacgacaagaaataa

SEQ ID NO: 424134 - DNA, 2658 bp, Serratia marcescens
atgaacgcattcaaactgagcgcattagccgctttgacggcaacgatgggattcctgggcggcatgggaaacgccatggctgatcaacagctggtggatcaactgagtcagctgaagctgaacgtgaaaatgctggataaccgcgccggcgaaaacggcgtggattgcgcggcgctgggcgccgactgggcctcttgcaaccgggtgttgttcaccctcagcaacgacggccaggcgatcgacggcaaagactgggtcatctatttccacagcccgcgccagactctgcgggtggacaacgaccagttcaagatcgctcacctcaccggcgatctgtacaagctggagccgaccgccaaattcagcggtttcccggccggtaaggcggtggaaattccagtggtggccgaatactggcagctgttcagaaacgacttcctgccgcgctggtatgccacgtccggcgacgccaagccgaaaatgctggcgaataccgataccgaaaatctggatcagttcgtggcgccgttcaccggcgaccagtggaagcgcaccaaggacgacaaaaacattctgatgacgccggcttcgcgctttgtcagcaatgccgatctgcagacgctgcctgccggcgcgctgcgcggccagatcgtgccgacgccgatgcaggtgaaagtgcacgcgcaggatgccgatctgcgtaacggcgtggcaccggatctgagcacgctggtcaagccgacggcggacgccgtcaaccagcgctttgcgctgctgggcgtgccggttcaggccaacggctatcctatcaagaccgacattcagccgggcaagtttaaaggcgcgatggcggtgtcaggcgcctatgagttgaaaatcggcaagaaagaggcgcgagtgatcggtttcgatcaggccggggtgttctacgggctgcagtcgatcctgtcgttagtgccgagcgacggcagcggcaagatcgccacgctggacgccagcgatgcgccgcgcttcgagtatcgcggcattttcctcgacgtggcgcgcaacttccataagaaggacgcggtgctgcgcctgctggatcagatggcggcctacaagctcaacaaattccacttccacctgagcgatgacgaaggctggcgcatcgagatccccggtttgcctgagctgacggaagtcggcggccagcgctgccacgatctgagcgaaaccacctgcctgctgccgcagtacggccaggggccggacgtctacggcggcttcttcagccgtcaggactatatcgacatcatcaaatacgcccaggcgcgccagattgaagtgatcccggagatcgacatgccggcgcacgcccgcgccgcggtggtctcgatggaagcgcgctataaaaagctgcatgccgccgggaaagaacaggaggccaacgaattccgcctggtggatccgaccgatacctccaacaccacctccgtgcagttctttaaccgccagagctacctgaacccgtgcctggagtcttcccagcgctttgtcgacaaggtgatcggcgaaattgcccagatgcataaagaagccggccagccgatcaagacctggcacttcggcggcgacgaagcgaaaaacattcgcctgggcgccggctataccgacaaggcgaaaccggagccgggcaaaggcatcatcgatcagagcaacgaagacaagccgtgggccaagtcgcaggtgtgccagacgatgatcaaagaaggcaaggtggccgacatggagcacctgccgagctacttcggccaagaggtcagcaagctggtgaaggcgcacggcatcgacagaatgcaggcctggcaggacggcctgaaagacgccgagagcgcgaaggcgttcgccacctcgcgcgtgggcgtcaacttctgggataccctgtactggggcggtttcgatagcgtcaacgactgggccaacaaagggtatgaagtggtggtttccaacccggactacgtctatatggacttcccttacgaggtgaacccggacgagcgcggttactactggggcacccgcttcagcgacgagcgcaaggtgttcagctttgcgccggacaacatgccgcagaacgcggaaacctcggtcgaccgcgacggcaaccccttcagcgccaagagcgacaagccgtggccgggtgcctacgggctgtccgctcagctgtggagcgaaacccagcgcaccgatccgcagatggaatacatgatcttcccacgcgcgctgtcggtggcggaacgcgcctggcaccgcgccggttgggagcaggactatcgcgccggccgcgaatacaaaggcggggaaacccactttgtcgataccaaggcgctggagaaagactggctgcgcttcgccaatattctgggccagcgtgaactggccaagctggacaaaggcggcgtcgcttaccgtctgccggtgccgggcgcgcgcgtagcgggcggcaagctggaggcgaatatcgcgctgccgggattgggcatcgagtattccaccgacggcggcaagcagtggcagcgctatgacgccaaggccaaaccggcggtttccggtgacgttcaggtgcgttcggtcagcccggacggtaaacgctacagccgcgccgagaaggtttaa

SEQ ID NO: 424135 - DNA, 327 bp, Serratia marcescens
atgaaaaaaatcatgctgatgttggcggccgccgcggccttgagcgcctgcgcgcaacccgccgcgccgccggaagacgccaaattgaagcaggcttacagcgcctgcatcaacaccgccgaaggttcaccggagcgtctgcagccctgcaaggcggtgctgaacgtgctgaagcaagagaagcagcaccagcagttcgccgcgcaggaaacggtgcgggtgatggattatcagaactgcattatggcggttcacagcggcaacggtcaggcttacgacgccaagtgcggcaagctgtggcaagaaattcgcgataacaataattaa

SEQ ID NO: 424136 - DNA, 1404 bp, Serratia marcescens
atgggtacgcacggtgctcagcgtaaaacgctggcgctcgcagtcgcgggcgcgctgttgggaacagggtttgccatggcgcctgaggcgaaagccgcagggtttatcgatgattccacgctgaccggcggcatctattactggcaacgtgagcgcgaccgtaaagatctcaatccggacagcaaggattacaaccaatacaccaccaacctgtcgcactccaccgccaacctgagcctggatttcgcttcgggctacgcctgggatatgttcggtctggacgtcggtgccttcaccgccatcgagctggcggaatccagcgccagcggccacccgaacgagatcgcgttttcctcgaaaaaccggacctacgacgaagactattccggtgacaaaggcggcgtcagcctgtacaaagccgccgccaaattcaaatacggcccggtctgggcgcgcgccggctatattcagccgagcggccaaaccctgctggcgccgcactggagctttatgccgggcacctatcagggggccgaagccggcgccaagttcgactacggcgatgccggcgcgttgagcttctcctacatgtgggccgacaaatacaaggcgccgtggcatatcgaggtggacgacttccgccagaacgacaggaaaacccgcgtctcctacctgcactcgctgggcgccaaatacgatttcaaaaacgatctggtgctggaagccgccttcggccaggcgcagggatacgtgaatcaatacttcactaaagcgtcttacaaattcgatgtgctgggcaacccgctgaccaccagttaccagttctacggtgcggaagaccgcatcagcgacaagaacgatccaaacagcatctacgacggcctggcctggctgcaggcgctgaccttcggttacaccaccgggcagttcaactggcgtctggaaggcaccatggtcaaggcggaaggcaaccagggcttcttcctgcagcgcatgaccccaacctacgcctcgtccaacggtcgtctggacgtgtggtgggacaaccgctccgactttaacgccaacggcgagaaagcggtgtacgccggagtgacgtatgacctcagcaactggaacctgccgggcatggcggtcggcggctcctacgtttacgcctgggacgccaagccgagcaccaacccgatctacgatcaaagccagcgcctgaaagagagcgcctggagcctggacgcgatgtacaccatccaggaagggcgcgccaagggcacgctgatcaagctgcactacacccagtatgacaaccacaccaacatcccgagctggggcggcggttacggcaacatcttccaggacgagaaagacgtcaagttcatggtcatcgcgccattcaccatcttctga

SEQ ID NO: 424137 - DNA, 1665 bp, Serratia marcescens
atgagtgaggctgaagcccgcccaaccaattttatccgtcagatcgtcgatgaagatctggcgtcggggaaacacacgtcggtacatacccgcttcccgccggagcctaacggctatctgcatatcggccacgccaagtccatctgcctgaacttcggcatcgccaaggactatcagggccagtgcaacctgcgtttcgatgacaccaacccggtgaaagaagacatcgagttcgtggagtcaatcaagcacgacgtggagtggctgggctttgagtggagcggcaacgttcgttactcctcagactatttcgatcagctgcaccagtatgcggtcgagctgatcaccaaggggctggcctacgtcgatgagctgtcgccggagcagatccgtgaatatcgcggcaccctgaccgcgccgggcaaagacagcccgtaccgcgatcgcagcgtggaagagaacctggcgctgttcgagaagatgcgcaacggcgagttcgccgaaggcgccgcctgcctgcgcgccaagatcgatatggcttcgccgtttatcgtgatgcgcgatccggtgctgtaccgcatcaagttcgccgaacaccaccagaccggcaataaatggtgcatctacccgatgtacgatttcacccactgcatctccgatgcgctggaagggatcacccattcgctgtgtaccctggaattccaggataaccgccgtctgtatgactgggtgttggataacatcaccattccttgccacccgcgtcagtacgagttttcgcgcctcaacctcgaatacgccatcatgtcgaagcgcaagctgaaccagttggtgaccgagaagatcgtcgaaggctgggacgacccgcggatgccaaccgtctccggtctgcgccgccgcggttataccgccgcctcgattcgcgagttctgcctgcgcatcggcgtgaccaagcaagacaacaacgtcgagatggtggcgctggaatcctgcatccgcgacgatctgaacgagaacgctccgcgcgccatggcggtgctggatccggtgaaaatcgtcatcgagaacatgggcgatgaggtggaaatggtcaccatgcctaaccatccgaacaagccggaaatgggcagccgcgatgtgccgttcagccgcgagatctatatcgatcgcgccgacttccgcgaagaagccaacaagcagtacaagcgcttggtgctgggcaaggaagtgcgtctgcgcaatgcgtacgtgatcaaggccgagcgcgtcgagaaggacgaagcgggcgagatcgtcaccatcttctgcagctacgatgcggaaacgttgagcaaagatcctgccgatggccgcaaggtgaagggcgtgatccattgggtgtccgcggcgcacgcgctgccggcggaaattcgcctgtacgatcgcctgttcagcgtgcctaacccgggcgcggcggaagatttcctctccaccatcaacccggaatcgctggtgatcaagcacggcttcgtcgagccgagcctggcggccgcacagccggagaaagcctatcagttcgagcgtgaaggttacttctgcgccgacagtcgctattcgtcggccgagcatctggtgtttaaccgcaccgtcggcctgcgcgacacctgggcgaaaatcgaaggctaa

SEQ ID NO: 424138 - DNA, 1995 bp, Serratia marcescens
atggtgccggtcgccacgctgcccgccgccgccatcttgatgggcgtcgggtactggattgaccctgttggttggggcggcgacaacgcgctcgccgctttcttcattaaatccggctccgctatcatcgacaacatgtcggtgttgttcgctatcggcgtggcctacggcatgtccaaagacaaggacggcgccgccgcgttgaccggcttcgtcggcttcctggtgctgaccaccctctgttcaccggccgccgtgtcgatgattcagaagatcccgctcgatcaggtgcctgccgcgttcggcaagatccagaaccagttcgtcggtattctggtgggtatcatctccgccgaagtgtacaaccgcttcagcggcgtcgagctgcctaaggcgctgtcgttcttcagcggccgccgcctggtgccgatcctcatttccttcctgatgatcctggtcgctttcattctgatgtacatctggccggtgatcttcaacggtctggtgaacttcggtgaacacattcagaaaatgggttcggtcggcgccggcatttacgccttcttcaaccgtctgctgatcccggtcggcctgcaccacgcgctgaactcggtattctggttcgacgtggccggcatcaacgatattcctaacttcctcggcggccagcagtcaatcgaagccggtaaagcggttgttggcatcaccggccgttatcaggcgggcttcttcccgatcatgatgttcggtctgccgggggcagcgctggccatctatcactgcgcgcgtcctgaaaacaaagccaaagtggcgggcatcatgctggcggccgcgttcgccgccttctttaccggcatcaccgaaccgctggagttctccttcatgttcgtggcaccggtgctgtacgtgatccacgccgtgctgaccggtatctcggtgttcatcgccgccagcatgcactggatcgccggtttcggcttcagcgccgggctggtggatatggtgctgtcgtcccgcaacccgctggcgacccactggtacatgctgatcccgcagggcttggtgttcttcgtcatctactacgttgtgttccgcttcaccatcaagaaattcaacctgatgaccccgggccgcgaactggcggttgccggtgacgaaaccgacggttatgacgtcaacgtcgacagcaacgccggtaaagacgaaaacgaaaccaccacgctggcccgtcgctacgtcggcgcgatcggcggttccgacaacctgaccggcatcgatgcctgcatcacccgcctgcgtctgaacgtgaaagactccgcgctggtgaacgacgccttggcgaaacgcctcggcgcatccggcgttatccgcctgaacaagcagagcgtgcaagtgatcgtcggcacccgtgctgaacttatcgccagcgcaatgcgcaacgtgattgcagccggcccggtagcggctgcggcggccccggcggcggcccctgccgcggaagccaaaccgcaggcggtgccgaacgcgccgaaagccgcgtttgaaacgctggtagcgccggtgaccggtgaagtcgtggcgctcgatcaggtgccggacgaagctttcgccagcaaggcggtaggcgacggcctggcgattcgcccgaccgacaacatcgtcgtggcgccggcggacggcaccgtggtgaaaatcttcaataccaaccacgcgttctgcctggaaaccgacaagggtgccgagatcgtggtgcacatggggatcgacaccgtcgcgctggaaggccagggcttcaaacgcctggtggaagagggcgcggaagtgaaagccggtcaaccgattctggaactggatctggattatctgaacgccaacgcgcgttcgatgataagcccggtggtggtcagcaacgctgacgactacgccggcctggcggcgctggccagcggctcggtggtcgccggtcagaccaagctgtacgagatccaaaagtaa

SEQ ID NO: 424139 - DNA, 801 bp, Serratia marcescens
atgagacttatcccactgaaagataccgcacaagtcggcaaatgggccgcgcgtcatatcgttcaacgcatcaacgcattcaagccaaccgcagagcgcccgtttgtcctcggcctgcctaccggcggcacgccgctggaagcctacaaacatctgattgcgatgcacaaagcaggtgaagtaagctttaagcatgttgtgactttcaacatggacgagtacgttggcctgccgcaggaacacccggaaagctaccacaccttcatgtaccgcaacttctttgatcacgttgatatccctcgtgaaaatatcaacctgctgaacggcaacgccgcggatgtcgacgccgagtgccgccagtacgaagagaagatcaagtcttacggcaaaattaacctgttcatgggcggcgtgggcatcgacggccatatcgcgttcaatgagccggcttcgtccctggcttcgcgcacccgcatcaaaacgctgaccgaagacacccgcatcgccaactcgcgcttcttcggcggcgacgtcagcctggtgccgaaatatgcgctgaccgtcggcgtgggtacgctgctggacgcggaagaagtgatgatcctggtgaccggccacgccaaggcgcaggcgctggaggccgcggtggaaggcaacatcaaccacatgtggaccatcagctgcctgcagctgcacgccaaagcggtggtggtgtgcgacgagccggccaccatggaactgaaagtcaaaaccgtcaaatatttccgcgagttagaagcggaaagcgtgaaaagtctttaa

SEQ ID NO: 424140 - DNA, 1140 bp, Serratia marcescens
atgttcgctttaacccacggccgaatctataccggccacgacgtacttgatgaccatgcagtcattatcgctgatgggctgatcgagagagtctgcccggcggctgaattgcccgccggcatcgaaacgcgcgacctgggtggcgccatcctggcccccgggcttatcgacgtgcagctgaacggctgcggcggcgtacagttcaacgattcgctggaagcgatttcggaagaaacgctggagatcatgcagcgcgccaacgagaaatccggctgcaccagctatctgccgacgctgatcaccagcagcgacgaattcatgaagcacagcgtcgaggtgatgcgcgcctatctgaaaaagcaccaaaaccaggcgctgggcctgcacctggaagggccgtacctcagcccggtgaaaaaaggcacccataacccggcgttcattcgcaagccaacgcaggacatgatcgattacctgtgcgccaacgccgacgtgatcaccaaggtgacgctggcgccggagatggttgagccgcacgttatcaagcagctgaccgaggccggcatcgtggtctccgccggccactcgaacgccacctacgatcaggcgcgcaccggcttcgccgccggcatcagcttcgccacccacctgtacaacgccatgccgtatatcaccggccgcgaaccggggctaatgggagcgatcttcgacacgccggaggtctataccggcatcatcgccgacggccatcacgtggcctgggcgagtatccgtaacgccaaacgcctgaaaggtgataaattggtattggtcaccgacgcgaccgcaccggcaggtgcagatattgaccaatttattttcgccggtaaaacaatatactatcgggatgggctgtgcgtggatgagaacggcaccctgagcggttccgcgctgaccatgatcgaagcggtgcaaaacagcgtcgagcatatcggcatcgcgctggacgaagcgctgcgcatggcgacgctgtacccggcgcgcgccatcggcgtcgagcaccgtctgggcaccatcgaagccggcaaggtggctaacctgaccgccttcacccgtgattttaaaatcaccaaaacgctcgttaacggtaacgaggtttaa

SEQ ID NO: 424141 - DNA, 1221 bp, Serratia marcescens
atgagcaccggcggacaagcacaaatagggaacgttgacttagtcaaacaacttaacggcgcggcagtttaccgcctgatcgaccagcagggcccgatctcgcgcattcaaattgccgaactcagccagcttgcccccgccagcgtcaccaaaattactcgccagctgctggagcgcgggctgatcaaggaagtcgatcagcaagcctccaccggcggccgccgcgcgatctccatcgtgtcggaaacccgtcatttccataccgtcgcggtgcgtctcggccgccacgacgccaccatcaccctgtatgacatgagcggcaaatcgctcggcgaagaacactatccgctgccggaacgcacccaggaaacgctggagaatgcgctgttcgccgccatcgcccaattcatcgaagcgaatcagcgccgcctgcgcgagctgatcgccatcgcggtgatcctgcccggcctggtggatccggcgctgggcgtggtgcgctacatgccgcacatcagcgtcagcaactgggcgctggtggacaacctgcagcaacgtttcaacgtcaccagcttcgtcggccacgacatccgcagcctggcgctggcggagcactacttcggcgccacccgcgactgcgaagactcgattctggtgcgcctgcaccgcggcaccggcgccggcatcatcgtcaacgggcagatttttctcggcaacaacggcaacgtcggcgagatcggccatatccagatcgatccgctcggcgaacgctgccactgcggcaacttcggctgcctggaaacggtggccgccaacgcggcgatcgaacagcgcgtgcgccagctgctgagccagggctacccgagcaaactgacgctggaagactgcggcatcaacgccatctgcaaggccgccaaccgcggcgatctgctggccagcgaagtgatcgaacacgtcggccgctatctgggcaaggcggtggccatcgccatcaacctgttcaatccgcagaaggtggtgatcgccggtgagatcaccgaagcggacaaagtgctgctgccggcgatccagagctgcatcaatacccaggtgctgaaggacttccgcaagaatctgccggtggtgacctccgaactcaatcatcgctcggcgatcggcgctttcgccctggccaaacgcgcgatgctcaacggcgtgctcttgcagcgattgctggaaagctga

SEQ ID NO: 424142 - DNA, 753 bp, Serratia marcescens
atgaaaatcaaaaacgttatatgcgatatcgacggcgtgctgctgcatgacaatacgccggtgcccggcgccgatctgttcctggcgcgcatccaggaacaaggcatgccgctggtggtgctgaccaactacccgtcacagaccgcgcaggatctggcgaaccgcttcgccgccgccgggctggaagtgccggagagcgcgttctatacctcggcgatggccaccgccgatttcctgcgccgccaggaaggcaaaaaagcctacgtggtcggcgaaggcgcgctgatccatgagctgtacaaagccggtttcaccatcaccgacatcaacccggatttcgtgatcgtcggggaaacccgctcttacaactgggacatgatgcacaaggccgcctacttcgtcagtaacggcgcgcgctttatcgccaccaacccggatagccacggccacggcttctcgccggcctgcggcgcgctgtgcgcccccatcgagaagatcaccggccgcaagccgttttacgtcggcaagcccagcccgtggatcattcgcgccgcattgaacaaaatgcaggcgcactcggaagagacggtgatcgtcggcgacaacctgcgcaccgacattctggcgggcttccaggccggcctggaaaccgtgctggtgctgtccggcgtctccacgctgagcgacatcgaaaccatgccgttccgcccgagctacgtctacccttccgttgccgatatcactattttctga

SEQ ID NO: 424143 - DNA, 1449 bp, Serratia marcescens
atgagcacaaataacattattaatgccgccgatgacgcagccattatgccgactatcgccaataaaaaaatcctgatggggttctggcacaactgggccgccggcgccagtgacggttatcaacaaggccagttcgccaatatgaacctgaccgacattcccgccgaatataacgtggtggccgtcgcctttatgaaaggccagggaatcccgaccttcaagccttacaacctgtccgacgccgagttccgccgccaggtgggcgtgctgaacagccagggccgcgcggtgctgatctccctcggcggcgcagacgcgcacatcgagctgaaaaccggcgacgaagataagctgaaagacgagattattcgtctggtggaagtctatggcttcgacggcctggatatcgatttggaacaggcggcaatcggcgccgccaataataaaaccgtcttgcctgcggcattgaaaaaagtaaaagaccattacgtcgcgcaggggaaaaactttattatcagcatggcgccggaattcccttatctgcaggctaacggcagctatggcgattatattaatgcgttagatggctattatgactttatcgcgccgcaatattataaccagggtggcgacggtatctgggttcccgaggccaataacggtgccggtgcctggattgcccaaaacaacgatgccatgaaagaagacttcctctattacctgacggaaagtctggtcaccggcacccgcggatttatccgaattccagccagtaaattcgttatcggcctgccgagcaacaacgatgccgccgccaccggctacgtgatcgacaaacaggcggtgtataacgccttctcgcgtctcgacgccaaaaacctgtcgatcaagggcctgatgacctggtcaatcaactgggacaacggcaagagcaaagccggcgtggcctacagctgggagttcaaaacccgctacgcgccgctgattcagggcggagtcaccccgccgccgggaaagcctaatgcgccgacggcgctgacggtctccgagttgggcgccacctcgctgaagctgagctgggccgccgccaccggcgccttaccgatcgccagttacaccgtttaccgcaacggcaacccgatcggccagactgccggcctgtcgttggccgacaacggcctggctccggccacccagtacagctacttcgttaccgcaaccgacagtcagggcaatacctcgctgccgagcagcgcgctggcggtcaaaaccgccaacgacggcacgccgcccgatccgagcgcgcccgagtggcagaacaaccacagctaccaagccggcgacgtggtgagttataaaggcaagaaatacacctgtattcagacgcacacctccaacgccggctggacgccggacgccgccttcaccctgtggcagctcatcgcctaa

SEQ ID NO: 424144 - DNA, 1665 bp, Serratia marcescens
atgtgttctattttcggtgtgctcgatctgaagtccgatcccgttgaactgcgtaagaaagcgctggagctgtcgcgcctgatgcgccaccgcggcccggattggtccggcgtttacgccagcgacaaagccattttggcccacgaacgcctgtcgatcgtcgacgtcaacaacggcgctcaaccgctgtacaacgctgcgcacacccacgttttggcggtcaacggcgaaatttacaaccaccaggcgctgcgccaacagctgagcgaccgctacgcgttccagaccggttccgactgtgaagtgatcctggcgctgtatcaggagaaaggcccggacttcctcgacgatctgcaaggcatgttcgccttcgccctgtacgacaccgaaaaagacgcctacctgatcggccgcgatcatctgggcatcatcccgctgtacatgggccacgacgagcacggcaacctatacgtcgcctcggaaatgaaagcactggtgccggtgtgccgcaccattaaggaattcccggccggcagctacctgtggagccaggatggtgagatccgcgaatactatcgccgtgactggttcgattacgacagcgtcaaagacaacgtgaccgacgccaccgccctgcgcaccgcgctggaagagtcggtgaaaagccacctgatgtccgacgtgccttacggcgtgctgctgtcgggcgggctggattcctcggtcatctcggcgatcaccaagaagtacgccgcgcgccgcgtggaagatcaggaacgcagcgaggcctggtggccacagctgcactccttcgccgtcggcctggaaggctcgccggatctgcgcgccgcgcaggaggtggccaaccatctgggcaccgtgcaccatgaaatccacttcaccgtgcaggaaggcctggacgccatccgcgacgtgatttaccacatcgaaacctacgacgtcaccaccatccgcgcctcgacgccgatgtacctgatgtcgcgcaaaatcaaggcgatgggcatcaagatggtgctctccggcgaaggcgcggacgaagtgttcggcggctacctgtacttccataaggcgccggacgcccgtgaattccacgaagagaccgtacgcaaactgctggcgctgcacatgttcgactgcgcgcgcgccaacaaggcgatgtccgcctggggcgtcgaagcccgcgtgccgttcctggacaagaaattcctcgacgtggcaatgcgcatcaacccgaaagataaaatgtgcggcaacggcaaaatggaaaaacacatcgttcgcgaatgtttcgagtcctatttgcccgccagcgtggcctggcgccagaaagagcagttctccgacggcgtcggctacagctggatcgacacgctaaaagaggtggctgcgcagcaaattagcgatcaacagctcgaaaccgcgcgtttccgcttcccgtacaacacgccgacgtcgaaagaaggctacctgtaccgcgaaatcttcgaggagctgttcccgctgccgagcgccgccgaatgcgtgccgggcggcccatccgtcgcctgctcgtccgccaaggccatcgagtgggatgaatcgttcaagaagatggacgatccttccggccgcgccgtcggcgtgcaccaggccgcctataaataa

SEQ ID NO: 424145 - DNA, 1215 bp, Serratia marcescens
atggcgagcattcacacagaaaacatagccaatatgaagacatctcaaaatcggtatgacgcggtggtggtcggcggcggcatggtcggcgcggcggcggccctggggctagcgcaggcgggctggtcggtggcgttgctggaacatcaggcgccgcaggcgttcgaggcgcaaagcccgccggatctgcgcatttccgctatcggctgcacctcggtggggctgctgaaacagctcggcgcctggcaggccgtgacggcgatgcgcacggcgccgtatcgccggctggagacctgggagtgggcgtcgtcgcgcgtggcgttcgacgcggtgtccctggggctgccggagctgggctttatggtggaaaaccgcattctgcagctggcgctgtggcagcagttcgcacagtgcgccaatttgacgctgctgtgccccgccaggctgcaatcgctgcagcgggcggacaatgcctggcagctgacgctggacggcggtgagacgctgcagacgcgtttggttgtcggcgccgacggcgccaactcgcaggtgcgcaagctggcggcgatcggcaccaacggctggcagtatcgtcaggcgtgcatgttgatcaccgtcgataccggtgcgccgcagcaggatgtgacctggcagcgcttcttcccatccgggccgcgtgccttcctgccgctgtacgacagctgggcgtcactggtgtggtatgacagcccgcagcgcattcgccagctgcaggcgatgccgccggcgcaactggagcgcgagatcgccgccgctttcccggcgcgactgggcccggttaaggtgcacgctgccggttcgttcccgctgacgcggcgtcatgcgcagcgctacgtgttgccggggctggcgctgttgggtgatgcggcgcataccatcaatccgctggccgggcagggcgtcaatctggggtatcgcgacgtggatgccttgctgaacgtattaagcgatgcgcgggagcagggagaggactggagcagcgaggcggtactgctgcgctatcagcgccgccgccgtaccgacaatctgctgatgcagagcggcatggatctgttctataccgctttcagcaataacctggcgccgctgaacgtggcgcgcaatctggcgctgatggccgcgcagcgggcgggcaagctgaaagagcatgcgttgaagtacgcgttgggattgtaa

SEQ ID NO: 424146 - DNA, 1425 bp, Serratia marcescens
atgacgaaaaaactacatatcaaaacctggggctgccagatgaatgagtacgattcatcgaaaatggccgacctgttgaacagcacgcacggcttcgagtggaccgataacgccgaagaggcggacgtgctgctgctgaacacctgctcgatccgtgaaaaggcgcaggagaaagttttcgccatgctggggcgctggcgcttgctgaaagaaaagaacccgtcggtgatcatcggcgtcggtggttgcgtggcctcgcaagaaggtgaactgatccgcagccgcgcgccctgcgttgacgtggtattcggcccgcagaccctgcaccgcctgccggaaatgatcaatcacgttcagggcacccgcagcccggtggtcgacatcagcttcccggagatcgaaaagttcgaccgtctgccggaaccgcgcgccgaaggcccgaccgcattcgtgtcgatcatggaaggctgcaacaaatactgcaccttctgcgtggtgccttacacccgcggcgaggaagtgagccgcccgagcgacgacgtgctgttcgaaatcgcccaactggcggcgcagggcgtacgcgaggtcaacctgctcggccaaaacgtcaacgcttaccgcggcgccacgcatgacggcgatatctgctcgttcgccgaactgctgcgcctggtggcggccatcgacggcatcgatcgcattcgcttcaccaccagccaccctatcgagttcaccgatgacatcatcgcggtgtatgaagacacgccggagctggtcagcttcctgcatctgccggtgcagagcggttcggatcgcatcctgaccatgatgaaacgcgcgcacaccgcgctggagtataaggcgattatccgcaagctgcgcaaggcgcggccggccattcagctcagctccgatttcatcgtcggtttcccgggcgaaagccaggccgatttcgaacagaccatgaacctgatcgccgacgtcaatttcgacgtcagcttcagcttcatctattcgtcgcgcccgggcaccccggcggcggacatggtcgacgacgtcagcgaagaagagaaaaaacagcggctgtatattctgcaggaccgcatcaaccagcaggcgctgcagttcagccgccgcatgctcggcaccgtccagcgcattctggtggagggcacctcgcgcaaaagcgtgatggagctggccgggcgcacggagtgcaaccgtgtggtaaacttcgagggcacgcccgacatgatcggccagttcgtcgacgtggaaattaccgaggtgctgaccaacaccctgcgtggcgcagtggtgcgcaccgaacagcagatggatctgcgcgtacatgaatccccgcagtcggtgatcgcccgtacccgcaaagaaaacgcgctgggcgtcggcatttaccagccctga

SEQ ID NO: 424147 - DNA, 336 bp, Serratia marcescens
atgcaactcccacactgcccgaagtgcaactccgaatacacctaccaggacaatgccctgttcatctgccctgagtgcgcccacgagtggagcgacagcgccccggcggaagatcaggacgcgctgatcgtcaaagacgccaacggcaacctgctggcggacggcgacgcggtcaccgtgatcaaagacctgaaggtcaaaggcagctcctcgatgctcaagatcggcaccaaggtgaaaaacattcgcctggtcgaaggcgatcacaacatcgactgcaaaatcgatggcttcggcccgatgaagctgaaatccgagttcgtgaaaaagaactga

SEQ ID NO: 424148 - DNA, 1056 bp, Serratia marcescens
ttgaacgtcgcaacacaagaaattttgttagagcccgcagacaacaagcgtttgctcagcctgtgcggcccgtttgatgacaacatcaaacaactcgagcgccgattgggcatcgaaatcaatcgccgcgacaaccgtttcaagctggtcggcaaaaacctgtgcgtggccgccgccgccgatatcctgcgccatctgtacgtggataccgcgccgattcgcggcgtgatcccggatatcgatccggagcaaatccacctggccatcaaagagagccgggtgctggaacaggtagccgacagcgtgccggattacggcaaggcggtcaccatcaaaaccaagcgcggcatggtgaaaccgcgcacgcccaaccaggcgcagtacatcgccaacattctcgatcacgacatcaccttcggcatcggcccggcgggcaccggcaagacctacctggcggtcgccgccgcggtagatgcgctggagcgccaggaaattcgccgcattctgctgacccgccccgcggtcgaagccggcgaaaagctgggcttcctgccgggtgatctgagccagaaggtcgatccctatctgcgcccgctgtacgacgccctgttcgaaatgttgggcttcgagcgcgtggagaagctcatcgagcgcaacgtgatcgaagtcgcgccgctggcctatatgcgcggccgcacgctgaacgacgcctttatcattctggatgagagccagaacaccaccatcgaacagatgaagatgttcctgacgcgcatcggcttcaactcgaaggcggtcatcaccggcgacgtcacccagatcgacctgccgcgcaaccagaaatccggcctgcgccacgcggtggaagtgctgtcggacgtggaagaactgagcttcaacttcttccacagcgaagacgtggtgcgccacccggtggtggcccgcgtggtcatcgcctatgaggcctgggaagcggccgaacagaaacgcaaagacgcgattgccgaacaacgtaagcgcgaggcgctcgccgcctccgagcaggagacaccatga

SEQ ID NO: 424149 - DNA, 474 bp, Serratia marcescens
atgagccaggtgattttggatctgcagattgcctgtgaaagcggcgacggcctgccggatgaggccaccttccagcgctggctggaaggcgtgctgccgcaatttcaggaagaggccgaggtgaccgtgcgtctggtggacgaagcggaaagccacgagctgaacctgacctaccgcggcaaagacaagccgaccaacgtgctctctttcccgttcgaggccccgccgggcatcgagctgccgctgctcggcgatctgatcatctgccgccaggtggttgaacaggaagcgattgagcaaggcaaggcgctggaggcccactgggcgcatatggttgtccacggcagtcttcatctgctagggtatgaccacatcgaagacgatgaagccgaagaaatggagtctttggaaaccgaaatcatgcacggactgggctatcctgatccgtacctggcggaaaaagaccccgtctga

SEQ ID NO: 424150 - DNA, 903 bp, Serratia marcescens
atgagtgacagtaacgaaaacgccatgagcgacgaccattcacaaagcaatgacagccccagtcccaagaaggggttctttactcttatccttaaccagctgttccacggcgagcccaaaaaccgtggcgatctggtcgagctgatccgtgattccgaacaaaacgacctgatcgatcccgatactcgcgacatgctggaaggcgtgatggatatcgccgagcagcgcgtgcgcgacatcatgattccccgctcccagatggtgacgctcaagcgcaaccagacgctggaagagtgcctggacgtgattatcgactccgcccactcgcgcttcccggtgatcagcgaagacaaagatcacatcgaaggtatcctgatggccaaggatctgctgccgttcatgcgcgcagattccgagccgttcagcatcgacaaggtgctgcgcaccgcggtggtagtgccggaaagcaagcgcgtcgaccggatgctgaaagagttccgctcccagcgctatcacatggcgattgtcattgacgaattcggcggcgtgtccggcctggtcaccatcgaagacattctggaactgatcgtcggcgagatcgaagacgaatacgacgacgaagacgatctggatatccgccagctcagccgccacatgtacaccgtgcgcgcgctggccccaatcgaagacttcaacgaagccttcggcacccatttcagcgacgacgaggtcgataccatcggcggtctggtgatgcaggccttcggccacctgccggcgcgcggggaaaccattgaaatcgaaggttacctatttaaagttgccatggccgacagtcgacgtattatccaggttcatgtaaaaattccggacgattctccaccaccgaaactggaagattaa

SEQ ID NO: 424151 - DNA, 1530 bp, Serratia marcescens
atggctaaagcctcattacttgaacgccagcgggttcgcgccctgctggcgctgttgtcaggtgccggcgggacgctggcattctcaccctacgacttctggccagcggccatcgtctccctgttcggcctgctggccgttaccctcaatcgcaccaccaaacagtccgccctgctcggctttgtctggggcttcgggctgttcggcagcggcatcaactgggtgtatgtcagcatcgccgatttcggcggcatgcctttcgccgtcaacgtcttcctggtggtgctgctcgccgcttacctgtcgctgtataccgggctgttcgccgggctgttgacgcgcctgtgcccggccactcgctggtggcggctggccatcgccgcgccggcgctgtggcaggtgaccgaattcctgcgcggctgggtgctgaccggcttcccctggctgcagttcggctacagccagatcaacggcccgctgaagggcatcgcgccgctgctgggcgtcgacgccatcacctttgtgctgatggccatcgccggtctgctggtgtatgccgtcaatcagcgccgcctgtcggctgcggtcatcgccgccgcgctgctgctgttgccgtggccgctgcgccaactgcagtggtttaccccgcagccggagaaagcggtgaacgtcgccatggtgcaaggcaacatcgcccagtcgatgaaatgggatccgaaagcgctggtcagcacgctgcaaacctatctggacgaaacccgtccgtacgtgggcaaggcgccgatcgtcatctggccggagtccgccatcccggattatgaagccaaccagaacggcttcctgaccatgatggacgacctgatgcgggcgaagaacagcagcctgatcaccggcatcgtcgacgtgcgcgccacgccacagggccagcagatctacaacagcgccatcgtgctcggcgagccgacgccatacagctacccggacaagaatcgctacaacaagcaccacctggtgccgttcggcgaattcgtgccgctggagacgctgctgcggccgctggcgccgttcttcgatctgccgatgtcttccttcagccgcggcgactatgtgcagccgcagctcagcgtgcgcgggtacaacctgacggcggccatctgctacgaaatcgtgctgggccagcaggtgcgcgataacttccgcccggacaccaacttcctgctgaccatctccaacgatgcctggttcggccactccatcggcccgtggcaacacttccagatggcgcgcatgcgggcgctggagctcggccggccgctgctgcgcagcaccaataacggcgtcaccgccgcggtggacgcgaacggcgaggtgatcgccgagatcccgcagttcacccgtcaggtgctcgaagtgaaggtcacgccgaccaccggcgtcacgccttatgcgcgcttcggcgccacgccgctgtgggtgattaccctgctgctgggcggctgggcgctgatgttgggcctgcgccgcaaataa

SEQ ID NO: 424152 - DNA, 897 bp, Serratia marcescens
atgcaaatgcgtaaattggcgttatcgttactgctgctcggtatggcaggtagcgtggcgcatgcggaagacctgaccggtacgctgaagaaaatcaaagacaatggcgtgatcgttgtcggccaccgcgaatcgtcagtgccgttctcctactacgacaaccaacaaaaagttgtgggctactctcaggactactccaaccaaatcgttgaagccgttaagaaaaagctgaatgcaccgaatctgcaggtgaaaatgctgccgattacctcgcagaaccgcatcccgctgctgcaaaacggcacctatgatttcgagtgcggctccaccaccaataacctcgagcgccagaaacaggccgccttctccgacaccattttcgtggtcggcacccgcttgctggtgaaaaaaggctccgacatcaaagactttaaagacctggcaggcaaaccggtggtggtcacctccggcaccacctccgaagtgctgctgaacaagctgaacgacagcggcaagatgaacatgcgcatcatcagcgccaaagatcacggcgattccttccgcactctggaaagcggccgcgccgtggccttcatgatggatgacgccctgctggcgggcgagcgcgccaaggccaagaaaccggatcagtgggaaatcatcggcacgccgcagtcgaaagaggcctacggctgcatgctgcgtaaagacgaccctgagttcaaaaaactggtcgatgacaccatcgcccaggcgcaaacttccggtgaggcggccaagtggtttgacaaatggttcaaacagcctatcccaccaaaacagctcaacatgaacttcgaactgtcggacgacatgaagcaactgttcaaagagcctaacgacaaagcgttgaactaa

SEQ ID NO: 424153 - DNA, 741 bp, Serratia marcescens
atgtcaatagattggaactggggtatcttcctgcagcaggccccgtttgggaacaccacttacctcggctggatctggtccggctttcaggtcacggtggccctctccgtctgtgcatggattatcgctttcttcgtcggttcgctgttcggtatcttgcgtaccgtgcccaaccgctttctttccactctcggcacctgttacgtcgagctgttccgcaacgtgccgctgatcgtgcaattctttacctggtatctggtgatccccgagctgctgccggtcaatatcggcacctggttcaagaccgagctggatcccaacgtgcagttcttcgtctcttccatgctttgtctggggctgtttaccgccgcccgcgtttgcgagcaggtgcgcgccgccattcaatccctgccgcgcggccagaaagccgccgggctggcgatgggcctgacgctgccgcaaacctaccgctacgtgctgttgccgaacgcctatcgggtgatcgtgccgccgatgacctcggagatgctcaacctggtcaaaaactccgccatcgcctccaccatcgggctggtggacatggccgcgcaggccggcaagctgttggattactccgcacacgcctatgaatcctttaccgccatcacgctggcttatatcggcatcaacgccgttatcatgctgtttatgcgtctggtcgaaaagaaagtgcagttgcctggcaacctggggagtaaataa

SEQ ID NO: 424154 - DNA, 675 bp, Serratia marcescens
atgtacgaatttgactgggcgtcgatcgtcccaagcttcccttatctgctgcagggcatggtgatcacgctgaagatcaccgtgaccgccgtcgtggtcggcatcctgtggggcaccgtgctggcggtgatgcgcctgtcgccgttcaaaccgatcagctggttcgccaccctgtacgtcaacctgttccgttcggtgccgctggtgatggtgctgctgtggttctatctggtggttccaagcttattacaacaggttctagggctgtcgccgaaaaccgatattcgcctgatctcggctatggtagccttttccctgtttgaagcggcttattattcggaaatcatccgcgccggcattatcagcatctcgcgcggccaatcttccgccgcgctggcgctgggcatgacccactggcaatccatgcggctggtgatcctgccgcaggcgttccgcgccatggtgccgctgctgctgacccagggcatcgtgctgttccaggatacctcgctggtttacgtactgagcctggccgacttcttccgcaccgcgtcgaccatcggcgaacgcgacggcacccaggttgaaatgatcctgttcgccggctttgtctattttgttatcagcctcgccgcctcggcgctggtaagctatttgaagaaaaggactgtttga

SEQ ID NO: 424155 - DNA, 726 bp, Serratia marcescens
atgatatccctgaaaaatgtttccaagtggtacggtcactttcaagtgttgaccgattgcaccaccgaagtgaaaaaaggcgaagtggtcgtcgtctgcggtccttcaggttccggcaagtccaccctgatcaaaaccgtcaacggcctggagccgatccagcagggaagcatcctggtgaacggcacgccggttaacgacaagaaaaccaacctggcgcagctgcgcgccaaggtcggcatggtgttccaacactttgaactgttcccgcacctgtccatcatcgacaacctgacgctggcgcaggtaaaagtgctcaagcgcgataagaccgcctcgcgcgagaagggcctgaagctgctggagcgcgtcggcctcaccgcccatgccaacaaattccccggtcagctgtccggcggccagcagcagcgcgtcgccatcgcccgcgcgctgtgcatggatccgatcgccatgctgttcgatgagccgacctcggcgctcgatccggaaatgatcaacgaagtgctggacgtgatggtcgaactggcgaacgaaggcatgaccatgatggtggtgacccacgaaatgggcttcgcccgcaaggtggcgaatcgcgtgatctttatggacgaaggcaaaatcgtcgaagaccgcaacaaagacgatttcttcaacaaccctgaatccgatcgcgccaaggacttcctggccaagatcctgcactga

SEQ ID NO: 424156 - DNA, 462 bp, Serratia marcescens
atgattcaactggtacaagcggagtacaacatcaaatccggttatccgattgttcgacgcacgttggaagacaagaagaaactgattgaaaaaccgggtttcgggccggagtcctgttgcgccaccatcgaataccagctgcgcggcagcactcgctatgcctttggcaatagccagatgaaaatggagatgccgccggatatctacacccataactgggtcaagcttcatgccgaaatggccgcgctggttgcggcgataaggcgcatcgaacgctttgacgccgataaggagcaggtgccgatcaccaacgtgtatatcgagctgcgcccctgcgaggccaactgcatgcaggcactgcaaaatatcttgtccgacggcactaccgtctattactccttcttgcacccaaacgaggtggaagaatggaaacgcagcgctcatgaactctgcggtgtctga

SEQ ID NO: 424157 - DNA, 933 bp, Serratia marcescens
atgccccgccctattatcatcgattgcgatcccggcctcgacgacgccatcgcgctggccatggcgctgcgttcgccggagctggacgtcaaagccatcaccacctccgccggcaaccagacgccggagaaaaccctgcataacgcgctgggcctgttgaccctgatggggcgcgaggacataccggtcgccgccggcgccggcggcccgctgatgcgcgagctggtgatcgccgactatgtccacggcaaaaccggcatgggcaacacccacctgccggcgccgaccctcaaacccgatccccgcggcgccatcgagctgatcgccgacctgctgcgcgccagcccgcagccgataaccctggtggtgaccggcccgatgaccaacatcgccctgctgttggcccagcatgccgagctgaaaagccgcatcgagcgcatcgtatttatgggcggcggcatgaacgccggcaataccacgccggtcgcggagttcaacatcttcgtcgatcccgaagccgccgaaatggtgctgaaatccggcgtgccgctgaccatggccggcctgaacgtcacccatcaggcgctggtgttgccgcaggatatcgaacgcattcgtcagatagccaatccggtcgcgcaggcggtcgcggagatgctcgatttttacctgccgctgtatctcagccacccgcgcggcctgcccggcgcggcgatgcacgatccctgcaccatcgcctggctgctggcgccgcagctgtttaccggcgtagagcgctgggtgggggtggaaaccaagggggaatacaccgccgggatgacggtggtggactatttccagcaaaccggcaacgcggccaacgtggaagtgctgaccggcatcaaccgcgaaggctttatcgatctgctggccgagcgcgtagcgcgttattga

SEQ ID NO: 424158 - DNA, 705 bp, Serratia marcescens
atgagccgcgtactggtccttaaatcaagtattctgggtgaatattcccagtctggaaaattagtcgatttttttgttgaacaatggcgtgaaactcaccctgaagacaggttcaccgtgcgcgatttggccaacccgacgctgccggagctggatggtgaagtgatggccggttttaccgccggcgataaaccgctgacgccgcaccagcaaagcaccctggcactgtccgatgagctgattgccgagctgaagtcgcacgacacgctgatcatcagcgccccgatgtacaacttcaacatcccgacgcagctgaagatctactttgatctgatcgcccgcgccggtcagacgttccgctatacttccgccggcgccgaagggctggtgacaggcaagaaagcgatcgtcatctccagccgcggcggcatccacgccgacacgccgacggatctgatcacgccgtacgtgaagctgttcctgggctttatcggcatcaccgacgttgaattcgtgctggcggaaggcttcgcctacggcccggaagcggcggagaaagccgcccaggacagccgcatcgcggtcgcgcagaaaatcccggccggcgtcgccgtaccggccagcgcaccggcgcaggcgcaagccgccccggctaccgtcagcggcggtttcctcagcaacctgctgaagaaactgttccgctaa

SEQ ID NO: 424159 - DNA, 483 bp, Serratia marcescens
atgaacaaggttgctcagtattaccgcgaattggtggcatcgctgaccgaacgcctgaaaaacggtgaacgcgatatcgacgaactggtggccagcgcggagcggcggttgaacgaggccgaggatctgacccgcgatgaggtgcggcaggtgacgcaggcggtgcggcgcgatctggaagagttcgcccgcagctatcaggagagccgggacgagtttaccgacagcgtgtttatgcgggtgatcaaagagagcctgtggcaggaactggcggatatcaccgacaaaacccagctggagtggcgcgaggtgttcaaggatgtcagccaccacggcgtttaccacagcggtgaagtagtggggctgggcaatctggtgtgcgagcagtgtcactaccacctggcgttctacacgccggaggtgctgccgctgtgcccgaaatgcggccacgaccagttccagcggcggccgtttgaaccttga

SEQ ID NO: 424160 - DNA, 2583 bp, Serratia marcescens
atgcaagagcaataccgtccagaagacatagaatcgaacgtacagcttcactggcaagagaagcagactttcaaagttaccgaagacgacagcaaggaaaagtactactgcctatccatgctgccttacccgtccggccgactgcacatgggccacgttcgtaactacactatcggcgacgtgatctcgcgctatcagcgcatgctgggcaaaaacgtgctgcagccgatcggctgggatgcgttcggcctgccggcggaaggcgcggcggtgaaaaacaacaccgcaccggccccgtggacctacgacaacatcgaatacatgaagaaccagctgaaactgctgggtttcggctacgactgggatcgcgaaatcgccacctgccagccggaatactaccgctgggaacagtggttcttcaccaagctgtatgaaaaaggcctggtctacaagaagacctcggcggtgaactggtgcccgcacgatctgaccgtgctggccaacgaacaggttatcgacggctgctgctggcgctgcgacaccaaggtcgagcgtaaagagatcccgcagtggttcatcaaaatcaccgcctacgccgatcagctgctgaacgatctggacacgcttgaaagctggccggagcaggtgaaaaccatgcagcgtaactggattggccgctccgaaggcgtggaaatcaccttcgacgtggcggacagcgaagagaagctgacggtttacaccacccgtcccgacaccttcatgggcgccacctacgtggcggtcgccgcgggccacccgctggcgcaacagggcgcgcgcaacaacccggcgctgaccgacttcatcgacgaatgccgcaacaccaaagttgccgaagccgaaatggcgacgatggagaagaaaggcatgccgaccggcctgttcgttgtccacccgctgagcggcgagaagctgccggtgtgggtcgccaacttcgtgctgatggaatacggcaccggcgccgtgatggcggtaccggcgcacgaccagcgcgactgggaattcgccaccaaatacgatttgccgatcaaaccggtgatcctgaacctcgacggcagccagcctgacgtgagcgccgaagcgatgaccgacaaaggcgcgctgttcaactccggcgagttcgacggcctggacaatgaagcgggcttcaacgccatcgccgacaaactggtcgccaagggcgtaggccagcgcaaggtcaactaccgtctgcgcgactggggcgtttcccgtcagcgttactggggcgcgccaatcccgatggtgacgctggaagacggcaccgtgatgccgacgccggaagaccagttgccggtgatcctgccggaagacgtggtcatggacggcatcaccagcccgatcaaggccgatcctgagtgggcgaagaccaccgtcgacggccagccggcgctgcgtgaaaccgatactttcgacacctttatggagtcttcctggtactacgcgcgctacacctgcccgcagtatgaccaaggcatgctggatccggccgccgccaactactggctgccggtcgatcaatatatcggcggcatcgaacacgccatcatgcacctgatgtacttccgcttcttccacaagctgatgcgcgatgcgggcctggtggattccgacgagccggccaagcgcctgctgtgtcagggcatggtgttggccgacgccttctactacaccggcaacagcggtgagcgcgtctgggtgtccccggttgacgccaccgtcgagcgcgacgacaagggccgcatcatcaaggccaccgatccgcaaggccgtgaactggtctatgctggcatgagcaaaatgtcgaagtcgaaaaacaacggcatcgacccgcaggagatggtggaaaaatacggcgcggacaccgtgcgtctgttcatgatgttcgcttcaccggcagaaatgacgctggagtggcaggaatccggcgtggaaggggctaaccgcttcctgaaacgcgtgtggaaactggcctacgatcacgtggaaaaaggcgcggtgcagccgctcgacgtagcagcgctgaacgaagatcagaaagcgctgcgccgcgatctgcacaaaaccatcgccaaggtgaccgatgacatcggccgccgtcagaccttcaacaccgcgatcgccgccgtgatggagctgatgaacaagctggcccgcgcaccgcaggagagcgagcaggatcgcgcgctgctgcaggaagcgctgctggccgtggttcgcatgctgtatccgttcaccccgcacgtgtgcttcacgctgtggcaggcgctgggcggcgaaggcgacgtggacactgcgccatggccggttgccgacgagcaggcgatggtcgaagactccaaactggtggtggtgcaggtgaacggcaaggttcgcgctaaaatcaccgtatccgccgatgcgaccgaagagcaggtgcgtgcgcgcgctgccgaagagcatctggtggctaaatatctggacggcgtcacgattcgcaaagtgatctacgttccgggcaaactgcttaacctggttgtgggttaa

SEQ ID NO: 424161 - DNA, 561 bp, Serratia marcescens
gtgcgacaacgcattctgacgctgttgctggggttggcggtgctggtcaccgccggctgcggttttcacctgcgcggcaccacgcaggtgcctaatgaaatgaaaacgctgatcctggacagcgctgacccttacggcccgttgacgcgctcggtgcgcgaacagctgcgtctgaacgacgtgactatcgtcagcgatccgaagcgtaaagacgtgccttccctgcgcatcgtcggcgcgacggaaagccaggataccgcttcgatcttccaggacggtaaaaccgccgagtaccagctggtgctgaccgtgcaggcgcaggtgctgatcccgggccatgacctgtatccgctgtcggtgaaagtgttccgttccttcttcgacaacccgctgaccgcgctggccaaggactccgaacaggagatcattcgccaggaaatgcgtgagcaggcggcgcaacagctggtgcgcaaactgctggccgtgcatgcggcggaagaagataaccggcagaaagccgctgccgccggcgaacgagcggcaagccaaaccgcacaatga

SEQ ID NO: 424162 - DNA, 1035 bp, Serratia marcescens
atgatccgcatttacccggaacaacttgccgcgcagctccgagaggggctgcgcgcttgttatttattgagcggcaatgaaccgctgctgctgcaggagagccaggatttgctccggcaggccgcgcaacagcagcagttcagtgagcactacagcatttccctcgacgcccataccgactgggacgccatcttcggcatctgccaggcgatgagcctgttcgccagccgccagacgctgctgctgatcttcccggaaaacggcccgacggcgccgatcggcgaacagctgaccaaactcgccacgctgctgcacgaggatattctgctgatcctgcgcggcccgcgcctcaccaaagcgcaggaaaacagcgcctggttcaaggcgctcagcccgcacggtgccctcgtcagttgccagacgccggaacaggcgcagctgccgcgctgggtcgccacgcgcgccaaggcgatgaagctggagttggacgacgccgccaatcagctgctgtgctactgctacgaaggcaacctgctggcgctgtcgcaggcgctggagcggctgtcgctgctgcacccggacggcaagctcacgctgccgcgcgtcgaacaggcggtgaacgacgccgcccacttcacgccgttccactggctggatgccctgctggccggcaagagcaagcgcgcctggcatattttgcagcagctgcagcaagaagacgtggagccggtgatcctgctgcgcaccctgcagcgcgaactgctgctgttgctgacgctgcagcgccgcatggcttccgcgccgctgcgcacgctgttcgatcagcacaaggtctggcagaaccgccgcccgctggtgacccaggcgctgcaacgcctgtccggcccccagctgcagcaggcggtacagctgctgacgcaaatcgagctgaccctcaagcaggactatggccagtcggtctggccggaactggaaaccctgtcgatgctgctgtgcggcaaacccttggccacgagttttaccgatgcccactaa

SEQ ID NO: 424163 - DNA, 663 bp, Serratia marcescens
atgcccactaacccggaacaccccaccgttttgcacgcgctgttcggcggcacctttgacccgatccactacggccacctgcgaccggtggaagtgttggccgccgaagtgggcctgaatcgcgtcacgctgctgcctaaccacgtgccgccgcaccgcccacagccggaggccaatgcgcagcagcgcctgaagatggtcgagctggcgatcgccggcaatccactgtttgccgtcgacgatcgcgaactgcaccgcaccaccccctcctacaccatcgagacgttggaaacgattcgtaaagagcgtggcgccgcccagccgctggcgtttatcattggtcaggactcgctgctgacgctgcataagtggcaccgctggcaggcgctgctggacgtgtgtcatctgctggtgctggcgcgcccgggctataacgatcgcatggacacgccggaactgcagcagtggctggaacgccatcgcaccgccgacccggcgctgctcagccgtcgcccgcacggccatatctatttggccgatacgccggagctggaaatttccgccaccgagatccgtcagcgccgccatcagggcctcaactgcgacgatctgctgccacgcccggtgcagcgctatatcgagttgcagggtttatatcgctag

SEQ ID NO: 424164 - DNA, 318 bp, Serratia marcescens
ttgcaaggtaaagcgctccaagatttcgtcatcgataaaatcgatgatctgaaaggccaagacattatcgctctggacgtccagggcaaatccagcatcaccgactgcatgatcatctgcaccggcacctcgactcgccacgtgatgtcgatcgccagccacgtggtgcaggaatcccgtgccgcgggcatggaactgtacggcatgaaaggccaggaagcctccgactggatcgtggtcgatctgggcgaagtgatcgtacacgtgatgcaggaagagagccgtcgcctgtacgagctggaaaaactctggagctaa

SEQ ID NO: 424165 - DNA, 471 bp, Serratia marcescens
gtgaaactgcaattggtggcggtcggcaccaaaatgccagactgggtacaaaccggctttatggattacctgcaccgctttcccaaagatatgccgtttgagctgaccgagatcccggcgggcaaacgcggcaaaaacgccgacatcaagcgcattctggacaaggaaggcgaacagatgctggcggcggtaggcaaaggcaaccgcatcgttacgctggatatcccaggcacgccgtgggaaacgccacagctggcgcagcagcttgaacgctggaagcaggatggccgcaacgtcagcttgctgatcggcggcccggaagggctggcgcccgcctgcaaagccgctgccgagcagagctggtcactgtctccgctgacgctgccgcatcctttggtgcgcgtcctggtggccgaaagcctctaccgcgcctggagtattactacaaatcatccttaccaccgggaatag

SEQ ID NO: 424166 - DNA, 1896 bp, Serratia marcescens
atgaaaatagaacgtaacccttttcgcgactatacggctgaatccgccctgtttgtacgccgcgccctggtggcgtttctgggcatcctggtgctgtccggcatcctgatcgccaacctgtataatctgcaagtgctccgcgtcgaggattaccgcacccgctccaacgaaaaccgcatcaagctggtgcccatcgcgcccagccgcggcattatctacgatcgcaacggcaccccgctggcgctcaaccgcaccatttatcagctggagctgatgccggagaaggtcgacgatctcaaggccacgctgcaggcgctgcgcacggtggtcgatctgaccgacgacgacatcaccaatttcgaaaaagagcgcaagcgttcgcgccgcttcgtctccattccggtgaaaaccgcgctgaccgaggtgcaggtcgcccgctttgcggtcaatcagttccgcttccccggcgtggaagtgaaaggttaccagcgccgctactatccttacggctccgccctcacccacgtcaccggctacgtgtcgaagatcaacgaccgcgacgtcgaacgcctggacaaagacggcaaactggccaactacgccgccacccacgatatcggcaaactgggcatcgaacgctattacgaagacacgctgcacggcaaaaccggctacgaagaggtcgaggtcaacaaccgcggccgggtgatccgccaattgcacgagcagccgccttccgccggtcaggacgtctacctgacgctcgatcttgagctgcagcgctacatcgagcagttgctggtgggcagccgcgccgcggtggtggtgagcgatccgcgcaccggcgccatcctggcgatggtgtccaacccgagctacgatccgaacctgttcgtggacggcatttccagcaaggattatcaggggttgctgaacgatccgaatcgcccgctgatcaaccgcgccacgcaaggggtttacccgcccgcgtcgacggtgaaaccttatatcgcagtgtcggcactcagcgccggcgtgatcaccaagaacaccgtggtgttcgatcccggctggtggcaactgcccggctcggaaaaacgcttccgcgactggaaaaaatggggccacggccgcctgaacgtcaccaaggcgctggaagagtccgcggatacctacttctatcaggtcgcctatgacatggggatcgatcggctgtcgagctggctgaccaaattcggttacggccagtacaccggcatcgatctggccgaagagcgttccggcctgatgccgacgcgcgaatggaagctgaaacgctataaaaaaccgtggtatcagggcgacaccattccggtgggcatcggccagggctactggaccgccacgccgatccagatggccaaagcgctgaacaccctgatcaacgacggcaccgtcaaaacgccgcacctgctgcagagcacccgcgtcaacggcgcgctggtgccgttcaaacaggaagagagcacgcagatcggcgatattcactccggcttctgggaaatcgccaaagacggcatgtacggggtggccaaccgtccgaacgggacggcgcgcaagtactttgcggacgcaccttataaagccgcggcgaaatcgggtaccgcacaggtattcggctacgaaacctacaacgcccacaaactggcggagcacctgcgcgatcacaagctgatgaccgccttcgcgccgttcaacaacccgacggtgtcggtcgccatcattctggaaaacggcggctccggtccggcggtgggcaccatcacccgccagatcctcgaccatatcatgctgggcgacaacaatacgcaattgccaagcgaggccccgctgccgcctggcgtagaaggtgactaa

SEQ ID NO: 424167 - DNA, 1113 bp, Serratia marcescens
atgactgaaagccaacaaaaaggctcgatctggaccaaaatccacatcgacccgacgttcctgctgctgatcctggccctgctggtctacagcgccttcgtgatgtggagcgccagcggccaggacatcggcatgatggagcgcaagatcgggcagatcgtcatggggctgatcgtgatggccgtcatggcgcaaatcccgccgcgcgtgtacgaaagctgggcgccctatctgtatattttctgcgtgattttgctgatcctggtagacgccttcgggcagatcagtaaaggcgcgcagcgctggctggatctgggcgtggtgcgcttccagccgtcggaaatcgccaagatcgccgtgccgctgatggtggcgcgctttatgaaccgcgacgtctgcccgccttcgctgaaaaacaccgccatcgcgctggtgctgatcttcctgccgacgctgctggtggccgcacagccggatctgggcacctcgatcctgatcgccgcctccgggttgttcgtgctgttcctgtcgggcatgagctggaaactgatcgccgtcgccgccgtcgcgctggcggcctttatcccggtgctgtggttcttcctgatgcacggttatcaacgcgaccgcgtcatgatgctgctcgatccggaaagcgacccgctcggcgccggctaccacatcattcagtcgaagatcgccatcggctccggtggcctgtccggcaagggctggctgcacggcacccagtcgcagctggagttcctgccggaacgccataccgactttatctttgccgtgttggccgaagagctggggctgatcggggtattggtgctgctggcgctctacctgctggtgatcattcgcgggctgatgatcgccgccaaggcgcaaaccaccttcggccgcgtgatggttggcggcttgatgctgattttgttcgtttatgtctttgttaacatcggtatggtcagtggcattttgccggtagttggcgtacctttgcctctggtcagttacgggggttcggcgctgatagtgttgatggccggtttcggcatcatcatgtcgatccacacgcatcggaaaatgctgtctaaaagtttataa

SEQ ID NO: 424168 - DNA, 1074 bp, Serratia marcescens
atgcgtaaggaatggctttggatcggcgtcgcggcggtgttgctctccgcctgtaccgccccgaccacggaacagcaggcgccacagcagccgtacaacggcccggtggtggaaatcggtggcgtcgagcctcaatatgaaccctataaccctaacaacatgcaggattataaggttaatggcgatacttaccgcatcgtaaaagatccgcagaacttctcgcagaccggcctggcgtcctggtatggcgaagaggccaacggcaacaccacggcgctgggtgagcagttcgatcccaacggcctgaccgcggcgcacccaacgctgccaatcccaagctatgtgcgcgtcaccaacctggccaacggccgtcagttggtggtgcgcgtcaacgatcgcgggccatacaccaagggccgcatcatcgatctgtcgaaagccgccgccgaccgcctcaacctgtccaacaacaccaaggtcaaagtcgatttcatcaacgtggcgccggacggcacgctgagcggcccgggcaccatcggcaccatcgtggcgaaacagagttacgccctgccggcacgcccggatctcggcgccagcggcatgggcactccgatccagcaggatgtgccggtcgccggcggcgcggcggtgcgcccgatcgataacagcacactgcgcaccgacgatggcgctccggcaaacgccggcaacggccgcagcggtttcctcggcgcgccaagcgcagtaccggccggcgtactggaaggttccgaacctgaagccgccgccgtggccgctccggttgcggccggcgctgcggcggccggcatggcggccgcttcttcctccggcggttacgtggtgcaggtcggtgcgctgagcagcgccgagcgcgcccagagctggcagcaaagcctgagccaacagtttggcgtgccgggcaaagtggcggccaacggcagcgtttatcgcgtccagctcggcccattcagcagccgtcaacaggcggcccagctgcagcaacgcctggccagcgaagcgcaacaacagtctttcgttactgctgcaccctaa

SEQ ID NO: 424169 - DNA, 1212 bp, Serratia marcescens
atgaaacaagtaacttcttttcgcttaatcaaaagcatcgcactcggcaccgttatcgcaatgagcgcagcctccgttgcacatgccgatgacgttaacatcaaaaccatgatcccaggtgtcccgcagatcgatgcggaagcgtacatcctgattgattacaactccggcaaggtgctggccgagatgaacgccgacgcgcgtcgcgatccggccagcctgaccaaaatgatgaccagctacgtcatcggccaggcgctgaaagcgggtaaaatcggccaggacgatctggtgaccgtcggtcaggacgcctgggcgaccggcaacccggtgttcaaaggctcctcgctgatgttcctgaagccaggcgatcgcgtgccggtctccaagctgacccgcggcatcaacctgcaatccggtaacgacgcctgcgtggcgatggccgactacgtcgccggcagccaggacgcgttcgttaacctgatgaacacctacgtcagcaagctgggcctgcagaacacccacttccagacggtacacggcctggatgcccagggccagtacagttcggcgcgcgacatggcgctgatcggccaggcgctgatccgcgacgtgccggacgagtacgcgatttacaaagaaaaagagttcaccttcaacaatatccgccagatgaaccgcaacggtctgctgtgggataacagcctgaacgtcgacggcatcaaaaccggccacaccgacgcggcgggttacaacctggtggcttcggcgaccgaaggccagatgcgcctgatctccgcagtgatgggcggccgcacctacaaaggccgcgaagccgagagcaagaaactgctgacctggggcttccgcttcttcgaaaccgtggcgccgctgaaggtcggtaaagagttcgcttccgagccggtctggttcggcgatgccgaccgcgttgaactgggcgtggacaaagacgtctacctgaccatcccgcgcggccgcatgaaagatctgaaggccagctacgtgctgaacacgccggaaattcacgcgccgctggcgaaaaaccaggtggtcggcagcatcaacttccagctggacggcaaaaccatcgaccagcgtccgctggtggtgatgaacgaagtgaaagaaggcggtttcttcagccgcatcgtggactacatcaaactgatgttccaccactggttcggttaa

SEQ ID NO: 424170 - DNA, 267 bp, Serratia marcescens
atgcaaaaaactaaactgaacgaactgctcgaattcccttgcccgtttacctacaaggtgatgggcctggcgcagcctgagctggttgaccaggtagttgaagtggtgcagcgccatgcgccgggcgactacaacccgcaggtcaagccgagcagcaaaggcaactaccactcggtctccatcaccatcaacgccactcacatcgagcaggtcgaaaccctgtacgaagagttgggtaacattgaaattgttcgcatggtgctgtaa

SEQ ID NO: 424171 - DNA, 669 bp, Serratia marcescens
atgactcttttgcaaccagacaagatcattttgcgtcagctggggttgcagccctacgcgcctgtatcccaagccatgcataacttcaccgacagtcgtaccgagaccacgccggacgagctgtggctggtgcagcatcacccggtgttcacccagggccaggccggcaaagccgagcatgtgctgatgcccggcgatatcccggtgattcagagcgatcgcggcggccaggtgacctaccacgggccgggccagcaggtgatgtacgtgatggtcgatctgaaacgcaacaaggtcggcgtacgccaattggtcacggcgatagaagatacggttatcaacaccctcgcccacttccgcctcgaatcgcgcgcccgtccggatgcgccgggcgtgtacgtgggggagcagaaaatctgttcgttgggtttgcggatccgcaaaggcagctcattccacggcctggccctgaatgtggcgatggatctcagccccttccaacgcatcaacccttgcggttacgccggcatgcaaatgacgcaggtcagcgcgctggcgcccggcgttggcattgaagacatacacccaatcctggtacaggaatttgttcatttactcggctaccagacggtcgagcttcgtaactggaacctgcacgattatgagtaa

SEQ ID NO: 424172 - DNA, 966 bp, Serratia marcescens
atgagtaaaccaattcagatggaacgcggcgtcaaataccgcgatgctgacaaaatggcgctgatcccggtcaaaacggtggtcaccgaacggcaggagctgttgcgtaaacccgagtggatgaagatcaaactgcctgccgactcaacgcgcattcagggcatcaaagccgcgatgcgtaaaaacggcctgcactccgtctgtgaggaagcttcgtgccctaacctgtccgagtgtttcaaccacggcactgccaccttcatgatcctcggtgctatctgcacccgccgctgcccgttctgcgacgtggcccacggccgcccgatcgcgccagacgccaacgagccggaaaagctggcgcaaaccatcgccgacatggcgctgcgttatgtggtgatcacctcggttgaccgcgacgatctgcgcgacggcggcgctcaacactttgccgactgcatctcggccatccgcgccaagagcccgaacatcaaaattgaaacgctggtgccggacttccgcggccgtatggatcgcgcgctggagatcctcaccgccacgccgccggacgtattcaaccacaacctggaaaacgtgccgcgcgtatatcgccaggtgcgcccgggcgccaactacgagtggtcgctgaagctgctggagcgctttaaagaagcgcacccggatatcccgaccaaatcaggcctgatggtcggcctgggcgaaaccaacgcggaaatcgtcgaagtgatgcgcgatctgcgccgccacggcgtgaccatgctgacgctgggacaatacctgcagccgagccgtcaccacctgccggtgcagcgctacgtcagcccggccgagttcgacgaaatgaaagaagaagcgatggcgatgggcttcacccacgccgcctgcggcccgttcgtgcgttcgtcttaccacgccgatctgcaggccaaagggatggaagtgaaataa

SEQ ID NO: 424173 - DNA, 216 bp, Serratia marcescens
atggaaggtatcagcattaccaaacttctggtgattgccgtgttggtgattttactgttcggcaccagcaaactgcgcacgctcggcgccgatcttggcgcggcgctgaaaggctttaaaaaagccgtgggcgacgacagcacgccgccggccgccggcaacaacgctgctgaaagccagtccgctcagcagagcgtcgaaaagaaagacgtttaa

SEQ ID NO: 424174 - DNA, 1068 bp, Serratia marcescens
atgtatattgctccacccattttcgatgcccgaaaatccggcctcagcttcgccaaacgcacctatctgccccgcgtcgccggcctgggactcggctttatctgcgtctgcgccgcgctctaccccttggctccacccacggcggtctggctattgctggcctttcacggctttctctggccgcatcttgcctaccacctggcccgccgcgccaaagatccgttcaaagccgagatccgcaacctgctgatcgactccgccttcggcggcttctgggccgcgatgatggcgttcaacgcgctgccggcgattgtcatcttgtcgatgatgagcatgaacaacatcgcttcggccggtaaggcactgtttgtcaaaggcttggcgattcaattggccgcggcggcgctgaccggcgcgctgctcggcttcccgttccacccgcacagcacgccgctgcaaatctatctgtgcctgccgatgatctacctgtacccgacgctgctcgggctggtgacctaccgcaccgccaagcggctggcggaaaagaaacaggagctgcaacgcatcagcactcgcgatgggctgaccggcttgtacaaccgccgccactgggagcacctgctgcatcgccagtttgacagctgccgccgctaccaggacaacgccacgctgatcctgatggatatcgatcgcttcaaaaccatcaacgacaccttcggccacgctttaggggatgaggccctggcggcgctggcggaagagctgctgatcggcttgcgcaacgtggatatcgtcgggcgctacggcggcgacgagtttggcgcagtgctgccgaacaccagcgccgaacaggcggtaaccgtcctgcggcgcatccagcagcggctggacgccgtcatcttcaaagaggcgccacagctgcggctgcagatcagcgccggcatcgccaactaccaccccgcgctgggcggttatctggactggctgaaagcggccgacggcgcgctttaccgggcgaagcaaaatggccgcaaccggctggaaacggcggcgccgacgggcgactaa

SEQ ID NO: 424175 - DNA, 384 bp, Serratia marcescens
atgttgagctctttactggccgtatttatcggcggcggcgtcggcagcgttttgcgctgggcggtaagcatgaaaatgaacccgctgaacgcccacattccgctcggtacgctgatggtcaatctgatcggcggttttatcatcggcctggcgatggcgattttcacccgcatgacgcatctggatcccacctggaaattgctgatcaccaccgggttctgcggcggcctgaccaccttctccaccttttcgctggaggtggtatacctgatgcaggatggccgcttcggctgggcgctggccaacatgctgctcaacctggccggctcgctggcgatgacgctgctggctttcatgctggtgatgtgggtcaacgggcgctaa

SEQ ID NO: 424176 - DNA, 597 bp, Serratia marcescens
atgctctcccccaacgacagtaaacaggccaaggtgcaggcccgccgcgatcagatcgtcgaagcggcgaaaaccagcttccgccgccacggcttccacgccgccagcatggctgagatcgcccagggctcgcagctcagcgtcgggcaaatctatcgctatttcgccaataaagacgcgattatcgaagagatcgtcaaccgcatcatcgccagcaagatgcaacggctggaaaaccttggcgatcacatcaacctgatcgccggcacgctggcggcgcgcacgctgtttcagcagccgggcgagagcgaaaccgatcacatgctgatgctggaagtgaccgccgaggccacgcgcaacccggtggtagccaaaatgctcagcgatgcggaagcgcggctgtttcgccacgtgtgccacaacctgcagcggctgtatcccgatttcagcgcggaagagatcgccgcccgggtggagtttatcgccgtcatgagcgaaggcaccggttaccgcatccttaccacgcaaaaagccgatgcgtccctgctacgcgagctgtatcagcaggccatttctcacctgttcaggaaacgctaa

SEQ ID NO: 424177 - DNA, 1191 bp, Serratia marcescens
atgaccaaacacttagccagacaacgtctggtgtacgccgtcgtgcttggcctgttggccgcgctggggccgctgtgcaccgatctctatctgcccgccctaccggaaatggcgggcgaactgaatacctccaccgccgccgcacagctcagcctgaccgccgggttgctcggcctgggcgtcggccagctgattttcggcccttacagcgacaaactgggccgcatgcgcccgctgttgctgtcgctgatcctgctgctgggcgcttcgctgtggtgcgccctcgcacccaccatcgaccagttgctgatcgcccgtctgctgcagggcatcgccggcgccggtggcgcggtgatttcccgcgccattgcccgcgatctgtacgccggccatgagctgacccgcttcttcgccctgctgatgctggtcaacggcctggcgccgatcgtcgcgccggtgctgggcggcgtgatgctgcaggtgatgaactggcgcggcatcttcggcgtgctggcggccatcgccgtgctgctgttcagcctgtcggcgctgaagctgcgcgaatccctgccggtagaacgccgcagccagggcggtatcctggcgatgctgatgtcgctgggcgggttgctgacccaacgctatttcatgggcctgtgcctgacgcaaggcttcgtgatggccggcatgttcgcctatatcggcgcctcgcctttcgtcttgcagcagatctacggcctcagcccgcagatgttcagcctgtgcttcgccattaacggcgtcgggctgatcattgcggcgcagctggccagccgcctcagttcgcgttggggggagcgccgggtattgaagagcgggttaacgctggcggccgtcgcgtcgctgctgctgctgttggccgccgcgctgcatgcgccgctggtgttgttgctggtgccgctgttcttctcggtggcggtgatcggcatcgtcggcccgaccgcctcttcgctggcgatgcaaagccagggagacaaagcgggcagcgcctcggccttgatcggcgtgtgcatgttcgccctcggcgcctgcgccgtgccgctcaccgggctggggggcacctcgggcctgtcgatggcgctgaccatcgtcggctgttacgccatcgctatcctgctgttcagcctattaggccgccgcagcgaggcataa

SEQ ID NO: 424178 - DNA, 210 bp, Serratia marcescens
atgtctaagattaaaggtagcgttaagtggtttaatgaatccaaaggcttcggtttcattactccggaagatggtagcaaggacgttttcgttcacttctctgccatcgttagcaacggtttcaaaacgcttgctgaaggccagcgtgtagagtttgaaatcacgaacggtgccaaaggcccatctgccgctaacgttactgctatctaa

SEQ ID NO: 424179 - DNA, 1164 bp, Serratia marcescens
atgaccagccagttggcagacaaaatcatcgcctatcggcgtgagctgcaccaaaacccggagctttccaatcacgaattcgccaccaccgcccggctgacccgctggctgcaagaggcgggcattcgcctgctgccgttggcgctgaaaaccggcgtcgtggcggagattggcagcggcaaggggccgatcatcgcgctgcgcggtgacattgacgccctgccgatcgacgaaatcgccgacgtgcccttcagctcgcaaaaccgcggcgtgatgcacgcctgcggccacgactttcacacctcggtgatgctcggcgccgcacacctgctgaaagcgcgtgaggccgacctgcccggcacggtgcgcatcttcttccaaccggcggaagagaccttcaacggtgcccggcatctgatcgacgctggcgcgctggataacgttgcagcggtatttggcctgcataacgcgccggagctgcccaccggcaccttcgccacccgcgccgggccgttctacgccaacgtcgatcgcttccagatcctcatcaccggcaaaggcgcgcacgccgccaaaccggaacagggcgtcgacaccatcgtcaccgccagccagatcgtcggcgcactgcagacgctgcccagccgcagcttcagctcgctggaatcgctggtggtgagcgtaacgcgcatcgaaggcggcaatacctggaacgtgctgccgcaaaccgtggagctggaaggcacggtgcgcacccacagcgacgcggtgcgccgccaggtgccggacaaaattcgccaggtgatcgacggcgttgccgccgcgctgggcgcgcaggccgaactccgctggcagccggggccgccggcggtaatcaatgatccgcattgggcggcgttcagcaaaaccgtcgccgccgaggccggctaccgggtcgaagaggcggaactgcagatgggcggtgaagatttcgcgctgtatctgcaccatgtgccgggcgtattcgtcagcatcggctccgccagcgaattcggcctgcatcatccgcgtttcaatcccgatgaacgcgctctgttccccgccgcgcaatatttcacgctgctggcggaacgcacgctgcaacaattaaccaccgcgccggaaaaagccctcagcaacgcctga

SEQ ID NO: 424180 - DNA, 1326 bp, Serratia marcescens
atgagcgacaacgcgactaatcaacggcaattgcggctgggcgccattctacatggcgcatcgggaaatatgtccgcctggcgccacccggacgccaccgccgacgccagcatcaacctcgaatttaatatcgccacggcgaaaaaagccgaacaggggaaattcgatttcgtgtttgtcgccgatgggctatatatcaacgaaaagtccattccgcattttcttaatcgtttcgaaccgctcaccctgctggccgcgttgtccgccgccaccgataaaatcggcctggtgggcaccctctccacctcctacagcgatccgttcaccgtcgcccgccagttcgccagcctcgatcacctgagcaacggccgcgccggctggaacgtggtgacctcgccgctggaaggctcggccaaaaatttctcgcgcaaagaacacccggagcacagcctgcgttaccgcatcgccggcgagtttctcgacgttgccaaagggctgtgggattcctgggaagacgacgccttcgtgcgtaataaggccagcggcgaattcttccgcgccggcaaactgcacactctcaatcaccagggggaattcttctcggtacaggggccgctgaacatcggccgcacgccgcaggggcgcccgatcctgttccaggccggcgcctccgaagacggcaaacggctggcggcccaacacgccgatgcgatcttcacccatcacgacacgctggagcaggcgcaggatttctaccaggacgtgaagcggcagctggtggaacagaggcgcgaaccgaacgatctgcgcatcttccagggcgtcagcgtgatcgtcggcgacgacgacgcggacgtcgagcgccagtaccaggagaccgcccgcctggtcagcatcgagaatgccctcaactacctcggccgctacttcgagcattacgacttcgcccgccatccgctggacgcccccttccccgacatcggcgatctggggcaaaacagcttccgcagcaccaccgacgccatcaagcgcagcgcccgcgagcgcaacctcacgctgcgccaggtggcgctggaagccgcctcgccgcgcccggtgttcagcggcacgccggaagcggtggcggatggcctgcaacgctggttcgacggcgaagccgccgacggtttcatcatcagcggcggtacgcccaacgccttcggccacttcgtcgatcgggtggtgcccatcctgcagcaacgtggcctgttccgccaggcgtaccacggcgacacgctgcgtgaacatctaggcctgaagcgcccgttgaacagattcacccaataa

SEQ ID NO: 424181 - DNA, 528 bp, Serratia marcescens
atgacgcaagacaccttcattcagacgctgccgaccgacccgttgatcgccccggtgatcgaagggctgttcggcgaatatcgtcagcgctacggcgactattttggtgaccaggaaccggaagcgctggatctgtacgcgccgccgcaaggagccttcatcgtgctgctgcgcgccggtgcgccgatcgccatgggcgccttcaaacgctatgacgcgctaaccgccgagctgaagcgcatctggacgcggggcgacctacgccgccagggcctggcgcagcgggtgctgcagcagctggaaacgctggcgctggcgcagggatatcgccagctctatctaaccaccggctttcgccagcccgaagcggtgggcctgtatctgagcaacgggtatcagccgcagttcgatcccaccgtcgacagcgagatatacagtcgcccaccctacgatggccgcctgccgttccgcaaaagcctgattgcagaggacgcgtgttgttgcgcgtcggaaaggaaaatcgcctaa

SEQ ID NO: 424182 - DNA, 888 bp, Serratia marcescens
atgtccaaacaagaagtcttgaaagtggtgcccgcccgctatccgctgcggctgatcggcgcgctgttttcgctgtttattctggccgccatcgtgcaatcggtggcgggcaacgcgcgctgggaatggggcgtgttcgccgagtggttcttcgcgccggcggtgctggcagggctggggcaaaccctgctgctgacgctgctcggcacgctgttcagcatcctgttcggcaccctgctggcgctggcgcggctgtcgcgctcttacctgctggcgtcgctggcctggggttatatctggctgtttcgctcgctgccgctgattctggtgttgatcatcctgtacaacttttcctatctgtatgacgccatctcgctgggcattcccttcacctccgtggtgttcgccagctacccgaccatcgacattctcggccagttcgccgtggcggtgctgggcctgacgctggtgcagtccgcctacaccgccgagatcatccgcggcggcatcctgggcgtggattacggccagcacgaagcggcggcggcgctggggttgccgggctatcgccgcaccttccgcatcattctgccgcaggcgctgcgctccattattccgaccggcttcaacgagatcatcagcctggcgaaaggcacctcgatcgtttacgtgctggcgctgccggagctgttttacaccattcaggttatctataaccgcacccagcaggtaataccgctgctgatggtcgccactgtctggtatctgtttatcaccaccgcgctgtcggtgatccaatactacatcgagcgctatttcgcccggggcgcggtgcgcgaactgccgccgacgccctggcagcaactggccggctggctaaaacgttag

SEQ ID NO: 424183 - DNA, 828 bp, Serratia marcescens
atgtctgaagccattgattattatgccttgcccgagcagccggcgcgcaatctcaccccggtgccggcacgcggcctgatcgaaatcagcaacgtcagcaagttcttcggcaagcacaaggcgctggacgacgtcagcctgacgctgcagccgggcaccgtaaccgtgatcctcggcccttccggctccggcaaatcgacgctgctgcgggcgatcaaccacctggaacgcgtggaccaaggctttatccgcatcgacggcgactacgtcggctaccgccgcaaaggcaaccggctgtatgagctgaaggaaaaggccatccttcggcaacgcatcaacgtcggctacgtgttccagaatttcaacctgttcccgcacctgacggtgctggaaaacatcatcgaagcgccggtggtgcataagatccactctcgcgaacgggcgaaagcggtggcctatgaactgctggataccgtcgggctacgccacaaggcggacgcctacccgcgccacctctccggcggccaacaacagcgtatcgccatcgcgcgcgcgctggcgctgaacccgaaggtgatcctgttcgatgaaccgacctccgcgctcgatcccgagctggtcggcgaagtgctggacgtgataaaggggttggcggatctgggcgtcacgctggtggtggtcacgcatgaaatcggctttgcgcgcgaagcggcggatcgggtggtgtttatggtcgatgggcagatcgtcgagcagggcgacgccaggcaagtgctggcccagccgcagcatccgcgcaccgtcaactttctcaacaaagtgctgtga

SEQ ID NO: 424184 - DNA, 510 bp, Serratia marcescens
atgggcatcaaacgtctcaatcacgccgtgctgtatgtcagcgacgtgcggcagagcgccgacttttatcatcaggtgttggggttcaagctcaagccgtccgacagccccgatcgggcggtgtttacccaggccgccgattcggacaacgatcacgatttggcgctgttcagcaagaacctgggccagcagcgcgccggggtgtttcgcgccaacaacgagccgccggcggagcatgagccagcggccgggctgtaccatctggcctgggaagtggacagcctggaggagctggagcgcattcgtcaccagctggccgaacgcggcattctcgggctggaagaggatcacggcgtgcacaaaagcatttatggccacgatccggacgggctgctgttcgaggtaacctggtttattccgccggcgttgctgaccgaagaggacaaaaaccagcaggggatccggccgctggatttcgccgccgagaagcggcgcttcgccggccggtaa

SEQ ID NO: 424185 - DNA, 480 bp, Serratia marcescens
atgaacggcaagataacgactttttttgaagacaaaggcttcggctttattaccgacgagaacggagaaaatcgttattttcacgtgattaaagtgcaaaacccggagctgattaagaaaaacgcggcggtgaccttcgaaccgaccaacaacaccaaaggcccgtcggcttatgcagtcaaagtgttggcgcccagcaaatacatcatcattgccaatgaaagaatcaagatcgccagcatcaagtcgttcaataccttcaccaaggaagtgccggccaaagccgacgtggataaagagaacaccgtgctgtcggtcggcctgctgatgaaccgcattcgcccgcagtcagaagatcaggcgcagaccatgcaaacgctgcgcatgctgaccattaccaccttccagaacaccacccataccttctccgagcacgagatcgatatggatgagaccattaaggcgctgaaaagcctgtaa

SEQ ID NO: 424186 - DNA, 1461 bp, Serratia marcescens
atgggcgaggcgatgaacgccagaataaacgccaggcatggcctgccgctaacggttcagctgatcaatcttttcatgctggcctttttactttccctggtgggtattcttagccggccgattggctcgctttccttattttggccggtgaatgcgattctgctcggcctgctgctgcgaaaacccgtttacgccacgccgctcggctggttcaccacctatctgggcatggtcgccgccgatctcagcaccggcgaaggctggtctctggcgctgtggctgaacgcctgcaacatgtcgctgatcgccgtcggttacggcatcatgctgatgttgccccaatctcaacggcgcatgggcaaaccccaggcgatactctatatgttcagcgccagcctggccggtgcggcggtggcgtcgacgctgtcggtgctgcgcaacgacagcctgtacaacaacacggtggtggtcgcctggctggcctggttcagcgagcagttctcgacgaccttgctgctgttgccggtgctgatggcggcgccgcggttgaagcagctgctgcgcatgcaggtgcgttggcgcctgaagggctgcctgccgctgctggcgctgctgctgtcgctgatattcagcgtctatatcggcgggccgggcgctatcgccttcccgatcccggcgctgctgtggtgcgcggtgcgctacccgctgttccccgtgacgttgctgacgctattgaccggcatgaccgagatcagcagcatttccgccaacctgatgctgtacgaaacgccgaacaaccacaacgccttcctcgataccctgatgtccgcccgcttgggcatcgccatgctggtgatggggccgctgatcctcgccagctccatcgccgccaaccgcaagctgatgcggcgtctggagcacagcgccaaccacgattttctgaccggggtgctggcgcgcagcgcgatgacgcgcaaagcgggcgagctgctggagcataaacaccgctccaaagaggcggtgtcgctactgctgatcgacatcgaccatttcaagcagatcaacgatacgcacggccacagcgccggcgatcaggttttggcgtcgttcgcgcacatcgtgcgtcgcgaactgcggcacgatcagctgttcggccgcctgggcggagaagagttcgccatcatgctgccgcgcgcgctggcggcgcagggcgtggcgctgggggaacatctgcgccggctggtagagcaggcggaactgcaggcggaaggcaaacagacgctgaaaatcaccatcagcgtcggcgtcgccagcctggcgatgaatgaggtgaaatcgctggagcaactgatgaatatggcggatatcgcgctgtatcgcgccaaatcgcaggggcgtaatcgggtggagtcgttcaacgtggtgagcggcaacagcgtcgagcatatcctgttccgctag

SEQ ID NO: 424187 - DNA, 552 bp, Serratia marcescens
atggcgaagacagtagtggtgtttcattccggctacggccataccgagcgtttggcgaaagtcgtggcggaaggcgccggggccgaactgatcgccatcgatcagaacggcgatatcagcgacgaagcctggcagacgctggatgaggcggacgccatcatctttggttcgccgacctatatgggcggcccgtcgtggcagttcaagaaattcgccgacgccagctccaaggcctggttcggccgcaagtggcaagacaaagtgttcggcggctttaccaacagcgccagcctgaacggcgacaagcaggtaacgctgatcgcgctgcagacgctggcttcacaacatggcggcctgtgggtcagcctggggctgatgccggccaacaccaaatcggcgcagcgcaccgacgtcaataacctgggcggttcggtggggctgctggtgcagaccccggcggatgccggcgtggatgagatgctgtcgggcgatctggcgaccgccaagctctatggccagcgcgtagcgggctttgccgccaaactggcgtaa

SEQ ID NO: 424188 - DNA, 144 bp, Serratia marcescens
gtgcgcaaatccagattcctgctcgtgaccttgctgtgcctgtgcgccgccgccgtgctgtacgtgatggcttaccgggcgctggggcattacctcagcgacggcgagaaggcctacccggatatcactgttgaaatccgctga

SEQ ID NO: 424189 - DNA, 327 bp, Serratia marcescens
atgcaaagcttattcgtttacggcaccctggggccgggcaggcccaacgcgcacattatggaagccatcggcggcagctgggaagaaggcagcgttggcggctcgctgcttaacgaaggctggggcgccgagatgggctacccgggcatcgtgctggataacagtggcaatcgggtgaacgggtttctgttccgttcagctaacctcgtcaaccactggccgactctcgatgcgtttgaaggtgagggttatgaacgagtggcggtcagcgtcaccaccgccggcggcgaaaccgtcgattcgtttatctacatgctgaagaaatga

SEQ ID NO: 424190 - DNA, 210 bp, Serratia marcescens
atgacctgcaacgcgcgggtggttgagcatgccgattggggggacatcgccgcagtggtgcagtccgcccgcctttgcctgcggcggggcggtgggcggcaaggggctgagcgcgcgccgatttacataggctttggtctggctcagcatggcggcgcccggttgacgggaaccctcgccgcgcgggcgctggcggaaaaaacgccataa

SEQ ID NO: 424191 - DNA, 210 bp, Serratia marcescens
atgagggcgataacccggctttacccgttgcatcatcagcctgacgagcaaccggcggagcctaaacgcataggggaaacggtgttcgattcttcgctgcatccggcggacagcgcgcaactcaccgcgctgcatcagctcggcaagcatgaaggagcgccgtcgtggcgggcgcgcctgagcgcgctgtggcggaggctgtgcgcatga

SEQ ID NO: 424192 - DNA, 867 bp, Serratia marcescens
atgtcagcaaagattattgatggtaaaacgattgcgcagcaggttagaaacgaagtggctgagcaagtgaaacaacgtctggcggccggcaaacgcgccccagggctggcggttgtgctggtcggcgagaacccggcttcgcaaatttacgtcgccagcaagcgccgcgcctgcgatgaagtcggcttcctttcccgctcctacgacctgcccgctgccaccagtgaagccgagctgctggcgttgatcgaccagctgaacgccgatgaggaaatcgacggcattctggtgcagctgccgctgccggccggcatcgataacgtcaaggtgctggaacgcatccacccggacaaagacgtcgacggcttccacccgtacaacgtcggccgcctgtgccaacgcgcccctaagctgcgcccgtgcacgccgcgcggtatcgtcaccctgctggagcgttataacatcgatacctacggcctgaacgccgtggtggtcggcgcctccaacatcgtcggccgcccgatgagcatggagctgctgctggccggctgcaccaccaccgtcacccaccgcttcaccaagaatctgcgtcaccacgtcgagaacgccgatctgctggtggtggcggtcggcaaaccgggcttcatcccgggcgactggatcaaaccgggcgccatcgtggtggacgttggcatcaaccgtctggaaagcggtaaagtggtgggcgacgtcgatttcgacgccgccagcgagcgcgccgcctacatcaccccggtgccgggtggcgttggcccgatgaccgttgctacactgatccaaaataccttgcaggcctgcgaggaatatcacgacgttcaacctaaataa

SEQ ID NO: 424193 - DNA, 213 bp, Serratia marcescens
atggaaattttcaatctggacaatcatccccacgtcgaactgtgcgatctgctgaagttccagggctggtgtgaaagcggcggcgccgccaaagaagtcatcgctgaagggcaggtgaaagtcgacggcaaggtcgaaacccgcaagcgctgcaagatcgtcgccgatcaggtggtggagttcaacggcggcaaggtcatggttaaaccctga

SEQ ID NO: 424194 - DNA, 1386 bp, Serratia marcescens
atgctaaagatttttaataccctgagtcgtcaaaaagaggaattcaaacccattcatgccgggaaagtgggcatgtacgtgtgcggggtaaccatttatgacctgtgtcacatcgggcacggtcgtacctttgtcgctttcgacgtggtggcgcgttacctgcgctacctcggctattcgctgaactacgtgcgcaacgtcaccgacgtggacgacaaaatcatccgccgcgcggcggaaaatcatgagacctgcgaccagctgaccgaacgcatgctggcggaaatgcacgccgacttcgacgcgctgctgatcgatcgcccggatcaagagccgcgcgcgacccagcacatcgccgagatcatcgagatcacccagcgcctgatcgatcgcgatcacgcctacgtggccagcaacggcgacgtgatgttctccatcgacagcgatccgcaatacggcctgctgtcgcgtcaggatctggatcagctgcaggccggcgcgcgcgtggagatcgacgacgtgaagcgcaacccgatggacttcgtgctgtggaagatgtccaagccgggcgagccgagctggcagtcgccgtgggggccgggccgtccgggctggcacatcgaatgctctgccatgaactgcaaacagctgggcacccacttcgacattcacggcggcggttccgatctgatgttcccgcaccacgagaacgagatcgcacagtcgagctgcgcccacgacggcccgtacgtcaattactggatgcactccggcatggtgatgatcgacaaagagaagatgtccaaatcgctggataacttcttcaccatccgcgacgtgctcggccattacgatgcggagacggtgcgttacttcctgatgtccggccactatcgcagccagctgaactacagcgaagagaacctcaaacaagcgcgtaccgcgctggagcgcctctataccgcgctgcgcggcaccgacgccgacgccgcgccggccggcggcgaagcgttcgaagcccgcttccgcgaagcgatggacgacgacttcaacaccccggaagcctactcggcgctgttcgatctggcgcgcgaggttaaccgcctcaagggtgaagacatggcggcggccaacggcatggcggcggaactgcgcaagctggcgaaggtgctcggcctgctgcagcaggagccggagcagttcctgcaagggggcgctcaggttgacgacggcgaagtggcggagatcgaagcgctgatcaaacagcgtaacgaagcgcgcgccgcgaaggattgggcgctggcggatgccgcccgcgatcggttgaacgagatgaacatcgtgctggaagacggcccgcagggcaccacctggcgccgtaagtaa

SEQ ID NO: 424195 - DNA, 495 bp, Serratia marcescens
atggttactttccacaccaatcacggcgatatcgttatcaagacctttgctgacaaagcgccggttaccgttgaaaacttcctgaactactgccgcgccggtttctacgacaacaccatcttccaccgtgtgatcaacggcttcatgatccagggcggcggtttcgagccgggcatgaaccagaaagcgaccaacgcggccatcaagaacgaagccaacaacggtctgaaaaacaccatcggcaccctggcaatggcgcgcaccaacgatccgcactccgccaccgcacagttcttcatcaacgtggctgacaacgacttcctgaacttccgcggcgaaaacgtgcagggttggggctacagcgtgtttgctgaagtggttgaaggcatggacgtggtcaacaagatcaaaggcgtgaaaaccggccgcagcggcatgcaccaggacgtaccggtagaagacgtggtgatcaacagcgtgaccgtcagcgagtaa

SEQ ID NO: 424196 - DNA, 723 bp, Serratia marcescens
atgagtacgctgttcatcgcagatctgcacttgtgcgcacaggaaccggcaatcactgccggttttctgcgttttttacggcgcgaagcggtgcacgccgacgcgctgtacatcctcggcgacctgtttgaagcctggatcggcgacgacgatcccgagccgctgcacgcggagatcgccgcggcgctgaaagcgctgcaacaggccggcgtgccctgctacttcatccacggcaaccgcgattttctgctcggcaaacgcttcgcccgcgccagcggcatgcagttgctgccggaagagaaagtgctggagctgtacggccgcaggatcctgatcctgcacggcgacaccctgtgcaccgacgatcacgcctatcagcaattccgccgtaaagtgcacaacccgctgattcaaaaattgttcctggcgctgccgctgcgctggcgattgaagatcgccgccaaaatgcgcgcccgcagccagcaatccaaccaggacaagtcggaagccatcatggacgtcaacccgcaggcggtcgagcaaaccatgctgcgccacgacgtgcactggatgatccacggccatacccatcgcccggcggtgcaccggctggcgttgagcaacggcgaagcccatcgcgcggtgctgggcgcctggcacgtcgaaggatcgatgatcaaagtcagcgccgacgccgtcgagctgatccaattcccattctga

SEQ ID NO: 424197 - DNA, 525 bp, Serratia marcescens
atgggagccaacgccgcttcagccgccactaccggggcgaaaatcgcaattgtaatgggatcgaaaagtgactgggccaccatgcagttcgccgccgaagtcctgacccagctcgatgtccccttccatgtcgaagtcgtttccgcccaccgcacgccggacaagctgttcagcttcgccgagcaggctaccaccaacggttttgacgtgatcatcgccggcgccggcggtgcggcgcacctgccgggcatgctggcggcgaaaaccctggtgccggtgctgggtgtgccggtgcaaagcgccgcgctgagcggcgtggacagcctgtactccatcgtgcagatgccgcgcggcattccggtgggcacgctggcgatcggcaaagccggcgccgccaacgccgggctgttggcgatgcagatcctggcgctgcacgacgccgcgctggcgcagcgtttggcggactggcgtcgggcgcagaccgaagacgtcttgaaccaccccgatccgcgggaggatgcatga

SEQ ID NO: 424198 - DNA, 1068 bp, Serratia marcescens
atgaagccggtttgcgtactgggcaatggccagctggggcgcatgctgcgccagtcaggcgaaccgctgggcatcgccgtttaccctgtcggcatcgatgccgagcccgaagcggtgccgtatcagaatagcgtcattaccgccgagatcgaacgctggccggaaaccgcgctgacgcgcgagctggcgacccacagcgccttcgtcaaccgcgacattttcccgcgcctggcggatcgtctgacgcaaaaacagctgctcgatcagctcggcctggcgaccgcgccgtggcagctgctggcgagcgccgccgaatggccgcaggtattcgctgcgctaggcgagctggcaatcgtcaaacgccgggtcggtggctatgacggccgcggccagtggcgcttgcgcccgggccaggaagccgaactgccggccgatgcctatggcgagtgcatcgtcgagcaaggcatcaatttctccggcgaagtgtcgctggtgggcgcgcgcggccacgacggccgttcggtattctacccgctgacccacaacctgcatgaagacggcatcctgcgcaccagcgtggcgctgccgcagcccaacccagcgctgcagcaacaggccgagcagatgctggcggcgatcctgaacgagctgaactacgtcggcgtgatggcgatggagtgctttatcgtcggcgatcggctgctgatcaacgaactggcgccgcgcgtgcacaacagcggccactggacgcaaaacggcgcgtccatcagccagttcgagctgcacctgcgcgccattctcggcctgccgctgccgcagccggtggtgagcacgccgtcggtgatggtcaacctgatcggcaccgccgtcaacgaacagtggctgtcgctgccgctggtgcatctgcactggtatgagaaagaggtgcgcccgggccgcaaggtcggccatctcaatctgaacgacccgagcgccgccgttctgcgccaggcgctgcaggcgctggcgccgctgctgccgggcgaataccaaagcgggctggcctgggcgcagcagaagctggcttaa

SEQ ID NO: 424199 - DNA, 1407 bp, Serratia marcescens
atgagcgctaccgttaaagttgcaccggcggagaaaagcccgacccatgtcggcatgacttttttcgtctgttttttggccgccttggccggcctgttgtttggcttggatatcggcgtaatcgccggcgctctgccgtttattaccgacacttttcatatcaccagctctcagcaggagtgggtggtcagctcgatgatgtttggcgccgccgtcggcgctatcggcagcggctggatgaacttccggctggggcgcaaatacagtttgatgatcggcgccattctgttcgtcgcgggatcgctgtgttcagcgtttgcccccaacgtggaggtgctgatcgtttcacgcattctgctgggattggcggtgggtatcgcttcttataccgcgccgatttatctttctgaaatcgcgccggagaaaatccgcggcagcatgatctcgatgtatcaattgatgatcaccatcggtattttggcggcttacctgtctgatacggcattcagctataccggcgcctggcgctggatgttgggcgtcatcaccatcccggccgggctgttgttggttggcgtgttctttttacctgacagcccgcgctggctggcctcgcgcaatcgtcatgagcaggcgcgccaggtgttggagaagctgcgcgacagcagtgcccaggcgcagcatgagctgaatgaaattcgtgaaagcctcaaactgaagcaaagcggttgggcgttgttcaaaggcaataaaaatttccgccgcgcggttttccttggcgttcttctccaggtgatgcagcagttcaccgggatgaacgtcaccatgtattacgcgccgaagattttcggtctggcgggcttcgccagcacggaacagcagatgtggggcacggtgatcgtcggtctggtcaacgtgctggccacctttatcgctattgggctggtcgatcgctggggccgcaaacccaccctgatccttgggtttatcgtgatggccgtcggcatgggggcgctgggaaccatgatgaatatcggcatgaactcggcggtggcgcaatatttcgccatcgtcatgctgctgatgtttatcgtcggctttgccatgagcgccggcccgctgatttgggtgctgtgttcagagatccagccattgaaaggccgcgatttcggcatcacctgctccaccgccactaactggatcgccaatatgattgtgggagcgacgttcctgaccatgctgaattcgttgggtagcgcgcacaccttttgggtctatgcagggcttaacgtgctgtttgttttcatcacgttggcgctgatcccggaaaccaaaaatatttctctggaacatattgaacgtaatctgatggccggcaaaccgttgcgtaatatcggctcgcgttga

SEQ ID NO: 424200 - DNA, 2433 bp, Serratia marcescens
atgatctggcgctggttctggcgcgaatggcgctcgccgtcgctgctgatcgtttggctggcgctgacgctctccgtggcctgcgtgctggcgctgggcagcatcagcgatcgcatggacaaagggctcagccagcagagccgcgattttatcgccggcgatcgggtgctgcgcagtgcgcatccggtgccggaaggctggctgctggacgcgcagcagcaggggctgacgctgagccgccagctgtcgttcaccaccatgacctatgccggcgaccggccgcagctggcggacgtgaaagccaccgatctggcctatccgctgtatggcaagctggaaacgcgcccggccaacatcaagcccgaaccgggcagcgtgctggtggcgccgcgtttgctggcgctgctgaatgtgaaagtgggggattcgctcgaggtgggcgacaccacgctgcgcatcgccggtgaaatcattcaggaaccggacgccggcttcaacccgttccagaccgcgccgcgcatcatgatcaacctggcggacgtcgataagaccggcgcggtgcagccgggcagtcgcctgacctaccgctacatgttcgccggcgccgagccggatattcagcgttacgaggagcggctgacgccgcagttgacgccggatcagcgctggttcgggctgcaggagtccggcagtgcgctcggcaagtcgctgcagcgatcccaacagttcctgctgctgtcggccctgctgacgctgctgttgtcgatcgccgccgtggcggtggcgatgagccactattgccgcagccgctacgatctgatcgcggtgctgaaaacccttggcgccgggcgcggcgcgctgcgtaaactgatcgtcggccagtggctggcggtgatggcgctggcggcggtgtgcggcggggcgatcgggctggcgttcgaagcgctgttgattcgcctgctgaagccggtgttgccggccgcgttgcccgccgccggcgcctggccgtggctgtgggcgctcggcgcgctggtgctgatttcgctgctggtcgggctgcggccgtaccgtcagctgctggccacccaaccgctgcgggtgctgcgccgcgatgtggtggccaacgtctggccgctgcgctacttcctgccggtgacggcggcagtcgtggtggcgctgctggtgacgctgatggggaccagcacgctgctgtgggcgatcttggcgggcatggcggtgctggcgctgctgctgggcggcatcggctggggcagcctgcagctgctgcgccgcatcacgctcaagagcctggcgctgcggctggcggtcaaccgcctgctgcatcagccgtgggtgaccatcagccagctggcggcgttctcgctgtcgtttatgctgctggcgctgttgctggtgctgcgcggcgatttgctcgaccgctggcagcaacagctgccgccggacagcccgaactatttcctgctcaacatgaccgaggcgcaggtgccgcaggttaaaaccttcctgcagcagcaccagatcaagccggaaacctattatccgatcgtccgggtgcgcctgaccgagataaaccagcaggtagcgacagagcgggtgcatgaagacgatccgggcggcgaggcggtgaaccgcgagctgaacctgacctggttggccgatctgccggatcacaatccgctggtggcgggcaattggccgccgaaagccggcgaggtttctatggatgaaggcattgccgggcggctgaagatcaagttgggcgacacgctgaccttcagcggcgatacccaggcgttcagcgccaaggtcaccagcctgcgccaggtggattgggagagcctgaagccgaacttttactttatcttcccgccgggcgcgctggacggccagccgcagacctggcttaccagcttccgctacgacggcgacggtcagatgctgacccagctcaaccgccagttcccgacgctcagcctgatggacatcggcgcgatcctgaaacaggtcggcggcgtgctgcagcaggtcagccgcgcgctggaggtgatggtggtgctggtggtgctgtgcggcggcctgctgctgctggcacaggtgcaggtcggcatgcgtcagcgccgccaggagctggtggtgtaccgcacgctgggcgccggcaaacggctgctgcgccgcacgctgtggtgcgagttcgccctgctggggctggtggcgggcatcgcggcggcggtgggcgccgaggcggcgctgtggctgctgcagagccgggtgttcgacttcccgtggacgccgacgccggtgctgtggtgggcattgccgctggccagcgcgctgctgctgtcgctgtgcggcggctggctgggcgtgcgcctgctgcgcggccgggcgctgttccgcagttatgatggctga

SEQ ID NO: 424201 - DNA, 534 bp, Serratia marcescens
ttgctgggcattttggccgggctggatgacggcagcgagggcgaggtgcgcctgctcggcgagtcgctgaccgcgctggacgaagaaggccgcgccgcgttgcgcgccaggaacgtcggcttcgtgtttcagtcgttcatgctggtgccgacgctgaacgcgctggagaacgtgcagctgccggcgctgctgcgcggcgagagcgacaggcagagccgcgagcaggcggtgcagctgctggaacagctgggattgggcaaacggctcgatcacctgccggcgcagctgtccggcggcgagcagcagcgcgtggcgctggcgcgcgccttcagcggccggccgcgggtgctgttcgccgatgaaccgaccggcaacctcgatcgccagaccggcgatcgcatcgccgacctgttgttctctctcaaccgcgattttgacaccaccctgatcctggtgacccatgacgaaaccctggcggcgcgctgccagcggcggctgcggctgcgcgaaggcaagctgtgggaggaagcatga

SEQ ID NO: 424202 - DNA, 672 bp, Serratia marcescens
atgctcaccctgaccaacgtgtttactaagatgatgaacttcaagaacgttttccgctggcatcttcccttccttttgctgttgggattattcagtttacgcgctgtcgctgccgataccttgttgattttgggcgacagtttaagcgccggctaccgcctgccgatcgagcgggcctggccgacgctgttggccgaacagtggcagaaaaaaccgggcgcgccgcagctggtcaacgccagcatcagcggcgacaccgccgcacaggggctggcgcgtctgcccgcgctgctgaaacagcatcagccacgctgggtgctgatcgagctgggcgccaacgacggcctgcgcggtttcccggcgcaggacatgcagcgcgatctcggccagatcatcacgcaggtgcagcaggccggcgcacagccgctgctgatgcaaattcgcatcccaccgaactacggccgccgctataccgaggcgttcagcgccgtctacccggcgctggccaagcagttcaacattccgctgctgccgttctatatggaacaggtggtggtgaagccggaatggatgcaggatgacggattgcaccccaatggggacgcccagccgtttatcgccacctggatggcggagcgcctggaaccgctagtaaaacatgagtctaactaa

SEQ ID NO: 424203 - DNA, 777 bp, Serratia marcescens
atgcaaaaagcagtattgataaccggctgctccagcggaattggattgattgcggcgcaggatctgcgcaaccgcggctaccgggtgctggccgcctgccgcaagccgcaggacgtggaaaacatgcgccagctcgggctggaaggcatcgagctggatctggacgacagcgccagcgtcgagcgcgccgccgccgaggtgatcgcgctgaccggcggccgtctgtacggcctgttcaacaacggcggcttcggcgtttacggcccgctcagcggcatctcgcgcagccagctggagcggcagttcgccaccaacctgttcggcacccaccagttgacccagctgctgctgccggcgatgttgccgcacggcgaagggcgcattatccagaccagctcggtgatgggcctggtctccagcgccgggcgcggcgcctacgccgccagcaaattcgcgctggaagcctggtcggacgcactgcgcatggagctgcacggcagcggcattcaggtcagcctgatcgaaccggggccgatttccacccactttagccagaacgtcaatcagacgcagagcgacaagccggtgcataaccccggcatcgccaagcgcctgacgctgccgccggaggccattctgcccaaactgcgccacgcgctggaaagcccgcgcgccaaactgcgctacccggtgaccctgctggcgcacgccatgagcgtgctgcgccgcattctgccgggccgctgtctggattggctgctgcgcagcaacgcttaa

SEQ ID NO: 424204 - DNA, 855 bp, Serratia marcescens
atgctagctcaagctgttgttgatattaacgaaactaacctgcaccagacgctggaacagtcgatgtccattccggtgctgttctacttctggtccgagcgcagccaacactgcctgcagctcacgccggtgctggacaagctggcggcggaatacgccggccagttcattctggccaaggtggactgcgacgccgaacagatgatcgcctcccagttcgggctgcgctccattccgacggtctacctgttcaaagatggccagccggtcgacggcttccagggcccgcagccggaagaagcgatccgtgacttgctgcagcgtttcctgccgaaggaagaagatctgaaactggcgcaggcgcaggaactgctggccgccggcaacgccgccgaagcgctgccgctgctgaaagacgcctggcagagcagccaacagcgcagcgacatcggcctgaccctggccgaaactcagatcgcgctcagccgcagcgaagacgccgaagcagtgctggcgaccatcccgctgcaggatcgcgatacccgctatcagggcctggtggcgcaaattgaactgttgaaacaggcggccgacacgccggaaatccaacagctgcaacagcaggtgcagcagcagccggacaacgttgagctggcggtgcagctggcgctgcagctgcatcaggtcgggcgtaacgaagaagcgctggagctgctgatggggcatctgaagaaagatctggccgccgccaacggcaacgcgcgcaagaccctgatggacattctggccgcgctcggcaccggcgacgcgctggccgctaaatatcgccgccagctgtactcgctgctgtactga

SEQ ID NO: 424205 - DNA, 1152 bp, Serratia marcescens
atggattcgctcagtgttgatgaactcgcccagaagaaggatcgctggtatcgcattgtggaggagatgttggcggaagccggcgtcgccatcaacggcccgcgcgcctgggatatccgggtgcacaacccggcgctgttcaaacgcattttgcaggaaggctcgctcggtttcggcgaaggctatatggacggctggtgggagtgcgaacggctggacatgctgttcacccgcattctgcaggccggcgtcgatgagcggttgccgaaaagcctgagcgacatcgcgcgcatcgcctatgcccggctgttcaaccgccaatcgcgcaagcgcgcctggcaggtgggcaaagagcactacgacatcggcaacgacctgttccgggcgatgctcgatccctacatgcaatactcctgcggctactggaaagaggcgcagacgctcgagcaggcgcagcaggccaagctgcggatgatctgcgaaaaactgcagctgaagccgggcatgacgctgctggatatcggctgcggctggggcgggctggcgcagtttgcggcgcaaaactacggcgtctcggtgcacggcgtgaccatttccgccgagcagcagaagctggcgcaggcacgctgcgccgggctggacgtcgagatcttgctgcaggattaccgcgatcttgatcgccagttcgatcgcatcgtgtcggtcggcatgttcgagcacgtcgggccgaaaaactacgagacctatttcagcgtcgcggcgcgcaacctgaagcccgacggcctgttcctgctgcacaccatcggttccaatcagaccgatctcaacgtcgacgcctggatagacaaatacatcttccccaacggctgcctgccttcggtgcggcatatcgccgaggccagcgaagggcgtttcgtgatggaggattggcacaactttggcgccgattacgatcgcacgctgatggcctggctggagaacttcaaacgggcgtggccagagttggccggcggctattccgagcgcttcgaacgcatgttcacttattacctgaacgcctgcgccggcgcgttccgttcgcgcaacattcagctgtggcaggtgttgttcagcccggcgggcgtggagggcggggtgcgggtctatcgctga

SEQ ID NO: 424206 - DNA, 903 bp, Serratia marcescens
atgaaaaccttggtcattgcgttgggcggcaacgccctgttgcagcgcggagccgtgctctctgcggaaaatcagtataagagcatcgcccttatcgccgacgccatcggcaagctggcgcagaaataccgcatcgccatcgtgcacggcaacgggccgcaggtggggctgctggcgttgcagaacctggcgtaccgcgacgtgccgccctatccgctggatattctggtggccgaaagccagggcatgatcggctatatgctggcgcagcagttgagcgccagccatccgcagcagccggtgtccacgctgctgacgcgggtgctggtggatgcgcaggatgcggattatcaggcgccgagcaagttcatcgggccggtgtatgcgccggaacagcggcaggcgctggaggcaaaatacggctggacgctgaaggcggacggcaactacatccgccgggtggtgccttcgccggcgccgcaaaagatcctcgacatcgaggcgatcacgctgctgctgtcgcagcggcacatcgtgatctgcaacggcggcggcggcatcccgatgatcgccggcgagcgtgggctgacgggcagcgaagcggtgatcgacaaagatctggcggcggcgctgttggcggagcaggtgggggccgatcatctgttgatcctcaccgacgccgacgcggtgtatcaggagtggggcacgccgcgccagcgcgccattcggcgcgccaccacgcaggagttggcgccgatggcggtggcggacggcgccatggggccgaagatcatggcggtcagccgcttcgtcgatcgcaccgggcggacggcgcatatcggtggcctgcaggatatcgacgcggtgctggcgggccaggccggcacctctattttaccttag

SEQ ID NO: 424207 - DNA, 870 bp, Serratia marcescens
atggacattatcgcgctggccggcagccgccatgcgacgcaagactacggcgcgctgcgctgcgtcggcagcttcaacaacgcgatcaatttcctgacggaacgcgcgcggctgctgacgctgcaccgcgccgacagcggcctgagcccgatggggtggcagctcggcgcgcgggatttcgatcgcgtgcggcgtgcggtgccgtccgtagggcgctgcgccttctccgccgcaggcatcacgttggatgggctcctggtgcggcccgccgccgcggcgcgggatctggcgctgacatcgcgtgcggccattgccgatcggccgctgacggcggtattgcagcgctgcacggcgcagtgcgggttacacggcgagctgggccgattggtgaagcagccgttaacgccggagccggccgcgctggtgcgggatttctcccgttggctgcggggcggcacggtcgactggcgccagacgttgggcaaggggccggggctgacgccgagcaacgacgacaccttgctcggcctgctgctgagcgcgcacctcgacagccgcattcaggtcgccgggctggcgccgtttttcgcccatacccccccgctggacgcgctgaccacgctggtgagcgcgcactacctgcattatgccgagcagggcgtgttcgccacgccgctgcaggcgttggcgcaggggctgcgggcgcctggagacgtatcggcggcggtggcggcggtgctgagcctggggcacttttcgggagcggacacgctgctgggcgtgtggctgggggtgacgacgattaacgcactgtgcggcgcgcggtgtgaacacgagggccggatcgcggatccggccgggacggtatga

SEQ ID NO: 424208 - DNA, 1266 bp, Serratia marcescens
atgtacgcaacgattgagcaagcaaacgccgccgttatcgcccgtatccgcgaggcgcgcccgcactggcaggatgtggatctggcgcaccgcttgatcccgcagctggccgaagggcgcaagctgctgcacgccggcccgccggtcacctggcaagagatgagcggcccggtgcgcggcgcctgcatcggcgcctgcctgttcgaaggctgggcgcaggatgagcagcaggcgctggcgctgctggagcagggggagatcgagttcatcccgtgccacagcgtgagcgcggtggggccgatgggtggcatcacctcggcccacatgccgatggtagtggtcaggaacaccgttcacggcaattacgcctactgcaacatgaacgaaggcatcggcaaggtgatgcgcttcggcgcctacggcgaagacgtgcagcagcgcctgcgctggatgcgcgactcgctggccccggtgctgaaagcggtgttggcgacgctggaggaggggatcgatctgaccgcgctgatggcgcaggcgatcagcatgggggacgaattccaccagcgcaatatcgcggcctcggcgctgctgatgcgcaggctggcgccggagatcagcctgctgccgcgcgataaggcggagctggcacaggtgatgcagttcctcagcatcaccgatcagttcttcctcaatctggcgatggcctactgcaaggcggcgatggacgccggggcggaaattgagcagggcaccatcgtcacggtaatgacccgcaacggcaagaacttcggcatcaagatcagcgggatgggcgatcgttggttcaccgcccccgtcaatacgccggaagggctgttcttctccggcttcagccaggcggacgccaacccggacatcggcgacagcgcgatcaccgaaactttcggcattggcggcgcggcgatggtggcggccccaggcgtgacgcgcttcgtcggggcttccggcggcatgagcgccgccaccgacatctccgaggaaatggcggaaatctacctcgagcgcaacatgatgctgcagatcccgacctgggacttccagggcgcctgcctggggctggatgcccggcgggtggtggaaaccggcatcacgccgctgatcaacaccggcatcgcccaccgcgaagccggggtcgggcaaattggcgccggcacggtgcgcgcgccgctcggctgcttcgagaaagcgatcgaagcgctggccgataagctcggcatcacggcgtaa

SEQ ID NO: 424209 - DNA, 1668 bp, Serratia marcescens
atgatccatgcttttattaaaaaggggagctttcaggattccgtcagcctgatgttgatctcccgcaaactcagtgaatctcccaaggtcgaggaaatatccgtcatgatggggacaccggccaataaatccttattggaggtgaccggtttctggcacccgcagtttagcgaagcgacgccgaacgatatttgcgtggcgatcaaggcggagtccgccgacgagacgatcgccgaggagatcggcgcggcgctggagacggcgctcaaggcgattgcgcagggcagccagggcggcaaaaaactgctgcgggcgcgcagctggcgcaccgccaggcagaagctgcccgccgccaatctggcgctgatctcgatcgccggcgaatatgcggcggagctggcggatagcgcgctggaagacggctgcaacgtgatgatgttctccgacaacgtcagcccggcgcaggaagtggcgctgaaaaccaaggcgcgcgaacgcgggttgatcgtgatggggccggactgcggcaccgcctgcatcgccggcgcgccgctggcgttcgccaacgtggcgcccgccggatctatcggcgtggtgggcgcctccggcaccggcattcaggaactgatttcgcaaattgccctggcgggccagggcatctcgcacgccattggcctcggcgggcgggatttgacggcggagatcggcggcatcagcgccatcagcgcgctgcgcatgctggcggcggatccgcagagtctggtgctggcgttcgtgtccaaaccgccggcgcccgaggtgcgccagcgggtgattgacgagatgaaagcgctcggcaagccggtggtggcgctgttcctcggcgcgcagtccgccgtgcgtcaggagggcaacatcacgttcgccgccacgctggatgaagcggcgcggctggcggcgatgctgggctgcgtgcagcaacaggcggcgcaacagcccgcggtgcccggcggcaaaatcgccgggctatacgccggcggcacgctggcggccgaatgcgcgatgttgctggcggaaaaactgtccctgccggtggatagcgagcacccgcgcggcgccatgctggtggccgacggccatcgcatcatcgacatgggcgatgacttttatacccaggggcgcccgcacccaatgattgacccgaccgcccgcaatcaagagatcgcccgcctggtgcagcagccgcagaccggcgtgttgctgctggacgtggtgatcggcttcggcgctcaggacgatccggcggcgtcgctggcggccgaggtggccaatgtgcgtgcggcgcgcggcgcggcccacccgctggcggcgatcgccaccgtcaccggcaccgaacaggatccacagcagcgctcgcggcaaatcgccaccctgcaggaagccggcatcgcagtgatgccgtcgctgccggcggcggtcgcgctggcgcaccagctgattacccccgtcttacctgcacctgaacgcgaacggccggccttgctggacggcgtcgcggtgatcaacgccgggctgcgcagcttcgccgatgacctgcaaaccagcgatatcccggtggtgcattaccagtgggcgccggtggccggtggcgatcaacgattagccaacatcttgaaaaaattaaagtaa

SEQ ID NO: 424210 - DNA, 1050 bp, Serratia marcescens
atgaaggtctctaaacaacaattacatcagcttatccagcaaaaaattcacgccgccggcctgagccaggaacacgccggcatcgtcgccgacgtgctggttcatgccgatgcgcgcggcattcattctcacggtgcggtcagggtcgaatactattccgaacgcatcagcaaaggcggcaccaacaatcacccgcatttcacctttgagaaaaccggcccctgcagcgccattttcgacggcgacaacggcgccgggcacgtggcggccaagctgagcatggatcgcgccattgaaatggcgaaagagaacggcgtggcggtggtgggcgtgcgccgcatcggccacagtggagcgctgtcctacttcgtgcagcaggcggcgcgcgccggcatggtcggcatttcgctgtgccagtccgatccgatggtggtgccgtacggcggcgccgaggtctactacggcaccaaccccatcgccttctccgcgccgggcgaaggcgacgagctgatcaccttcgatatggccaccaccgtgcaggcctggggcaaagtgctggacgcccgctcgcgcaacgccgccatccccgacacctgggcggtggacgccgagggcaagcacaccaccgatccgttcgccgtcagcgggctgctgccgatcgccgggccgaaaggctacggcctgatgatgatggtcgacgtgctgtcgggcattttgctcggcctgccgttcggcaaacacgtcagctcgatgtatcacgatctcagcgccggccgggaattgggccaattgcatatcgtcctgaatccgggttatttcaccaacgaatcggcgttccgtaaaaatatcagccaggtcatgaaagagttgaatgccgttaagccggcgccgggcgtcagcaaagtgctttatccagggcagaacagccatgcgcgtgaaatggaaagcgagaaaaacggtatcgaaatcgtcgacgatatttatcaatacttaatttcaaatgctatttaccagcgttcttacgaccataaagatcccttcgccagttaa

SEQ ID NO: 424211 - DNA, 1248 bp, Serratia marcescens
atgaaagacttccaacaagaaatccgtgatatttccggctggttatcgaaaatcggcgccgatcccagcggcggcatgacgcgtctgctttataccccggaatggatcgaagcgcagcacgcgctgaaaaccaccttcgaggccgccggactgcgcacccattttgatgcggtcggcaacctgttcggccggctggagggcagcaaataccccgaccaggtgattctctccggttcgcacatcgacacggtggtcaacggcggcaacctcgacggccagttcggtatcgaagccgccttcatggcgatcaaacacctcaaagacacctacggtccgccgctgcgcagcctggaagtcatcgcgctggcggaagaagaaggcagccgcttcccttatgtgttctggggcagcaagaacatcgtcggcctggcccggcgggaagacgtgcagcacattacggacgccaagggcgtcggcttcgtcaacgccatgcgcgacgccggtttcgatttccctccgccgcatcagccgctgcgcagcgacatcgcggccttcgtcgagatccatatcgaacagggcaaggtgctggaaaccgaaggcaaaaccatcggcgtggtgaccagcatcgtcggccaacggcgttatgacgtgcggctgcagggcgaagccaaccacgccggcaccaccccgatgagctaccgccgggataccgtgcacgccttcagccgcatctgctgcgaatcgatcgccaaggcgcgcgccgagggcgacccgctggtgctgaccttcggcaaggtggagccgaagccgaacaccgtcaacgtggtgccgggcttcacccacttcaccctcgactgccgccacaccgatcaggccgcgctgctgcgcttcacgcaggagatcgagcaggatatccagcgcatctgcgccgagatgggcatcgaggccgagatcgatctgtggatggacgaagcgccgatcccgatgaacgaacagttggtggcctgcgtcagccgcctgtgcgaaacgcagcggctgaattaccgcatgatgcacagcggcgccggacacgactcgcaaatcttcgccccgcgcgtgccgacggtgatgatgttcgtgccgagcatcgccggcatcagccataacccggcggaaaaaaccgccgtcgccgatttgaacgaaggggtgaaaatcctggcgcagacgctgtatcagctggcctacaccgaacagggggccgaggcatga

SEQ ID NO: 424212 - DNA, 1260 bp, Serratia marcescens
atgagcaaagacatcgacccgcgctactggaaaaagatcgtcgtcgtgctctgtctgggctgggcggtgatctggatctatcgcaccgtcctgacgccgatcttccccgagatccaacaaaccatcggcgcgcactccaatgcggaaatggggctgatcgccagcttctacttcttcgcctacaccgggatgcagatcccggcgggcatcctggtggacaaattcggcaagaaggtggtgctgatcccgggcttctgcctgttcatcatcgccacgctgctgatcggcaacgccaccagcctgaccatggtctatgccggcagcctgctggcgggcatgggctgcggctcttactacggctcggcctactccctgtcgtcggagaatatcccgctggaacgccgtggcctggcaaccgcggtgatcaacagcggctcggcgctcggcatggccatcggcctgatcgcctccagcctgctggtgaaaagcttcaacatgaactggcagatcatgctgttcatcatcaccggcctgctggtggtgatgacgctggtgttcgccgtggtcatcaaaggctcgcagcctcacgccgcggcggccgtcagccagaccgttgcgccgacggctgccgagcccgaggaggacggccagcccagcggcctgttcagcctgcgcatgatctccgcctacgcgatgtacttcgccacctgctacggctactacatgatagttacctggctgccctcgttcctgcagcaagagcgcggctttgaaggggtggccatcggcttctcctccgccctggtggcgttcgcctcggtgccgggcgcgctgttcttcagccgcatgtccgaccgtttccgcaacaagaaggtgcagctgatcattttcctcgagctgtgcgcggcggtgatgctggtttgcaccgtcatttcgccggactccaccatgctgctgatcagcctgatcctgtacgggttgctgggcaagctggcggtcgatccgatcatgatctccttcgtcgccgacaacgcgccgaagaaaggctatggcaccagcttcggcgtgttcaacttcttcggcatgtcctcgtcggtgatcgcccccttcctgaccggcgtgatctccgacagcaccggctccaaggtgatggggttttacatctccgccgccatcctgctggtgggcaccgccattttcttcaccgtcaacgtcttgatgaaacgcactacgccaacccgaacggccaccgaggcctga

SEQ ID NO: 424213 - DNA, 786 bp, Serratia marcescens
gtgggttacttcaacaatcaaaccggatatccaaccgacattctgtcaacgcgcgccatcatcaaacgcggcaactatgcgctgatcccgccgaacggcctggtgcgcaacgtcattcccggttttgaaaactgcgacgtcaccatcttgtcgacgccgaaactgggcgccaccttcgtcgattatctggtaacgctgcacgactgcggccgcaacaccaaaggctttggcggcgaagagatcgaaaccttcgtgtacgtcatcgacggcgccatcaccgcttccgccgacgccaccgactacccgctgaccgccggcggctatctttactgcccggcgggcgtcaccctgcggctggaaaacgccaacggcggccaatccagccgcctgttcctctacaagcgccgctaccagcgcatcaagggttacgaggcgcacgtggtcagcaacaacgtcgccaacctggaaaagatccactacgaaggcatgagcgaggtgatcctgcaggatctgctgccgaaagatctgggcttcgacatgaatatgcacatcctctccttcgcccccggcgccagccacggctacatcgagacccacgtgcaagagcatggcgcctacattctcagcggcgccggcgtgtacaacctggacaatgaatggatgccggtgaagcaaggcgactacatcttcatgggcgcctatgtgcagcaggcgggctatgcggtgggccaggaaaccttcagctacatctactccaaggactgcaaccgcgacgtcgagccgtaa

SEQ ID NO: 424214 - DNA, 1143 bp, Serratia marcescens
atgaaaattgttattgcaccggattcatttaaagaaagcgtcagcgcggaacgggcggcgcgggcgatcgcgcgcggcttccacgaggtttatcccgatgccgagtgcgtctgcctgccgatcgccgacggcggcgaaggcacggtggacgcgctggtggccgccaccggcgggcgcaaagtgagcgtggccgcaacggggccgctgggggaacgggtggcggcgttttacggcgtcagcggcgacggcaagacggcggtgatcgaaatggcggcggccagtggattgatgctgacgccggcggcgcgccgtaacccgctgttggcgaccagctacggcaccggcgaactgatcctgcatgcgttggatcagggcattcgccacctgatcctcggcatcggcggcagcgccacggtggatggcggcgtcggcatggtgcaggcgctgggcgggcgcttctaccgcccggacggcaaggcgctgccgtggggcggcggcgagctggcgacgctgagcggaatcgatctcagtacgctggatgcgcgcctgcggcagtgccggatcgaggtcgcctgcgacgtagacaatccgctggtggggccgcgcggcgcagcggcggtgttcgggccgcagaagggcgcgacggcggcgatggtggcgcagttggaacagggcctgacgcagtatgccgaggtgatccgccagagtaccgggcgcgacgtgcggcacgtcgccggcggcggggcggcgggcggcatggggatcgcctgccaggtgtttctcggtgcagcgctgaagccgggcatcgagatcgtgatggcggcgctgggcctggagcaggcgctggcggaggccgatctgctgatcaccggcgaagggcgcatcgacagccaaacgctgggcggcaaggcgctgtccggcgtcgcccgtctggcgcgggcgcgcggtttgccggtcatcgcgctggccggcgtggtggaggaaggggcggaggcgctgcacgcgcagggaatagacgcgatgttcagcattctgccgcgcctgagtgcgctggagatcgcactgtcgcaaggggaactcaacctgcagcgcagcgccgccaacgtcgcccgcgcgatgcgcatcggccggcgattgggataa

SEQ ID NO: 424215 - DNA, 1341 bp, Serratia marcescens
atggcaaccgataatgctgttattgataaagatattcttaccgcccctgacaaaaaccgtttatatcgaaaaatcgcctggcgcattatgcccattttattagtgagctatatcgtcggttatctcgatcgggttggcatttcgttttcgaaatttcaaatgatgcccgatattctgaacggcaatgtctcgatggccgaagccgtttacgggctgggcgccggggtgtttttcatcggctatatcatcgccggggtacccagtaatattctgctgagccgctacggcgccagaaagatcatcgcgctgctgatggtggtgtggggggcgatttcgatgctgagcatctttatcaccaacccctggcaattttacctggcgcgtttcctgctggggctggcggaggccggcttctaccccggcgtgatcctctatctgacgctgtggttcccgtccagccagcgcgccaagatgaccgcgctgttcgtgtgcggcatcccggtcagcaacatcatcggcggcccgctgtgcgggtggatcatcgagcacatgaacggcctgatgaatctctccggttggcagtggctgttctttatcagcggcccgcgcgcgctgctgatcgccatcgtcatcttctgtttcctggataatacctatcagagcgccaagtggctcagcccgcaggagaaggcgctgatcaaagaggatatggcgcagagcgcgccgcgccagggcgctgccggcgggcaggagtggacgatgaaaagcatgctgagatcgtccgcgttcaccaaaatgtggctgatttgcttctgcaccgtgatgggccagggcgggctggcgttttgggtgccgaccatcattcgcgacaccggcgtgacctcggtgatggatatcgggttgctgaccatgctgccgtatatgctggcggtggtggcgatgctggtggccgcgcgcagttcggacaagcatcgcgagcggcgttggcacatcatcgtgccgttctgcatcgccgcggtgtcgctgatctttatcggcctgttcccggacaacaagcacgtggtgatggcggcgctgtgcgtggcggtggcgtcgagcctggtgccgtcgccgctgttctggagcctgccgaacgccatttttaccggcacctgcgccgcggcgggcattgcgctcatcaattccatcgccaatatcggcggttttatttcaccttatatcatcggctatttcaaacagctgacccacagcaatttggcggcgatgtgcgtcttgtcgacaatgatgatactgggggcgatattaacctacagcgtgccggcgaaatgggtcaataaataa

SEQ ID NO: 424216 - DNA, 882 bp, Serratia marcescens
atgaaagtgggatttatcggtctgggcatcatgggcgcgccgatggcggaaaagctgctggcgggtgggcacacgctttacgcccacacccggcatcaggtgccggcggcgctgttgcagcaaggggccatcgcctgcggcgatccgcagcaggtggcggatgaggcggacgtgatctttatcatggtgccggatacgcctcaggtggaggaggtactgttcggtgaacgcggctgcgccgccggcaagctgaacggcaaagtggtggtggacatgagctccatttcaccgctggagaccaagcggttcgcgcagcgcatcaaccagctgggcgcccagtacctggacgcgccggtttccggcggcgaagtgggcgccaaacagggcacgctgaccatcatggtgggcggcgaggaagcgaccttcgaacgggtgcagccgctgctggcgctgatgggcaagaacatcacgctgatcggcggcaacggcgacgggcaaacctgcaaggtcgccaaccagatcatcgtggcgctgaccatcgaagcggtctccgaggcgctggtgttcgcctcgcgcgccggcgccgatccggcccgggtgcgcgaagccctgatgggcggtttcgcctcgtcgcgcattctggaggtgcacggcgagcggatgatcaagcgggcgttcgcgccagggttccgcatctcgctgcaccagaaggatcttaatctggcgctgcagggcgcgaaggcgctggcgctcagcctgccgaataccgccacttgccaggagttgttcaacgtctgcgccgccaatggcgacggcgaactggatcactccgcgctggtgcgggcgctggagatcatgggcaaccaccgggtggccggctaa

SEQ ID NO: 424217 - DNA, 780 bp, Serratia marcescens
atgccgaaattttcagccaacctgtccatgctgttcaccgaagtcgattttatgcagcgcttccgccgggcgaaggagcagggcttcagcgcggtggaatacatgttcccctatgactacccgatcgccgcgctgtgcagtgaactggaggcgcatcgcctgagccaggtgctgttcaacctgccggccggcgactgggcggcgggcgaacggggtatcgcctgcttgccggggcgcgaagcggagttccgcgacggcgtcgggcgcgcgatcgagtatgcgcaggcgctgggctgcgatcgcatcaactgcctgatcggcaatccggatcccgccgtcagccgccacaccaccgacgaacgggtgaaggagaacctgagctacgccgccgacaccctggcgcggcagaatatccgcctgctgatcgaaccgatcaaccgctacgacatgccgcagttctacctgcaaacctcccggcaggcgatcgaactgatcgaagcgatcggcagccccaacctgtatctgcagtacgacctttaccacatgcagcgcatggagggagagctgacgcagacccttgagcgcctgctggcgaagatcgaccacgttcaggtcgccgacaacccggggcggcacgagccgggcaccggcgaaatcaactgcgagtttatcttcgcgcagctggatcgcatgggttaccgcggctggatcggctgtgaatacaaaccgctcaccaccacggaaagcggcctgtcatggattaaaaaatacctgtcttga

SEQ ID NO: 424218 - DNA, 1782 bp, Serratia marcescens
atggcaattatgcgagcggtagacgcggcaatgcacgtgctggaaaaagaagggatcaccaccgcgttcggcgtgcccggcgcggcgatcaacccgttctacgatgcgatgcggcggcacggcggcatcaaacactacctggcgcgacacgtggaaggagcttcgcacatggcggaaggctacacccgcgccgccgccggcaacatcggcgtgtgcatcggcacctccggcccggcgggcaccgacatgatcaccggcctttactccgcctccgccgattcgattccgatcctgtgcatcaccggccaggcgccgcgtgcgcgtttgcacaaagaagattttcaggcggtagacatcgaatcgatcgccaagccggtgaccaagatggcggtcaccgtgcaggagccagcgctggtgccgcgtgtgctgcagcaggcgttccacctgatgcgctccggccggccgggcccggtgctgatcgacctgccgttcgacgtgcagatggcggagatcgagttcgatccggacacctactcttcgctgcccgcctataagccggcggccacccaggcgcagatcgacaaagcgctggatctgctgtgcgcggcgaaaaaaccgctgatcatcgccggcggcggcattcacaacgccgacgcggcggatctgctgcagcagctggcggagatctgcaacgtgccggtgatcccgacgctgatgggctggggcgccattccggacgatcacccgctgatggcgggcatggcgggcctgcaaacctcgcatcgctacggcaacgccaacctgctggattcggatctggtgttcggcatcggcaaccgctgggccaaccgccacaccggctcggtggacaagtacaccgccgggcgcaaggtggtgcacatcgatatcgagccgacgcagattggccgggtgatctgcccggatctgggcatcgtttccgacgcgcgcatcgcgctgcaaatgctggtggacacggcaaagcgccgcttcgagcgcggcgagttgccgaatcgcgacgcctggtgcgccgcctgtctgcagcgcaagcaaacgctgctgcgcaagacccacttcgacaacgtgccggtcaagccgcagcgggtgtatgaagagatgaaccgtgccttcggccgcgacgcctgctacgtcaccaccatcgggctgtcgcagatcgccgccgcgcaaatgctgcacgttttcgagccgcgtcactggatcaacgccggccaggccggcccgctgggctggacgttgcctgcggcgctgggcgtgtgcgccgccgatccgcagcgcaaggtgatcgcgctgtcgggcgactatgatttccaattcatgatcgaagagctggcggtcggcgcacagttcaagctgccctatatccacgtgctggtgaacaacgcctacctggggctgatccgccaggcgcagcgcgggttcgatatggattactgcgtgcagctgtcgtttgaaaacatcaacaatgcggagattggcgagtacggcgtcgatcacgtcaaggtggcggaagggctgggctgcaaggcgctgcgggtgttcaaaccggaagagatcgcgccggcgttccgtcaggcccaggaactgatgcagcagcaccgggtgccggtggtggtggaaatcatcctggagcgcgtcaccaatatttccatgggcaccgagctggataacgtcaacgagttcgaaccggtggcggcaacgccggaagacgcgccgacctcggtcaacttctttgattaccgttaa

SEQ ID NO: 424219 - DNA, 816 bp, Serratia marcescens
atgaccgaattacgcaggaaaggacgccccgccaccgaagccggcgccaccaaaggagcgcaggcgttggatcgcgggctggagatcctccagtacctggccaacgccggggggagttcgtcggtttccgtgctgtccgaaaagctggagctgccgctttcaaccaccttcaggttgttgaaagtgctggagaaatcggaattcgtctttcaggatccacagctgggctggtggcatatcggcattcagtcgttcaccgtcggttccgcttacatgaacgatcgcgacgtggtatcggtggccgggccgttcatgcgccggctgatgctgctgtccggcgagaccgccaacctggcgatccgcaacaatttcgacgcggtgctgattcgccaatgcgagtgccaggcgatggtgcgcatgtgcgcgccgctgggcagccgtttgccgctgcacgcctcgggcgccggcaaggcgctgctgtacccgctggcggaagaggagatgctggatctgatcgtgcgttcggggctgcaatcctatacgccgaagacgctgaccagcgtgaacctgctgcgcaaggatctgcatcagtcgctggaacagggctacaccatcgacgatgaagagcacgcgctcggcctgaactgcctggcttcggcgattttcgatcgcaacaacaacgtgatcgccgccatctccatctccgggcccagttcgcgggtcggcaaggagcggttcaaggagctgggcgaactggtgggtgaagtggccagagacatcagcgccgcgctgggcgaatcgcgcagcaaggcgtaa

SEQ ID NO: 424220 - DNA, 486 bp, Serratia marcescens
atggatttagtcatcgaagaattaacgccggcggcctttgcgccttacggcgatgtattgcagatagagggctcgcgtttctttcatatcaatgacggaaaaaccgagcgttatcacgatctcgccaggatagaggtgtccgacggcaaccgggtgctggccagcatcaaccgggcggaaccctgcgatctgccgatgaccttttccctgttggaaaagcatccgctctcgtcgcaggcctttgtgccgatgaacggcgaacgcttcgtggtgatcgtcgccgaaccgggcgaaaccatccccgtcggcacgctgcgcgcctttatcaccaacggcaaacaggggatcaactatcatcgcaatgtctggcaccacccgctgttcgcctatgcgaaggtcaccgactttttcaccatcgaccgcgcgggcgccgacaactgcgtggtcagccgcttgccggagccgtatcgcatagttttggcatag

SEQ ID NO: 424221 - DNA, 915 bp, Serratia marcescens
atgctggatcacgaaaccattcgttcgtttatcaaggttgccgagtgccaaagtttctcccgcgcggcggagctgctgcacaaaaccaccgccaccatcagctaccgcatcaaaacgctggaagagagcatcggcacgcagctgtttatccgcaccacccgcaccgtcaacctgacgccggccggagagtatttgctggaacgctgccgccagtggcacacctggctggacgccatgccgggcgagctgcggcaaatcaacgacggcgtagagcatcaggtgaatatcgtgatcaacaacctgctgtacgacgccgctgccgtagccgggctgttaactcacctgcacgacaaatacccgttcacccaattccacatttcccgccaggtgtacatgggcgtgtgggacgcgctgctgaatgaggattgccatctggcgatcggcgcggcgggcaacgaatcgctggaaaacagcatcaaggtgctgccgctgggcaaaatagagtgggtgttcgccatcgcgccgacgcatccgctggccgccgccgccgatccgctgaacgaaacgcagctgcgcccttacgccgcgatcaacgtcgaagataccgcacgccatttggccaagcgcaccgcctggctgctgtcgggccagcaggaaatcaaggtgccggatctgcgcaccaagctggagtgccatctgcgcggtctcgggatcggtttccttccgcgccggctgtgccaaacttatctggagagcggcgagttggtggccaaacagctcaaatacccgcgccagtcttctcccctgtcgctggcctggtccgatgctcgcggcggcgaagcggtgcgcacccttatcaacctgttccagacgcgggatccgctgatcgcgggtttgatcggcgctctggattaa

SEQ ID NO: 424222 - DNA, 906 bp, Serratia marcescens
atgcttacttttatccccatcgtgatcgtcgtcgcgctgattgtggtgttcgccggcgtcaaaattgtgccgcaggggttccaatggacggtagaacgcttcggccgctacaccaaaacgctgatgccgggcctgaacctggtggtgccgttcatggaccgcatcggccgtaaaatcaacatgatggaacaggtgctggacattccctcacaggaggtgatttcccgcgataacgccaacgtcgccatcgacgcggtgtgctttatccaggtggtcgatccggcccgcgccgcctacgaggtcagcaacctcgaacaggcgatcgtcaacctgaccatgaccaacttccgcaccgtgctcggctcgatggagctggacgaaatgctgtcgcagcgcgacagcatcaacagccgcctgctgcacatcgtcgatgaagcgaccaatccgtggggggtgaaaatcacccgtatcgagatccgcgacgtgcggccgccggcggaactgatcgcctcgatgaacgcccagatgaaggccgaacggaccaagcgcgccgacatcctggaggcggaaggggtgcgtcaggcggccattctgcgcgccgagggggagaaacagtcgcagatcctgaaggccgagggcgaacgccagtcggcattcctgcaggcggaagcgcgtgaacgcgccgccgaggccgaggcgcgcgccacccagctggtgtcggacgccatcgccagcggcaacattcaggcggtgaactacttcgtggcgcagaaatacaccgacgcgctgcagaagatcggttcctccaacaacagcaaagtggtgatgatgccgctggacgccagcagcctgctcggctcgatcggcggcattaccgaactgctgaaagaaagcaaaggcaaataa

SEQ ID NO: 424223 - DNA, 462 bp, Serratia marcescens
atgctcgaactgatcgcggcgaatccgctgtggttttggctttccctcgggggcgtgttgctggcggcggaaatgctcggcgccggcggctacctgctgtggagcggcgtggcggcgctgttggtcggcgtgctgatctggctgctgccgccgctttcctgggcgtggcagggcatgatcttcgccgtcctgaccgtcgtcgtcgcctatctgtggtggtactggctgcgccggcgcccggcggccgcatccggcggttcgccggtgctcaaccagcgcaaccgccagttgatcggcacccgcgccacgctgacggagccgatgcacaacggtatggggcgcatcaatatcggcgacagcagctggcgcgcgcaggcggcagaagatctgcccgccggcaccgaagtggaagtggtggcggtggaaggcgtcacgctggtgatccgcgccatcggccgctaa

SEQ ID NO: 424224 - DNA, 402 bp, Serratia marcescens
atgaatattagcgacgtcgcgaaaaaaaccgggttaaccagcaaaacgattcgtttttacgaagagaaagcgctgattaccgccccgatccgcagcgataacggttaccgccattattccgccaggcacgttgaagagctgacgctgctgcgccaggcgcggcaggtgggcttcaacctggacgagtgccgcgagctggtggcgttgttcaacgatccggcccgccacagcgccgacgtgaaggcgcgcacgctgcagaaggtggcggagatcgacaggcacatcagcgaactgggcgaaatgcgccagcgcctggtgacgctggccgatcaatgtccgggcgacgagggggcggagtgccccatcatcaacaacctggcaggatgctgtcgttcaaattag

SEQ ID NO: 424225 - DNA, 2712 bp, Serratia marcescens
atgtcacacaccactatgctggcattgcaggggctgtcctgcatgaactgcgcgcagcgggtgaaaaaagccctggaaagccgcagcgatgtcgaacaggcggacgttaacgtgcattacgccaaagtgaccggcgacgcaccggacagcgcgctgatcgacagcgtgatcgccgccggttatcaggccgaagtcgcgccgcgcgccgataccgaactgcagctgagcggcctgagctgcatgcactgcgtcggcaccacccgcaaagcgctggaagcggtgccgggcgtgttcgccgccgacgtcgctatcgacagcgcgaaagtgtacggcgatgccgatccgcaggcgctgatcgccgcggtggaagatgccggttatcacgccggcgtagcgggcgccgccgccccaaaaactgagccgttgactgacgcaacaccttcattgccggacgttcagccagcggcgcaatctccccttccggcaaccgacggcgcggacgacagcgtacagctgctgctcagcggcatgacctgcgccagctgcgtcaataaagtgcagcaggcgctgcaaagcgttcccggcgttgagcacgcgcgcgtcaacctggcggagcgcagcgcgctggtgaccggcgctgccgatgcgcaggcgctggtggcggcggtggaaaaagccggctacggcgccgagatgattcaggacgagaccgaacgccgcgagcgccaacagcagaccgcacgcgccaacatgaagcgctttagctggcaggcggcgctgggtctggcgttgggtatcccgctgatggcctgggggctgttcggcggcagcatgacgctgacgccggaaacccagcgcccctggctgctggtcggcgtcatcaccctggcggtgatggtgttcgccggcgggcacttctaccgcaacgcctggcgcgcgctgatgaacggcagcgccaccatggataccctggtggcgctcggcaccggcgccgcctggctctattcgatcgccgtcaacatctggcccgatttcttcccgatggaggcgcgccacctctattacgaggccagcgcgatgatcatcggtttgatcaacctcggccatgcgctggagcagcgcgctcgccagcgttcttcgcaggcgctggagcggttgctggatctgacgccgcctaccgcacggctggtaaccgacgacggcgagcgcgatatcccgctggcggaggtgcagctcggcatgacgctgcggctgaccaccggcgatcgcgtgccggtcgacggtgaaatcgtgcagggtgaagtctggctcgatgaagcgatgctgaccggcgaagcggtgccgcagcagaaaggccccggcgatacggtgcatgccgggacggtggtcgacgacggcagcgtgctgttccgcgccgccgccatcggcagccaaaccacgctggcgcgcatcatcaaactggtgcgccaggcgcagagcagtaaaccggcgatcggccaactggccgaccgcgtctcggcggtgttcgtgccggcggtggtggcgatcgccctgttcagcgcggcgatatggtacttcttcggcccgcagccgcagctggtctatacgttggtgatcgccaccacggtgctgatcatcgcctgcccgtgcgcattgggattggcgaccccgatgtcgatcatctccggcgtgggccgcgcggcggagtttggcgtgctggtacgcgacgccgacgccctgcagcaggccagccagctggacaccctggtgttcgacaaaaccggcaccctgaccgaagggaagccgcaggtggtggagatcctgaccttcaatcaggtcagcgaacggcaggcgatcggctgggccgccgcgctggagcaaggctccaatcacccgctggcgcgcgccatcatggaacgcgccgccgggcaaacgctgccgcaggtggcgcagttccgcaccctgcgcggcgccggcgtcagcggggagatcgacggcgtgcagttgctgctgggcaacgccgcgctgctggagcagcatcaagtcgcgaccgccgaactggaagcgccgatgcgcgaccaggccgaacgcggcgtgacgccggtgctgctggccgttgacggtaaaccggccgcgctgttcgccattcgcgatccgctgcgcgaggacagcgtcgcggcgctgcagcgcctgcaccagcaggggtatcagctggtgatgctgaccggcgacaatccggtgaccgccaacgccatcgccaaagaggccggtatcgatcgggtgattgccggggtgctgccggacggcaaagcggcggcgatcaaacagctgcaggcgcagggccaacgcgtggcgatggtcggcgacggcatcaacgacgccccggcgctggcgcaggccgacgtgggcatcgcgatgggcggcggcagcgacatcgccatcgagaccgccgccatcaccctgatgcgccacagcctgcacggcgtggcggatgcggtggaactgtcgaaggccacgctgcgcaacatgaagcagaacctgttcggcgcctttatctacaatacgctgggcatcccgatcgccgccggcgtgctctacccgctgaccggcacgctgctcagcccggtggtggcgggcgcggcgatggcgctgtcgtcgattaccgtggtcagcaacgccaaccggctgctgcgttttaaacccagaaagtga

SEQ ID NO: 424226 - DNA, 807 bp, Serratia marcescens
atgggtcaactgttacgccgcctcgccgcctttctcggcctgatctcgcccaaacgatacgcttatccggcgctggacatcactctgccgggcgatcgtcggctgcatctggtgggcagcatccatatgggcaccgtcgatatgtcgccgctgccggcgcggctggccgcccggctgcagcaggccgacgcgctgatcgtcgaggccgatatcaccgattccgcctccccttttgaccacgcagaacagcagccggcgctggaacagcgcctgtccgccgaagaatatcaacggctgctggcgctttgccacgagctgggcgccgatccgcacgccttcgccaccctgcccggctggcaggtggcgctgatgatgcaggcgcgccaggctcagcgtctggggctacgggcggagtacggcgtggactatcagttgttgcaggccgcccgcgcgcatgacaaaccggtgatcgagctggaaggggcgcagcagcagttggcgatgctggaacagctgccggaaggcggcatcgcgctgctgcgcgatacgctggagcactggcacaccaacgcgcggctgctgcaaaccatggtgagctggtggctggacgccaaaccgcgcggcacgctggacaccctgcccgccaccttcagcgccgggctgtacgatgtgctgatgcatcagcgcaatcgcgactggcggcatcagttggaggcgctgccggccggggactatgtggtggcggttggcgcattgcacctgtacggcgaggataacctgccggcgatgctgcagccacagggctaa

SEQ ID NO: 424227 - DNA, 480 bp, Serratia marcescens
atgacgcccgcagtcgttctgctcgagaaacaaaaggtcgccttcacccttcatccgtatcaccacgacagcgacgaaaccaacttcggcgacgaagcggtgagaaagctggggctggatgccgatcgggtttacaaaacgctgctggtggcgctgaacggcgacgccaaacatctggcggtggcggtcacgccggtcgccacccagttggatctgaaaaaggtcgcccgcgcgctcggcgccaaaaaggccgagatggccgatccgcagctggcccagcgcgtcaccgggtatctggtgggcggcatcagcccgctggggcagaaaaaacggctgccgacagtgatcgacagcccggcgcaagcgttcgccaccatctacgtttccggcggcaaacgcgggctggacatcgaactggccgccgccgatctgtgccgcctgctggccggcagcttcgccgacatcgccaagcgcgactga

SEQ ID NO: 424228 - DNA, 1467 bp, Serratia marcescens
atgttgaaaaccgcaggctggctgctgcccgccatcctggcgctggcggggtgttcgtcatccggccaacgtcatgagcaaacgcttagccaggcgctgatggccctcggccaggacaaagcgctgattggggcgtcgagcggcgtgatggtgcgcgacgccgagagcggcaccgtgctgtatcaggcgcacgcgcagcagcgtttggcgccggcttccaacatgaagatgttcacttctctggcggcgttcggcgtgctgggggcggattaccggtttgaaacccggctgctgaccaccggcgagcagcgcggcgacaccttgcagggggatctctatctgcagggcagcggcgatccgacgttgcaccctgacgatctcgacaccttcgccgccacgctggcgcagcgcggcattcgccatattcatgggcggctgatcctggacgccagcgcgttcgatcaaacgcccttcggcgccggctggagctgggacgatgaacccttcgctttcggcgcaccgatctcggcgctgaactacgcgtttacccccggcggcgatatcaacgtggtgcgggtggacgtgcagccgggtgcctgcgccggtgcgccagggcgggtgggtttctatcccgccaatgacgcggtgacgctggtcaaccgcaccaccaccggcggcgacaccgcactgacgttcgagcgccagtcgggcagcaaccgaatcgtggtcggcggcaccatcgccgcgcaggcggagacccgctcgcgattgatcaccgtcgatcaaccggctcgcgtggttggcgccttattgcaaaatgccctgcgcgcgcacggcatcacgctgcgcggcaacgctgaagaaggcgtgacccctgcgggcgcccggctgctggcggaaaaaacctcgccgccgctctcccgattggccgtcaccttcctgaaagtgtccaacaatggttacggcgaggtattgaccaaagcgatgggccgcaagacgcagggcaagggggactgggccgccggcctgcaggcgatcggccggtttgtgcaaagccagggcatcgaggccagcgcgtatcgccaggtggacggttccgggctgtcgcgcatgaaccagatcacgccgcagcagctgacgacgctgctgctggcggccagaaaacagccgtggttcgccgagtggtataacgccttgcccatcgcgggccagccggggctgctggtgggcggcacgctgcggagccgcatggtgaaaagcgcggctgccggccgcgcccacgccaagagcggttccatgaccggggtatcgtcgctcagcggctatgtcgactcggcgaccgggcggccgctggcgttcgccatcatcagcaacaactacctggtgcccggcgcagaggtgaaagcgctggaggatcgcctggtcgagacgctggcggcctgtgacgcctcggtggtgtgccgctga

SEQ ID NO: 424229 - DNA, 936 bp, Serratia marcescens
atgagcctcattgaaaccacgttgaaaaaatgggatcgcgccgcgattgtccgctcccgtcctcgccgccttctcaacgaacaggacagccaatcaacccttttcttccccctcgaacgtctgccgctgtgcctccatccgcgcgttgccgcgctcggtgaacaagcattgcgctatattcaggtgcaaaccctctaccactacctgaatggcatcgccaacatcgagttggatatcatcaatgattccagttacaagctctacaaaaacgcggtcggcgtagactttccgcttgaaatgcgcttagacgcgctgaccgtggtcgtggatgagtcctatcacgccctggtggcgctggatctgatcaatcaggtagagcagatgacgtccattgcgccgttgccgatgccaaaagacaccgaggcttcctatgccctggcgcaatcgttggcaatgggggacgaacggctgcgcgaactgctgcgactggtgtgcgtgtctctgtcggagcaggcgctgacgaccgatcttatcgatgtgatcaacaacgaagatattttcccgaccttctatctggtgatgaaagatcacgttgcggatgaaggccgccatgcccgcttctcacagcaggtgctaagccatatctggcgccacagcgacgcggcgaccaagcaagcgttgcaacaaccgattttggctttcctagaaggctacgcaaccgacgctatcgccaaagatttcagcgcctgcatgttgcgccaactcggactggccgaagcggaaattatcgacatcatcgcagatacttatccagcaacgcatgttaaaccgtgggaaaccaataatatcgtcacggaacaaatgctggtggcactgaataaatcgggcattctggctgatttgcctatcgccgatgcgctgcatgcaaaaatctaa

SEQ ID NO: 424230 - DNA, 5709 bp, Serratia marcescens
atggaattacttcatattggctatttcggcgacagtgcctgcggtaaattattaacagacgaaatccaggaatacggccatcaggttagttttatcagtctcgaacgccgtccaatcgaaaaattcgatcttattatcaccactgaaaataacgctgaaacaatacgacggctgcaacagcagggaaaaaatctgctgacgatcgtaaccaataaaaaaaatattagcgacattgataccctgcaaaaccaagaacacttttctctgtactttagctccgccggccaaaccgcttatctgtgcgacgcgctgtccgatatggccgcaggcgcccaacttcccctgctgcaggaaaagcttgtcgacattgtggtcgagctttcgcgtggcggcttaccgcacgcgcaagacactccctaccgtttggcgcgtaaatactatgccgaatcaccgacgcgcatgcgcgagttgaccgcattgctgatggaacgccttggcgatcagatgcaggggcgttgcggcagcgatctctgccatctcacctggcaacccggcgccgacttccatacgctgccggtggcggacatcacgtcccccgcacagctgcaacatttcttctttaatgaaaccggcgcgctcaaacaggggcgctatgcccagccacgagcgatggtcgacgtagcggcttgcggtgacggcactcagcttaccctgtatggcgacgacatgcgtttcaacgcgttcaccgactatcttgacgcgctattggcagatccggccgatcccgtcgccgcgcccattgttactcaacctcaaacgttgcatcgcctgagccaattcaacgcaaccgacgatgccaagctgctggcgcacgacgtcatcgctttgttccgccacgccgccgccgctcatccgcaacaggccgcgctgcatgccgatggccagatatacagctatggcgagatcgatcgcgcctcggatcagtttgcctgttggctgcttgaacacagcggggccgccagctcggtcgtcgccgtctcgatggacaagtcagcgacgctgctgatcgtgctgttggggatactgaaaagcaataaaacctatgtactgctcgatccgcaggcgccagcggcgcgcaatcaaagcattcttgacgacgtgcagcctgcgctgattttggccgactcgccgttgcactctggcgacgcgccgtgcattgcgccatcaagcattgactaccgttcgctgaacatccatgcggagcaactccctcaatcgcgagacgcactggcctacgtctgctatacctccgggacgaccggcaaacccaaaggcgtcatgatagggcgtgagggcctgagcaacgtggcgcaaaaccaccgcgatttcattggcctggcgcaaggcagtcgcgtgctggccatcgcctcgttgggtttcgacgccttcggctgggacgtctatggcgcgttggtcagcggtgcgacgctttatctggcgccctcggagctgcataccgatgtcggcgcgctgcacgattatctgactcgacacgatatcggccatatcactattacaccggcaattctggaattgttgccccgcgaaatgtggccgggactgcggacaatgatcgtcatgggagacgcaccgccagcggacgtcgtcacctggtgggccgagcgcacccgattgtgcaacggttacgggccgaccgaggcttctattgccacttcgctgtgcgagtatcgtccaggtgttccctggaactgtattggcaaaccgctgaaaaactaccgttgtcacatccttgatccccaccacaatccactgccggtcggttttgagggcgaactgtgcatcgccggcagcggcctggcgcacggttacctgcatcaagaggcgctgagcgcagagaagttcattacctgtcggctaccgtatatggcggccgaagagcgcctttatcaaaccggtgacatcgccaaatgggacgaacagggcaacattattttcgtcggccgccgtgatcaccaggtgaagatacgcggtgtacgcatcgaaatgggcgaagtggaaagcgccgtccgcagtcaccccctggttgacagcgcctgcgtggtggctcgcagccagccctcgggcaaaattctcgccgccttcgtacaacccgcttcgcctgagctgacgatcgacgcgctgcgtcacgcgttggtcacacagctccacccagccgcgatccccagcgtctttattttcttgccggcgctgccgctgaccatcaatggcaagatcgcccgtcaacagttggaaaactggccgctggatgaacgaaatgagcgcctgacgccaccggaaacagaaactgaggccattctcgagcgcatcgtggccaacgccatcggctgtccgcaagccgacgtcacacaggagttcatcaacctgggcgcacactcgctgacaatgagcaaaatcgtcgcgctcgtcgcacgcgatctttgctgccacctgagcatcgccgatctgttccgccataatacggtacgcaaactggccgaatatatcgagaataaggccgttgccgcggagcgcgccatcgctatctgcgacgaacgccgcgcgccgctcagccctcagcagaacctgctctggtacctgagcgcattgaatcctgacgactgcagttacaacctgccgctggcgatagacatccagggctcgctcgatctggcgcgctttgaacaggcgatcaattttatctatgaaaaacatgaaagcctgcgcactcgcttcgccgaaaccgacggtgtcgcctatcagttggcagaaccgcataccccgattcgtcttgccgaccactgggtggaaggccaaacgctgtcggcagagaagtgggtgcgccaactgtgtgccacgcctttcgacatcaccgctcggccgccgctggtgcttcggctggtacagtatcatcagcagcaccatgttttgatttgggtaaaacacaacataattaccgacgcctggagcgaacagctgatccttaacgatctgtggcagcgctataacgagctcgacgatcacaatgggtttgacgcgccgcaaccgcagatccaaaccattgacatcgtcaacagcggcatcgcaccacctgcgccggcggatgtcgcttactggcaacagcaactgcaaggctgccgcgaactggacttcccgctggataaaccacgcccgctaatgccgacacatgccggagaacgcatccattatcagctgcagcccgacgtggccggtctgctggcgtcacggggcaaagcgctgggcgccacgcctttcgccttgctctgcgcggcattaagtttactgctcagccgttatacccagcagcaggatatcgtcatcggcaccgccattgcagcgcgggacaacctggatcaggcgcaggtcagcggcttccatgtcaataccgtaccgctgcgtatccaactgagcgaacaggacaccctggccgagctgatcggtaacatgatggaaacctgcatcggcgcctatcagcatcagcagctctcgttcgaccggatcttgcaccagatcgaatacgagcggatgtcgaacaaaaatccgttattccaaatcatggcgatcctgcagaacgccggcgacgtatgccaacaaaacctgcacgattgcacgctgcatcgcttgccgctttcgtccggcttctcgatgttcgatatgacctggaactttagtgtggaacaggacgccgtcgccatcgaactcgattacgccagcgaactgttttatcccgccagcatgcagatgctgttggacaactatcagcaaacgctgcggcaactgctcaccctgccggccaacacggcgcagcgtgccctcaacccgctatgcgaacgggagcaacattggctgcaacagttggccgtcagctcggacgctggttcaggtgactcgctgctggtgcagattgatcgcttggcacaaacccagcctgacagcctcgccgtcagctgcgaacggcaacagtacagctaccgtcagctgtgggcgcagtctgagcgcatcgcgcatgcattgcagcgcatcgacagcaagcctttttcggtcggcgtcatgatggagaaaagttgccacgtcgccgtactcctgctcggcgtgctgagagccggcaaacactacgtgccgattgacgtacactacccggccgaccgcgtgagctacatgatcgagaacgcgcaagcccggttgctggtgaccgatggtgagccagagcaacgttgggccagtcccgccgtcggtttcgactcgctggtttctcaacctgcagcggccgacacattgccgatcccagccgacgatacgctggcctacatcatgtacacctcaggctcaaccggtaaccccaaaggcgtgatgatctcccacggcaacctgaacaatttcacccacgacttcgtcgggcggctggcgctgagcgcgagcgataaggtgctcagcctgaccagcatcagtttcgatatttttgggttggaactgttctgctcgctggccggcggcgcgcacgtcacgctgtgtccacgagaaaccgccatggatccggtcaagttgtatcactttatcgagcgacagcagcccagcgtgattcaagcgacacctaccgtctggagcaccatcgtccaccatctgccggcggcgggccagcgccccctgaccgtgctgtgcggcggcgagaagatgccggcggccttgttgacgcaattgcgacgcatcgcgacacgggtgctgcaggtgtatggcccgacggaaaccaccatctggtcgacctgcgccgatctgactcacgaaggcgcgagcgactgtatcggcacgccgatacagtcaactgacgttctggtcatggatcaggccggcaacccgatgccaagcggcgcatttggtgagctatggctgggcggcgcaggggtatcaccggggtattggcgcaacccgacgctgagcgataaggtctttctacggcgccaggcgttcggcaccgagcgctatatgtaccgcaccggcgacattgtgcggtttaatcgtcaggggcagctggaatacctcggccggaacgatcaccaggtcaaaattcgcggccaccgcatcgaattgagcgaaatcgatctcagtttatcctctctcgacaatatcgagcggtcgctcagcttaattgtcggtgaaggccagcaggcccgcatcgtcagctacctgcagttaacgccgggagaggagctgaatgaaaaagcggtgcgcacggcgctgaaagctcgcttgccgaatatcatgatcccgtccggttttgtggtgctgtcggccttcccgctcaccaacaacaataaaatcgacattcgtcggctaccggcgccggaaacccgctactcggcttccgaagcggactacacgcctgcggccaacgaggcggaaagcgccatgcagcatatctggcaacaagtcttgtcgcagacgcagatcagcgtctgcgacagcttcttcagcctgggtggaaattcactgcagatcccgcaactgctgcacgccattcgtcaacagatgggcgtctcgctgactatccgcgaattcatcatgcacagccagatccgcgaactcaccgcgctggccttgagcaaaactgccggggtcgccgatgaaacgcattga

SEQ ID NO: 424231 - DNA, 813 bp, Serratia marcescens
atgaaacgcattgaggtgtaccaccatggacgttgtcatcaccttgactaccgagagccgctgcggctctcggccaggctggacttctccgataacccgaccaacctttatggcgtggcccccgccgattcggcgccgctgagttacggcgataccgtcgccagcgtgcgtcatggcggggtctgcaacgccgagcgtatcagcctggtgccacactgccacggcacgcacaccgaatgcatcggccatattcttgctgaaacgcacaacgtggcggatttgccgcttgaaccgttcatcgccgccaccctgattcgcgtcaggccgcaacgcgcggacgggaccacggagagctataacgccagcgctgcctctgaagattggctgattacccgggcggcgctcgatgacgcgctggcgccgttgtcgggcgactacctgcaggctttggtgatagcggtcgagacgccgagcgatttccgcgccgcagcctgcgcgccctacttcagccatcaagctctggcgcgcatcgtcgaactcggcgtccagcatttgttggtggatattccgtcgatcgaccggctatacgacggcggacgcatggacaaccatcgccgtttttgggggcttgatgcccccgacaggccgcactccgggcgcaaatacgcctcagtgaccgagctgattcaggttcccgtgcacgccgcggcgggacattattttctgaccattcaactgccggatttgagcggggatgcccttcccagtcggcccgtcctattttcgttttctacagggaaagtgacatcatga

SEQ ID NO: 424232 - DNA, 738 bp, Serratia marcescens
atgaattacgccagctatctgcagctaaaccagctgctgtcactgcaacagccagcctcgccgtctgcggaacaccgcaatgaaaacttgtttatcatcactcatcaaacctacgagctctggttcaagcagttgatcgatgagcttcatctggcgattgcgctgatcgaagaaggagatataccggcggcgatcgaaacgatgacgcgcgtcaataccattacccaaaccgtggtgaatcagatcgctgtgatttgcacgctgaagtttcatgaattccagcgttttcgcagctatctcggcaccgccagcggtttccaatcctaccagtttgccggcatagaagcgctgctcggcaaggaaaacccaaagaaactacaacagtatcaaggtgatgaagaggcacagcgccgattggcggctattatccaaccggtttccctatggcaggcgatacgcggccacctgatgcgtctcaatgaccagcccaatcaggcggcgcaaggtttcgacgacatcatcaggcaatcgctgacgcgttcaggctgcgagtcgctgctgctcaaccaactgcttgatttggattcactgctgcaagagtggcgctaccgccatgtgaaactggtggagcgtacgatcgggcagcggaaaggtaccggcggttcatcgggttcggactatcttaaatctacgctgttcacgccgatcttcgatgaattgtggaacgccatcaactga

SEQ ID NO: 424233 - DNA, 768 bp, Serratia marcescens
atgcattgcacccacttccccaacgcccccctcggcctgaaaccgctgacgccgggacgccagggcagcctgcggctgatcgcttttccccacgccggcgccggagccactgcctttcagcgatggagccccgcgttgcatcaggacatcgaactctatgccgtgcaatatcccggtcgagaggagcgggcgcacgaagcgccgctctgccaaccccaatcgctcatcaatcaactgatatcggcactgcagccactgcaggataaaccgctgatctttttcggccacagtcttggcggacgggttgcgctggcgttagcgatggcgctgccccaaccgccgctgcagttgatcatttccgccagttcatcgccctttctggcgcgccacagccagttgctgaggatgcctcgtgccgctttgttgaacgcgctttgtgccggcgagggcctggatgagtctctcatcggcgacagcgcgctggtcgattactatctgccgctgatccgtgccgatctgttgctgtccagccaattgcttttccctgcgcaaccgggttaccacgccccgctggcgatgttctatggtgaaaacgacaagttgattgatcggcaggatttgctcgactggcgccggatcgcgcaaggcgattttcagcagcgcacttttgccggcggacatatgtatatcaccacgcagcgcgaggcggtgatagccggcgttcaccagttgctggctggccgcctgagcgaaccggccagccggtaa

SEQ ID NO: 424234 - DNA, 768 bp, Serratia marcescens
atggcgtggcttcaggcgcaggacagttttaatccggatacgctcgacaacggcgtgctcgggatcgccgccgaactggcgcagcacgactctggcacgcattggcatgacaggggccagttgctgttctgtcagcaaggcagcatgcgtatcacgctcaaccaaagcatctgtatgctgccgccgggcagagttgcctggatcccgccgcaagtggctcaccgcgttcaggtcaacggcgtagtcggttaccgttcgctttatctcgacgccgatcgctatgcctgtctgcctgcgcagcttgccgtactgacagcctcgccgctgctgcgcgaggtgttggaacgcatcgcgttcgccgcattcgacaccgactggcagcatgggcctcacgccaatattctggcggtctgcctggacgagatcgccgccgcgccgcgcgaactgacgttgctgccgctgcccagcgaccggcgcctgcgccatctggccaatctggacatgcttccgccgctgcacgagctatcgcgctacagcggcgcttccgagaaaaccatcagccggattttccgccgtgaaaccggcctcagttatcaacagtggcgtcagcaatggcgcctgatcaaagcaatagagatgctggccgcagggctgagccaatccgacgtcgccggtcggctggcgttttccagcgacagcgccttcgccacttttttcaagaatatggtgggctgcccgccgagggcgtatatggagagaagaaagtaa

SEQ ID NO: 424235 - DNA, 1653 bp, Serratia marcescens
atgcgtttttcgctgaaaaccaccgcatgtgcgttggccgtttccctgacgttgctgtcgggggccgccagtgcctgggaaaaggataagacctacgccatcaccattctgcataccaacgaccatcacggtcacttctggcagaacgatcatggcgaatacggcctgggcgcgcagaaaacgttggtggacggcattcgtcaggaagtggcggcgcagggcggcagcctgctgttgctgtccggcggcgatatcaacaccggcgtgccggaatcggatttgcaggacgccgagccggacttccgcggcatgaacctggtgggttacgacgcgatggcgatcggcaaccacgaattcgacaacccgctgagcgtgctgcggcagcaggaaaaatgggcgaccttcccgctgctgtccgccaatatctatcagaaaagcaccggccagcgcctgttcaagccttacgccttgttcgacaagcagggcatcaagattgccgtgatcggcctgacgaccgacgacactgccaagataggcaacccggagtacttcaccgacatggagttccgcgtgccggcgcaggaggcgaagcaggtggtggagcaactgcgtaaggacgagaagccggacgtgattatcgccgccacccatatggggcactacgacaatggtgaacacggctcgaacgcgccgggcgacgtggaaatggcgcgcagcctgccggccgggtatctcgacatgattgtcggcggccactcgcaggatccggtgtgcatggccggcgacaaccgcaaacaggcagattacgtgccgggcacgccgtgctcgccggatcgccagaacggcacctggatcgtgcaggcgcacgagtggggcaaatacgtgggccgcgccgacttcgaattccgcaacggcgagctgaagctggtgcattatcagctgatcccggtgaacctgaagaagaaggtggagaaggcggacggcaccagcgagcgggtgtactacacccagcagatcgcggaagacccgaccatgatgaaactgctgacgccgttccaggagaagggcaaggcgcagttgggcgtgaagatcggcagcgttaacggcaagctggagggcgatcgcagcaaggtgcgcttcgtgcagaccaacctggcgcgggtgatgctggcggcgcagagggagcgcgccgatgccgacttcgcggtgatgagcggcggcggggtgcgcgattcgattgaaagcggcgatatcacctataagaacgtgctcaaggtacagccgttcggcaacaccctggtgcatgtcgatatgaaaggcagcgaggttgagcagtacctggcggtggtggccaacatgaagccggattccggcgcctacgcccagttcgccaacgtcagcctggtggcggacggcaagggcgtcagcgaggtgaagatcaacggccagccgctgcaggcggataaaacctaccgcatggcgacgctgaacttcaacgcgctgggcggcgacggctatccgaagctggacgggctgccgagctacgtcaacaccggctttatcgacgccgaggtgctgaagcaatacatcgagaaacattcaccgctggatgcggcggcctacgagccgaagggcgagatcgtctatcgataa

SEQ ID NO: 424236 - DNA, 1221 bp, Serratia marcescens
atgaccgacagtagccaaagcgcgatgccgcccgccaagggcagtgcggtgaaaggcaccgccttctcgatcctcggcgccatcagcgtgtctcacctgctcaacgatatgatccaatcgctgatcctggcgatttacccgatcctgcaagccgattttcacctcagcttcgtgcagatcggtatgatcaccctgacctatcagctgacggcctcgctgctgcagccgctgattggttattacaccgataaacacccgcagccttattcgctgccgatcggcatgggctttaccctgtccggcctgctgctgctgtcggtggcgagcaccttcccgctggtgctgctggcggcggcgctggtgggcaccggctcatcggtgtttcacccggaatcctcgcgcgtggcgcgcatggcctccggcgggcggcacggcctggcgcagtcgctgttccaggtcggcggcaacttcggcagctcgctagccccgctgctggctgcgctgatcatcgcgccttacggcaagggtaacgtcgcctggttcacgctggcggcgctgctggcgatcgtggtgttgctgcaggtcagcaagtggtatcaacatcagcaccgggcaactaaagggcagccgaaaagcccatcaacgctgaaaccgctgccaaaacgtaccgtagtctactcgctgggcatcctgctggtgctgattttctctaaatacttctatctggccagcatcagcagctattacaccttttatctgatacataaattcggcgtttcggtgcagaatgcgcaaattcacctgttcgccttcctgttcgcggtggcggcaggcaccattatcggcgggcctctcggcgacaagatagggcgaaaatacgttatttggggctctattctcggcgctgcgccgtttacccttattttaccttatgcatcgctctattggaccggcattttaacggtgattatcggggttattctcgcctcggcgttctccgccattttggtctacgcccaggagctgatccccggcaaggtgggcatggtttccggcttattcttcggttttgctttcggtatgggcggattaggcgcggcagttcttggttatgtcgcggatttgaccagtatcgaactggtctaccaaatctgtgctttcctgccgctgatcggcattatcaccgcactgctgcccaatatggagcataaaccgcaataa

SEQ ID NO: 424237 - DNA, 1692 bp, Serratia marcescens
atgcataattcaacaccgctcattaccaccatcgtcggagggttagtactcgccttcctcctcggcatgctggcgaaccgcctgcgcatctcccctctggtggggtatctggccgcaggcgtgctcgccggcccgttcacccccggtttcgtcgccgatacctcattggcgccggaactggcggaaatcggcgttatcctgttgatgttcggtgttggcctgcacttctctttgaaagacctcctcgcagtaaaatctatcgccattcccggcgccgtagcgcaaatagccgtcgccaccctgctcggcatggggctgtccaagctgctcggctgggatctgatctccggcctggtgttcggcctctgcctctccaccgccagcaccgtggtgctgctgcgcgcgctggaggagcggcagctgatcgacagccagcgcgggcaaatcgccatcggctggctgatcgtcgaagatttggcgatggtgctgacgctggtattgctgccggccttcggcaacatgctgggcaacgacaacgccagcagcagccagctgctgatggagctggcgctgaccatcggtaaggtcatcgcctttatcgcgctgatgatcgtggtcggccgccggctggtgccgtggatcctgtcaaaaaccgccagcaccggctcgcgcgagctgttcaccctggcggtattggcgctggcgctcggcatcgcctacggcgcggtgaagctgttcgacgtctccttcgcgctgggcgctttcttcgccggcatggtgctgaacgagtccgaactgagccaccgcgcggcgcacgacaccctgccgctgcgcgacgcattcgcagtgctgttcttcgtctcggtcggcatgctgttcgatccgatgatcgtgattaacgaaccgctggcggtgctggcgacgctggctatcatcgtgttcggcaaatccgccgccgcgttcctgctggtgaaaatgttcggtcactccaagcgcaccgcgctgaccatttccgccagcctggcgcaaatcggcgagttcgcctttattctggcgggcctcggcattgcgctcggcatgatgtcggaacacggccgcaatctggtactggccggcgccattctgtccatcatgctcaatccgctgttgttcaccctgctggaacgctatctggccaagaccgaaaccatcgaagaccaaatcctcgaagaggcggtggaagaagagaagcaaatcccggtggatatgtgcaatcacgcgctggtggtcggctatggccgcgtcggcagcctgctgggcggcaaactggccgaagcgggcatcccgctggtggtgatcgagaactcccgcccgcgggtggaagcgctgcgcgaacagggcatcaagacggtgctgggcaacgccgccaatccggaagtgatggatctggcgcggctcgactgcgcgcgctggctgctgctgaccatccccaatggctatgaggccggcgagatcgtcgcctcggcgcgcgccaagcggccgaatatcgagatcatcgcccgcgcccactacgacgacgaggtggcctacatcaccgatcgcggcgccaaccaggtagtgatgggcgaacgggagatcgccaacagcatgctgaacatcctgcagctggacaccctgagcgaagaagaaaaaatgggcggctgcccgatctga

SEQ ID NO: 424238 - DNA, 1305 bp, Serratia marcescens
atgaaatttcctggtaaacgcaagtccaaacactatttcccggtgagcgcccgcgatccgcttctgcagcaggcccagcccgaaagtgaaatcagcacctcgtatatcgtcggcatcgaccagacgctggtggatatcgaggcgaaggtggacgacgcttttgtccagcgctacggcctgagcctgggccactctctggtgatcgaagacgacgtcgccgaggcgctgtatcaggaactgaatgaaaacaacctggttacccatcagttcgccggcggcaccatcggcaataccatgcacaactattcggtgctggcggacgatcgctcggtactgctcggcgtgatgtgcagcaacgtgaaaatcggcagctacgcctaccgttacctgtgcaatacctccagccgtaccgatctcaactatctgcagggcgtagatggcgccatcggccgctgtttcacgctgattggcgaaagcggcgagcgcaccttcgccatcaacccgggccaaatgaaccagctgcgcccggaaagcattcctgaagaggtgatcgccggcgcgtcggcgctggtgctgagctcttatctggtgcgctgcaaggaaggggagccgatgaaggccgccaccctgcaggcgatcgaatacgccaaaaagcacgacgtgccggtggtgttgacgctgggcaccaagtacgtcattgccgacaacccgcagtggtggcgcgacttcctgaaggaaaacgtgacgattctggcgatgaacgaagacgaagcgctggagctgaccgggctgagcgatccgctgaccgcctcggacatggcgctggagtgggtggatctggtgctgtgcaccgccgggccgaacggcctgtatatggcgggctacaccgaagaggccaacaagcgccagacccagcacccgctgctgccggggcatatcgccgagttcaaccgctacgaattcagccgcgccatgcgccgcgaacactgtgaaaatccgctgcgcgtttattcgcacatcgcgccgtatatgggcgggccggagaagatcatgaacaccaacggcgccggcgacggcgcgctgtcggcgttgctgcacgatatcgccgccaacggctatcaccgccacaacgtgccgaactccagcaagcacgtgcgcagctacctgacttactcctccctggcgcaggtgtgcaaatacgccaaccgcgtcagctaccaggtgttgaaccagcattcgccgcgcctcactcgcggcctgccggagcgggaagacagcctggaagagtcttactgggagcgttaa

SEQ ID NO: 424239 - DNA, 963 bp, Serratia marcescens
atgaagcaagagaaacacggcgtattgctggtgaacctgggcacgccagatgcgccgacctcgtcggcggtcaaacgctatctgaaggaattcctcagtgacgatcgcgtggtcgacacggcgccgctgatctggtggccgatcctcaacggcgcgatcttgccgatccgttcgccgcgcgtggcgaagctctatcagtcggtgtggatggatgaaggctcgccgctgctggtgtacagccgccgccaacagcgggcgctggcggcgcgcatgccgaatacgccggtggagctgggcatgagctacggctcgccgagcctggcggaagccatcgacaagctgctggcgcagggcgtgaccaacctggtggtgctgccgctctatccgcaatattcctgttccaccagcgcggcggtatgggatggcgtagcgcgggtgctgaaaggctatcgccgcttgccttctgtggccttcatccgcgattacgccgaacacccggcctacatcgccgcgctgcagcaaagcgtggagcgctcgttcgccgagcatggccagccggatcggttggtgctgtcgttccacggtatccccaaacgctatgcgcgcctgggcgacgactacccgcagcgctgcgaggatacgctgcgagcgctgagcgccacgctgccgctggcgccggagcgagtgatgatgacgtaccaatcgcgcttcggccgcgagccgtggctgacgccgtacaccgatgagaccctgaaggggctgccggcgcagggcgtgaagcacattcagctgatttgcccgggtttctcggcggactgcctggaaacgctggaagagatcaaggagcagaaccgcgagatcttcctcgaggccggcggcgagaagtttgagtatatctctgcgttgaacgatgagccggcgcatatcgatatgatgcagcagctggtggcgcagcgcctctaa

SEQ ID NO: 424240 - DNA, 1164 bp, Serratia marcescens
atgaaaacgctgaaaaaagtggttattgccccggattctttcaaagagagcctgagcgcgctcggcgtcgccgacgccatcgagcgtgggttccgccaaatttacccgcaggcgcactacgtgaagctgccgatggcggacggcggcgaaggcacggtggagtcgatggtggcggccaccggcggtgaaatcgtccaggtgacggtcaccgggccgctgggggagccggtgcaggggttctatggcctgctgggcgacggcgaaaccgcggtgattgaaatggccgccgcctcagggctgcacctggcgccgcccggccggcgcgatccgcgcatcaccaccagctacggcaccggcgaactgatgctggcggcgttggaacgcggcgtgaaggcgatcattctcggcatcggcggcagcgccaccaacgacggcggcgccgggatgatgcaggcgctgggcgtgaagttgctggataaggcacgccggccgctgccggcaggcggagcggcgctggcgcagctggcgcatctcgatctcgccgggctggatgcgcgttggcaatgggtgagcgtgaccgccgcctgcgacgtcgataacccgctgtgcggcgaaaagggcgcctcggcggtgttcgggccgcagaagggagcgacgccggagatggtggcgcagctcgatgcggcgctgcatcactatggcgagctgctggaacgggaaaccggccgcgcggtgctcacccagccaggggcgggcgcggcgggcggcatgggggcggcgctgctcggcatgctcaatgcgcgtttgcggccgggcatcgagatcgtcaccgaaaccctgcgcctggatgaggcggtgcgcgatgccgatctggtgatcaccggggaaggccggctggacagccagtcgatccacggcaaaacgccgatcggcgtggcgcgggtggccaagcgccacggcgtgccggtgatcgccatcgccggcagcctgacgtcggattaccaggtggtgcatcaacacggcatcgacgcggcgttttcggtgctcgatggcatcgtgacgctggaagaagcgctggcgggcgccgatcgcaatctgcaggtgacggcgcgcaacgtggcggcggtgtggcgactggcgcaagggggaggcccacaggcatag

SEQ ID NO: 424241 - DNA, 1266 bp, Serratia marcescens
atgacaaccgtatccactctgggggcgctggtggcgttagccgtcgccatcgtcctgattctacgcaaggtgccgccggcttacggcatgatcgccggcgcgctggcgggcgggctgtgcggcggcgccgatctggtgcagaccgtaacgctgatgatcggcggggcgcagggcatcaccaacgccgtgatgcgcatcctggcggcgggggtgctggccggggtgctgatcgaatccggcgcggcgcacaccatcgccgaaaccatcgtgcgcaaggtgggcgaaacccgcgcgctgctggcgctggcggtggctacactgatcctgacggcggtgggggtatttatcgacgtggcggtgatcaccgtcgcgccgatcgcgctgtcgatagcccaaaaggccggcatttcgcgcgcggcgatcctgctggcgatgatcggtggcggcaaggccggcaacgtgatgtcgcccaacccgaacaccatcgcggcggcggacaatttccacgtgccactcacctcggtgatgatggccggcatcgtgccggggctgtgcggcctggtggtggcctatctgctggcgcgccgcctgagcgataaaggcagcaaagtgatggccgaagagctgactcagcatgccgaaggggcgcggccgggcttcgctgcagcgatcagcgcgccgctggtggcgatcctgctgctgtcgctgcggccgatcgccggcatcgccgtcgatccgctgatcgcgctgccggccggcggcttggcgggcgcgctgctgatggggcgcatccgccagtgcaatcagtttatggtctccggcctgtcgcgcatggcgccggtggcgatcatgctgctcggcaccggcacgctggcgggcattatcgccaactcggcgctgaaggatgtcttgattaacggcttaacgcacaccgggctgccggcctggctgctggcgccgctgtccggcgcgctgatgtcgatggcgaccgcgtcgaccaccgccggcaccgccgtggcttccggggtgttcagctccacgctgcttgagctgggcgtgagcgggctggccggcgcagcgatgatccatgcgggcgccacggtgctggatcatctgccgcacggcagcttcttccacgccaccggcggcagcgtcaatatggcggtgcacgagcggctgaagctgctgccgtacgaaacgctggtggggttcaccattgcggcaatctcggcgctgatgtttggcgtatttaacctggcgggataa

SEQ ID NO: 424242 - DNA, 1134 bp, Serratia marcescens
atgctcagacaaaccaatcttctggcggaagccaccgcgcgccagatcgtccagcgggcgatgggcatcatcagccattccgtcaacgtgatggacagcaacggcgtgattatcgcctccggcaactcgcagcgcctgttccagcgccatgaaggcgccgtgctggcgctggcggagaaccgggtggtggaaatcgaccgcgccaccgccgaacatctgaagggcgtgcggcccggcatcaacctgccgttcagctttcgcaaccagcgagtgggggtgatcggcatctccggcgaaccggccgaggtgcgcgcctacgccgagctggtgaagatggcggcggagatgatggtggagcaggcggcgctgctggatcagcaccagtgggaaaaacgctaccgggaagagctggcgaatcagctgctgcagccccagccgaacaccgcgtcgctggcggcgatggcggcgtatttgggattggatctgcgccaggcgcgcatcgtgtggatcgtcgagctgcaagaggcgcagccgcacctgctgcgcgagctgctggcggagctggaggccacccagcgcgacgcgttgatcgccattaccggcttcaatgaaatgaccctgctgcgcccggcctgcatggtgcagggcgaatggagcctgaagctggagcgccaacaggcccagcgtttgcaaaaccaactcaaacaccgcttccgggtgcggctgatcgtcggcggtttttatgacgatccgcaaagcgcctatcgttccagcctgacggcgcgcgccactcaggcgatggcgcagcgcctgaaactgcgtcacgccacgctgttctaccacgactacccgctgccctcgctgttgtgcgatctgggggaggattggcgcgcgcaggagctgggtcgcccctggcggacgctgggcgaacaggacgaaaaaggcgtgctgcgcggcacgctgcgccactatttttcgcagaattgtgatcagacgcagaccgccgcgcagctgcatatccacgtcaataccctgcgctatcgcctgcagcgtatcgaagcgataaccggcatgaaaatcaaccaattaaccgacgctctgcggttatatatcggcatgctgatgcacgactga

SEQ ID NO: 424243 - DNA, 645 bp, Serratia marcescens
atgcgtatcattctgctgggcgctccgggcgctggtaaaggtactcaggctcaattcatcatggagaaatacggcattccgcaaatctccaccggtgatatgttgcgcgcagccgtgaaggccggcagtgaactgggcaagcaggcgaaagagatcatggacgccggcaagctggtgaccgatgagctggtgatcgcgctggtcaaagagcgcatcgctcaggaagattgccgcaagggcttcctgctggacggtttcccacgcaccattccgcaggctgacgcaatgaaagaagccggcatcaacgtggacttcgtgctggagttcgacgtgccggacgagctgatcgttgaccgcatcgttggccgccgcgtgcacgcgccgtccggccgcgtataccacgtgaagttcaacccgccgcaggtggaaggcaaagacgacgtgaccggcgaagagctgaccacgcgcaaggacgatcaggaagagaccgtgcgcaagcgccttgtggaataccatcagatgaccgcgccgctgatctcttactacagcaaagaagcggcggcgggcaacacccaataccgcaaaatcgacggcacccgcaaggtggccgaagtgagcgcagagctggcgaccatcctcggttga

SEQ ID NO: 424244 - DNA, 1872 bp, Serratia marcescens
atgagtatgaaaggtcaagaaacccgcgggttccagtctgaagtaaaacagctgcttcatttgatgatccattcgctgtactccaacaaagaaattttcctgcgcgagctgatttccaacgcctctgacgccgccgacaagctgcgtttccgcgccctgtccgcgccagagctgtacgccggcgacggcgagctgcgcgtccgcttgtccttcgataaagagcagcgcaccctgaccatcgccgacaacggcatcggcatgcgccgcgaagaagtgatcgaaaacctcggcaccatcgccaagtccggcaccaaagcgttcctggaatccatcggctccgatcaggcgaaagacagccagctgatcggccagttcggcgtcggtttctactcggcgttcatcgtggcggacaaagtgaccgtgcgcacccgcgccgccggcgccgccgatgacgaaggcgtgttctgggagtctgccggcgaaggcgactacaccatcgccgacatcaccaaagagacgcgcggcaccgaaatcaccctgcatctgcgcgaaggcgaagatgagtacctcgacgcctggcgcctgcgctcggtgatcggcaaatattccgatcacatcgccctgccggtggagatcgaaagcaaaaacgaagaagacgacaccgtcacctgggagaagatcaacaaggcgcaggccctgtggacccgcagcaaggctgacgtgaccgacgaagagtacaaagaattctacaagcacatcgcccacgacttcaccgatccgctgagctggagccacaaccgggtagaaggcaagcaggagtacaccagcctgctgtatatcccggcgcaggcgccgtgggacatgtggaaccgcgatcacaagcatggtctgaagctgtacgtgcagcgcgtgttcatcatggacgacgccgagcagttcatgccgaactacctgcgcttcgtgcgcggcctgatcgactccaacgatctgccgctgaacgtgtcgcgcgagatcctgcaagacagccgcgtgacgcaaaacctgcgcggcgcgctgaccaagcgcgtgctgcagatgctggataagctggccaaagatgacgccgaaggctaccagaaattctggcagcagttcggtctggtgctgaaagagggcccggcggaagaccacggcaaccaggaagcgatcgccaagctgctgcgctttgcctccactcacggcgacagctcggcgcagaccgtgtcgctggaagagtacgtcggccgcatggcggaagggcaggagaagatttactacatcaccgccgacagctacgccgccgccaagagcagcccgcacctggagctgttccgcaagaaaggcatcgaagtgctgttgctgtccgatcgcatcgacgagtggatgatgagctatctgaccgaattcgacggcaagccgttccagtcggttagcaaagcggatgaaacgctggataaactggcggatgaaaccgaagagcagaaggccgccgagaagcagctggagccgttcatcgaacgcgtgaaaaccctgctgggcgagcgggtgaaggatgtgcgcctgacgcaccgcctgaccgatacgccggcgatcgtggtgaccgacgccgacgaaatgagcacccagatggccaagctgttcgccgccgccggccagcaggcgccggaagtgaagtacattttcgagcttaatccggagcatgctctggtcaaacgcgcatccgatgtgggcgataacgaacatttcgccgaatggatcgacctgttattggatcaggcgctgctggctgaacgcggcacgctggaagatccgaacctgttcatccgtcgcatgaacaagttgctgtccgcctga

SEQ ID NO: 424245 - DNA, 606 bp, Serratia marcescens
atgcaaaccagcccgctccttgaatccctgatggaggcgctgcgctgcctgccgggcgtcggcccgaaatcggcgcagcgcatggcgtttcagctgctgcagcgcgatcgcagcggcggcatgcgcctggcgcaggcgttgacgcgcgcgatgtcggaaatcggccactgcgccgactgccgcaccttcaccgagcaggacgtctgcaccatctgcgccaatccgcgccgtcagcaaaacggccagatttgcgtggtggaaagcccggcggatatccatgccatcgagcagaccggccagttcgccgggcgctactttgtgctaatggggcatctgtcgccgctggacggcatcgggccgggcgatatcggtctggatcgcctggagcaacggctggaaaaggagagcatcaccgaagtgatcctcgccaccaacccgacggtggaaggggaagcgaccgccaactatatcgccgagatgtgcggccagtatggcgtgctcgccagccgcatcgcccacggcgtgccggtgggcggcgagctggagatggtcgacggcaccacgctgtcgcattcgctggccgggcgtcacgccatcaagttctga

SEQ ID NO: 424246 - DNA, 330 bp, Serratia marcescens
atgtttggtaaaggcggtctgggcaacctgatgaagcaagcccagcaaatgcaagaaaaaatgcagcagatgcaggaagaagtcgccaaattggaagtgaccggcgagtctggcgcgggcctggtgaaggtcaccatcaacggcgcgcacaactgccgccgcgtggagatcgatcctagcctgatggaagacgacaaagagatgctggaagatctgatcgccgccgcgttcaacgacgccgcgcgccgcatcgaagagacccagaaagagaagatggcctccgtctccagcggcatgcagttgccgcctggcttcaagatgccgttctga

SEQ ID NO: 424247 - DNA, 1959 bp, Serratia marcescens
atgagctatcaggttctcgcccgtaagtggcgccctcaaacgttcgcagacgtggtcggccaggaacatgtcctgaccgcgctggccaacggcctctcgctggggcggatccatcacgcctatctgttctcgggcacgcgcggcgtggggaaaaccaccatcgcgcgcctgctggccaaaggcctgaactgtgaaaccggcatcaccgccacgccgtgcggccaatgcgacaactgccgcgagatcgagcagggccgcttcgtcgatctgatcgagatcgacgccgcttcccgaaccaaggttgaagatacccgcgatctgctggacaacgttcagtacgcgccggcgcgcggccgcttcaaggtctacctgatcgatgaagtgcacatgctctcgcgccacagcttcaacgcgttgctcaagacgctggaagagccgccgccgcacgtcaaattcctgttggccaccaccgatccgcaaaagctgccggtgaccattctctcgcgctgtctgcaattccacctcaaggcgctggacgtcgatcagattcgccagcagctggaaacggtgctgacggcggagcagatcaccagcgacgcccgcgcgctgcagctgctggcgcgcgccgccgacggcagcatgcgcgatgcgctgagcctgaccgatcaggcgatcgccatggggcaggggcaggtgaccgccgccaccgtcagccagatgctcggcacgctcgatgacgaacagccgctggcgatcctcgaagcgctggtcagcgccgacggcgaaaagatgatggcgcaggtcgcacaggccgcttcgcgcggcgtggactgggaaaacctgctggtggagacgctggcgctgctgcaccgcattgcgatggtgcaactgctgccttcgatgctcgacaatcagtacgccgccgtggaacaacggctgcgcgagctggcgcgcaccctgccgccggccgatgtgcaactttactaccagacgctgttggtcggccgcaaagagctggcctatgcgccggatcgccgcatgggggttgagatgaccctgctgcgtgcgctggcgtttcacccgaaagcggtgatcccggagccggtggcgttggtgcagaccgcgccggcgccgatggcgcagccgcaggccgccgcatcgcaacagccgccgcagtttcaggacgcgccgccgccgctagggcagccggccgcgccgtcgcggcaatcatcgaccccattaccggatgccactgcccagctgttgaaagcgcggtcccagctgcagcggcagcagggagcatccacaccaaaaaagaatgagccggcggcgccaggaatagcgcggccggcaaactcggcgctggggcgtttggcttccgtgaccgagcgtagccagcagcgtctggcggagaagaaggtgccggaaaaaccggccaagccggaagcatatcgctggcgcgcgcagaccgagccggaagcggcaccggaaccgctggcgacgccgaaagcgttgcgcacggcgttggagcacgagaaaacgccggagctggccgccaagctggtggtggagtcgctggagcgcgacgcctgggcggcggaaatcgacaggctgaagatcccgaaactggtgcagcagctggcgttgaacgccttcaagcagcagccggaagcgggcaagatttgcctccatctgcggtcttcgcagcgtcatctgaattcgccttcggcgcagaagacgctggccgaagcgctcggcgagctgtacggcagcccgatcgagctgaccgtgatagaggacgataatccggcggagcgcaccccgctggaatggcgacaagccatctatgaagaaaagctggcgcaggcgcgccagtccatcgttgcggatacccatattcagacgctgtgccggttcttcgacgcggatctggatgaagagagtatccgccccctttaa

SEQ ID NO: 424248 - DNA, 552 bp, Serratia marcescens
atgaccgctactgcgcagcagcttcagtttattaaagacagtatcaaaaccatcccggattatccgaagccgggcatcctgttccgcgacgtgaccagcctgctggaaaacccgttggcctacgccgccagcatcgagctgctggttgagcgctatcgcgaagcgggcgtgaccaaggtggtgggtaccgaagcgcgtggtttcctgttcggcgcgcccgtcgcgctggcgttgggcgtcggtttcgtgccggtgcgcaaaccgggcaaactgccgcgcgccacgctcagcgaaagctatgagctggagtacggcaccgacaagctggagatccacaccgacgccatcaccgcgggtgacaaagtgctggtggtggacgatctgctggcgaccggcggcaccatcgaagcgaccaccaaactgatccgccgcctgggcggtgaagtgaacgacgccgcattcatcatcaacctgccggatctgggcggggaagcgcgtctgaacaagctgggcatcgactgctactgcctggtggacttcgccggccattga

SEQ ID NO: 424249 - DNA, 381 bp, Serratia marcescens
atgacgcgtgggttattgatcattttgggctggctggcggtggtgctggcgacgttgggcgtggtgctgccgctgttgccgaccacgccgtttctgctgttggccgcctggtgtttcgcccgctcttcgccgcgctttcatcactggctgctgcaccgctcctggttcggcccctacctgcgccactggcaacagcatcgcgcgctgccgccgggagcgaagtggaaggcggtgctggtgatcgtgctcaccttcgcctgttcgctgtggctggtgaaaatctggtgggtgcgcgggctgttgctgctgatgctggccattttgctgacctttatgctgcgcctgccggttattgacctgccgcaacaaaaacagcgctga

SEQ ID NO: 424250 - DNA, 537 bp, Serratia marcescens
gtgagcactcagcgtctattacaggtgttggcacagcagatcgcggcgctggcggccgaagtgaccccgcgcggcgacgttccgatcccgcaggcgcgcttcgacgccgccctgttcgccaaccgcggtacgcggctgcgcgactacctggccgaggtggagaagaatttcgcccagctgcaaagcgccgccaacgacagccgcaccagccaggtggcctttctggccgaaaaactggtggctcagatcgccgccctgcagcgcgagctggccacccaggcgctgcggcgcaagaaccagccgaaagaagcccctgaggccgatctgtaccacaagctggccgagcatcaggactacgaacgccggctgatcgccatgattcaggatcgggaaagcctgcttggccgtcagaccacgctggcggcgcagcaaaagctgcagcacgagctggcggcgctggaggggcgcctgatgcgctgccgccaggcgctggcgcgcatcgagcgcaatatcgagcgcaaagaaaacggtttttga

SEQ ID NO: 424251 - DNA, 180 bp, Serratia marcescens
atgtctctggaaaacgcctcacccgaactgcagctggcggtagacttgatttacctgctggaatgcaacgagatcgatccggccaccgcgctggcggcgctggatatcgtcaaacgggattatcaggaaaaactgcagcgcgccggcgtcacctctccctatctgcctgccggacagtaa

SEQ ID NO: 424252 - DNA, 354 bp, Serratia marcescens
atgtcatccatcgttctcatcgccaatggcgccgcctatggccatgaatccttgttcaatgcgctgcggttggccatcgccatgaaagagcagcagagcagtctcgacctgcggctgtttctgatgtccgatgcggtggtggccgggctggccgggcagcagccgcacgagggataccacctgcagcagatgctggagatcctcaccgcgcagcaggtgccggtcaagctgtgcaagacctgtgccgacgcgcgcggcgtcagccgcttgccgctggcggacggcgtggcgatcggtacgttggtcgagctggcgcagtggacgctggcggcggaaaaagtgctgactttctga

SEQ ID NO: 424253 - DNA, 348 bp, Serratia marcescens
atggaaattatattccacaaatgcgagtttgtcggtgaaatgatgccgctgctggattcgcgcaaggtgctgtacctcgccggctacgaacgcattgaagcggtgctgtataactgcattcaccacgggcaattacccgccgatttacatacccgccgcgcggcgatcatcctgcgcggttatatcaccggcctgatggaaaactggctgtttatgccggaaagtttcgatctgcgggccgaagccgaagcgctggtggacgcgtttttggaaatgctgcagttttgccccaccttgcgcctcaaacccgacgcggcgacgtctgacgccgaccgccttcctttataa

SEQ ID NO: 424254 - DNA, 1188 bp, Serratia marcescens
atgaacaaaaacagagggttaacgcctctggcggccgttctgatgctttcaggcagcttagtgctaacaggatgtaacgataaagaaacccaacagcaaggcgcccaacaacaggcgcctgaagtgggcgtagtcaccttgaaggccgagcctctcaacatcactaccgatcttcctggccgcaccgctgcgtatcgtatcgccgaagttcgccctcaggtcagcggcatcatcctgaagcgcaacttcgttgaaggcagcgatatcaaggccgggacgtctctgtaccaaatcgatcccgccacctatcaagccagctacgacagcgcgaaaggcgatttggccaaagcacaggccagcgcttccatcgcacgcgtgacggtaaaccgctacaagccattgctgggtaccagctacatcagcaagcaggactacgacaacgccgtctccaccctgcagcaggcggatgccgccgtggtggccgccaaggccgccgtggaaaccgcgcgcatcaacctggcgtacaccaaggtgacctccccgatctccggccgcatcggcaagtccgccgtgaccgaaggcgcgctggtcagcaacggccaggcgaccgccctgtccaccgtgcagcagctggatccgatgtatgtcgacgtcacccagtcgagcaccgacttcctgcgcctgaagcaagagttggccagcggcgcgctgaagcaggaaaacggcaaggctaaagtgaaactgctgctggaaaacggcaccgaatacgcacaggaaggcacgctggaattctccgacgtcaccgtcgacgagaccaccggctccatcaccattcgcgccctgttccctaacccgaacgatacgctgctgccgggcatgttcgtacgcgcccgtctggacgaaggtgtgcgcagcgatgcgctgctggtgcctcagcaaggcgtcacccgcaacccgcgcggcgaagcgacggcgttggtggtaggggcagacgacaaagttgagctgcgcacgctgaaggcggaccaggcgattggcgacaaatggctggttaccgatggcctgaaagccggcgatcgcgtgatcgtctccggcctgatgaaagtgcatccgggcgcgcaggtaaaagtgcaggaagttgacactcaggcgcaaaaacagccgcagtctgaagcgcagaagtcataa

SEQ ID NO: 424255 - DNA, 3147 bp, Serratia marcescens
atggctaagttctttatagaccgcccaattttcgcctgggtaatcgccatcatcgtcatgttggcgggggtgcttgcaataatgaaactgcctattgcgcagtatcccactattgcaccgccggcggtgagtatttccgccaactacccgggcgcagatgccaaaacggtgcaggataccgtcacgcagattatcgaacagaacatgaacggtatcgataacctgatgtacatgtcctccaccagtgattcctctggtagcgtcaccattaccctgacgtttgaatccggcaccgatcctgacatcgcgcaggttcaggtccagaacaaactgtcgttggccaccccgttgctgccgcaagaagttcagcaacagggcctgaaagtagaaaaatccagcagcagcttcctgatggtggccggcttcgtttccgacgatccgaacatgactcaggacgatattgcggactacgtggcgtccaacatcaaggatccgatcagccgttcgtccggcgtgggtgaagtgcagctgttcggtgcccagtacgcgatgcgtatctggctggatccgaacaagctgaacaactaccaactgacgaccacggacgtgacctccgccatcaccgagcagaacaaccagatcgccgcaggccagctgggcggcctgccgccggtgccggggcagcagttgaacgcctcgatcatcgcgcagacccgtctgacttcgccggaagagttcggcaagatcctgctgaaggtgaataccgacggttcccaggtacgcctgcgcgacgtcgctcacatcgagcgcggcgcggaaagctatgccgttaccgctcgctataacggtaagcctgccgccggtctgggtatcaaactggcaaccggcgccaacgccttgaacaccgccaaaggtgtgaaagatgagctggccaagatgacgccattcttcccgcaagggatgaaagtggtttatccgtacgacaccaccccgttcgttaagatctccatcaacgaagtggtgaaaacgctgatcgaagccatcatcctggtattcctggtgatgtatctgttcctgcagaacttccgcgcgacgctgatcccaaccatcgcggtgccggtggtgctgctggggacctttgcgatactcgcggcgttcggcttctcgataaacaccctgacgatgtttggcatggtgttggcgatcggcctgctggtggatgacgccatcgtggtggtggaaaacgtcgagcgcgtcatggccgaagaggggctgccgccgaaagaagccacccgtaaatcgatgggccagattcagggcgcgctggtgggtatcgccatggtgctgtcggcggtattcgtgccgatggcgttcttcggcggttcaaccggcgccatctatcgccagttctcgatcaccatcgtgtccgcgatggcgctgtcggtgctggtggccttgatcctgacgccggcgctgtgcgccaccatgctcaaaccgatcccgaaaggcgatcacggggttaaaacaggcttcttcggctggtttaaccgcatgttcgagaaaagcacgcatcactataccgacagcgtgggcaacatcctgcgcagcaccggccgctatctgatcatctacctgctgatcgtggttggcatgggcctgctgttcctgcgcctgccttcctcgttcctgccggacgaagatcagggcatcctgttgaccatggtgcagctgcctgccggcgccaccgagtcccgcaccaacaaagtgctggaagaagtctccgactacttcctgaacaaggaaaaggacaacgtggtttcggtgtttaccgtcgcgggcttcggcttcaacggtaacggccagaacaacggcctggcattcgtcagcctgaaagactggggcgagcgtccagggagcgagaacaaggtcgaagcgatcgcgggtcgcgccatgggcgcattctcgcagattaaagaaggcctggtattcccgttcaacctgccggcgatcatcgaactcggtaccgccaccggcttcgacttcgagctgattgaccagggcggcctggggcacgagaaattgaccgaagcgcgtaaccagctgttgggcatggttgctcaacatccggacgtgctggtgggcgtgcgcccgaacggcctggaagatacgccgcagttcaaactgatcgtcgatcaggagaaagccaaggcgctgggcgtcagcatcaccaccatcaacagcacgctgagcaccgcgctgggcggctcgtacgtcaacgacttcatcgaccgcggtcgtgtgaagaaggtatacgtacaggccgacgcgccgttccgtatgctgccggaagacatcaacaagtggtacgtgcgcggcacgagcggccagatggtgccattctccgccttctcttcggcgaaatgggaatacggctcaccgcgcctggaacgctataacggcttgccgtcgatggaaattctgggccaggccgcaccgggcaagagtaccggtgaagcgatgaacctgatggaacagttggcgtccaaactgccaagcggcatcggttacgactggaccggcatgtcctatcaggaacgtctgtcgggcaaccaggcgccggcgctgtacgccatctcgattctggtggtgttcctgtgtctggcggcgctgtatgaaagctggtccgtgccgttctcggtcatgctggtattgccgctgggggttatcggtgcgttgctggccgcgacgatgcgcggtatgaacaacgacgtgtacttccaggtggggctgctgaccaccatcggtctatcggcgaagaacgccatcctgatcgtggaattcgccaaggatctgatggagaaagaaggcaaaggcctgatcgaagcgacgttggaagcggtgcgtatgcgtctgcgtccaatcctgatgacgtctctggccttcatcctcggggttctgccgctggttatcagcagcggtgcgggctccggcgcacagaacgcggtaggtaccggcgtaatgggcgggatgatcaccgccaccgtcttggcgatcttcttcgtgccggtgttcttcgtggtggttcgccgccgcttcagcaagaagaacgaagacctggaacacagccatccggtagagcaccactga

SEQ ID NO: 424256 - DNA, 255 bp, Serratia marcescens
atgaaacccggcatccatcccgattaccgcaccgtggtcttccacgacgtcagcgccaacgcctactttaaagtgggatcgaccatcaaaaccgatcgcaccatcgagctggacggcgaaagctggccgtatgtcaccctcgacgtctcttccgcttcgcatccgtactacaccggcaagcagaaagactattccaaagaaggcagcacggcgcgcttccagcagcgctttggccgctttatcggcaataagtaa

SEQ ID NO: 424257 - DNA, 141 bp, Serratia marcescens
atgcaggtattgagttcattgcgttcggcgaaaaatcgccacccggattgcaaagtcgtgcgtcgtcgtggccgcatctatgtgatctgtaaaagcaatccgcgattcaaagcggtacagggacgtaagaaaaagcgttaa

SEQ ID NO: 424258 - DNA, 879 bp, Serratia marcescens
atgaaacgtttacctatatcgctggcggtcgctgcgctgctggccagcccattggcgatggcgaagaccgtcgacgccgtcgccagcttttccattctgggcgatatcgtcaaacaggtggggggcgatcacgtcaaggtcagcacgctggtggggccggatggcgatccgcacagtttcgagccttcgccgcaggacggcaaaaagttggctcaggctgatgtggtattcgtcagcggactggggctggaagggtggatcgatcgcctggtcagcgcttcgggttataaagggcaggtgatcaccgcttcacagggcatcagcacccgccagatggaggaggacggcaaagcgattaccgatcctcacgcctggaacagcatgaaaaacggcgtgcagtacgccaccaacgtgatgaacgccctgattgccgccgatcccgaggatgccaactattttcgccagcgcggggccgaatacattcagcaactgcaaaagctggacctgtgggccaaaacccagttcgccgcagtgccgccacagaaacgtaaagtgctgaccagccatgatgcttttggttactttgggcaagagtatggcgtcaccttccttgccccggtcggattttccaccgaggccgaagccagcgccagcgacgtggccggcctgatcaagcaaatcaaacaggaaaaggtcaacgcttactttatcgagaatcagaccgatccgcggttggtgaaacagattgccgccgccaccggcgccaaggcgggcggcgagctgtaccctgaagcgctctcccgtacgggcggcccggcggccacctatgaacaggcgttcaaacacaatgtcgacgcgctgctgagcagcatgaagtaa

SEQ ID NO: 424259 - DNA, 858 bp, Serratia marcescens
atgatgctgtggcatgggcttatcgatcctttcctctctttcggttttatgcgccgcgcgctcatggcgtgcctggcgttgtcgctcagcgccgccccgctgggcgtgtttttgctactgcgccgcatgagcctggtgggggatgccttgtcccacgcagtgttgccgggcgcggcgatcggctatctgatctccggcatgtcgctggtggcgatgggggtgggcggctttatcgccgggctggcggtggcgatgctgtccggcctggtgagccgccgcacgccgctgaaagaggacgccagcttcgccgggttctatctgggctcactggcgctgggggtcacgctggtctcgctgcgcggttccagcgtggatctgctgcacgtgctgttcggttcgatcctggcggtggatgcgcaggcgatgctgatggtcggagcgatcgcctcggtttcgctgctggcgctggcggcgctgtaccgtgcattggtgatcgagtccttcgacgtcacgttcctgcgcgtcaacgcgccgcgccggttggcgctgatccacggcctgtttctggcgctggtggtggtcaatctggtggcgggattccagatcctcggcactctgatgtcggtggggctgatgatgctgcccgccgccagcgcgcgcttctgggcgcgcaatctgccgcagacgctggcgacggcgatgggcatcggcgcgctttccagcctgattgggttggtgtggtcctattacgcttcgctgcccgccggcccggcgatcgtgctcagcgccagcgtcatctttttcgtctcgatcctgtttggaacgcgtggaggcatttacgccttcgcgcgccgttga

SEQ ID NO: 424260 - DNA, 714 bp, Serratia marcescens
atgatctccttgcgccaactggcgataggctatggcgtcacgccgcttttcccgccgctgagcgggcagttcagcgccggttcgttaaccgcggtggtgggcgtcaacggggccgggaaatcgacgttgctgaaaacgctcgccggattgttgccgccgctgggcggcagtctgagttttagcggcggcaagccaccgcgcagggcttatctaccgcagcaggccgagttggatcggcaattcccgatcgcggtaagcgatctggtggcgatgggctgttggccgcaaagcggcatgttcggcggtatgaacaggcgcgcggcaagccaggtcaatgaggcgctggcgaacgttggcatgagcgcgctggcgcgcagcccggtgggcgaactgtccggcggccagctgcagcgggtgctgtttgcgcgcctgctggttcaaccggcgccgctgattttgctggatgaaccttttaccggcatcgacagcgccaccacgcagatcctgctgcaggcgatcgcgcaactgcaccggcaggggaaaacggtgatcgccgtgctgcacgatatgtcgatggtcgccgagcattttccacaggtgctgttgctgacgccgcaggcttgccactggggcgcggccgagcgggtattggaacaggtgccgaggtatcacgccgccgaacggcagccggatctgcgggcggtggcgccatga

SEQ ID NO: 424261 - DNA, 369 bp, Serratia marcescens
atggatgagtattcgcctaagcgacacgacattgctcagctcaaattcttgtgcgaaaatttgtatgatgaaggtatcgctaccctgggagacagtcaccatgggtgggtcaacgatccgacgtcctccgtcaacctgcagcttaatgagttgatcgaacatatcgcttcgtttgtgatgagttataaaattaaatacatggacgaatcagacctgtcggagttagtcgaagaatatctcgacgatacctatacgctgttcagcagctacggtatcaatgattccgacctgcgccgctggcaaaaaaccaaggcgagattattcagaatgttctcaggagaggacatctgtacgacaatgaaaacttag

SEQ ID NO: 424262 - DNA, 204 bp, Serratia marcescens
atgactaaaaccgactatctgatgcgtttacgtaaatgcaccacgattgatactctcgaacgtgttattgagaaaaataagtacgagctttccgatgatgaactggagctgttttactcagcggccgatcaccgtctggcggagctcaccatgaacaaactgtatgacaaaatccccacctccgtttggaaatatgtcagataa

SEQ ID NO: 424263 - DNA, 519 bp, Serratia marcescens
atgtcacacgaacctgcccgttacgatcttttcagtcggttactgcattggggcattgccgccgtgatgatctacgtaatgatcgttggttattcactgcattttatgacggatgcacgcatcttcgcctttttctccgtgaccaatatgtcgctggccttggtgctgacaccgctgatggcggcgcgctttatctggcgttttttccggcctaaggtgccctatggcgatatgctgcaagggcacgagaagggattggtgcatttgctgcacgaaatattctacctgctgattttcgtggtgctgctcagtggattccttatgctggagcacggctttgccgttttcggtgcgatcgacttccctcgcccgatagcaaatctcgacgttaaccgcttctttttcgccgtgcaccgttattcgtgcatcgcgctgtcggccatggtcgtgctgcacatagcggcggtgattaaacaccactgcttcgccgggcaggcgattttgcgccgcatgctctga

SEQ ID NO: 424264 - DNA, 1431 bp, Serratia marcescens
atgaaattatccaaaatcgccctgatgatggcaacgctcgcggcctcttcggccgcctggtcgcacggttatatcgaagtgcccgagagccgcgcctacaagtgcaagctgggcagcaacaccgactgcggccgggcgcagtgggaaccgcagagcgtcgagcaggtttccggcttccctggcggcgcgacgccgctcgacggccagctggccagcggcggggtgaacggcttcgagtcgttggatcgccagggcgtcaacgtctgggcgttgaataccatgaagccggggccacagacgttcacctggtaccacaccgccaagcacaaaaccaataactggcgttactacatcaccaaacaggactgggatgtgaacaagccgctgtcgcgcgaggccttcgaaaaagagccgttttgcgagattgatggccatgccaagccgccaaaagatcgcgaagtgcaccagtgcgtggtgccggagagaaccggctatcaggtgatttacggcgtgtgggaaatcaatgacacggtaaacagtttctatcaggtggttgacgttaacttcgaagacgacggcgtcgtgtcggaatggcgcaagcagctgcaaggttccctcaccggtaaaaacctgcaggttggcgacaaggtgatcgcccgcttcttcgatgcggacggtgaagtgctgacgatgaaaaccgaactggcgatcgacagtgagacgctgaccgacaaaaaccgctggggtcacgcgctggccagcaagatcaacgccgaacagaaagcggtgcgtgccggggtgaaagacggcaaaggcaacgtcaatccggtattcggcaacaacgcggtctacgccaagcagggcagcacgatgaagagcgtggtgatttcctatgaggaagaaacgccggctatcaccgaagagatccgcatcggcaacctgtccagcaccaaaatcaaggacggcaaagctcagctgaccttcaatgccgaggtcaaaggcaaactgacggttgaagcgcgcgtttacgaccacggccagacggagaaaggctatgtgaaagcgacgctggaagacgccagccagccgctgactatggcgctgagcaacgtcagcgaaggccaccacatgctgaaagtgatcgccagcaacgacaacgggcagagcattcaaccagatatcgaaaacttcaacctggaagcggaatccaccggcggtggcggcggcaacggcgactataacttcgtcttcccgaacgcgctgagtaaatacactgccggcaccacggtgctgcaaccgaaagacggcaaggtatatcagtgcaaacctttcccttacagcggttactgcatgcagtggaacagcggcgcgactcactttgagccgggcgtgggttccaactggcaggatgcctgggtcgtgaaaacgtaa

SEQ ID NO: 424265 - DNA, 363 bp, Serratia marcescens
gtgacattgaaaaatattgccgcagcgatcgtggcatccctgctgttatccggctgccagcacgccgccaaatcggctcctgacgccgccacccaacgcgaccagctgtcgtcgctggtcggcgccggtcaatttctaagagacaggtgcaaccgcgccgatattccggccggcgataagctcgcggcggcggcgctgcaggaagcgaaggaaaaagattggacgccggcgctcaatcgcgcccaactgcttgcggcgggtaaacacgtcgccgcgcagctggaggccgacgccacgccgctgcaggaaaagtgccgtgaactcaaccgctcgctggcgccttttttagcccagctgcgttag

SEQ ID NO: 424266 - DNA, 816 bp, Serratia marcescens
atgctatttgctataaacgcggcggcagatgaacactggctgttatttagcgccgtgttgagtttgtgcgtcggtagttttattaacgtagtcgtttatcggctgcccattatgcttgagcgcgaaatggaaacggcgcaggccgagcggttcgatctcttttggccgcgttcattctgtccgtcatgcacaaaaaaattatcggcgttcgataatattcctttattaagttggctgctgttgcgtggccgctgtcgttattgccgccgtcctattgccgtgcgttatccactgctggaattattcctgatgctgatggggataacgctggcctggcggctcggcatcggggtggattggtttttcatgctggcgttggttgcgctgttgctggcgttggcggcgatcgacaaccaatgtcagctgctgccggattgcctgacgctgtcgctgctgtggatcggcttactgtggcattgcctggcgcacccggcctttttgccggcggcggtcattggcgcgatggcgggctatctggcgctctggctattgtattggggatttcgtttggcgaccggccgcgaggggctgggatacggcgatttcaaactgttggcggcgcttggcgcctggggcggctatgccgctttgccgtcgatcctgctgttcgcctccgccggcagcctgctatggctgttgctgcgcgcgtggcgcggcggcgatgcggcccaacccctgcccttcgggccggggctggcgacggcgggcgccggcgcggtggcctgtcagtggcttgcgctgccgatagggggctaa

SEQ ID NO: 424267 - DNA, 447 bp, Serratia marcescens
atgaatatcgggtggcgcgataaggcgttgcggcgggcggtgctgttaagcctgttgctgctggcagcctgcggctactgcctgtatcagttttcacaggcgcagaaaagcgcacagcgcctggccgcgctgcaggggcaggcacgcgtcatccagcaactgcaggcgcgcttgccgccggatgccgctgcgcgcgagcaactgccggagcggctgcggcagagcgcgcaggcgttccgcatccccatcatcgccctgacggaaagtgatgcgcagatgcaggtggggctgccgcccgtgccgtttgaaagcctgctgtcgtggctggccgccctgcagcgtgagcatggcatccgcgtgctggcgctcgccgtggaacgcgcggagcaggcgccgggcatagtgcaggtcagcctgctgcgggtaacgacgcagccgtcgatgtaa

SEQ ID NO: 424268 - DNA, 1089 bp, Serratia marcescens
atggccgatgtgcgctggggccgcgtcggcgagacgagttgccgtttcgccgcccacctcgatctgaccgaaggcggcggcgagttggcggccatggcgcagggcagccgcgtcgtggtgttggtgcctgcccgtcatgtggcgctgaggcaaacgacattccagggcaaggcccggcaggcgacgccgttggcgctggcctacgcccatgaggccgggttgttggccgatgccgagcagatgcactgggcggtgctggacaaggcgcagcgcgatttcaccctcgccggcgtcgcgttgacgcagatgcaggaatgggtcgagcgcctgagcgccagcggcattcgcgccgataaaatgctgcccgacgtgctggcattgccgctgcccggtcaatgcagcgcgctgcattggcgcaaccactggttgatccgaacgggaaacgggcagggaatgcagctgcccgacgcctggctgggctgcgcttcactgccgacgccggactggtgtctgcaccgcggcggggaggttccggcgggctgggaagcggcgcgcattgacgaggatccgctctggcgactggcggaagaggcctggaacagtacattcacgctgctgcagggacgtttcaaaccgagcgtacgctggccgcgccgcctgcccgacaagaccgcctgcgcgctgctgttgctcagcggttcgctgctggtgggcggtttgcaccaccaacagatggcccggcagagcgagagccagattgcggcgctctcacggcacctgctgccgggccaggccgcgtcggcgtttgccgagcaggcggtgaaagcgcgggtgcggcgtatgcaggatgccctgaatgcgccgcagctgttcaggctgttgccctacgcggccggggcgctcgcgttatgggcgcccccgcagctgcaggcgctggctttcgacgccgccgacgatcgtctggtggtgacggtgaacagaaacgacgtgccgctgccggcgccggttaacgacggcgaggtcagcatggcgttcagcgaaggcggtgcgtccaaccaggcgatcctgacggtgagaggtgagcgatga

SEQ ID NO: 424269 - DNA, 903 bp, Serratia marcescens
atgaaaaaacaacgcggtatggcgctgttgatggtgctgctgctgatgtcgctgatggcgatcgtggcgatcaatatcaacgacaactggcagcgttcgctggcgcgcacccagtctcaacaggatcggctgaaggccaaatggctgctgctgggcggggagatctacgcccaacagcgattgcggcaggcgggagagaagcgcaaggcttggggagcatcaggagcggcgttcaggatgcgtaccgaagagggggaggtggcgatacgcctgcgccgcgtcgatgcctgtttcaacctaaacgccctgatccgcgccgccggcccaacggaggccggggatagcgaggggtttccccccaataaggagaagcggatattcatgctgttactgaacaacctggggatcgccgacgcgcaggcgggcgcgattgccgaggccatcgtcgccaggggcgatgacgaggggtatctgatggggaatgtcagcgaactgcgggagctggccggcatcgatcgtgagctttacctgcgcctggcaccgcagctttgtgcggcgccggatgccgaactgcgcatcaacccggatgccgtgagcgaggcgcaattaccgctgctgcgggcgatgctgatgaacgccctgagcgatgaacggctgcgggagctgctggcggcccgtccgccgcagggctggcagacgctggcgtttttgtcgcaggaaaaagcgctgcaagacttgggtgacgacgatctcggcgagcgattgacgttcgacgatagccgctggattgcgcagctgcagctgacgctgaacgacgggcgctatcggctcgtcagcgcgttgcaaccgggccagtcaggcgtcacggtcagcggacgcctgttcgacagaggggaggggtaa

SEQ ID NO: 424270 - DNA, 612 bp, Serratia marcescens
atgaaacgcggttcgcaatgcggttttacgctggtggaaatgctgctggccatcgccctgttcgccatgctgtcgctcaccgcgctggcggtctttaggggcgtgctgaaaagcgatgaaatcacccggcgcaaatcgacgcagctgacccagctgcaacgggcgctggcgatcgtcgaacgcgatttcactcatgcgcaggcgcgggcgccgattggcgataagcgcttgccggcggcgccggagttcgcggtgcggcagacggtgggcgaggacgcggatatacagctgctgctgatccgaaacggctggccgaatccacacgctcggctgccgcgcgccacgctggagcgggtggagtatcgctaccggcaggggcggctcgagcgtctcagctatccgagtttgggcagcccgcaggcggcggcgcgcagcgtgctgctgctgccggaggtgacgcggttccgcctgcgtttttacctgcagggcgaatggtcgacggcctggcacgccggcgggctgctgccgcaggcggtggagatcgtcgtcgaaacccccgcgttgggggaaatacggcgcatcatcgcgctgcccgccgcgaggccatcatga

SEQ ID NO: 424271 - DNA, 378 bp, Serratia marcescens
atgacgcggaaaattaaacgccagcggggtatgacgctgctggaggtaatggtggccttgatgatcttcgccatcggctgcctggcgctgatcaacagcaccggcggccaggtgcgcagcctgagcgcgatcgaagccaagaccgttgcgctgtgggtggcggacaaccagtcgacgctgctgcagctcgacccgtatccgccgacgctggcctggcattcgggcactgcggcgatggccggtgaaacctggcactggcgctatcgcgggcaggagaccagcgacgccggaatgcgggcgatcgcgattgaagtccggcgcgatccgcaggatcgcaacgcgctggtggagatgctggcctacagggcactgccatga

SEQ ID NO: 424272 - DNA, 477 bp, Serratia marcescens
atgaggcgcatacgcggctttacgctgctggagatcatgctggtattgctgttgctgggggtgaccagcggcctggtgatgctgagttttccggcggatgagaaagcgttggcacggcagggggaacggctgaaccattggttgaatgccctcgccgagcgggccgagcgcgaaggggtgagttatggcgtggcgttcggcagcggcggttggcgcagcgttgccgctgcggggcaggcgagccgggaggcatacgccctgccggacggcatcgcgctgtggctgagcgttgaagggcaaaccgtcgcgctcgatgacgcggcggcgcggccgccgcaggtgtggctgtatccggggggcgaaaccacggcgttcagcgtagcgctggcgcaggggcggtgcctgtggcgattgcaggcgcccggttacttcgtatttgaaacgacggatattcgttgcgatgacgcggaaaattaa

SEQ ID NO: 424273 - DNA, 474 bp, Serratia marcescens
atgccgttaatggagagtaaagtgagtcatatcagcaagatgcgcaggtctcggcagcgagggtttacgctgctggaaatcatggtggtgatcgtcattctggggctgttggccagcctgaccattccaagcctgatgggaaacaaggagaaggccgatcggcaaaaggccgccagcgatatcgtcgcgttggagaacgcgttggatatgtacaagctggacaacgggcgttatcccagcgcggaacaggggctggcggcgctggtgacccggccggcgctggcgccgatcccgagaaattatcccgaagacggttatatccgccggttgccgcaagatccctgggggcaggagtaccgtctgcgcaatccggggcgtcacggcaagctggacgtgttttctctggggccggacggcatcgccgacaccgatgacgatatcggcaactgggtggccgacgccgacgcgccatga

SEQ ID NO: 424274 - DNA, 1212 bp, Serratia marcescens
atgaagtttgattatcgcgcctgcgaccgtgaggggcgcgcccagcgcggcgtgttggaggcggattctctgcgccacgcccgcgatcgcctgcgtgaaaaggggtggcaggtgctggcggtgcaagcgcgcaggcggcctgctttcaccggtgtgttttccggccgctggatgagcggcgtgagcagcggcgatgtggcgctgttgacccggcagctggcgacgctgctgtccgctgcgctgccgctggaggaagcgctgatggcggtggcgcggcaaacggagaaaaaaggtctgcaggcggcgttggctcaggtgcggcagcgcattctggagggctttccgctggcgcaggcgctgggtcagtatccgcagatttttgaccgcctctattgcgccatggtggccgccggtgagattgccggccatctggcgccggtgctggaacggctggccgactacgtcgaacagcgccagcaaatgaagaacaaaatcgtgcaggcgttggtgtacccgatggtgctgacggcggtggcaattggcgtggtggcgatcctgttgacggcggtggtgccgaaggtgatcgaacagtttgtgcatatgaagcagaccttgccgctgtcgacccggatgctgctcggcgccagcgacgggctgcgccgatggggggcgttggcgctgatatcggtgctgacgggccttggcgctttccgctatcggctgcgggatccggcgcggcgcgtgcgctggcatgcgttcatcctgcggttgccggtggtcggcaagctgtcgctggcggtgaatacggcgcgctacgccaaaacgctgagcattttgaacgccagcgcggtgccgttgctggaggcgatgcgcatcagcgccggcgtgttgggcaacgatgccgcccgcgaacggctgctggcggcgatggagcgggtgcgggagggcgaaggattgtcgccgtcgcttgagggcaccgcgctgttctcgccgatgatgcggcacatgatcatgtccggcgagcgcagcggtgagctggacatgatgctcgaacgggcggcgacgatgcagcaggaggccttcggccggcaagtcacgctggcgctggggctgtttgagcctttattggtgatcgcgatggccggttcggtgctgtttatcattttggccatcctgcagccgatattgcagctcaataatatggtcggctaa

SEQ ID NO: 424275 - DNA, 1497 bp, Serratia marcescens
gtgaagccccgttctgcggggccgctgctgcctttttcctgggcgcgccagcatggcgtgctggccgttgacgggcaacacggtatccaaatttattgtcaccctgacacgagccacgccgcattgatggaggcctaccgctgcctgcccggcgagccggcgctagcccggctggaggcggaggcttttgatcaacggctggtggcgcactaccagcaggaaagcggccaggcgcagaaaatgatcgacgacctgggcggcgaactggatttttacgcgctggccgaggagctgccgcagcagcaagacctgttggacgaacaggacgatgcgccgattatccgcctgatcaacgccttactgagcgaggcgatcaaagaacgcgcctccgatatccacatcgaaacctacgagagcgagctggtgatccgctttcgcatcgacggcgcgctgcggcggattttggcgccgcagcgcaagctggcggcgctgctggtgtcgcgcatcaaggtgatgtcgaagctggatatcgccgagaagcgcgtgccgcaggatgggcgcatggcgctgaaggtcggcgggcgagcgattgacgtgcgggtgtcggtgatgccggccagccacggcgaacgcgtggtcatgcgcctgttggacaaacagggcgtgcggctcgaactgcccagcctgggcatggcgccggcgcaccagcaggcgttgctgcgcctgatccgccagccgcacggcatcattttggtcaccgggccgaccggctccggcaagagcaccacgctctataccctgctcagccagatcaacgatgaacagcgcaacatcatgacgatcgaagatcccgtcgagtatgagttggccggcattgcgcagacgcaggtgaatcccaaggtggacatgaccttcgcgcgcgggctgcgcgcgctgctgcgtcaggatcccgacgtggtgctgatcggtgagatccgcgacggcgaaacggcgcagatcgcggtgcaggcctcattgaccgggcatttggtgctgtcgaccctgcataccaacacggcgatcggcgccgtgacccggctgcgggacatgggagtcgaaccgtttctgctttcgagttcgctcagcggcgtgttggcgcagcgcctggtgcgccggctgtgcccgcagtgccgtgagccttatgcgttgcctgacgcgcagcggcgccggctggggctgcccccgacgccgacggtgacctgctggcgcccgttggggtgcgaggcctgcggcgggcagggatatcacggccgaatcggcttgcacgaactgttggtgctggatgaaccgatgcgcatggcgatccatcgcggtgacggcgagctggacattgcgaaactggccgccgaacgctatctgccgctgcgccaggatgggatcgccaagatgtgcgccggggagaccagcctggaggaagtgctgcgagtgacgcgcgaaggggacggcgatgaagtttga

SEQ ID NO: 424276 - DNA, 1890 bp, Serratia marcescens
atgatcgcgctgggcggcgcggcgcgcgcggagcaattctcagccaatttcaaaggcacggatattcaggaatttatcaatacggtcagtaaaaacctgggcaaaaccatcattatcgatccggcggtgaaaggtaaggtcacggtgcgcagctacgaacagctcgacgagaaacagtattaccagttctttctcaacgtgctggatgtctatggctatacggtcatcggcatgcccaataacgtcttgaaggtgatcgccgccaaagagggaaaaagagccgcgctggcacaaaacggcggcgaggcgatcgccgaaggggatgaagtggtgatgcgcgtggtaccgctgcgcaatatcgcggccaaagacgtttcgccgatattgcgccagctcaacgacagcatcggcgtgggcagcgtggcgcattacgagcaggggaacgcgctgttgatcaccggacgggccagcgtggtcaatggcctgctcgagctcgtcagggagatggatcaggacgatggcaatcgggtcgaaactctcgcgctgaagcatgcggcggcgccggagatcgcgcgcatggtgaacgaactgtttcgcgaagagggcaaacggcgcacggccggcgcgagctcgctgcggctggtggcggatgagcggaccaacagcgtgatgatcgccggggatgatcggagccgcgaacacgccaaagaactgattgaccagctggataacaagagcgtcacccagggcaatacccaggttatcccgctcaaatacgccaaggcgcagagcctggtcgaggtgctgaccggcgtgagtgcgggcctgcaaaatgagaaggagagcgccgccgccaacgtggcgctgctgcaaaacgtggtgatcaaggccgatgagcagaccaatgcgctgatcatcaccgccgcgccggacgtgatgcgcgatctggaggcggtggtcgccaagctcgacgtgcgccgcgcgcaggtgctggtcgaagcggtgatcgtcgaagtgcaggatgggcaggggctgaacatcggcgtgcagtgggccaacaaatacggcggcggcacgcagttcgccggctcggcgcccggggtgtcggcggggttcgaaaacggcatgagcgacgtgttcggcaaggccaacggcctgatgaccggtttctacagcggtaactggggcgtattgctgaccgccatcgccagcaacaaccaaaataatatcctggccacgccgagcatcgtcacgctggataacgccgaggcggagttcagcgtcgggcaggatgtgccgatcctgaccggttcgcaaaccaccaatagcgataacgtcttcaataccgtgtcgcgcaagacggtggggatcaaactcaaggtcaaaccgcagatcaaccagggccagtccgtgctgctgcagatcgaacaggaggtctccagcgttgccgacagcgccggcgctacgccggattcgctgggggcgaccttcaatatccgcacggttaacaacacggtgctggtggacagcggcgaaaccgtagtggtgggcggcctgttggacaagtccaactcggagctggagagcagcgtgccgatcctgggcaagatcccgctggtgggggcgctgtttcgctcgaccgccaccaaagcgagcaagcgtaatttgatgctgtttatccgcccgaccatcattcgcagcaccgagggatatgcccggcagagccaacgcaagttaggcaagttcgacgccgagcagcaggacgatcgtgagctgaataacgcactgcgcggcgagatcgccggcgataagaaggcgctcgacaatcgggcgtttctcgccaccgttgccagtatcgacgcgttttattcgcggggagtgcgcccgtga

SEQ ID NO: 424277 - DNA, 423 bp, Serratia marcescens
atggtggccggggatggcgcgcccgttgagccgagccgtgaaaacgcgcgcgggccggggcgccatattgtctttcctcaggaagatgaaatcggaaaaattaatgacgcgcactggtttggccgctatcaagcggcgaaagacggcgaaaaggcgcacgggtataaagtcggcgagtgggcgatcggtgccgaactgctggctaacgcaccggaagccgctgcgcttggcaagatagccggtctgctgttcagcgataacgccaaaaaaagcctggtcatcgtcgagcatgacggcaagcaaaccggttatggcgttggcgaccgtctggccggcagcaatgccgttatcgtgcggatagtgaaaaataaaatactgctcgatgaaaacggctattacgccacgctgacgtttaaagagtag

SEQ ID NO: 424278 - DNA, 486 bp, Serratia marcescens
atggacatacataacattgccctgaacgagactctgttggaaaatgagttggtgatattaaacaacaatgaaaaaacgctgttgtttaaaaaagagaatgtgctcattgaaatgaccgaattacagcggcgcttcatgctgtgcctgttgagcggtatttataagaagaacgacattattcgcgcggtctggttttgcaaccatgagaccatcagcgacaataactattatcagatgatattccaatgccgctctttgctctcccgccacggtattcctggcgaggtgatcaagaccattccccgatttggcgtgatgttgagctttcaagcctgcgagcgtgcggccgctaatttgcagggggaatgcccgtcgtcatcggttaataagcgccggcgaacgtggctggacgccgtgaattataaagtggctctggtcatcacgctgctgttttccgtcgcgatggtggtcagtatttccgcttag

SEQ ID NO: 424279 - DNA, 495 bp, Serratia marcescens
atggaaaaaaagttaaatattttgtcagccacgctggtcggcctgtgcgtattgactggcagcgtggtgtattccctggtgcgcagccatcatgagttcggtgacttttcctgcgaagcgaacgccacgttcaattatttcaattcgctggacacgcaggcggcgcacgatgatatccagctgtcgctaaaaataaactacatctttttgtcgggcgataagggcgtgatgatgctgtcgggcctggccaacgatggcgaagagaagtatttcgttaaccgacgggttaatttcagctatgtctcgcaaggcagtttttatcgcttccactatggcgaggtgaattattcgccgcgcgataccttgccggaagaggtgtatacttactttttcagcaatgaatcgacgttttatcatattcgcagcgtagacaagaatacgttgatgtttagcaatgcctactcgccgatgtttttatgtaatatcgaatcctga

SEQ ID NO: 424280 - DNA, 798 bp, Serratia marcescens
atgatttatatcattgataaagatattacatttaacactgaaaacggttcattgaagagtataaagaagggacgggaagttttcttatccagcgttaattctagagtattcaaatgtttgcttgagcatggccacgaggcggtgagccgggatacgctgttgcagcaggtgtgggccgatcatggcctgagcgcctcttcggcgacgttgaatcaatatatcagcctgacgcggcgggcattgacgtctgtcggtttcaatgaacgcctgatcgttaccctctctaaaaaggggtatagactcaatagaataataccgatcgaccgactgcggattgatttacccgatcctccaccgcttgccgatgccccggttcccttggctgcgccgaccgcaacgtcaaaaaacacccaccactatttttttattctgctgcgcagcttatcgatcgtcgtgccattatcttttctggcgctgtgctttatctattacaaacatcatcgcgacagtgaaaagaagcaggtattgtcttacgtcggtacggtaaacggctgcccgatctactatgccggccattttttggagaatcatcaggacgactatttgcagttcttggtcaggaaggatctttatggccagcgttgccgccccggtgagattatcattaccaaggttaaccgttctcataatgccaatgaagacagcggacgccagtttatcgccaaatgcacgaaggacagtgcggccgttttgcataattgtgagagcgagtacatccgggcatggaaaaaaagttaa

SEQ ID NO: 424281 - DNA, 315 bp, Serratia marcescens
atgcaaccagaagacgcctctttcagccagcgggttttccatatcgtggccgccatcccgttcggcaaagtcaccacctacggcgaagtcgcccggctggccggctcgccgcgcgccgcgcgtcaggtcgggggcgtgctgcggcgtttgccggaaggcagcacgctgccctggcaccgggtgatcaaccgccacgggcagatctcgcagcagggggaggattttcaacggcagcggcaggcattgctggcggaggggattattttcggcccgcacagcacggtcgatttcgatcgctacggctggcgctggtaa

SEQ ID NO: 424282 - DNA, 492 bp, Serratia marcescens
atgaaactctggcaaatcgtaggcggtgccgcggcactgacgatcacgctggcgggatgcgcgcaaaagagtgctgatgtgcctacccaggcggccggtaacccggcggctgcgcaaacgcagattcagggcccggcggtgacaggttcggttaatatacgtcagcgcattgcgctgccgccggacgccgtactgacggtcaccctctctgatgcctcgctggcagatgcgccgtccaaagtgattgcacagcgcgcggtacgtactgaagggcagcaggcgccattcagctttacgctgccgtacaacccgtccgacatccaaccgaatgcgcgtatcattctgagcgcggcggtgacggtcaacgggcgactgatgtttattaccgacaccatccaggaagtggttaaccgcaacggcacccgtgccgatctgctgctggttccggttcagggtgtgccgattcaggctgcgccaaccgccatgcagtaa

SEQ ID NO: 424283 - DNA, 864 bp, Serratia marcescens
atgagccaggcattgcaaaacctcctcgatctgctggatctggagaaaatcgaagaagggctgttccgcggccagagtgaagatctggggctgcgccaggtgttcggcgggcaagtggtcggccaggcgctgtacgccgccaaacagacggtgccggacgaacgcagcgtgcattcgttccacagttacttcctgcgcccaggcgacagcagcaagcctatcgtttacgacgtggaaaccctgcgcgacggcaacagtttcagcgcgcgccgcgtcagcgccatccagcacggcaaacctatcttctatatgaccgcttccttccagagcccggaagcgggtttcgagcatcagaacctgatgccggacgtgccgccgccggaaggcctgctgtccgagtcagagatcgcccagaaactggcgcatatgctgccggaaaaagtgcgcgaaaaatttatcggccagaagccgatcgaaatgcgcccggtgaaattccacaacccgctgaaaggcagcgtggaagaaccgcatcgctacgtgtggttccgcgccaacggcagcatgccggacgatcaacgcatccaccaatatctgctgggctacgcgtcggactttaacttcctgccgacggcgctgcagccgcacggcgtcggcttcctcgagccgggcatgcaggtggccaccattgaccactcgatgtggttccaccgtccgttccgcatggatgactggctgctgtacgcggtggagagctcctccgcttccggcgcacggggctttgtgcgcggccagatctacacccgcgacggcgtactggtcgccaccaccgtgcaggaaggggtgattcgccagcgcgacgcctga

SEQ ID NO: 424284 - DNA, 1287 bp, Serratia marcescens
atgaaaagactgttatccatgttgggcctgagttcggtaaccctggttccttctttggccctggccgctccggcggtcgctgataaggccgacaacgcctttatgatgatctgcaccgcgttggtgctgttcatgacgctgcccggcatcgcgctgttttacggcggcctgctgcgcggcaaaaacgtgctgtcgatgctgacgcaggtcaccgtcaccttcgcgctggtttgcgtgctgtgggtgttgtatggctacagcctggcgttcagcgaaggcaatgcggtgttcggcgggttcgaaacggcgatgctgaaaggcatcggtatcgacagcgtcaccggcagcatcagccagatgatccacgtcgccttccaggcctccttcgcctgtatcaccgtggcgctggtggtgggcggcttcgccgaacgcattcgcttctcggcggtgctgatcttcgcgatcctgtggttcacgttgtcttacctgccgatcgcgcacatggtgtggggcggcggctacctggccgccgacggcgcattggacttcgccggcggcaccgtggtgcacatcaacgccgccagcgccgggttgatcggcgcctacctgatcggcaagcgcgccggcttcggtaaagaggccttcaaaccgcacaacctgccgatggtgtttaccggggcgtccatcctgtatatcggctggttcggctttaacgccggttccgccagcgcggccaacggcattgcggccctggcattcctcaacaccgtggttgccaccgcgggcgccattctctcctggaccttcgccgaatgggtgctgcgcggcaagccttcgctgctgggcgcctgctccggcatgatcgccgggctggttgcggtgacgccggcggcgggcaccgtgggcgtaggcggggcgttgatcatcggcctggtgggcggcgtcgccggcctgtggggcgtcgtgacgctgaaaaaatggctgaaagtggacgacacctgcgacgtattcggcgtgcacggggtgtgcggcatcgtcggctgcctgctgaccggcgtgttcaccgcctcttcactgggcggcaccggctacgccgaaggcgtgacgatgggccaccaggtctggatccagctggtgagcgtgctgatcacgctggtgtggtcgagcgtcgccgcctttatcgccttcaagatcgcgggcgccatggtggggctgagagtgccggaagagcaggaacgcgaagggctggacgtcaacagccacggcgagagcgcctacaaccaataa

SEQ ID NO: 424285 - DNA, 339 bp, Serratia marcescens
atgaagctggtgaccgtggtaatcaaaccgttcaagctggaggacgtgcgcgaggccctgtcctccgtgggcattcaggggttgaccgtaaccgaagtgaagggctttggccgccagaaggggcacgccgagctgtatcgcggcgctgaatataacgtcaacttcctgcccaaggtcaaaatcgatatcgccatcgccgacgatcagttggatgaagtggttgatgtgattagcaaagccgcctacaccggcaaaatcggcgacggcaaaattttcgttgccgagttgcaacgcgtgatccgcattcgcaccggcgaaaccgacgaatcggcactgtaa

SEQ ID NO: 424286 - DNA, 1779 bp, Serratia marcescens
atgaataaagtgcaaaagctgtggccgacgctgaagcggctgctggcctacggttcgccgtaccgcaaaccgctgggactggcggtgctgatgctgtggatcgcggcggcggcggaagtcgccgggccgatcctggtgagctatttcatcgataactacgtcgccaaagggcagctgccgctgacgatcgtcggcgggctggcggcggcttacattctgctggagctgctggcggcggcgctgcactacttccaggcgctgctgttcaaccaggctgcggtgggggtggtccagcggctgcgtaccgacgtgatggacgccgcgctgcgccagccgctcagcgccttcgacacccagccggtcgggcaattgatctcgcgcgtcaccaacgacaccgaggtgatcaaggatctgtacgtgatggtggtctccacggtgctgaaaagcgccgcgctgatcggcgccatgctggtggcgatgttcagcctcgactggcgcatggcgctggtggcggtctgcatcttcccggcggtgttcgtggtgatgggcatctatcaatactacagcacgccgatcgtgcgccgggtgcgcagctatctggcggacatcaacgacggtttcaacgaagtgatcaacggcatgggcgtgattcagcagttccgccagcaggtgcgcttcggcgagcgcatgagcgccgccagccagtcgcactatctggcgcgtatgcagaccctgcggctcgacggttttctgctgcggccgctgctcagcctgttttcggcgctggtgctgtgcggcctgctgatgctgttcggcttcagcggcgaaggcgtgattggcgtcggcgtgctctacgccttcatcaattacctggggcgcctgaacgaaccgctgatcgagctgacttcgcagcagtcgatcctgcagcaggcggtggtggccggcgaacgcatcttcgagctgatggatcgcagccagcagagttacggcgccgacgatcgtccgttggccggtggccgcatcgacatcaccgatctgagcttcgcctaccgcgcggacaaaaaggtgctgcagcacatttcgctggcggtgccgtcgcgcggcttcgtggcgctggtcgggcataccggcagcggcaagagcaccttggccaacctgctgatgggctattacccggtcagcgaaggggaagtgcgcctcgatggccgcccgatctccagcctgtcgcaccgcacgctgcgccagggcgtggcgatggtgcagcaggatccggtggtgatcgccgattcggtgctggctaacgtcacgctggggcgtaacatcgaggaagacgccgtgtggcgggcgctggaaacggtgcagctggcggatctggtgcgcggcttcccgcagggcattcacacccggctgggggagcagggcaataacctgtcggtcgggcagaaacagctgctggcgatggcgcgggtgttggtgcaggcgccgcagatcctgatcctcgacgaggcgaccgccaatatcgactcgggcaccgaacaggcgatccagcgcgcgctgcgtgcgatccgcgagcacaccacgctggtggtgatcgcccaccggctgtcgaccatcgtcgatgccgactccatcctggtgctgcatcgcggccaggcggtagagcagggcaaccatcagcagctgctggcgcagcaggggcgctactaccagatgtaccagctgcagctggcgggcgagcagctggcggaagcggtgcgcgaagagagccaacccgcctga

SEQ ID NO: 424287 - DNA, 1776 bp, Serratia marcescens
gtgagattatttgctcaaatcggctggtacttccgccgggagtggcgccgctacctcggggcggtggtgctgctgatcgtcatcgccatcctgcaactgttgccgcctaagctggtcggcatcatcgtggacggcgtcaccgaaaaacaaatgtctaccggcgtgctgatggcctggctcgggctgatgatcggcaccgcgatcgtcgtttacctgctgcgctatgtgtggcgggtattgctgttcggcgcgtcctaccagctggcggtcgaactgcgcgagaacttttaccgccagctcagccggcaaaacccggcgttctacctgcgccaccgcaccggcgatctgatggcgcgcgccaccaacgacgtggaccgcgtggtgttcgccgccggtgaaggcgtgctgacgctggtggattcgctggtgatggggttggtggtgctggtggtgatgagcacccaaatcagctggcagctgacggtgctggcgttgatcccgatgccgctgatggcgatcgccatcaaatattacggcgaccagctgcaccagcgctttaaatcggcgcaggcggcgttttccagcctgaacgatcaggcgcaggaaagcatgaccagcatccgcatgatcaaggcctttgggctggaagatcaccaatccaaccgctttgccgacgtcgcggcgcagaccggcgccaagaacatgcacgtggcgcgggtggatgcgcgcttcgatccgaccatttatatcgccatcggcgcctctaacctgctggccatcggcggcggcagctggatggtggtgaacgggtcgctgacgctcgggcagctgaccagctttgtgatgtacctcggcctgatgatctggccaatgctggcgctggcctggatgttcaacatcgtcgagcgcggcagcgcggcctacagccgcatccgcagcctgctcgacgaggcgccggcggtgcaggacggcccgcaggcgctgccggccgggcgcggcgtgctggacgtggatatccgcgcgttccactacccggaaaacccgcacccggcgctgcatgatgtggcgctgacgctgaaaccggggcaaatgctggggctgtgcgggccgaccggcgccggcaaatcgacgctgctgtcgctgatccagcgccagttcgacgtcgatcaagggcagatccgctatcacggcctgccgctgccgcaggtcaaactcgacgactggcgttcgcggctgtcggtggtgagccagacgccgttcctgttctccgataccgtggcgaacaacatcgcgctgggtcatccgggcgcgacgcaggcgcagatcgaacaggcggcgcggttggccagcgttcatgaggacattctgcggttgccgcagggctatgacaccgaggtgggcgaacgcggcgtgatgctgtcgggcgggcagaaacagcgaatctccattgcgcgcgcgctgctgctggatgcggagatcctgatcctcgacgacgcgctgtcggcggtggacggccgcaccgaacaccagatcctgcacaacctgcgcagctgggggcaagatcgcacggtgatcatcagcgcgcaccggctgtcggcgttgaccgaagccggcgagatcctggtgatgcagcacggtggcgtggcgcagcgcggcgatcatgcggcgctggcggcgcagccgggctggtatcgcgatatgtaccgttatcagcagctggaagcggcgctggacgaagcgccggaaaacggcgaggaggcgttggccgatgaataa

SEQ ID NO: 424288 - DNA, 462 bp, Serratia marcescens
atgttagataaaacagaccgtaagctgctgtgcatgctgcagcaagattgcacccagtcgctgcaggcgctggccgatgcggtcaatttgacctcgacgccgtgctggaaacggctgaagcgcctggaagacgagggctatatccgcggccgggtggcgctgctggataacgaaaagctcggcctggggctgacggcgtttgtgctgatcaagactcagcagcacagcagcgagtggtatcaggcgtttgtgcagttgaccagccagatgcccgaggtgctggcgttctaccgcatggcgggggagtacgattacctgatgcaggtcgaagtggcggacatgaaaagctacgacggcttttataagcgcctggtgaacggcgtaccgggcctcatcgacgtcacctcgagctttgccatggaaaaaatcaaatacaccactgcattgccggtgccggagtga

SEQ ID NO: 424289 - DNA, 1041 bp, Serratia marcescens
atgacaaactcttgggtaaaatatgctatcggtgaaatagaagcggattttcagcgctccgccgatacgcacctgattcgcctgaacctgccggcgtttcccggcatctgcctgtatctgaaagatgagagcacccacccgaccggcagcctgaaacaccgcctggcgcgctcgctgttcctttatggcctgtgcaacggctggatcaccgaaaacaccaccatcatcgaggcctcttccggcagcacagcggtgtccgaagcctacttcgcccgtctgatcggcctgccgttcatcgcggtgatgccgtcctgcaccgcgcgccgcaaggtggagcagatcgccttttacggcggccgctgtcacttcgtcgatcacgccgcccagatctacgccgcctccgaacagctggcgaaagagctgaacggccactatatggatcagttcacctacgccgagcgcgccaccgactggcgcggcaacaacaatatcgccgacagcatcttccgccagatggcgcgcgaacccttcccggtgccgaaacacatcgtgatgagcgccggcaccggcggcacctccgccacgctggggcgctacatccgctatcaggggcacgatacgcaattgacggtggtcgatccggaaaattcggtgttctatgactgcttccaccacggcgatcgcaccctgatcggcagctgcggcagccgtatcgaaggcattggccgcccgcgcgccgagccgtcgttcatcccgtcggtggtcgacaacatgctgcgggtgccggatgccgccagcgtcgccaccattcactggctggaaggcgtgctcggccgcaaggttggcgcttccaccggcaccaacgtctggggggcgctgcaattggcgaaacagatgcgggaaaacggcgagcaagggtcgatcgtcaccctgctgtgcgacagcggcgagcgttatctggatacctattacaacccggaatgggtcagcaataacatcggcgatctgcagccgtatctggcgcagctggcggatttgtaa

SEQ ID NO: 424290 - DNA, 825 bp, Serratia marcescens
atgtatcgcctggcagctttcgatatggacggcacgctgttgatgccggatcaccgggttggcccggaaacgctggcggtgctgaaccagctggtggaacgggagatggtggtgacgttcgccaccgggcggcactacctcgacgcgcagccgatcatggcgcagctggggctgcagggctacctgatcaccggcaacggcacgcgggtgtatgacaaccgcggccaacagctgcacgctaccgatctgccggcggcggtcgccgaggaggttttgcatcatcattggcgcacccgcgccagcatgcacgtgttccgcgacgaaggctggctgaccgagtttcccgtgccggaagagatgctgcgggcgcaccacctgagcggctttcgttttcagctggctgacgtgcgccgcctgccggcgttcggcaacagcaaggtgtgctttgtcgcgccgcatgaggagctgctggcgttgcaggtgcagctgcgggcacagctgggcgacgaggcagacctgtgcttttccgcctacgattgcctggaggtgctgccgctcggttgcaataagggcacggcgctggaccggctgagccgccatctggggctgacgatggccgactgcatggcgttcggcgacgcgatgaacgacaaagagatgctgggggcggtggggcacggcgtggtgatgggcaacgccctgccgcagctgaaatccctgctgccgcagctaccggttatcggccattgccagcagcaggcggtggcccactatttacaacattggctgcgttcaccttgcctcacctattcccccgaagaatga

SEQ ID NO: 424291 - DNA, 1716 bp, Serratia marcescens
atgcgcctggttcaccgcctcagccaatatcaacgcctgtaccatcagctcggcagcgcgccggtcgccgtgaccatcggcgagctggcggcgatgttctactgcagcgagcggcacgcccgcacgctggtgcaacagctgcaggatcagggctggctgagctggcattcgcagcccggccggggcaaacgcgctcgcctgcactgcctgaaaaccccggatgagctacgcgcgcagctgttgcaacagctgctgcaacagggcaaccatcagggggcgctggagatggcgcagctcgatccgcagcacctgcaggatctgctcagcccgcacctcggcgggcaatggcaggccggcagcccgacgctgcgcattccctattaccgcacgctggaagcgctcgacccgctcacgctgaccggccgcgccgagcaacacctggtgtcgaccctgcacgccgggctgacgcgcctgatgaccggtaacccggaaccgcagcccgatctggcgcaccattggcagattagcgatcgcggcctgcgctggcgcttctttctgcgcagccagctgcgctggcacaacggcgaaccgttgaccggccaccaactgctgcaaacgctggaaaaactgcaacaccacccgcgcagccaaccgagcctggccaacgtcgcgcgcatcagcctgccgcatccgctgtgcgttcagttcgatctgcatctgccggattactggctggcccaccggctggcggaactgccttgcctgatgacccacccggagctgccggccatcggcgccggcccgttcaagctgacgctgaatgaaccgcagctggtgcggctggaacagcacgccggttaccacctgcagcatccgtatctggacaccatcgaatactggatcacccccgatctgcccaccgccgccccctacaccagctgccagcacccggtgcgcatcaccatcggtcaacaagacgatttggcgcaggcccggccggtgcagcgcagcatgagcctgggctggtgttatttggcgctgaacctgcgccacggcgtgctgagcgaagcccaggggcaaaagctgctgatgctgatccagcagtccggcctgctgagccatctgccgatccccaacagcgtgatcacccccagcaatgaaatgctgcccggctggcgcatcccccgccaacaggtcgaagaggacgtcgccctgcccgcccggctgacgctgttgtatcggccgccggtcgagctggaaacggtgacggccgcgctacagcggctgctcgcgcagcacggctgcgagctggaagtgcgctactacgccggcaagcgctggcaaagcgaggaacagatcgcccaggccgacctgctgctggcggacaacctgatcggcgaagcgccggaggcgacgctggagagctggctgcggcaggatacgctgtggcgcggcatcctgacggaaagccgctggcaacagcaacaggacacgctgcggcagatccagcagctgcaggcgcagcaaccgcgcttcgcacaactgcaggcttattatcaacggctgatggccgccgccatcatcacgccgctgtttcactaccagtatcagatcagcgcgccgccgcgcatgcatggcgtcacgctgaccgcccacggctggttcgatttttgccaggcgtggctgccgccgccggtggacgacgccccggcctga

SEQ ID NO: 424292 - DNA, 699 bp, Serratia marcescens
atgaagcgcgcggttgtcgttttcagcggtggacaagactccacgacctgcttgatccaggcattgcaacagtatgacgaagttcactgcgtcacgttcgattacggccagcgccatcgcgccgagattgaagtggctcaggagctgtcggtggccctcggcgccaaggcgcacaaggtgctggacgtaacgctgctcaacgagctggccgtcagcagcctgacacgcgacaatatccctgttcccgcctacgaccccaatcagaaaaatgcgctgccgagcaccttcgtgccgggccgcaacatcctgttcctgacgctggcggcgatctacgcctaccaggtggaagcggaagcggtgatcaccggcgtgtgtgaaaccgatttctccggctatcccgattgccgcgacgagttcgttaaagcgttgaacaaggcggtgacgctgggcatcgcccgcgatatccgcttcgaaacgccgctgatgtggctgaacaaggccgagacctgggcgctggcggactattaccaccagctggatcgcgtgcgccaggatacgctgacctgctacaacggcatcaagggtgacggctgcggcgagtgcgccgcctgcaacctgcgcgccaatggcctgacgcagtatcgcgccaatcaggcggaagtgatggccgcattgaaacaaaaggccggtctggcctga

SEQ ID NO: 424293 - DNA, 414 bp, Serratia marcescens
atgcaaacctttatcaaagttcgcggttatcatcttgatgtttaccagcacgttaacaatgctcgctatctggagtttctggaagaggcgcgttgggagtggctggagaacgaggccgggttccgctggatgacggaaaacaacatcgctttcatcgtggtgaacatcaatatcaattaccgcagcccggcggtattgggggataagctgcgtatcgacagccagatggtgcagctcaacggcaagagcggcgtgttgagccaaaaggtgacgcaggatccggcggggacgccggtggccgacgcgctgctgactttcgtgtgcgtcgatctgaaaacgcagcgtgcgctgccgctcgagggggaactgcgtgcgcatctggaggcgcttgtgccgcaggaaaactcacggtaa

SEQ ID NO: 424294 - DNA, 381 bp, Serratia marcescens
atgcaacattcagagaaaaaagcgtttttcggttaccgtcgtcacgttaacgccgcgctgaccgcgctgttgttatgcctggctgggccgggcgccgcggcggaaaaaaccgaggcgccggcgcccatgctctcaacgccgacgagcaatggcgggcaacagacgatgaccagggtggccgaagaaacggcggtcagcatcaatcaggctaccgccgaacagctggccgccgccttgagcggcgtcggcctgaagaaggcggaaggcatcgtgcgctaccgcgagcagaatgggccattcacccaggttgagcagttgcaggaggtgccgggcatcgggccggcgctgtttgagaagaaccgcgcccggctgaaaatgtga

SEQ ID NO: 424295 - DNA, 1884 bp, Serratia marcescens
atgatggacaatttacgcgcggctgctaatcacgtcgtgctcaaaatcatcctggccctgatcatcctgtcattcgttctgaccggggtgggtaactacctgatcggcggctccggcgattatgctgcgaaagtaaatggtcagacgatcgagcgcgctcagctggaacaggctttccaaagcgagcgtagccgcatgcagcagcagctgggtgaccagttctccgcgctggccggcaacgaaggctatatgcagcagatgcgccgtcaggtgttgtcccagttgatcgacaacatgctgctcgaccagtacgccaagaagctgggcctggcggtcagcgacgatcagatcaaggacgccatccgcaaggcgccttacttccagaccaacggccagttcgataacgccaaatacctcgacctgatcggccgcatgggctacaccgccgacaacttcgcgcagtcgatgcgccagcagttggtcaatcagcaggtgatccaggccttcggcgattccggcttcgtgctgccgtctgaatcgcaagccatggcggcgttggtgctgcaggagcgcgacgtgcgcctggcgaccatcgatttgaaagcgctgcaggcgaaacagagcgccggcgacgacgaactgaaggcgtattacgatcagaacaagaacagcttcatcgcacctgagcaggtgaaggtgagctatatcccgctggacgctgcgtccatgcaggacaaggtgaaagtgagtgaagaagacatcagcgcttactacgaccagcacaagagcagctacggccagccggagcgtaaaaactacagcgtgatccagctgaaaaccgaggcggaagccaacgcggcgctggacgagctgaagaagggcgccgatttcgccacgctggcgaaagagaaatccaccgatatcatctcacgccgcaccggcggcgagctgggttggctggagccggaaaccaccgccgacgagctgaagcaggctaacctgaccgagaaagggcagctgtccggcgtggtgaagtcttccgtcggctacctgatcgtgcgtttgaacgatattgagcctgagaaagtgaagccgctgagcgaagtgcatgacgccatcgccaagcaggtgcagcaggagaaagcggtagacgcgtattacgcgctgcagcagaaggtgagcgaagcggcgaccagcgacaacgaatctctggcctcggctgaagaagcggccggcgtgaaagcggcgcaaagcgactggttcacccgtgacaacattcctgccgcgctgaacttcaagccggtcgtgcaggcgatcttcgacggctcgctgatcggcgagaacggcgcgccgggcagcaactccgacgtgatcaccgtagacggcgaccgcgccttcgtggtgcgcgtgagcggccacaagccggaaggcatcgaaccgttcgaccaggtgaaagaccgcgtggcggaactggtgaagcgcaacaaggcgctgcaggcagcgaaactgcagggcgagaagctgctggttgagctgaagcagggcaagggcgacgaggcgatgaaagccgccggcctgagctttggcgccgtgcagaagatggcgcgcgcgccggaagacagccagctggtagagagcgtgttcgcgctgccgcacccgcaggacggtaaaccggtatacggcatgtcgcaggatcgtcaggacaacgtggtgctgatcgcgctcgatgcggtgaagccaggcacgttgccggaagacgaaatgaaaaccttcgttggcaagatggaagagggcgcgaccggcgtctccttcgattcgctgctggcgagcctgcgtaaagaagccgagatcaaaatgggcgccgctgagcaacagcctcagtaa

SEQ ID NO: 424296 - DNA, 273 bp, Serratia marcescens
gtgaataagtcacaactgatcgacaagattgccgcaggtgctgatatttccaaagcggcagcgggacgtgctttagacgcagtaatcgcttccgttaccgactctctgaaagcaggggatgacgtggctctggtaggtttcggttccttcaccgtgcgtgaacgttcggctcgtaccggccgcaacccgcagaccggtaaagagatcaaaatcgcggcagccaaagtaccggccttccgtgcagggaaagcgctgaaagacgctgtaaactga

SEQ ID NO: 424297 - DNA, 2403 bp, Serratia marcescens
atgagattccccctcaacctggcggaaattaaactaagagagagctctatgaaccctgagcgttccgaacgcattgaaatccccgtcctgccattgcgcgacgtggtggtttatccgcacatggtgatcccgttatttgttggccgggaaaaatcgattcggtgcctcgaagccgcaatggatcacgataagaagatcatgctggtggcacagaaagaggcctcaacggatgaacctggcattaacgacttgttctcggttggcaccgtagcgtcgatcctgcagatgttgaagctgccggacggcacggtaaaagtgctggtcgaggggctgcagcgcgcacgcatcactacgctgtccgacagcggtgagcattttgccgcgcaggcggaataccttgagtcgccggcgatcgacgagcgcgagcaggaagtgctggtgcgcaccgcgatcaatcagtttgaaggctatatcaagctgaacaaaaaaatcccgccggaggtgctgacttcactgaacagcatcgacgacgccgcgcgcctggcggacaccatcgctgcccatatgccgctgaaactcagcgacaagcagtcggtgctcgagatgtccgacatcaccgagcgcctggaatacctgatggcgatgatggaatcggagatcgacctgctgcaggtcgagaaacgcatccgcaaccgcgtcaagaagcagatggagaagagccagcgcgagtactatctgaatgagcagatgaaggcgattcagaaagaactgggcgagatggacgacgcgccggacgagcacgaagcgctgaagcgcaagatcgatgcggcgaaaatgccgaaagaggcgcgcgagaaaaccgaagcggaactgcaaaagctgaagatgatgtcgccgatgtcggcggaagcgaccgtggtgcgcggctacatcgactggatgctgcaggtgccgtggaatgcgcgcagcaaggtgaaaaaagacctgaacaaggcgcaggaagtgctcgataccgatcactacggcctggagcgcgtcaaggatcgcattctcgagtacctcgcggtgcagagccgcgttagcaaaatcaaggggccgatcctgtgtctggtggggccgccgggcgtgggtaaaacctcgctggggcagtcgatcgccaaagcgaccggccgccagtacgtgcgcatggcgctgggcggcgtgcgtgacgaagcggaaatccgcggtcaccgccgcacctacatcggttcgatgccgggcaaactgatccagaagatggccaaggtcggggtgaagaacccgctgttcctgctggatgagatcgacaagatgtcttccgacatgcgcggcgatccggcctccgctctgctggaggtgctggatccggaacagaacgtggcgttcaacgaccactacctggaagtggattacgatctgtccgacgtgatgttcgtcgccacctcgaactcgatgaacattcctgcgccgctgctggaccgtatggaagtgatccgcctgtcgggttacaccgaggacgagaagctcaacatcgccaagcagcacctgctgccgaagcagcttgagcgcaacgcgctgaaaaaaggcgagctgacggtcgacgacagcgccattatcggcatcattcgcttctacacccgcgaagccggggtgcgcagcctggagcgtgaaatctccaagctgtgccgtaaagcggtgaaaacgctgctgatggacaagaagctcaagcatctcgagatcaacggcgacaacctgaaggattacctgggcgtgcagcgcgtcgattacggccgtgcggataccgaaaaccgcgtgggcgaagtcaccgggctggcgtggacggaagtgggtggcgatctgctgaccatcgaaaccgcctgcgtgccgggcaaaggcaagctgacctacaccggttccctgggcgaagtgatgcaggaatcgattcaggcggcgctgaccgtggtgcgcgcgcgcgcggagaaattgggcatcaacgccgatttctacgagaaacgcgacatccacgtgcacgtgccggaaggggcgacgccgaaagacggcccgagcgccggtatcgcgatgtgcaccgcgctggtctcctgcctgaccggcaacccggtacgcgccgatgtggcgatgaccggggagatcacgctgcgcggtcaggtgttgccgatcggcggcctgaaagagaagctgttggcggcgcatcgcggcggcatcaaaaccgtgctgatcccttacgagaacaagcgcgatctggaagagattccggacaatgttatcgccgatctggagattcatccggtgcagcgaatcgatgaagttttgaacattgcgttgcaaaacccggccttcggcgcactgccggtagcggcaaaatag

SEQ ID NO: 424298 - DNA, 1272 bp, Serratia marcescens
atgacagataagcgcaaagacggttcaggaaagctgctgtactgctctttttgcggcaaaagccagcatgaagtgcgtaagctgattgccgggccgtcagtgtatatctgcgatgaatgtgtcgatctgtgtaacgacattattcgcgaagagattaaagaagttgccccgcatcgtgagcgcagtgcgctgccgacgccgcacgagatccgccaccacctggatgactacgtcatcggccaggagcaggcgaagaaagtgctggcggttgcggtgtacaaccactacaaacgcctgcgcaacggcgataccagcaacggtatcgagttgggcaagagcaacatcttgctgattggcccgaccggcagcggtaaaaccctgctggcggaaacgctggcgcgcttcctggacgtgccgttcaccatggccgacgccaccacgctgaccgaagccggttacgtgggcgaggacgtggaaaatattatccagaagctgttgcaaaaatgtgactatgacgtgcagaaagcgcagcgcggcatcgtttatatcgatgaaatcgataagatttcccgcaagtccgataacccgtcgatcacgcgtgacgtctcgggtgaaggcgtgcagcaggcgctgctgaagctgattgaaggcaccatcgccgcggttccgccgcagggtgggcgcaagcatccgcaacaggagttcctgcaggttgatacctccaagatcctgtttatctgcggcggcgctttcgccggcctggataaggtgatcggtcagcgcgtcaacaccggctccggcatcggcttcggcgcgaccgtcaagggcgagtccgagaaggcgaccgagggcgaactgctgctgcaggccgaaccggaagatttgatcaagttcggtctgatcccagagttcatcggccgtctgccggtggtggcgaccctgagcgagctgagcgaagatgcgctgattcagatcctgaaagagccgaagaacgccctgaccaagcagtatcaggcgctgttcaatctggaaggcgtggagctggagttccgcgacgaagcgctgaacgccatcgccaagaaagccatggcgcgcaaaaccggcgcccgcggcctgcgttccatcgtggaaggcgcgctgctcgacaccatgtacgatctgccgtcgatggacagcgtagacaaagtggtgatcgacgagtcggtcatcgccggccaatccaagccgctgttgatctacggcaagccggaagcccaggcatctggcgaataa

SEQ ID NO: 424299 - DNA, 624 bp, Serratia marcescens
atgtcatacagtggcgaacgagatcaatttgcaccgaacatggcgctggtgccgatggtggtagagcagacttcacgcggggagcgttcttacgacatctattcccgcctgctgaaagagcgcatcattttcctgaccggccaggtggaagatcacatggccaacctgatcgtggcgcaaatgctgttcctcgaagcggaaagcccggaaaaagacatttacctctacatcaactcgccgggtggggtaattaccgcgggcatgtcgatttacgacaccatgaagttcatcaagccggacgtcagcaccatctgtatgggccaggcgtgctcgatgggctccttcctgctgaccgcgggtgccaaaggcaaacgtttctgcctgcctaactcgcgcgtgatgattcaccagccgctgggcggctaccagggccaggcgacggacatcgaaatccatgcgcgtgaaatccttaaggtgaaagcgcgcatgaacgaactgatggcggagcataccggccagccgctggagcagatcgagcgcgacaccgagcgcgatcgctttatgaccgcggaagaagccgtggaatacggcctggttgacggcattctgacacaccgcagctag

SEQ ID NO: 424300 - DNA, 1305 bp, Serratia marcescens
atgcaagtttcagtagaaaccactcaaggccttgggcgccgtctctctattactgtaccggctgatactatcaagcaggcggtgaagaaagagctgatcaacgcagcgaaaagcgtgcgtatcgacggcttccgcaaaggcaaagtgccgatgaacatcgtggaacagcgttacggcgcctctgttcgtcaggacgtgctgggcgaagcgatgcagcgcagcttcgttgacgcgatcatcaaagaaaagattaatccggccggcgcaccaaactacgtgccgggcgagtacaaagaaggtgaagacttcaccttcgccgttgaattcgaagtgtatccagaagttgagctgaaaggcctggaaaacatcgaagttgaaaaacctgtggttgaagtgaacgacgaagacgtcgacgcgatgctggacaccctgcgcaagcagcaggcgacctggaaagaaaccgatcgcgcagcggaagctgaagatcgcgtgaccgttgacttcaccggttctatcgacggtgaagagttcgaaggcggcaaagcgtccgacttcgtactggcaatgggccagggccgcatgatcccaggcttcgaagaaggcctggtcggtcacaaagcgggcgaagagttctccatcgacgtgaacttcccggaagattaccacgcggaaaacctgaagggcaaagcggccaaattcgctatcgtgctgaagaaagttgaagagcgcgaactgccggagctgaccgaagagttcatcaagcgtttcggcgtggcggacggttccgttgccggcctgcgcaccgaagttcgcaagaacatggagcgcgagctgaaaggcgccgtgcgtaaccgcatcaagtctcaggcgatcgacggcctggtgagcgcgaacgaaatcgacgtgcctgctgccctgatcgacggcgaaatcgacgtgctgcgtcgtcaggctgcacagcgtttcggcggcaacgagaagcaagcgctggaactgccacgcgagctgttcgaagagcaagcgaaacgccgcgtagtggttggcctgctgctgggcgaagtgatcagcaccaacgacctgaaagctgacgaagaccgcgtgaagacgctgatcgaagaaatggcttctgcctacgaagatccgagcgaagtcatcgagttctacagcaaaaacaaagagctgatgaacaacatgcgcaacgtggctctggaagagcaagcggttgaagccctgctggcaaaagcgaaagtgactgaaaaagccactaccttcagcgagctgatgaaccagactcaacaggcgtaa

SEQ ID NO: 424301 - DNA, 315 bp, Serratia marcescens
atgattcgcgagcaaatagaagcaaagttaagggcggcgtttgagcccgcgtatctggaagtcgttgatgaaagctatcgtcataacgttccggcgggttcagaaagccatttcaaagtggtattggtcagcgatcgcttcgtcggcgaacgttttttgacgcgccaccgctccatctacggcgtgctgtcggaggagctggcggacggcgtacacgcgctggcgctgcacacctacacgctcaaagagtgggaagggttgcaggataccgtgccggcttcgccgccgtgtcgcggcgccgggacgctggcctga

SEQ ID NO: 424302 - DNA, 579 bp, Serratia marcescens
atgttaaagaaactttgtcttcctttgctggccgccctgctgctggccggctgcgcgaccagcagcaacaccttgaacgtcacgccgaaaatcgttctgccgcagcaggatcctaccctgcagggcatcaccgtcagcatcaacggtgcggatcagcgcaccgatcaggcgctggccaaggtgaatcgcgacggccaactggtcacgctgacgccatcgcgcgatctgcgtttcctgctgcaggaagtactggagaaacagatgggcgcacgcggctacatgatcggcgccgacggcccggtggcgctgcaaattgtcgtcaataatctgtacgcggacgtctccgaaggcaacctgcgctacaacatcaccaccaaagccgacatctcgatcatcgcccaggcgaagaacggcaacaagcaggtgaaaaattaccgctcgacgtataacgtgcagggcgccttcacggccaccaacgagaagatcaccgacgccgtcaactccgtgctgggcgacgtgatcgccgatatggcccaggacaccagcgtcaacgatttcatcaagcaaaacgcgcgttaa

SEQ ID NO: 424303 - DNA, 1479 bp, Serratia marcescens
atgtcgaaacactatctgaacattttcacccagcgtaactccgccattctgctgctgctgggcttcgcgtcgggtctgccgctggcattgacctccggcacgctgcaagcctggatgaccgtcgaaaatatcgatctgaaaaccatcggcatcttctcgctggtgggccaggcctacgtcttcaaattcctctggtcgccgttcatggaccgctataccccgccgttcctcgggcggcggcgcggttggctgctggtcagccagctgctgctggtggcggcgatcgtggcgatgggcttcatgcagcccgcgcagcacctatggtggctggcggcgttggcggtgctggtggcgttctgctccgcctcgcaagatatcgtgttcgacgcctacaagaccgatctgctgaaagccgaagagcgcggggcgggcgcggcgatctcggtgctgggttaccggctggcgatgctggtttccggcggcctggcgctgtggctggcggatcgctatttcggctggcaagccacctactggctgatggccggattgatgctgatcggcgtggccgccacgctgctggcgccggagccggacgaaagcatcccggcgccgcgcaccatggaacaggcggtcgtcgcgccgctgcgtgatttcttcggccgcaacaacgcctggctgatcctgctgctgatcgtgatgtacaaaatgggcgacgccttcgccggcagcctgagcaccaccttcctgatccgcggcgtggggttcgacgccggtgaagtcgggctggtcaacaaaaccctcggcctgttcgccaccatcgtcggcgccctgttcggcggtgtgctgatgcagcgtctcagcctgttccgcgcgctgatgctgttcggcgtcctgcaggcggtctccaacctcgggtattggatcctggcggtgaccgacaagagtctgctcaccatgggcagcgccatcttcctcgaaaacctgtgtggcggcatgggcaccgcggccttcgtggcgctgctgatgacgctgtgcaaccggtcgttctccgccacccagttcgcgctgctgtcggcgctgtccgccgtggggcgcgtctatgtcggcccgatcgccggctggttcgtcgaagcccacggctggccgttgttctatctgttctctatcgccgccgccctgcccggcttgctgctgctcggcatctgccgtcagacgctggagcacacccagcagcatggcgacttcatgccgcgcaccgagttttcagaatcttaccgttgggcgctgcgcctgctgacgctaggctgttcgctgttgggcctgtggttgctgttgctgatcgccaatgcgctggactggacgcaggcaccgcttctggccgatcggctgctgcaggtcggcgccgcgctgagcctgctcggcgtcgcgatgggcagcacgctggattacctggcccttcgccgcacccgtttggcataa

SEQ ID NO: 424304 - DNA, 951 bp, Serratia marcescens
atgagacttaagaaatacaataaaagtattgggatgctgtcattaatcgcagccactgtattgctcagtggttgcgatatggttttgatgaatcccaaaggagcaattggtgttgagcaacggacactgattatcactgcaatcgcgttgatgttgatcgtggtggtgccagttatcttcatggcgttcgcctttgcttggaagtatcgcgcttccaacaaagacgccaagtacagtccgaactgggcccactccaacaagatcgaagcggtcgtctggaccattcctatcattatcatcgccatccttggcaccattacctggaagaccacccacgaactcgacccgttcaagccgattgtcaccgacaagaagccgatgacgatcgaagtggtgtcgctcgactggaaatggctgttcatctacccggaacaaggcattgcgaccgttaatgagctggctttcccgaaagatgttccagtcgaattcaagatcacctctaactcggtaatgaactcgttctttatcccgcagttgggtggacagatttatgcgatggccggcatgcagaccaaactgcacctgatcggcaacgaagccggtgcctacaagggcatctccagcagctacagcggcgcaggcttctccggcatgaaattcaccgcgatcgttaccccgaccgaaggcgacttcgatcagtgggtggccaaggtgaaggcatcgtctaaaaacctgaacaccaccgacgactttaacaaactggcagagccgagtgaaaacaacccggttgagtactttgccgctgtcaaaccgaatttgttcaaagaaacaattgccaaattcatgggcgacatggatatgcacaagggcgctggcgcgcacgaaggcatggacatgagccaaggtatggacatgggtgaacatgctgctcacgccggagccgaggaataa

SEQ ID NO: 424305 - DNA, 1992 bp, Serratia marcescens
atgttgggaaaattaacacttgatgcggttccgtaccacgaaccgatcatcatggtcaccgtagccgcaattattgtcgggggcctggcagtgctggcgctgctgacatatttcggcaaatggaagtggttgtggagcgaatggctgacttcggtcgaccataaaaaaattggtatcatgtacatcatcgtggcgatggtcatgctgctgcgcggtttcgccgacgccatcatgatgcgtagccagcaggcgttggcgtccgccggcgaagccgggttcctgccgccgcaccactacgaccagatcttcaccgcgcacggcgttatcatgatcttcttcatggcgatgcctttcgtggtcggcctgatgaacgtcgtggtgccgctgcaaatcggtgcgcgcgacgtcgccttcccgttcctgaactccctgagcttctggttcttcgtggtgggcgttgtgctgatcaacatctccctgggggtcggtgagttcgctcagaccggttggctggcgtatccgccgctgtcgggtaaagagtacagtcctggcgtcggggtcgattactggatctggagtctgcagatttccggtctgggtaccctgctgaccggcgtgaacttcttcgccaccattctgaagatgcgtgccccaggcatgcctatgatgaagatgccggtgttcacctgggcggcgctgtgtaccaacgtcctgatcatcgtttctttcccaattctgaccgtcaccatcgcgctgctgaccctggatcgctatctgggcacccatttcttcaccaatgatatgggcggcaacatgatgatgtacatcaacctgatttgggcctggggtcacccagaggtgtatatcctggttctgccggtgttcggcgtgttctccgaagtcaccgcgaccttctccagaaaacgcctgttcggctatacctcactggtatgggcaaccatcgcgatcaccgttctgtcgttcatcgtctggctgcaccacttctttaccatggggtccggcgcgaacgttaacgccttcttcggtatcgccaccatgatcatttccatcccgaccggggtgaaaatcttcaactggctgttcaccatgtatcagggccgtatcaagctcaactccgcgatgctgtggaccgttggcttcatcatcaccttctccgtaggtggtatgaccggcgttctgctggcggtgccgggcgcgaacttcgtgctgcacaacagcctgttcctgatcgctcacttccacaacgtcatcatcggcggcgtggtgttcggttgcttcgcgggcctgacctactggttcccgaaatccttcggcttcacgctgaacgaaaaatggggcatccgcgcgttctggttctggatcatcggcttcttcaccgccttcatgccgctgtacgcattgggctttatgggtatgacccgtcgtatcagccagaacatcaaccctgagttccaccctctgctgctggttgcagccggcggtgcggcgctgatcgcctgcggcatcctgtgccagctgatccagatcttcgtcagtatccgtgaccgcgaacaaaaccgcgatctgaccggtgacccatggggcgctcgtactctggagtggtcaacttcgtctccaccgccgttctataactttgccgtagtgccgcagattcatgaccgtgatgaattctgggacatgaaagaaaaaggcgaagcgtataagaaaccggctaaatacgaaccgattcatatgcctaagaacaccggcgccggcgttatcatcgccttcttcagcctggtattcggtttcgcaatgatttgggaaatctggtggatggctctggccggcttcatcggtatgatcgttgtctggatcggcaagagcttcgatcacgatgttgactactatgtgcaggttgatgaaatcgagcgcattgagaaccaacactacgaacaaatccgtaaagcaggcgtgaaccatgtcaactga

SEQ ID NO: 424306 - DNA, 615 bp, Serratia marcescens
atgtcaactgaaactctgaccaatcataacgcagcccatgcagagcatgggcaccacgatgcgggtgagaccaaagtcttcggattctggatctacctgatgagcgactgtattttgtttgcgagcttgttcgcgacttatgcagtcctggtgaacgggaccgctggcggtccctcaggtaaagatatcttcgacctgaagtttgtcctggtcgaaactttcctgctgttgttcagctccatcacctacggcatggcgatgatcgccatgaacaaaggtaaagttggcggtgtaaacacctggctgttcctgaccttcctgtttggtctgggcttcgtggcgatggaaatctatgaattccatcatctgatcgccgaaggcttcggtccggatcgcagcgcgttcctgtccagcttcttcgcgctggtcggcacccacggtctgcacgtaacttccggcctgatttggatcatcgtgctgatgattcaggtgagcaagttcggcctgaccgcgaccaacaaaacccgcctgatgtgcctgagcctgttctggcacttcctggacgtggtctggatctgcgtatttaccgttgtctacctgctgggggttatgtaa

SEQ ID NO: 424307 - DNA, 339 bp, Serratia marcescens
atgagccattcatcccatgaaacctctcacggcggcgcaagccacggcagcgtgaagtcatacctgatcggctttatcctgtcgatcatcctgacggtaattccatttgcgatggtaatgaacggcactgcctctcattccaccatcctggcggttgttgtcggcatggcggttatccaggtgattgttcacctggtttacttcctgcacatgaacacctcatcggaagagcgctggaacctggtggcattgctgttcaccgctatgatcatcggtatcgttgttgtaggttcactctggattatgtacaacctcaacatcaatatgatggtcgattaa

SEQ ID NO: 424308 - DNA, 891 bp, Serratia marcescens
atgattaagcaatacctgcaagtcactaaaccaggaattattttcggcaatttaatttctgtcgttgggggattcctgctcgcttccaaagggagcatcgactatcccctgtttctcgccaccctggtgggtgtctcgttggtggtcgcgtcgggctgtgtgtttaacaactacatcgaccgcgacatcgacaagaaaatggagagaacgaagaatcgggtgctggtaaaaggcctgatcgcgccgagtgtcaccctggtttatgcgaccgttctgggtattgtgggcttcgcgttgctgtatatcgcggccaacccgctggccatgtggctggcggtgatgggcttcgtggtttatgtcggcgtttacagcctgtacatgaaacgccactcggtctacggcacgctgatcggcagcctgtcgggcgccgcgccgccggttatcggctactgcgcggtaaccaacgagttcgacgccggcgcgttgatcctgctggctatctttagcctgtggcagatgccgcattcttatgcgatcgctatcttccgctttaaagattaccaggcggccaacattccggtgctgccggtggtgaaaggcatttccgtcgccaagaaccacatcacggtctacatcctggcatttatgatcgccacgctgatgctgaccctggtgggctacgccggctacaaatacctgatcgtcgctgcggcggtgagcgtctggtggctgggcatggcgctgcgcggttacaaaaccgaaaacgacagcgtctgggcgcgtaaactgttcgtgttctccatcgtcgccattacctcgctgagcgtgatgatgtcgatcgacttcagcgccacggcggcgcctgaagcgctggtgacctacgtttggtaa

SEQ ID NO: 424309 - DNA, 1365 bp, Serratia marcescens
gtgaacgataattcaatgaccccgcaggagcgccgcgccacctggggattaggcaccgtattctccctgcgcatgctcggcatgtttatggtactgccggtgctgaccacctacggcatggcgctcaacggcgccagcgaagcgctgatcggcatcgccatcggcatctacggcctggcgcaggcggtgtttcaaatcccgttcggcctggtgtccgatcgcatcggccgcaagccgctgatcgtcggcggcctgctgatctttgccctcggcagcgtgatcgccgccgctaccgactcgatctggggtgtgatcctcggccgcgcgctacaaggctccggcgccatcgccgccgcggtaatggcgctgctctccgatctgacccgcgaacagaaccgcaccaaggcgatggcgtttatcggcgtcagcttcggtatcaccttcgccatcgccatggtattgggccctatcatcacccacgccttaggcctgcatgcgctgttctggatgatcgccgtactggcgctagccggcattgtcatcaccctggcggtggtgccttccgccgacactcacctgctgaaccgcgagtccagcatcgtgcgcggcagcttccgcaaggtgctgagcaactcgcgcctgctgaagctcaacttcggcatcatgtgcctgcatatcctgctgatgtcgagcttcgtggcgctgccgctggcgatggaaaaagccgggctggcggccagcgagcactggatcgtctacctggtcaccatgctggtgtcgttcgccgccgtggtgcctttcatcatctatgccgaaaaatatcgccgcatgaaacaggtgtttatgggctgcgtggcggtgctgttctgcgccgaagtgttgctgtggctctccggcgcgcgcctgtggggcatcatcgccggcgttcagctgttcttcatagccttcaacgtgatggaagccattttgccttcgctgatcagcaaagaatcgccggccggctacaagggcaccgcgatgggggtctactccaccagccagtttctcggcgtggcgatcggcggcagcctcggcggctggctatacggattgcagggcgcagggctggtgtttatcgccggcgccgtgttggccgcggtctggttcctggtcagcagcaccatgaaagagccgccgtatgtcagcagcctgcgcattacgctgtcggaactggcggtaaaggattcggcgctggaaagccgcctgaaggcgcagcccggcgtggccgaagcgatcgtggtgccggaagagcgcagtgcctacgtcaaggtggacaccaagcagaccaatcgcggtcagctggaagcgctggtcaattcgctgtaa

SEQ ID NO: 424310 - DNA, 492 bp, Serratia marcescens
atgccatctttcgacatcgtttccgaaattgatatgcaggaagtgcgtaacgccgttgagaacgccacccgcgatctcggcacccgctgggattttcgcaacgtgccggccagctttgagctaaacgagaaaaaccaaagcatcaaggttgccaccgagtctgatttccaggtgcagcagctgctcgacattctgcgcgaaaagctgagcaagcgcagcatcgacggcgccgcgctggagatcccggaagagtttacccacagcggtaaaacctacagcgtggaagccaagctgaagcaggggattgaaacctctgtggcgaagaaaatcgtcaagctgatcaaagacagcaagctgaaggtgcaggcgcagatccagggcgaagaagtgcgggtgaccggcaagtcacgcgacgatttgcagagcgtgatggcgctggtgcgcggcggcgatctggggcagccgttccagttcaagaacttccgcgattaa

SEQ ID NO: 424311 - DNA, 912 bp, Serratia marcescens
atgaaaataaccattcttggttgcggcgcgctcggacaactgtggctctcccggctgtatcaacagggccacgatgtgcagggatggctaagagtgcctcagcctttttgcgccgtgaacgtgatagagccggaaggcgtctcgttcaatcgcaatttgcccaccaacgatccgcagcacctcgcgcagagcgagctgctgctggtgacgctgaaagcctggcaggtgtccagcgcggtcagcgcgctgctgccgaagctgaacccccagtgcgccattttgctgctgcacaacggcatgggcacccaggaggagctgccgccgaacggccagccgatcctgcagggcaccaccacccacgccgcgcgccacgaaggcagcaccattattcacgtcgccaccggcatcacccacatcggccccacctcgccggccgcccaacacctcagccacctggcggaagtgctgcatcaggcgctgcccgacgttgcctggcacaacaacatcgcctcggccaactggcgcaagctggcggtcaactgcgtgatcaacccgctgacggcgctgtacggctgccgcaacggcgatctgcagcgctacccggagcagatcgaaacgctgtgccgtgaagtcgccagcgtgatggcgatggagggctaccacacctcctgcgaaggcctgatgcaatacgtgatggacgtgatccacagcaccgccgacaacgtttcgtcgatgctgcaggatatccgcagccagcggcacaccgagatcgactacatcaccggttacctgctgcgccgcgcgcgcagccacggcctcacgctgccggagaatgcgcggctgtttgaactgattaaacgaaaggaaaatgaatatgagcgtatcggcgctggtctgcctggcacctggtag

SEQ ID NO: 424312 - DNA, 603 bp, Serratia marcescens
atgagcgtatcggcgctggtctgcctggcacctggtagcgaagaaatcgaagccgtcaccaccctcgatctgctggtgcgggcgggcgtaaaagtcactaccgccagcgttgccggcgacggcgagctgactatcgtctgttcgcgcggcgtcaagctgctggccgacgcgccgctggtggcaatcgtcgatgagccgttcgacgccatcgtactgcccggcggcctgaaaggcgcggaatgcttccgcgacagcccgctgctggtggaaaaggtgcggcagatgcatctgcagggcaatatcgtcgccgccatctgcgcggcgccggcgctggtgctgcagcatcacgatctgttcccgatcggcaacatgaccggcttcccgggcctgaaagaccagataccggcggataaatggatggagcgccgcgtggtgtacgacgcgcgcgtcaacctgctcaccagccaggggccgggtaccgcgatggagttcgcgctgaagctgatagacctgctgctcggcaaggccaaggcggcggagatcgccgcgcagctggtgctgatccccgggatgtacgattatcgcgacagtgaagaaaactga

SEQ ID NO: 424313 - DNA, 1617 bp, Serratia marcescens
atgaaaagggaatgtcttattctttgtctgggcgtgctgttcagctgttgcagccgcgctgaagccacgccggcgccggccaaacaacgcgttagccaggaaagcctcatcggcgatacgcaacgcaaactgttaccgtccacccctcctgttttgtcgccgcagccggagcaaaatgcgcaagcggacatatttatcagcgaatctccgtgttggatgatcgataaagtcgaaacggcgacggcgccgctacgcctcacggctttcaaacagttggcgcatacggcccgtggccgctgtatgggggataaagggttggcgaggttgcgcaaaaagctgcaaaacgcgctgatagcgcaaggttatatcacttcgcgggtgcagctcgacgttcaagaggtaccgacaggcatactgaaggtacgtgtgcattatggccgcatcggtcagctgaaaatgcaggcgggcagcagcgcctatttccgccccgatgcgctttttcccattgcggccggcgatgtgctgaatttgcgtagtatcgagcaagggctggagaacatgggggggataccgggcgtcatcagcgatatccgcattgctccgggcgaacgagctggcgaaagcgatatcgagatcctgcgccaacaggataaatattggcgttttaccgcctgggcggatgacgccggcgttcgttctacggggcgttatcagaccggcggcgcgctgtatctcgataatctgaccgcattgggcgacgttttatacctgtcgatggcgcgcagcattctggcgccgccgggcaaaggcaatgaaagccgcgccctgtactatagcttgccttggggatactggcgcttcagcgcgttgggcggagacagccgctatcaccagactttcgccggcaacttcaccgattatcgctataacggccgttcgcagtattgggggctgcaggctgactatacgttggcgcgcgggatgaatgagaaaacgtcgttgaatgcgcaactgctgcaacgtcattaccgctattacctcaatgacacggagattgccttgcagagcgcacggctaaccagcctgaagctgggcgccagccatctttattatggcgcccgtacgcaaatcgcgctgacagccgacgcccttgccggggtcgggaaggggagctcacatgccgaacagcagctgcgagcgggcggcagtatgctgaaacccttcaatgcatttggtcatcgtctgcgttatctcggggagttatcggggcaatgggcgagcgccgcacagccgatccaggataagtcgtttatcggcgaccgttctacggtgcgtgggtttagcggcgacagcaaattgatcggcagcagcggagggtatctgcgcaatacgctgacgttggaacgtgacatgctgcaaccctatattggattcgactacgggcagttggccaaacaacagggggaaggcggccagttggcggggagcgtcattggcctgcaggtgaatcaggggcgttttgctgcggacattttcgccggcacgccggtgatcaaacccggcgcgctgccgagtgagcgtctggttttgggcttctccagccagctcagtttttga

SEQ ID NO: 424314 - DNA, 1578 bp, Serratia marcescens
atgaaaatgaataagacgacattgctgttgtcggcagcggcgttgctgttgcccagcgcgccgctgttggcgcaaatagcacctcaggcggggggcgcaccggttgaccatatcaatcaggtgccggtggtgaatatcaatcgtgcgggtgcggacggtgtctcgcataacgtttacacgcagttcgacgttggcgctcagggcgctattttaaataacagccttgcgggcgcgaatacgtcattggccggaaccgttgcggggaacgctcagttagagggtcgtgcagctaaggtaattctgaatgaagtgaattcggcaaataaaagtattttgaagggggtggtagaagtcgccgggcaacgtgccgatgttgtcattgccaataaatccggcattacctgcaacggttgcggttttattaatgcccgcaacggcgtattaactaccgccgatttgcagttcaaggacggcgcttttaacggcttccacgttaatcaaggcaatattcgagtcgagggggagggcttgacgaagggagatgtcgattatacggctgttattgcgcgcacggcggaaatcagcgcggcggttcatgcggacgccctgttagtctcggcggggaaaaaaacggtttcggcagatctatcccgcttcaatagcgttgaagcgtctaaagataagcctgaagtattgatcgacgtcgccgagttggggggaatgtatgccaacaagattaggctggtcgccaatgaaaacggcgtaggcgtcaatagcggcaatgccaatggggcgggctccaacgctggcgccgcgttgaacaatgtcagcatcgtcagtatccaaaccgacgcgggaagtgatgaacgcgtgcaaatcgacaacggcgctcaaaacgtatctcgcgcttccgtcggtatcgccaaccgcggtcagattcaggcgaaaaacggtggcgccgacatcagtaccgactcgctggtcaatcaaggaaatatcgcttcacaggggcaattgaacatcagcgctacccggctgcaaaatgaaaagaacgtgagtgcgcgttcggcctccctgacggcaacgcagctggacaatatcggccgcatcgagggcggggcaatacggctgaatgcgacccaactgaacaatcgcggcagcgtcaaaacgcaaaacggcgcgctgacactgcgggcgacccgcgtcgacaataccggcggcattcaatccgcgcaggctttacaactcaacgccaccagcttgttcaacgccggcaatggcgtgatcgaagcccaaaacggtgcggcgatccagggaacgtccatcaccaaccgcgggagcatcgtttctcgcgcttcttccatcagcttgtcagacaccagtttcagcaactacggcaggattgaagcctatggcgatatcagccatcgcggcgtctctttcaacaactcaggcacgatgtgctccacgtccggcgcggtcaccaacaacggccgcgacatcaacaagcctgcgaatagctggggttggggatacggcggtttcggctggccttacggttggtcttattggatgtga

SEQ ID NO: 424315 - DNA, 1449 bp, Serratia marcescens
atgaagtttatcattaaattgttcccggaaatcaccatcaagagccaatctgtgcgcttgcgctttatcaagattctctcgaccaatattcgcaacgtcctgaagcagtatgatgaaacgctggcggtcgtccgtcactgggatcatatcgaagttcgcgccaaagatgaaaaccagcggccgatcattgccgacgccctgacgcgcattcccggtatccaccatattctggaagtggaagatcgcgcttataccgatatccaccacatctttgagcagacgctggaagcctaccgcgcccagctggaaggcaaaaccttctgcgtgcgcgtcaagcgccgcggcaagcaggcgttcaactcgcaggacgtggagcgctacgtcggcggcggtctgaaccagcatatcgagagcgcgcgcgttaacctgacccgcccgcaggttacggtaaacctggagatcgaagacgacaagctgatgctggtcaaacgccgcctcgaaggcatcggcggttacccggtcggcacccaggaagacgtaatgtcgctgatttccggcggtttcgactcgggcgtgtccagctacatgctgatgcgtcgcggctgccgcgtgcacttttgctttttcaacctgggcggcgccgcgcacgagatcggcgtgaagcaggtggcgcactacctgtggaatcgcttcgccagctcgcacaaggtgcgcttcgtcgccatcgatttcgagccggtggtgggtgagatcctggagaagattgacgacggccagatgggcgtggtgctcaagcgcatgatggtgcgcgccgcttcgcaagtggccgaacgctacggcgtgcaggcgctggtgaccggcgaagcgttggggcaggtctccagccagacgctgaccaacctgcgcttgatcgacaacgcgtccgataccctgatcctgcgtccgctgatctcgcacgataaagagcacatcatcaagctggcgcgcgaaatcggcaccgaagacttcgccaaaaccatgccggaatactgcggcgtgatttcgaagagcccgacggtgaaagccgtcaaggccaagatcgaagaggaagagagccacttcgatttcagcattctcgaccgggtggtgagcgaagcgaagaacgtcgatatccgctccatcgccgagcaggcgcaggagcaggtgaccgaggtcgaaaccgtcgcggccttcggcgccgacgaggtgatcctggatatccgctccaacgacgagcaggaagagaagccgctgcagctggaacaggttgaagtgaaagcgctgccgttctacaagctgagcacccagttcggcgatctggatcagagcaaaacctacctgctgtactgcgagcgcggcgtgatgagccgcctgcaggcgctgtacctgctggagcaaggcttcagcaacgtgaaggtttatcgtccgtaa

SEQ ID NO: 424316 - DNA, 264 bp, Serratia marcescens
atgccgaaaaaaccagcacaatcagccagtacagagcaaactgccagctttgaaagcgccctcggcgagctggaaagcatcgtgacgcgtctggagtcgggcgaactgccgctggaagacgcgctgaacgagttcgaacgcggcgtacagctggcgcgtcagggccagcagaaactgcaacaggcggaacagcgtgtgcagatacttcttaacgacagcgctgacgatgcggcgctggcgcctttcacaccggatgccgagtaa

SEQ ID NO: 424317 - DNA, 921 bp, Serratia marcescens
atgtctgagatcgccccatcggccgcttttgccgatcaactgcagattttccgccagcgcgccgatcgcgcgctgctggacttcatcgccccgctgccgttcaacgacggcaacatggtggcggcgatgcgtcacggcgccttactgggcggcaagcgcctgcgcccgttcctggtgtacaccaccggccagatgttcggcgtgtcgctggctaacctggacgcgccggcggcggcggtggaatgcattcacgcctactcgctgatccacgacgatctgccggcgatggacgacgacgatctgcgccgcggccagccgacctgccacattaaattcggcgaagccaacgcgatactggccggcgatgcgctgcaaacgctggcgttttcgatcctggccgatgccgaaatgcctgacgtggccctgcgcgatcggctggcgatggtctctgaactggcgaccgccagcggcgtagccggcatgtgcggcggccaatcgctggatctggaagccgaaggcaagcgcgttgatctgaaggcgctggagcagatccaccgccacaaaaccggtgcgctgatccgcgcggcggtgcgcctgggcgcgctgagcgccggcgaagccgggcgtgcggcgctgccgcagttggatcgttacgccgccgcggttggcctggcgttccaggtgcaggatgacattttggacgttgtcggcgagactgaaaaaatcggcaagcgccagggcgcggaccaacaacacggaaagagtacctacccggcgttgctcgggcttgacagcgcgaaagcaaaagcgtgggatctctatcaggaagcattagctgcattagacactttggcagcgcaatcttataacacagcgccattgcgagcgttagccagcttcattattgaacgcgacaattaa

SEQ ID NO: 424318 - DNA, 1866 bp, Serratia marcescens
atgagtcttgatatagccaaatacccaaccctcgcgctagcggaaaaccccgaggaactccgctcactgcccaaagagagcttgccgaagctgtgcgatgagctgcggcaatacctgctgaacagcgtcagtcgctccagcggccactttgcctccgggctgggtaccgtcgaactgacggtggcgttgcatttcgtctacaacacgccgttcgatcatctggtgtgggacgtcggccaccaggcctacccgcacaaaattctgaccggccgccgcgaccgtatcgccaccattcggcaaaagaacggcctgcatcccttcccgtggcgcgccgaaagcgaatacgacgtgctgtcggtcggccactcgtcgacctcgatcagcgccggcctcggcatggcggtggcggcggaacgtgaaggcaaaggccgccgcacggtgtgcgtgatcggcgacggcgccatcaccgccggcatggcgttcgaagccatgaaccacgccggcgacatcaacccggacatgctggtggtgctgaacgacaacgagatgtcgatctcggaaaacgtcggcgcgctgaacaaccacctggcgcagctgctgtccggcaagctttactccaccctgcgcgaaggcggcaagaaagtgctggccggcgtgccgccgatcaaggagctggtgaaacgcaccgaagagcacctgaaaggcatggtggtgccgggcacgctgttcgaagagctgggcttcaactatatcggcccggtagacgggcacgacgtgcaggggctggtcgccacgttgaaaaacatgcgcgatctgaaaggcccgcagctgttgcacatcatgaccaaaaaaggccgcggctacgcgccggcggagaaggatccgatcagcttccacgcggtgccgaagttcgatcccgccagcggcacgctgccgaaaagcgccggcggtctgccgacctattcgaaaatcttcggcgactggctgtgtgaaaccgccgccaaagacagctcgctgatggcgatcacgccggcgatgcgcgaaggctccggcatggtgcagttctcacgtgactacccgcagcaatatttcgacgtggcgattgccgagcagcatgcggtcaccttcgccgccgggctggcgatcggcggctacaagccggtggtggcgatctattcaaccttcctgcaacgcgcctacgatcagctgatccacgatgtggcgatccaaaacctgccggtgatgttcgccatcgatcgcggcggcatcgtcggcgccgacggccagactcaccagggggcgttcgatctgtcgttcatgcgctgcatcccgaccatggtgatcatgacgccgagcgacgagaacgaatgccgccagatgctgtacaccggctatcactacaacgacggcccgagcgccgtacgctatccgcgcggcaccggcaccggcgcggcgctggagccgctcaacctgctgccgatcggtaaaggcgtggtgcgacgccagggggaaaagatcgccattctcaacttcggcaccctgctgccggaggccgcgcaagcggcggaggcgctcaacgccacgctggtcgacatgcgcttcgtcaaaccgctggacgagcagctggtgctcgaactggccgccagccatgaaacgctggtcacgctggaagagaacgccatcatgggcggcgccggcagcggcgtcaacgaactgctgatggccaaacgccgtccggtgccggtgctgaacctcggcctgccggacagctttgtctcgcagggcagccaggaagaactgcgcgccgatctggggctggacgccgccggcattcagcgccaaatcgaaacctggctggcgcagtaa

SEQ ID NO: 424319 - DNA, 975 bp, Serratia marcescens
atgaagtacctgaaactgggcaacaccgatctgaacgtctcgcgcatctgcctgggttgcatgacctacggcgaaccgaaccgcggcaatcacgcctggacgctgccggaagagagcagccgcccgctgctgaaacaggcgctggaagccggcatcaactttttcgataccgccaacagctattccgacggcagcagcgaggagatcctcggccgggcgctgcgcgactatgcgcgccgcgaagacgtggtggtcgccaccaaggtgtatttcccgctgagcaacctggagcgcggtttgtcgcgcgccaacatcatgcaatccatcgacgacagcctgcgccgtctcggcaccgactatgtcgatttgctgcagatccaccgctgggattacgaaacgccgctggaagagacgctggaagcgctgcacgacgtggtgaaagccggcaaggcgcgttacatcggcgcctcctcgatgtacgcctggcagttcgccaaggcgctgtataccgccgatctgcacggctggacgcgctttgttagcatgcaggatcaatacaacctgatccagcgcgaagaagagcgcgaaatgcatccgctgtgtaccgccgaaggcatcgccgtgctgccgtggagcccgctggcgcgcggccgcctgacccgcccctggggcgaaaccaccgcgcggctggtttccgaccagttcggcaagagcctgtacgaggaaactgaaggcatcgacgccattatcgccgagcgcgtcgccagcctcgccgacgaacgcggcgtttcacgcgcgcagatcgcgctggcctggctgctgaacaagccggcggtcagcgcgccgatcgtcggcgcttcacgcagcgagcagttggatgacgccatcgccgcggtcgatttgagtttgtcgccgcaagaggtcgcagaactggagacggcttacgtgccgcatcgggtgacgggatttgaataa

SEQ ID NO: 424320 - DNA, 495 bp, Serratia marcescens
atggatgaagccaagcgtcggctgcggatgagcaatccgtggcacctgctggccaccgggtttggcagcggtttgtcgccggtgatgccgggcaccatgggatcgctggcggcgatcccgttttggctgctgctgatccagctgccgtggcagctctactcgctgacggtgatgttcagcatctgcatcggcgtctatatttgccaccgcacggcaaaagacatgaaggtgcacgatcacggcagcatcgtctgggacgagttcgtcggcatgtggatcacgctgatggcgctgccggtcaacgactggcgctgggtcgccgccggtttcgttatcttccgcattctcgacatgtggaagccgtggccgatccgctggttcgaccgcaacgtgcatggcggcatgggcatcatggtcgacgatatcatcgccggcgtgctgtccgccggcatcatctacctgattgggcaccactggccgatcgggctgttctga

SEQ ID NO: 424321 - DNA, 993 bp, Serratia marcescens
atggcatgcggcgaatttgacctcattgcccgctattttgaccggttcaagcgtgtgcgccgggatgtacagttgggcattggagatgactgcgcactgctggcagtgccggaaaaacagctggtggccgtcagtaccgatacgctggtggcgggcgtgcactttctgccggacatcgatccggccgatctcggctataaggcgttggcggtcaatctgagcgatctggcggcgatgggcgccgatccggcctggctttcgctggcgctgaccctgcctgaagtgaacgaatcctggctgaaggccttcagcgacagcctgttcgatcagctcaactattacggcatgcagctgatcggcggcgataccacgcgcgggccgctgagcatgacgctgaccatccaggggctgatcccggccggccgggcgctgactcgcagcggcgcgcgcatcggcgactggatctatgtgaccggcacgctgggcgacagcgccgccgggttggcgatcctgcaggatcgtttggcggtgacggaaacgacggcgcgcgattatttggtcgctcgccatctgcggccgcagccgcgggtgttgcaggggcaggcgctgcgcgatctggccagctcggcgatcgacatctccgacggcctgatttccgatctgaagcatatccttaaggccagcgactgtggcgcacgcatcgtgctggacgagctgccgatgtcgcaggcgctgagcagccacgccgatgccgaacaggcgctgcgctgggcgctggcgggcggcgaagattacgagctgtgcttcaccgtgccggagatcaaccgcggcgcgctggaagtggcgttgagccacctcggggccgactacacctgcattggccaaattggcccgctgtctgaaggcatccgctattatcgcgacgatgaggcggtagagctggactgggctgggttcgatcatttcaacgcggagccgggcacccatggatga

SEQ ID NO: 424322 - DNA, 417 bp, Serratia marcescens
gtgaaacctgctgctcgtcgccgcgctcgtgagtgcgctgttcaagcgctttactcttggcagttgtctaaaaacgaccttgccgatgttgaacaccagttcctgacggagcaggatgtcaaagatgttgacgtcgcctattttcgcgagttgctgtccggcgcggcagtgaatgcaggtatgctggacgaactgatggcgccttacctgtcgcgtcagctcgaagagctgggccaggtggagcgcgcggtgctgcgcgtcgcgctgtttgaactgaaaatgcgcgaagatgtcccttacaaggtggcgatcaacgaagcgatcgaactggcgaaaaccttcggcgcggaagacagccacaagtttgtgaatggggtgctggataaagtggcaccaacccttcgcaagaaaaagtaa

SEQ ID NO: 424323 - DNA, 471 bp, Serratia marcescens
atgaaagttatcgaaggtgttgttgctactccaaaggcccgtgtggcgatcgcaattgcacgttttaacaatttcatcaacgacagcctgctggaaggcgcgatcgacgcgttgaaacgcattggtcaggttgctgacgacaacatcaccgttgtctgggtcccgggcgcttacgagctgccgctgacggcgagcgtattggccaaaaccggcaaatacgacgcggttatcgcgctgggcaccgttatccgtgggggcaccgcgcacttcgaatatgtggcgggcgaagccagctccggcatcggcaacgttgcgatgaatgccgaaatcccggttgcttttggcgtgctgaccaccgaaagcatcgagcaggcgatcgaacgcgccggcaccaaagcgggcaacaagggcgctgaagctgcgctgaccgcacttgaaatgattaatgttatcaaagctattaaagcctga

SEQ ID NO: 424324 - DNA, 1110 bp, Serratia marcescens
atgcatcacgacgaactttatatggcgcgcgccttcgaactggcgcggctggggcgttttaccaccgcacccaatccgaacgtcggctgcgttatcgtgcgcgacggcgaaattgtcggtgaaggctatcatctgcgcgccggcgagccgcacgcggaagtgcacgcgctgcgcatggcgggcgacaaggcgcgcggcgccaccgcctatgtcacgctcgagccgtgcagccatcacggccgcacgccgccctgcgccgatgcgctggtggccgccggcgtaacccgggtggtcgcggcgatgcaagatcccaatccgcaggtggcggggcgcgggctgtacaagctgcagcaggccggcgtcgaggtgcggcacggcctgatgctggccgaggccgaagcggtcaacctgggcttcctcaagcgcatgcgcaccggtttcccttacgtgcagctgaagctgggcgcgtcgctggacggccgcacggcgatggcctccggcgagagccagtggatcacctcacccgaagcgcgtcaggacgtgcagcgcctgcgcgcgcagagcgccgccattctcagcaccagcgccaccgtgctggcggacgatccgtcgctgacggtgcgttgggatgaattggacgccgagacgcagcgcctctatccgcgcgacaatctgcgccagccgctgcgcatcctgctcgacagccaaaatcgcattactccgcagcaccgcgtggtgcagcagccgggcgccacctggctggcgcgcctgcaggcggatgaacaggcctggccgcaagacgtcgagcagtttatctgcccggcgcacggtggcggcgtcgatctggtggtgatgatgatgctgttggccaagcgccaggtgaattcaatctgggtggaggcgggcgcatcgctggccggcgcactgctgcaggccggcctggtggatgagctcattttgtacatcgcgccgaaactgttgggcgataatggccgtggcctgtgccacctgccgggcctggagcggttggccgatgcgccggaattcgtctttagcgacgtgcgccaggtcggccccgatctgcgtttgcgcctgcgggcgaaacactga

SEQ ID NO: 424325 - DNA, 450 bp, Serratia marcescens
atgcattgccctttctgcgccgccgttgataccaaagtcattgattcccgcctggtgggggacggttcgcaagtgcgccgtcgccgccagtgtctggtgtgcaatgaacgcttcaccaccttcgaggtggctgagttggtgatgccgcgagtgattaaaagcgatgaggtgcgcgagccgttcaacgaagacaaactgcgccgcggcatgctgaaagcgctggaaaagcgcccggtcagctcggacgacgtggaaaacgcccttaatcatatcaaatcccaactgcgcgccaccggcgaacgcgaagtgccgaccaaactggtgggcaatctggtgatggacgcgctgaaaaagctggataaggtcgcctacattcgcttcgcgtcggtataccgcagcttcgaagacgtgcgcgagttcggcgaagagatcgcccgcctgcaagactaa

SEQ ID NO: 424326 - DNA, 561 bp, Serratia marcescens
atgacaacctgttaccccaaaatcgccctgctcgccgccgccgtgttgctggcgggctgcgcgcataacgccgccgtgccccagctgcgccatcaggtcgccgcactgaaccagaaagtgagcgtgctgaccgatcaaaccaccgcgctggagcggcagaatcagctcaatcagcactccgacaatggcgtctatctgctgccggcggcccgaagcgccgcccgtttgcagagcggtatcggcgaactgagcgtttcgctgagccacatcaagaacgaagccaacggcacgcaggcgcagctgcatgtacgcgtcctctcacaggccacgctgccgccgttcaaagccgtggtggaatggggccagctggacgaagacaccggccggccgttgaccgccgaggcgctgtcgcaaccgatcgccagcgctgactcgctgctgccgaagcccggccaggacttcgaactgcgcttcagcggcctgacgccggaacaattgggctatatccgtctgcacagtctggtttcaaccgcccaaccggcggtagtgaagcagcactga

SEQ ID NO: 424327 - DNA, 969 bp, Serratia marcescens
gtggcacaggattatactgttgagcaactcaactacggccgtaaagtctacgactttatgcgctgggactatttggccttcggcatctcgttgctgctgttggtcgcgtcgatcgccaccatgtcggtgcgcggctttaactggggtctggatttcaccggcggtacggtgattgaaatcaacctggagaagccggctaacctcgacctgatgcgcgatacgctggagaaggccgggttccaggatccgatcatccagaacttcggcagcagccgcgacgtgatggtgcgcatgccaccggcgaccggcaccgcaggccaggaactgggcaacaaggtgatcggcgtgatcaacgactcggtggataaaaacgccaccgtgaagcgcatcgagttcgtcggcccgagcgtgggcagcgaactggcgcaaaccggcggcatggcgctgctggtggcgttgatctgtatcctgatctacgttggtttccgcttcgaatggcgcctggcgctgggggcggttatcgcgctggcgcacgacgtgatcatcacgctgggcgtgctgtcgctgttccacatcgagattgacctgaccatcgtcgcgtccctgatgtcggttatcggctactcgctgaacgacagcatcgtggtttccgaccgtattcgtgagaacttccgcaagatccgccgcggtacgccttacgagatcatgaacgtgtcgttgacccagacgctgagccgtacgctgatgacttccgggaccaccctgatggtggtgctgatgctgtacatcttcggtggcgcgatgctgcaaggcttctcgctggcgatgctgatcggcgtgtcgatcggtaccgtctcctcgatctacgtcgcgtccgcgctggcgttgaagctggggatgaaacgcgaacacatgttgcagcaaaaagtggaaaaagagggcgcagatcagccttcgattctgccttaa

SEQ ID NO: 424328 - DNA, 1815 bp, Serratia marcescens
atgttgatcgtcgtgatcctcgtcggtctgctttatgcgcttcccaacatctacggtgaggatccggccgtacaaatcactggcgcgcgcggcgtcgccgccagtgaaactacgctggaccaggtccgtaccgtattagaaaaagacaacatcacgagcaagtcgattgcgctggaaaatggcgccatcctggctcgctttaaagatcctgacgttcagctgcgcgcccgcgaagcgctggtgaccgagctgggtgacaaattcgtcgtggcgctgaacctggcgccggccacgccgacctggctggccatgctgggcgcagagccgatgaaactcggcctggacctgcgcggcggcgtgcacttcctgatggaagtggacatggacaccgcgttgagcaagctgcaggaacagaccatggataccctgcgcagcgagctgcgcgagaagggcattccttacgcgtctatccgcaagctggacaacaacggcgtggaagttcgcttccgcgacaatgcggcccgtgaccaggccatcagctacatcggcccgcgtcagcgcgatctggtgctgtccgccaacggcgccaacaccatgaaagccagcctgacggacgcccgtctgagcgaagcgcgcgaatacgccgtccagcagaacatcactatcctgcgtaaccgcgtcaaccagctcggcgtcgccgaaccgctggtgcagcgccagggcgccgaccgcatcgtggtcgagctgccgggcattcaggacaccgcgcgcgccaaagaaattctgggcgccaccgcgaccctcgagttccgtctggtgaacaccaatgcggacgccactgcggcggccaacggccgcgtgccgggcgactccgaggtgaaatacacccgtgacggccagccgatcgtgctgtacaagcgcgtgatcctgaccggtgatcacatcaccgactccacctcgagtaccgacgaatacaaccagccgcaggttaacatctcgctggacagcgccggcggcacgtcgatgtccaacttcaccaaggacaacatcggcaagccgatggcgaccctgttcgtggagtataaggacagcggcaagaaagacgccaacggccgcgcggtgctggtgaaacaggaagaagtgatcaacgtggcgaacattcagtcgcgtctgggcaacagcttccgcatcaccggtatcggcaacccgaacgaagcgcgtcagctttcgctgctgctgcgtgcgggcgcgctgatcgcgccgattcagatcgtcgaagagcgcaccatcggtccaaccctgggtcagcagaacatcacccagggtctggaagcctgtctgtggggcctggtggcgtccatcgtcttcatggtggtctggtaccgtaagttcggcgtgatcgccaccacggcgctggtcgccaacctggtgctgatcgtcggcgtgatgtccctgttgccgggggcgacgctgaccatgccgggcattgccgggatcgtgttgacgctggcggtggcggtcgacgccaacgtactgattaacgaacgtatcaaggaggagctgaagaacggccggtccgttcagcaggcgatccatgagggctataaaggcgcgttctccagtatcgtcgacgccaacatcaccaccctgatcaccgcggtcatcctgtacgcagtgggcaccggttcgatcaaaggctttgcgatcaccaccgctatcggtgtggcgacgtccatgttcaccgcgattgtcggtacccgtgccatcgtcaacctgctttacggcggcaaacgcattaacaagctgtctatctga

SEQ ID NO: 424329 - DNA, 333 bp, Serratia marcescens
atgagctttttcatttctgacgccgtcgcatccgcaggggctccggctcagggaagcccgtactctctgatcattatgctggtggtgttcggcctgatcttctacttcatgatcctgcgcccacagcagaaacgcgctaaagatcacaagaagctgatggactccatcggtaaaggcgacgaagtgctgaccaccggcggcctgatcggtcgcgtgaccaaagtggccgacaccggcatcatcgccatcgcgctgaacgacaccacggaagtgatgatcaagcgtgacttcgtggcggccgttctgccgaaaggtaccatgaaggccctgtaa

SEQ ID NO: 424330 - DNA, 1125 bp, Serratia marcescens
gtgaagtacgaactacaaactaccgatggccgcgcgcgtcgcggccgcctgatcttcgaccgcggcgtggtggagaccccggcctttatgccggtcggtacctacggcacggtcaagggcatgacgccggaagaagtgaaagaaaccggcgcgcagatcctgctgggcaacactttccacctgtggctgcgcccgggccaggagatcatgaaactgcacggcgatctgcacgacttcatgcagtggcatgggccgatcctcaccgactccggcggtttccaggtattcagcctgggggcgatgcgcaagatcaaagaggaaggcgtgtacttccgcaacccgatcaacggcgacaaggtgttcctgagcccggaaaaatcgatggaaatccagtacgacctgggttccgacatcgtgatgatcttcgatgaatgtacgccgtacccggccgactgggactacgccaagcgttcgatggaaatgtcgctgcgctgggcggagcgcagccgcaagcgattcgacgagctggaaaataaaaatgcgctgttcggcatcattcagggcggcgtttacgaagatttacgtgatgtttcagtcaaagggctggtggatatcggctttgacgggtacgctgtgggcggcttggctgtaggcgagccgaaagaggatatgcatcgcattcttgaacacgtttgcccgcaaattccggaagataagccacgctatttgatgggcgtcggcaagccggaagatttggtggaaggcgtgcgtcgcggcatcgacatgttcgactgcgtcatgccgacccgcaacgcccgcaacggccatctgttcgtgactgacggtgtggtaaaaatccgtaatgccaagcacaaggatgatacttctccgctggataaggactgtgattgctacacctgtcgccattacagccgcgcctacttgcaccatctcgaccgttgcaacgaaatattgggtgctcgactgaacacgattcataacctgcgtcactaccagcgcctgatggcgggtttacgccaggctatcgaagagggtaaattagagcagtttgttgcggatttctatggtcggatcggcaagccgattccgcctttaaacgcttga

SEQ ID NO: 424331 - DNA, 1071 bp, Serratia marcescens
atgcgcgtcgctgatttttcgtttgaacttcccgaatccctgattgcccactatccccaggccgaacgcagcgcatgccgcctgctgcagctggacgggccgagcggggcgctgacgcacggcgtattcaccgatctgctggataagctggaagccggcgacctgctggtgttcaacaatacccgcgtgatcccggcgcgcatgttcggccgcaaggtcagcggcggcaagattgaggtgctggtggagcgcgtgctggacgaccatcgcgtgctggcgcacgtgcgcgcgtcgaaagcgccgaagccgggcgccgagctgctgttgggggatgacgagagcatcgccgccaccatggtggcgcgccacgagacgctgttcgagctgcgcttcaacgacgagcgcgacgtgttcactatcctcaacgccgccggccacatgccgctgccgccttatatcgcccgcccggatgaagacgccgaccgcgagctgtatcagacggtctacagcgagaagcccggcgcggttgccgcgccgaccgccggcctgcacttcgacgagccgctgctggcggcgctgcgcgccaagggcgtggaaatggcgttcgtgacgctgcacgtcggcgccggcaccttccagccggtgcgcgtggaaaccatcgaagatcacgtgatgcacgccgaatacgccgaagtgccgcaggaggtggtcgatgcggtgctggcctgcaaggcgcgcggcaaacgcgtcgtagcggtgggcaccacctcggtgcgctcgctggaaagcgccgcggcggccagcaaagaagcgctgattgcgccgttcttcggcgataccagcatctttatctatccgggctatcactatcaggtgatcgacgcgctggtgaccaatttccacctgccggaatcgaccctgatcatgctggtgtcggccttcgccggctataaaaataccatgaacgcctatcagcaggcggtggccgagcagtatcgctttttcagctacggcgatgcgatgttcatcagccgtaacccgcaggcggaaaacgagtccgtcggcggttaa

SEQ ID NO: 424332 - DNA, 552 bp, Serratia marcescens
atgctggcggacagctcgctgctgggcaacctgctggccgatttcgtgcgcggcaaccccgccgccgactaccagcccgaggtggtggccggcatcatgatgcaccgccgcgtcgacgtgctgaccgacagcctgccgcaggtcaaagccagccgcgactatttcagcgccccctaccgccgcgtggcgccgatcaccctcgacgtggtgtgggaccattttctggcgcgccactggcagcagctcgagccttcgcgcgacctgcaccagtttacccaggaagcccgcagccagatcgaaccttttctgccgctcacgccgccgcgctttcagaacctgaacggctacctgtggcaggaacgctggctggagcgctacgccgaattgccgttcatcgcccgggtgctgcagggcatggccagccgccgcccgcgcctcgaggcgctggccggttcgttcgccgacgtcgagcaacattatcatcagcttgaaacacagttctggcagttttacccgcaaatgatgcggcaggcgaaggacaaagcgctctaa

SEQ ID NO: 424333 - DNA, 603 bp, Serratia marcescens
atggtcctggtaactcgtcaagcccctgacttcactgcagctgccgtactgggtagcggcgaaatcgttgaaaacttcaacctgaagaagcacctgaacggcaaaccggccgtgctgttcttctggccaatggacttcaccttcgtatgcccttccgagctgatcgctttcgatcaccgctatgaagagttccagaagcgtggcgttgaagtggttggcgtttccttcgactcagagttcgttcacaacgcatggcgtaaaacccctgtcgacaaaggcggcatcggtgaagtgaaatacgcaatggttgctgacatcaagcgtgaaatccagaaagcttacggcatcgaacacccggaagccggcgttgcgctgcgcggctccttcctgatcgacaaagacggcatcgtgcgtgctcaggttgttaacgatctgccaatcggccgtaacatcgacgaaatgatccgtaccgttgatgcgctgcaattccacgaagagcacggtgaagtgtgcccggctcagtgggaaaaaggcaaagcaggtatgggcgcttccccagacggcgttgcaaaatacctgtctgaaaacgctgccaagctgtaa

SEQ ID NO: 424334 - DNA, 1764 bp, Serratia marcescens
atgtttttacagaaatggagcaaacccctgaccatggcggcgctgctggtcagcggcagcctgtatgcggcatccaaccccgcggtggaagccaaaaacggcatggtggtcacctcgcagcacctggcctcgcaggtcggcgtggatatcctgaagatgggcggcaacgccatcgacgccgccgtggcggtgggctatgcgcaggcggtggttaacccctgctgcggcaacatcggcggcggcggctttatgaccgttcacctggcggacggcaccgacaccttcatcaacttccgtgaaaccgcgccggcggcggccagcgccaacatgtatctggatgccgacggcaaggtgaagaaagacgccagcctgtacggctatctggcggcgggcgtgccgggcaccgtgctggggatggaaaccgcgcgtgagaagtacggcaagctgagccgtgaacaggtgctggcgccggcgatcaggctggcgcgcgaaggctttgtgctgacccgcgccgataccgatatcctcgacaccaccgtcgcgcgcttcaaacaggatcccgagtcggccaaaatcttcctgcgcccggacggcagcccgctgcagccgggggacaaactggtgcaaaccgatctggccaatacgctggaagccatcgccaaagggggaaccgacgccttctataaaggcaagatcccgcaggcggtggaggcggcggccaaacagggcggcggtatcttgaccgccgccgacttcgccaattacaaggtcaccgaaacgccgccgattacctgcagctatcgcggctacaagttcgtgtcggcgccgcctcccagctccggcggcgtgacgctgtgcgaaatcctcaacgtggtggaaggctacgacctgaaaagcatgggcttcaactcggcggcggccattcacaccatgaccgaagcgatgcgccatgcttacatggaccgcaacacctacctcggcgacccggagttcatcaaaaacccaatcgaccggctggtgagcaagagctacgccgagcagatccgcaagaaaatcgtcgcggacaaggccacgccgtcggaaaacgtgcagcccggcatggaaccgcatgagaaaccggaaaccacccactattcgatcgtcgatcacgacggcaacgcggtctccaccacctataccgtcaacggccgcttcggcgccgtggtgatcgcaccgggtaccggcttcttcctcaacgacgagatggacgactttacggtcaaagtgggcgagaaaaacctgtacgggctggtgcagggcaccgccaacagcattgcccccggtaagcgcccactatcgtcgatgagcccgacgctggtgaccaaggacaacaagatctttatggtgctgggctcgccgggcggctcgcgcatcatcaccatcaccctgcagaccgcattgaacgtgatagaccacggcatggcgccgcaggaagcggtggacgcaccgcgcatccatcaccaatggttgccggatgaggtgtactacgaacagcgcggcgtttccgccgatacgctgaagctgctgagcggcatgggctataagatggtcgagcaaacgccgtggggcgccgccgaactgattctggtcggcttgccgggtgcggcgggcgtcagcccggccaactccggcaacgactcggcggtttccggcaaggtgcgcgaaggctatctgtatggcgccaacgacgtgcgtcgcccggcaggttctgcggtcggttactga

SEQ ID NO: 424335 - DNA, 1824 bp, Serratia marcescens
atgcttaacgcctggcatcaaccggtcccgccttttgtggtgaagcaagggcaacgtttggatatcacgctgtggttacagggggatgaactgccggaacgggtgtttttgcgcgccgaaccggacaacgaagagtggctgctggtgatgaaagcgcagcgccacgaggggatgcggcgctaccaggccagcctgacgctgaatgagggcgagccgacgcggcgttactgcttcaagctgctgtgggccgatcgccagcagtggttcgggccgcagggctggtcgccaacgccgccggggcaactggcgcagttcgccgtcgacgaacctgacaacggccccgagtgggtggcagatcagctgttctaccagattttccccgatcgcttcgccagcagcggcggcgagcacggcatccaaagcggcagctaccgccatcacgcggccggcgccgaggtgattcggcgcgactggcagcacccgctggaggatcgccacgccgcctcgaccttttacggcggcgatctggacggcatcagcgccaaactcccgtatttgcagcagctgggcgtgacggcgctgtatctgaacccgatttttaccgcgccgagcgtgcataagtacgataccgaggactattaccaggtcgatccgcacttcggcggcaacgcggcgctgcagcgtttgcgagtgagcactcacaaggtgggcatgaaactggtgctggacggggtattcaaccacaccggtgactcgcatccgtggttcgaccgccatcgccagggcgaaaacggcgcctgtcaccaccccgattcaccgtatcgcggctggttcaacttttacccggacggccgtgcgctcgactggaagggtaatgccagcctgccgaagctcaacttcgccgagccgcaggtggcggaagcgatctatcgcggggaaggcagcgtggtacgccactggctgcgcccgccgtacagcatcgacggttggcggctggacgtggtgcacatgctgggggagaacggcggcgccaccggcaacctgcaccacctggctggcatctatcaggcggtgaagcaggagaatccgcaggcctacgtattgggcgagcacttcggcgacgcgcgccgctggctgcacgccggcgtggaggatgcggcgatgaactacatgggcttcgcgctgccggtgcgggcgttcttggcggggctggacgtggcctatcacccggtgcggctggacgccgccgggtgcgcgcagtggatggacggctaccgcgccgggctgccgcacggtcgccagctgatccagttcaaccaactggacagccacgataccgcgcgttttctcacgctgttgcaggggaacgcggcgcgcatgcagatggcggcggtgtggttgctgagctggataggcgtgccttgcctctattacggcgatgagattggtctggacggcggcaacgatccgttctgccgcaagccgttcccgtgggacgtcggcgactgggaccggccgctgctggcgctgttccagcgcatggcggcgctgcgtaaacagagcgtggcattgcgccgcggcggttgtcaggtgctgtacgccagcggggaaacgctggtgttcgtgcgcctgtatcagcaggagcaggtgctggtggcgctgcagcgcgacggcagcggccaggcgcagctgccgtacaacccgctgttggcgcgcggcccgtggcggcgtgtggaagggcggggagagttgagcgaaacggcaggcgggctgcgcctgcagctggcggaagagacggccaccgtgtggcgctgtgaaggctaa

SEQ ID NO: 424336 - DNA, 1257 bp, Serratia marcescens
atgcaacaacagataacgcgctggctggaacaatttggtttggaattcggcggagtgatgtcgctgttgatggtattggggttgattgtcctgatctcggtcgcgatccacctggtgctgcaccgagtggtgctggccgcccttcagcgccgtggccagcaatcgcagcgcgtctggcaacaggccatcactcaatacaaactgttccagcgtgtggcgctgctgctgcaaggggtgatcatcagcatccaggcgacgctgtggctgcagagcggcagccagacccaggcggtgatcgtcaccgccgcgcaggtgtggatcctcgccttcaccctgctgtcgctgttctcgctgctggatacgctgctggcgctgctgcgccaaagcccgatctccaatcagctgccgctgcgcggcattttccagggcctgaaactggtggcggcgatcctgatcggcatcatgatcgtctcgctgctgatgggcaaatcgccgctgctgctgctcagcggcctgggtgccatgaccgcggtcttgatgttggtgttcaaggatccgatcctcgggctggtggccggcattcagctctccgccaacgatatgctgaagatcggcgactggctggaaatgccgaaatacggcgccgacggcgcggtcaccgacatcggcctgaccacggtcaaagtgcgtaactgggacaacaccgtcaccaccattcccacctacgcgctgatctccgactcgttcaaaaactggcggtcgatgtcggaatccggcgggcgccgcatcaagcgcagcctgaatatcgacaccggcagcgtgcacttcctgtcggaagaggaacagcgccgcctgcagcgcaacccgctgctgcacagctacctgaacgtcaagacccaggagctgagccagcataaccaggagatcgccgtcgatctggcctcgccgctcaacggccgccgcctgaccaacctcggcacgctgcgcgcctatctggaagcctatctgcgcgctcacccgcgcattcaccagaacatgacgctgatggtgcgccagctggcgccgacgccggaaggcctgccgctggaaatctacgccttcaccaacaccacggtctgggcggagtatgaaagcattcaggcggatattttcgatcatattctggcggtgatcgacgagttcggcctgcgcgtgcatcaaacgccaaccggcaatgacctgcgcggcatgctgctacaaaacgccaacgcttcctga

SEQ ID NO: 424337 - DNA, 264 bp, Serratia marcescens
ttgctgaaacgcttacgtcaccggctgtttaccctgatggccaccctgctgtttatcggctgcctgcacagcgcttcgctggacgaaagccgcatgccccgcaacctgcaaccttcgctgagcgccctgagcagcaatatgcaagacattcgcgaggtgctggcgcgctgcgccggcgaggaagaggaggaacgccttaacggcggcgacatgcgtatcgaagcgcgcatcgccggggaggatgaagcggaagacaaacgctaa

SEQ ID NO: 424338 - DNA, 1449 bp, Serratia marcescens
atgtccgtggcttttttacgtttaaaactatgggtcattttcatgcaacaacagtcacccaccactgcccccgacaataagctgaaacgcggcctcagtacgcgtcatatccgctttatggcgctgggatcggccatcggcaccgggttgttctacggctcggcggacgccatcaaaatggccggcccgagcgtgctgctggcttacctgatcggcggcatcgtggcctttatcatcatgcgcgccctgggggagatgtcggtcaacaacccgcaggccagctcgttttcccgctatgcgcaggactacctcggcccgatggcgggttacatcaccggctggacctactgctttgaaatcctgatcgtcgccatcgccgacgtgaccgccttcggcatctatatgggggtctggttcccggaagtgccgcactggatctgggtgctgagcgtggtgctgatcatcggcgccatcaacctgatgagcgtcaaggtgttcggcgagctggagttttggttctcgttcttcaaagtcgccaccatcatcatcatgatcgtggccggcatcggcatcatcatctggggcatcggcaacggcgggcaaccgaccggcattcataacctgtggtcgaacggcggcttcttcagcaacggctttatcggcatgatcctgtcgctgcagctggtgatgttcgcttacggcggcattgaaatcatcggcatcaccgccggcgaagccaaagatccgaaaaaatcgattccgaaggccatcaactcggtgccgtggcgcattctggtgttctacgtcggcacgctgttcgtcatcatgtctatctacccgtggaatcaggtgggcaccaacggcagcccgttcgtgctgaccttccagcatatgggcatcaccgtggcggcaggtatcctcaacttcgtggtgattaccgcttcgctgtcggcgatcaacagcgacgtgttcggcgtcggccgcatgttgcacggcatggccgagcagggccatgcgccgaagatgttcagcaaggtgtcgaagcgcggcattccctgggtgacggtggtggtgatgatgctggcgctgctgctggcggtatacctcaactacatcatgccggagagcgtgttcctggtgatcgcctccttggcgaccttcgccaccgtgtgggtgtggatcatgatcctgttctcccaaatcgccttccgccgcagcctgagcaaagaacaggtgaagcagctggcgttcccgctgcgtggcggggtgttcacctcggtggtggcgatcgtgttcctggtgttcatcatcggcctgatcggctacttcccgaccacgcgcgtctcgctgtacgccggcctggtctgggtggtattgctgctggcgggatactggttcaaggtcaaccatcagaaaaaacgcgcgccgttggcgacgcagcaagactga

SEQ ID NO: 424339 - DNA, 1317 bp, Serratia marcescens
atgagtcatcgtttaacgtcaaaagatatcctggcactgggcttcatgacctttgccttattcgttggggccgggaacatcatcttcccgccgatggtcggcttgcagtccggtgaacacgtctggatcgcggcgctgggcttcctgatcaccgccgtcggtctgccggtcatcaccgtcatcgcgctggcgcgcgtcggcggcggcatcgatgccctcagttcgccgatcggccgcggcgccggcctgctgctggcgaccgtctgctacctggccgtcggcccgctgttcgccacgccgcgcaccgccaccgtgtcctttgaagtgggcatcgccccgctgaccggcgacggcgccatgccgctgttcatctacagcctggtgtacttcgcgctggtgatcggcatctccctgtatccgggccgcctgctcgacaccgtcggccatgtgctggcgccgctgaagattgtggcgttaggtgtattgggcatcgccgcactgctgtggcctgccggcgcgccgattccggcgacggcggcttaccagagcgtgcctttctcttccggcttcgttaacggctacctgaccatggatacgctgggcgcgctggtattcggcatcgttatcgtcaacgcggcgcgctcgcgcggcgtgaaagacgccggtctgttaacccgctacaccattctggccggtttgatcgccggcgtgggcctgacgctggtttacctgagcctgttcaagctgggctccggcagcggcgcgctggtgccggacgccaccaacggcgcggtgatcctgcacgcttacgttcagaacaccttcggcggactgggcagcttcttcctggcggcgctgatcttcatcgcctgtatggtgaccgcggtaggcctgacctgcgcctgcgccgagttcttcgcgcaatacctgccgttctcgtacaagacgctggtgtttattctgggcctgttctcgatggtggtgtccaacctcggcctgagccacctgatccagatctccattccggtgctgaccgcgatttacccgccgtgcatcgtgctggtggtgctgagcttcaccctgcgttggtggcacagcgcgccgcgcatcatcgcgccggtgatgcttgtcagcctgttgtttggtatccttgacgcggtgaaagcctccagtttccagcagctgctgccggcctggaccactcacctgccgctggcggagcaggggttggcatggttgccgccttcgctgctgatgctggtgctggtcgcgatttatgatcgggtgtgcacgcgttcccaagtgaccgcgcactga

SEQ ID NO: 424340 - DNA, 963 bp, Serratia marcescens
atgacccgaataacccgagggctgttgctttgcctggcgctgctggccggacgcggcgcgctggcgcagcccgacggcatgctggcgggcaacctgtccagcgtcggttccgatactttggcgaatctgatggcgctgtgggcgcaggatttcagccggcattatcccaatgttaacctgcagatccaggccgccggctcgtcgaccgcgccgaccgcgttggcggcgggcgccgcgcagctgggcccgatgagccggccgatgaaggcggccgaggtttcggcgttcgaacaccgttacggctatgcgccgctggcggtgccggtggcggtggacgcgctggtggtgttggtgcatcaggacaacccgctgcgcggcctcaatctgcagcagctcgatcgcattttctccgccacccggcgctgcggtgaaagcaagccgctgacgcgctggggcgagctggggctgagcggcgactgggcgacgcgctcgctgcagcgcttcggccgcaactcggcgtccggcacctacggctatttcaaactgcgcgcgctgtgcggcggcgattttatgccgcgcgtcaatgagctgcccggttcggcctcggtggtgcaggcggtggccggttcgctcaacggcatcggctacgccagcatcggttttcgcgccagcggcgtgcggctgctgccgttggcggaatcgggagaggactatgtcgcgcctaccgccgccaacgtgcgcaacgatcgctacccgctgtcgcgctatctctatatctacatcaacaaagcccccaatcaaccgctggagccgctgaccgccgcgttcctcgatcgcgtgctgtcgaacgcagggcagagcctggtcaatcacgacggctatctgccgctgccgccgggcgccctgcagaggacccgccaggcgctcgggctgcagccgctcgcggcggccacggtgcaataa

SEQ ID NO: 424341 - DNA, 1317 bp, Serratia marcescens
gtgttagaacgtctgtcgtggaagaggctggctctggagctggctcttttctgtttgcccgccttactgctggggctgattttcggttatctgccctggttcctgctggcctccgcgctggccgcgctggtgtggaatttctacaaccagctcaaactctctcattggctgtggatcgaccgcagcatgacgccgccgcccggccgctggagttgggagccgttgttctatggcctgtatcagatgcagcagcgcaatcgtcgccgccggcgtgagctggcgctgttgatcaagcgctttcgcagcggggccgaatcgctgcctgatgcggtggtgatgaccaccgtcgaaggcaacatcttctggtgcaacgggctggcgcagcatctgctcggcttccgctggccggaagacaacggccagcacatcctcaacctgctgcgttatccggaattcagccactatctgcaacagcaggagttctcgcgcccgctgacgctgcagctgaacaacgaacactacgtcgaattccgcgtgatgccttattccgaagggcagctgctgatggtggcgcgcgacgtcacccagatgcgccagctggaaggcgcgcggcgcaacttcttcgccaacgtcagccatgagctgcgcacgccgctgacggtgctgcagggctatctggagatgatgggcgacgaagagcaggacggttcgctgcgcagcaaggcgctcggcaccatgcaggagcagacccgccggatggacgggctggtcaagcagctgctgacgctgtcgcgcatcgaggcggcgcccaatgtcgacatgaacgagcgggtggatatcccgctgatgctgcgggtgttgcagcgcgaggcgcaatcgctgagcggcggcaatcacgagatcactttccgggtgaacgaacagctcaacgtgttcggcaatgaagaccagttgcgcagcgcggtgtctaacctggtgtacaacgcggtcaaccacacgccgaagggcacccatatcgaagtgagctggcagcagacggcgcacggcgcgcagttccaggtcagcgacaacgggccgggcatcgccgccgaacacctgccgcgcctgaccgagcgtttttaccgcgtcgacaaggcccgttcgcgccagaccggcggcagcgggctggggctggcgatcgtcaagcatgcgctcagccatcacgacgcgcggctggagatcctcagcgagccggggatcggcacccgctttatctttaccttacccaaccggttgattgttcccgccgctttatcagagaatgcggtgaaaaattaa

SEQ ID NO: 424342 - DNA, 690 bp, Serratia marcescens
atggcaagacgcatactggtggtggaagacgaagcgccgatccgtgagatggtgtgctttgtgttggaacagaatggttaccaaccgttggaagccgaggattatgacagcgccgtgacgcgcctgtctgagccgttccctgatttggtgttgctcgactggatgttgcccggcggttccggcattcagtttatcaaacatatgaagcgcgaagcgctgacccgcgatattccggtgatgatgctgaccgcgcgcggcgaagaggaagaccgcgtgcgcggcctggaagtgggggcggatgattatatcaccaagccgttctcgcccaaggagctggtggcgcgcatcaaggcggtcatgcgccgcatttcaccgatggcggtggaagaagtgattgaaatgcaagggctgagcctggatccgtcctcccaccgcgtgatggctaacgatcaggcgctggacatggggccgaccgagttcaagctgctgcacttctttatgacccacccggagcgggtttatagccgtgagcagttgcttaatcacgtctggggcactaacgtttatgtggaagaccgtaccgttgacgtgcatatccgtcggctccgcaaggcgttagaaaccagtgggcatgataaaatggttcaaaccgttcggggcaccggctaccggttctcaacgcgctactga

SEQ ID NO: 424343 - DNA, 1233 bp, Serratia marcescens
atgcgcctgatccacacctctgactggcaccttggccagtactttttcaccaaaagccgtgccgccgagcaccaggcttttctgaactggctgatcgagcagatcgagcagcagcaggtggatgcgctgatcgtcgccggggatctgttcgataccggctcgccgcccagctacgcccgcgagctgtacaaccgcttcgtggtggagctgcagcgcaccggctgtcagctggtggtgctgggcggcaaccacgactcggtggcgacgctgaacgaatcgcgtgagctgctctcctgcctgaacaccacggtgatcgcgagcgcgcaaagcgcccccgaacagcagattgtggtgctgaaccggcgcgacggccagccgggcgcggtgctgtgcgccattccttttctacggccgcgcgatctgctcaccagccgcgccggcgaatccggcgcgcaaaaacagcaggcgctgcaggaagccatcgccgaacattaccaggcgctgtatcaggcggcctgcgaacgccgcgatcggctgggcctgccgctgccgatcgtcgccaccggccacctgaccaccgtcggcgtcaccacctccgactcggtgcgcgacatctatatcggcaccctcgacgccttcccggcgcaagccttcccacctgccgattacatcgcgctgggccacattcaccgcgcgcagaacgtcgccaagtcggaacatattcgctatagcggctcaccgattccgctcagcttcgatgaactgggcaaagccaaaagcgtcttcctggtcgatttcgccggcggcgccctgcagcaggtagaagcgttaacgatcccgcagttccagcccatgcagctgatcaaaggcgatctggccgagatcgaacggcagctgcagcaatttgccgactatgccggcgagctgccggtgtggctggatatcgaagtggcgacgcaggactacctcagcgatatccagcgccgcatccaactgctggcggatgagctgccggtggaagtggtgctgctgcggcgcagcaaagagcagcgccgccaggcgatcgcgcagcaggataaggaaacgctcaacgagctgagcgtcaacgaggtgttcgaacgcaggttggcgcaggaggccgacatgccagaagcgcgccaacggcgaatgcaccaactgttccgccaggtggtcgaggcggtgcagcacaatcctgaggagaccaatccatga

SEQ ID NO: 424344 - DNA, 3252 bp, Serratia marcescens
atgaagatcctcagcctgcggttaaaaaacctcaactcgctgcagggcgagtggaaaattgacttcaccgccgagccgttcgccagcaacggcctgttcgccattaccggcccgaccggcgcgggcaaaaccaccctgctggacgccatctgcctggcgctgtaccaccagacgccgcgtctcaacgtcacgccgagccagaatgaactgatgacccgccacaccgccgaatcgctggcggaggtcgaattcgaggtcaagggcgtcggctatcgcgccttctggagccagcgccgcgccaaaaacgcgccggacggcaacctgcaggcgccgaaggtggaactggcgcgccgcgaggacggcaagatcttggcggacaaggtgcgcgacaagctggagatcaccgccgccatcaccgggctggacttcggccgcttcaccaaatcgatgatgctgtctcaggggcagttcgccgcattcctcaacgccgacgccaacgatcgcgctgagctgttggaagagctgaccggcaccgaaatctacgggcggttgtccgaacaggtgttcgaatcgcacaagcaggccaaaaccgacctggatgggttgcaccagcgcgccagcggcatcgagctgctgaacgatgaacagcgccactccctgactgaacagctgacggcgctgagcgcgcaggaaagcgccctcggtaagcaaactcagcaacagcaacaggcgctgagctggctgcagcaatggcaacgcctccagcaacagcaaaacgagggtcaacggcggctggaaaccgcccagcgcgagcagacggaggccgccccgcagctgcagcggctggcgctcagcgaaccggccgagaaattgcggccgctgcgcggtgaacgcgatcgctgccgcgccgagctgcagacgatacaacagcaggcagcccagctgacgcagcaacaggaacagcactcggcgcagctggcgccactgcagcaggcggtggaaaaggcccgtctggcgcagcaagcccatgccgagcatatgcggcagcagcaacagctgatcgatgaccaggtcgccccgctcgaccatcagatcgcccaactgcagtcgacgcaggccgagcggcgacaggccggcgatgccgccgcgcagcagtgtaccaaacagcaaaccacgctggagcagctcaccgccgagcgcagccagctgacggcgcaggccgcacagcatcagcagcggttgaacgcgctgaccgaagcgctggccgttcagcagcaacagcaacaagcgctggcggcgcaaacgccgctggccccgctgcgccagcgcctgagcgccctggcggatctgcgcccgacgcgccagcagctatttactctcgcctctttatcgcaacaagttgttaaacggctggaacagcagcggcaagagctaaacatcggtcaaaatgaactgacccagttggagccacagttagagctcatccgtcagcaatttaagcagcagaaagcccaccaggccgatgttgaaaaaacctatgcgctggaacaacggatcgtgggactggaagccgagcgcgcccgtttgcaacccggcgccccctgcccgctgtgcggctcatgcgagcacccggcggtagaacaataccaagaggtaaaactgtcagaaactgcgcaacgtctggagcaaatgaaagtccagaccgaagcattgcaaaaacaaggcgtcgagctgcgagcccgttacgacaacctgcaacagcaattgcaacgccaacagcaggctatcgcgcaggatgagcagcagctggctgcccaacagcagcagtggcagcagctcagcgcgccgctggcattcgactttacgttggccgagggcgagcggctcagcgcctggctaagcggctgcgacgatgaagagcggcgcgggcaacacgcgctgcagcagcatgaacaggcggcgcaggcggtacagcaggcaaaagacgcgctcgccgctctgcaaacgcagcagcagcaggcgcagcaacggctggcgctgctcgaagagcgctttacgctgctgcagaaaacccatgccgacagcctgcaacagcagcaagacctgcaacaacgctggcaagaaggcgagaagaccctcgccgaacggcgcgcgcagcggctggcgctgttcggcgaacagcaggtcgccgaggtgcgcgaacagctgcgcgccaaacaaaccgcctgtgagcaggccagcttgcaggccgccgagcagtggcaaaaagcgcaggaactgcgcgagcgcctggccggccagcaggccggattgcaacaacagcacacccaaatgcaggaacggctgcagcaggcgcagcagctgtggcagcaggcgctggccgacagcgaattcgccgatgaaaccgccttcgccgctgcgttgctggacgacgccctgcgccgcgaattgcagcagcgcaaagagcagctgcaacagcggcaggtagaggctgcggctctgctggctcaggcgacgcaaacgctggagcagcatcggcaaagccgcccggaaggggtggatgaggccaacgcggatctcgacgcactcacgcaatcgctggccgagctggcacagcagttgaaaacgttgcagctgcgccagggtgaactgcgcaaccagctggaaagcgacgccgcccgccgcctcaatcaacaggcgctgttcgagcaaatcgcccgcagccagcaagactacgacgactggagctacctcaaccagctgatcggctcgaaagaaggcgacaagttccgccgcttcgctcaagggctgacgctcgatcatctggtttatctggccaaccttcagctcggccggctgcacgggcgctacctgctgcagcgcaaaaccagcgacgcgctggagctgcaggtggtggacacctggcaggccgacgcgctgcgcgatacccgcaccctgtccggcggcgagagcttcctggtcagcctggcgctggcgctggcgttgtccgatctggtcagccacaaaaccagcatcgattcgctgttcctcgacgaaggcttcggcacgctggacgccgaaaccctcgataccgcgctggacgcgctggacagcctgaacgcctccggcaaaaccattggcgtgatcagccacgtcgaggcgatgaaagagcgtattccggtgcagatcaaggtgaaaaaggtcaacggactcggcgtcagccggctggaggcgcacttcaggctggaatga

SEQ ID NO: 424345 - DNA, 849 bp, Serratia marcescens
atgaaaatcgctaaaatactcaataataacgtggtgattacgctggacgaccgtcaggaagagacggtggtaatgggaaaaggaatcggctttaaaaagaagcccggcgacacgctggacgaaagcctgatcgaaaaggtgttcacccataacggcggtgaaatcgccgagcgctataaagagctgctctccgagatcccgctggcctgcgtcaccaccgccgaccggattattaccctcgcccgcgaacggctgccgggcaagttgcataacatcgtctacatcacgctgaccgaccacatccatttcgctctgcagcgccacgcggaaggattggatatcaaaaatgccttgctgtgggagattaaaaagctctatcaggccgagttcgccgtcgggctggaggcgctggccttgatcgccgagcggctgaataccgcgctgccggaagacgaggccggatttatcgccttgcacctggtcaacgcccagcttaacgacgagatgcacaacacgctgcacatcacccgcgtgatgcaagagatcctcaacctggtcaaataccacttccgctttgattacaacgaggaagccctgagctaccaccgtttcgtcacccatttgaaattctttgcccagcgcctgctggggaaaaactacgtcgacagcgacgacgactcgctgtatcaggtggtgaaagagaaataccgtgagtcattcgcctgcgccggcaaaatcaaccgccacatcgaaaagcactatcagcatcagctcaccacggaagagatgatgttcctgaccattcatatcgaacgggtgcgcagcgaaagcgaggagaaaccggcttaa

SEQ ID NO: 424346 - DNA, 387 bp, Serratia marcescens
atgaagcgcctgttgctggatacccacgcgttgctgtggtggctgattgatgacgcctgcctgggcgcgaacgccaaaaggcagatcgccgatccgggcaatgcggtgtacgtcagcgcggccagcatttgggagatctcgatcaagcaggcgctgggcaagctggcgctgccggaagacatctttgcgatcatcgaggccgaagattttctgtcgctgccgatggacgcctttcattgccaacaggccgggcagctgccgccctatcatcaggatcctttcgatcgcatgctgatcgcacaggcgcaggccgaggggctgatgctgatctccgccgacgcggtgtttccgcagtacggcgtgcgggtggcggacgcccgccgttaa

SEQ ID NO: 424347 - DNA, 234 bp, Serratia marcescens
atgccgattcaggccaatatgcacgaagccaaatccaatctgagccagctggcggacagagccgcggagggagaaaccgtgattattgcaaaagcagggaagccgtacgtacagctggtcgccatccagggcgaagcgcgccggcccggcgccgccaagggcaagtttaccgtgccggcggatttcaacgcgggggatgcggccattgcggcgctgtttgagggcgatgcatga

SEQ ID NO: 424348 - DNA, 915 bp, Serratia marcescens
atgcgcattggcatcgatttgggcgggacaaaaattgaagtgattgcgttggcggacgacggccgggagctgtttcgccatcgcatcgccacgccgcgccatgactatgggcaaaccctggcggcgatcgccgggctggtgaaactggcggaagatcataccggcgagcggggatcggtcgggatcggcattcccggcacgctgtcgccgtttaccgggcgggtgaaaaacgccaactcggtatggctcaacggccaaccgctggacaaggatctctcggcgctgttggcgcgcgaggtgcgtatcgccaacgacgccaactgcctggcggtgtcggaagccaccgacggcgcaggcgccggcgcgcaaaccgtgtttgcggtcattgtcggcaccggctgcggcgccggcgtggcgctgaatgggcaggcgcattccggcggcaacggcatcgccggcgagtggggccacaatccgctgccgtggcaggatgacgatgagctgcgctacgcccgcgaagtgccgtgctactgcggcaaaccgggctgcatcgaaacctttatttccggcaccggtttcgccaccgactatgcgcgcctgggcggcaacgcgctgcaagggcacgagatcgtggctctgagcgagcggggcgatgcgctggcggagcaggcgatcgtgcgctacgaaatgcggctggcgaaagcgttggcgcacgtgatcaacattctggatccggacgtggtggtgctcggcggcggcatgagcaacgtggatcgcctgtaccgcacggtgccgcagcgggtgaaagattgggtgttcggcggcgagtgtgaaacgccgatccgcaaggcggtgcacggcgactccagcggcgtacgcggcgcggcctggttatggccgcaacagcagcgctaa

SEQ ID NO: 424349 - DNA, 912 bp, Serratia marcescens
atgctgtggtttaagaatttgatggtttaccgtttgagccgcgaagtggcgttaaacgcggatgaaatggaaaaacaactcagcgcgttcgccttcacgccgtgcggcagccaggacatggccaagaccggctgggtctccccgatgggctcgcacagcgatgcgctgacgcacgcggtcaacggccaaatcgtcatctgcgcgcgcaaggaagagaaaatcctgccgtcgccggtcatcaagcaagagctgcaggccaaaattgagcgcctggaggcggaacaacatcgcaaactgaagaaaaccgagaaagacgcgctgaaggacgaagtgttgcacagcctgctgccgcgcgccttcagccgcttcaaccaaaccttcatgtggatcgacaccgtcaacgatctgatcatggtcgatgccgccagcgccaaacgcgccgaagatacgctggcgctgctgcgcaaaagcctcggctcgctgccggtggtgccgctgaccatggaaagcccgatcgaactgacgctgaccgaatgggtgcgttccggcgagatgccggctggtttcgccattcaggatgaagcggaactgaaagcgattctggaagaaggcggcgtgatccgctgcaagaaacagaatctgatcagcgacgaaatcgcggtgcatatcgaagccggcaagctggtgaccaagctggcggtggattggcaggagcgcattcagctgatgctgtcggacgacggctcgctcaagcgcctgaaattcgccgacacgctgcgcgaacagaacgacgatatcgatcgcgatgacttcgcccagcgctttgacgccgactttatcctgatgaccagcgagctggcggcgttgatcaaaaacaccatcgaagcgctcggcggcgaagcccagcgttaa

SEQ ID NO: 424350 - DNA, 291 bp, Serratia marcescens
atgctgaaagtgaatgagtattttgccggaaaagtgaagtctatcggttttgacagtagcagcatcggtcttaccagcgtgggcgtgatggaagagggggaatacaccttctccaccgcgcagccggaagaaatgacggtgatcaccggggcgctgaaagtgctgctgccgggggcgccggactggcaggtgtttacgccgggtgagaagttcttcgtgccggggcacagcgagttcaacctgcaggtggccgacgcgaccgcctatctgtgccgctacctgagcaaataa

SEQ ID NO: 424351 - DNA, 678 bp, Serratia marcescens
atgacggcttcattcgccacgctgaccatcggtcaggcgccgcgcagcgatatcatgtcgctgctgtctgcttatctgccggcggagcgggtgaggcacgtcggtttgctggacggcctggatgccgggcagatcgccgagcgttatgcgccgcaacggggcgataagctgctggtgtcgcgcctgttggacggcacgcaggtgacgctctgtgccgctcgcgtcgaaagcgggttgcagcagaagatccgcgagctggaggcggcgggatgccaggtgattctgctgctgtgcaccggcgaattcggccgattgcaggcggagcaggcgctattgctggagccggatcgcatcatcccgccgttgatctccgcgatcgtcggcgaacaccgcgtcggcatcgtggtgccggtggcggaacaggttgggcagcaggcgcgcaaatggcggcagctggcgacgccgccgagctatgccgtcgccagtccttatctggcggatgatgccgcgctggagcaggcggcttgcgcactgctgcggcagggggcggaggtggtggtgctcgattgcatcggttatcaccagcgccaccgcgcttttttgcaggcgcgtctgtcggtgccggtgctgctgtcgaacgttctggtcgccaagctggccgcagagttaatcggctga

SEQ ID NO: 424352 - DNA, 930 bp, Serratia marcescens
atgagtttgcaacaaacgctgcaggtttttgaattgattgatagcgcattcgtcagcggccaggacgtcgtcgacctgtttgcgccttacccggcgatccgcgccagcaccctgcgcgccgaggggccgaagggcggcaccgatttcgtgcgcatcgagatccccggcagcgcaggcaaattcgctggcggtgcggcgccgacgctgggcattatcggccgcctgggcggcatcggcgcgcggccgacgcgtatcgggctggtgtccgacggcgacggcgcgatcgccgccattgccgccgcgctgaagctggcggagatgcagcgcaagggcgacacgctgccgggggatgtgatcgtcaccacccatatttgcccgaacgcaccgacccggccgcacgatccggtcgattttatggattcgccgatcgatgacgtgacgatgaacgataatgaagtggtgccggaggctgacgccatcctgtcgatcgacaccaccaaaggcaaccgcatcatcaaccacaaaggctatgcgctatcgccgacggtgaaagagggctacatcctgcgggtggcggaagatctgctgcgcatcatggagatgaccagcggccgcccggcggtgaccttcccgatcaccacgcaggacatcaccccttacggcaacggcgtgcatcacctcaacagcatcctgcagccctcgaccgctactgcggcgccggtggtcggcgtggcgatctgcagcgaatcggtggtgccgggctgcggcaccggcgccagccacgaaacggatatcgcgctggcggtcaaattcgcggtggaagtcgccaaagaattcggccgcggcacctgccggttctacgatgccgccgaatacggccagctgctggcgctgtacggcagtctgagtcacctgcaaaaaaggagatag

SEQ ID NO: 424353 - DNA, 1557 bp, Serratia marcescens
atgaaatcaaataatccgctaaaagaggtcggcacgctgttggtcatggcgctgctttcggtggtgggggcgatcatcggcgttcagctgatcactacgctgggcgtgacgcccaacacctcgatcatcggtgcgctgatcgccatgctgctggcacgcattccgctgcaaatgtttcaacgctaccgctcggtgcacacccagaacctggcgcagacggtgatctcctccgccaccttcggcgcggccaactgtctgctgatgccgattgcggtgccttacgtgatggggcaaccgcagcttattctgccgatgttctgcggcgtggcggcggcgatgctgctcgacgcctatctgctttatcgcctgttcgataccaaagtgttccccgccgccaatgcctggccgccgggcgtcgccgccgcggaggcgattaaagccggcgatcgcggcggcaagcaggcctggcttctggtggtgggcgtaggggtgggcatcgccggatcaatgctcaagatccccatggcggccttcggcaccgcctttatcggcaatatctgggcgctgagcatgttcggcgtcgggctattgctgcgggcctacgccgagccggtggccggtttcgatattaatgcccattttattccgcacggcgtgatggttggcgccggcctggtggcgctgatccaggtcgcgcaggtgatccgcagccgccgcgccgatagcgccggttatacccaaccggacagcgcggtaagcaaagcgctcggcctgggggcggtcggctacatcgccatcgccgcgtttttggctctggtcggcgggctgtttagcgagatgtcgctgccgatgctggcgctgttcgtgatttacgcggcgttcgccgctttcgttcatgagctgatcgtcggtatcgccgccatgcactccggctggtttccggcgttcgcggtggcgttgatcaccctgatcgtcggtatcctgatcggtttcccaccgctggcgctgtgcatcctgaccggctttaccgccgccaccgggccggccttcgccgacatgggctttgacttgaaagccggcttcatcctgcgcggctacggcgaggatctgcggcaggaactgctggggcgccgcattcaactgtttgcggcgctgatcgccttcctcatcgccattccggtggtttacctctcttaccacagctatttcctgcaggacctgatcccgccggtcgcgcgcgtttacgccaagaccatcgaggccggtgcgcagccgggcatcgcctggagccttttgatctgggcgatccccggcgccgtggtgcagctgatcggcggccccaagcgccagctcggcgtgctgctggcaaccggcctgctgatcaacaacgccttggccgggtgggcggtgctggtgggcatcgcgctgcgcgtggcgatcctgcgccgttggggcgatcgcggccgcacgccgatggagatcatggcggccggatttatcgccggcgacgcgctctacaacttcttcagctcgattttttccagcaagggcaaatag

SEQ ID NO: 424354 - DNA, 774 bp, Serratia marcescens
atgacaacgctggaaaatgccgctgcggtattaaaactcttttctcaacaacgcgtgatgcatggccaaccgggcattgcattcagcgacgtggtagatcaattggcgctgccgaaaagcacggtatcgcgcctgctgcagagcatggaaaatcagggcatgctggagcgcgatcccgatagccggcgttaccgcatcggcgcgctgttgctggcggcatccagccactatctgtcgatgccgctggtggacaacctggcggccagcatggcgcagctgtgccgccagacggcgtgtaccggctacctctcggtgctggaggggcaggagatcatggtgatgcgcatgttccccggccgccactttttgcaggtggtcaccccggcgggctaccgttcaccggcggcggaaacctcggttggtcgggcgatactggcgcgtgaaagcgacgagcaggttcgggcgcgttacgccggcggttaccgggcggcttcgcccaatgcgccgcaaacgctggatgcgctgctgcagaagttgcagcaggtgaggcgccagggctggtcgctggcgcgcaatgaaactttgaacggcatcagttcgctggcgaccgcgctggtgaacaagcacggcagcgagacggtggggctgtgtctgtccttcccttcgcagggcgaggaacagccgtttgttccggaagttctggccgaattaaccgcagtcagccgccaactggcggaaaaatatggcgatgattattggcagcagatcaactaa

SEQ ID NO: 424355 - DNA, 792 bp, Serratia marcescens
atgtcggtttcgccgctgcctttcgccgcgcccggcgccgccatgccctggcgccgttgtctggtgctggtgctggcgctgcacctgctggccgcggcgctgctctggccttggcgagacaaggccgcgccggcgtgggtgccgccgccggcggtcatggtggtgatggccgccgcaccgcaggctccggccgaggtaaaacaaccgccggggcaaaggacgccgccgcctcaggttgaaccgccggcgccgccggaacccttgccggcggtgaaggtgcctgaagccgtacggtcgaacatcgccgtaccgccgaagcagaaaaaatcgcccaagccggtgaagaaaatccccctgccgcgcacgccgccgcaggagaaaacgatcgcgccgccgagaattcaggagcaaagcgtcggcgcaccgccgccgggccgggcggataaagcggccgcgccgcaaacccgcctgacgccctatgcacaggcgggggaagatagctggcgcagccgcatcaacggccgccttaatcgctttaagcgttatcccaaagacgccttgcggctgaagcgccagggcgttgggcaggtgcgtttcacgttggacaggcagggccatgtgctggcggtgacgctggtcagcagcgccgggctgccgtcgctggatcgcgaaatccaggcgctggtcaagcgcgcttcgccgctgcctacgccgccggcggatgcttacgtcaacggcacggtggaattgacgttgccgatcgatttcagtttgcgcggcgcgggtttttga

SEQ ID NO: 424356 - DNA, 1332 bp, Serratia marcescens
atgagcaatcagagtgtgatccccggcgatatcgacgcgctttcccggcagttcgacgaagggcgccacctgcggctcggtggttggctggtgctgttgggatttggcggtttcctgctgtgggggctgttggcgccgctggataagggtgtgccggtctccggcagcgtggtggtggccggcaaccgcaaggcggtacagcacccgagcggcggcgtggtgtcgcaaattcaggtgcatgagggcgaccgggtcagcgccgggcaggtgctgctgctgatggataccgtcgacagccgcacccagcgcgatgcgctgcgcagccagcagttgagcaacgccgcgcagcgggcgcggctgcaggccgagcgcgatggcctgcaggcgatcgttttccccgctttgttgcaagcgcggcgggaggagccggaggtgatgtcgttgatgctgttgcaacagcagctgttcaccagccgccgtgcggcgttgcagagcgagctggcggcgatcgcggagagcatcgccggatcgcaggcgatgctggaggggatccggcagtcttacgccagcaagcagcggcaaaaggccatgttgcaggagcagctgagcggcatgcgcaagctggcggcgcaagggtatgtggcgcgcaaccggctgctggatctggaagggcagtatgcgcagatcgacggccaggcgtccgaagacaccggcaatatcggccgcctggggcgccagatcctagagctgaagctgcgggcgatccagcggcgggaagagtatcaaaaagaggtcagcagccaactggccgaggtgcggatgaagctggacgagctggataaccgcctggccaaggcggaggccgatctgggccatacgcaggtgaaagcgccggtggcgggcaccgtggtggggctgagcgtgttcaccgaaggcggtgtgatcggcgccggtcagcaactgatggagatcgtgcccagcgatcgggggctgcaggtggaggcgcgtattccggtcgaactgattgacaaggtgcaggtgggcttgccggtcgagctgttgttctcggcgtttaaccaaagcaccacgccgcgcgtcgagggcgaggtgacgctggtcggggccgatcgcctgaccgacgagaaaagcggtgcgccttattacagcgtgcgcgccaaggtcagcgaagcgggtctgcagcggttgaacgggttggaaatccgtccggggatgccggtcgaagggttcatccgcaccggcgagcgttcgatgatgaactacctgttcaaaccgctgaccgatcgccttcatctggcgctgacggaagagtga

SEQ ID NO: 424357 - DNA, 1752 bp, Serratia marcescens
atgagcgtgctggccgcataccggcgcgtattttggggcatcgcactgtttaccgcggtgatcaacctgttgatgttggcaccggcgctgtacatgctgcaggtctacgatcgcgtgttgccatcgggcaaccgcatgacgctggcgatgctgaccctgatggtggtcggcctttacctgtttatggggctgctggagtgggtgcgcagccaggtggtgatccgcctcggcgcccagatggatatgcgcctgaatcagcgagtctacgacgccgccttcgaaaccaatctgaaaaccggcaacccgctggcggggcaggcgctgaacgatctgaccaacctgcgccagttcgccaccggcaatgcgctgttcgcctttttcgatgccccctggttcccggtttatctgctggtggtttttctgctccacccctggcttggcgcgttggccagcgccggggtgatcgtgctggtgctgctggcctggctcaaccagcgggtgtcgcaggcgccgctcgcggaggccggccgggtcgcgctgagcgccacgcagcaggccaacggcaacctgcgcaatgctgaagccatcgccgccatggggatgctgaccgatttgcgcctgcgctggctgcggcagcatcagcagttcctgctgctgcagaaccgcgccagcgagaaaatcgccgccgtcaccgcctggtcgaaaaccgtgcggctggcgctgcagtcgctgatgttgggctgtggcgcgctgctggcggtcaacggcgacattacgccgggcatgatgatcgccggatcgatcctgatcggcagggtgctggggccgatcgatcagttgataggcgcctggaagcagtggtcgtcggcgcgccagtccctgcagcggctggaggtgatgctggccgccaacccgccgcaggcggcgagcctgccgctgccggcgcccagcggcgcattggccgtgaatcagctgagcgccagcgcgcctggcgggagcgcgccggtgttgcacggcgtcagttttcgtctggaggccggggaggtgctgggcgtcattggcgcgtccggctccggcaaaacgctgctgatgcgccaactggtcggcgcgctgacgccgctcagcggcgacgtgcggctggacggtgcggatcttcggcagtgggacaaacagcaactggggccgcatatcggctacttgccgcaggatatccagctgttcgccggcaccctgacggaaaatatcgcccgctttggccaggttgacgccgagaaggtggtggccgccgccgcgctggccggcgtgcaccaactgatcctgcatttgcccaaagggtatgaaaccgagctgggcgagggtggcagcggcctgtccggcggccagcgtcagcgggtggcgctggcgcgcgcgctgtatggctctccggcgttggtggtattggacgaaccgaacgccaacctcgatcgcgaaggggaagaggcgctgcagcgggcgatcgaagcgctgaaaaagcgcggcaccaccatcgtgttggtgacccacaaaccggcgatcctggcgacgaccgacagattgctggtgctggccgccggccaggtgcagcacttcggccccagcgacgccatcctgaaaaaactgcctggttttacgcccgcggccgtaccggccaacgccggccgcagcagcggcggcggtttcaacgtcaactacgccaattttgccaaaacggccagcggtgaacgaaaagtatga

SEQ ID NO: 424358 - DNA, 570 bp, Serratia marcescens
atggcattttcagtcaactatgacagcagctttggcggttacagcattcatgactatctgggccaatgggcttcgacattcggtgatatcaaccataccaacggcaatgtcgtcgaaggctcaaacagcggtggcttctacggcggccggttgtccggtagccaatacgccgtgaccagtacggataaccatgtcacgtcggtcgtggcgggtggcaacctgacctacacgctgttcaatgaaccggcgcataccctgtacggccagctggattccctgtcgttcggcgacggtttgagcggtggcgatacatcaccgtacagcattcaggtgcctgacgtcagcttcggcggcctgaacctcagcagcctgcaggcgcagggccacgatggcgtggtgcaccaggtggtgtacggcctgatgtccggcgataccggcgcgctggagaccgcgctgaacggcatcctcgacgactacggcctgagcgtcaactccaccttcgatcaggtagcggcggcgacggcggtgggcgtgcagcatgccgacagcccggaactgctggcggcctga

SEQ ID NO: 424359 - DNA, 2700 bp, Serratia marcescens
atgtttattcacaagggaaccacgccggccggccgattggccacggcggtacgtgccgcgctggcggcgatgatgttgactcagccggctgtggcgctcgctgcccaggctgaggcgaacggcgcgcaggctgcacagcaaaagcatttcaacgttgcggcgcagccgctgcagagcgccatgttgcgcttcgccgagcaggccggcatgcaggtatttttcgacgaggtgaagctcgacggcatgcaggcggcggcgctgaacggcagcatgagcgttgaagagggcctgcggcgcttgatcggcggcaatccggtggctttccgcctgcagccgcaggggcagatcgtattgagccggctgccgacggcgaacggcaacggcggcgcgctggcgctggacagcctgacggtgctgggcgccggcggcatcaacgccaacgattgggtttacgacgaaccgcgctcggtcagcgtcatcagccgcgaacagatggacaaccgcccggcgcgacacgcggccgatattctggagcagacgacgggggcctattccagcgtcagccagcaagatccggcgctgtcggtcaacatccgcggcatacaagactacggccgggtgaacatgaacatcgacggcatgcggcagaattttcaaaagagcggccatggccagcgtaacggcaccatgtacatcgattccgaactgctgtccggcgtaaccatcgacaagggcaccaccggcggtatgggcagcgccggcacgctcggcggcatcgccaccttcaataccgtcagcgcgagcgatttcctggcgccgggcaaagagctgggcggcaagctgcacgccagcaccggcgataacggcacccacttcatcggcagcggcatactggcattgggtaacgaaaccggcgatatgctgctggccgccagcgaacgccacctcggcgactattggcccggcaacaagggcgacatcggcaacattcgcatcaataacgacaccggcaattacgatcgctacgccgagagcatcaagaacaacaaaatccccgacactaattaccgcatgcactcgcggctggccaaggtgggctggaacctgcccgccaaccagcgcctgcagctgagctatctgcagacccagaccgcgtcgccgatcgccggcaccttgaccaacctgggcacccggccgccttatgaactgggctggaagcgcaccggttacagcgacgtgatggcgcgcaacgcggcgttcgactacagcctggcaccggaaggcgtcgactggctcgattttcaggccaagctgtattacgtcgatactcaggacgacagcgacacctacagcaccagctcgctgctggacaacggctacgcgacgcgcacccgcctgcgtacctatggcgcgcaggcgcaaaacacctcgcgcttcagcctggcgccggggcatgacttccgcgccaactacgggctggagttctattacgacaaagcgaccagcgactcttcccgtgagggtatggaaggggtgacgccggccggcaaccgttcggtcggcagcctgttcgccaacctgacctacgactacgacggctggctgacgctggagggcgggctgcgttacgaccgctatcgcctgcgcggccagaccggcctgagctatccggatttggccaaggatgggcaacgctacacgattgacaatccttgcaaagcgttgcgtctgaccggctgttcaaccacgacccgcgaagattgggacgtggatcgcgatcagggcaagctgtcgccgacgctggcggtggcggtgcgccccggcgtggagtggcttgagctgtataccacctacggcaaatcctggcggccgccggcgatcaccgaaacgctgaccaacggcagcgcgcacagcacctcgacgcaataccctaacccgttcctgcaggccgagcgctcgcgcgcctgggaagtcgggttcaacgtgcagcagccggatctgtggtttgagggcgatcggttggtggccaaggtggcctacttcgacaccaaagtggataactacatcaacctggcgatagaccgcaataaaccggggctggtgcagccgagcatcggcaatgccgcttacgtcaacaacctgtctaaaacccgcttccgcgggctggagtaccagctcaactatgacgccggggtgttctacgccgacctgacctacacccacatgatcggtaaaaacgagttctgctcgaacaaggcctggttgggagggcgtctgcgctacggcgacggatcgcgtcgcggcaacttctatgttgagccggatgccgcttccaatgacttcgtcacgtgtgacggggggacgcagttcggctccgccgcctacctgccgggcgatcgcggctcggtgacgctgggcggccgcgccttcgatcgcaagctggacgccggggtgaccgtgcgcttcgcgccgggctatcaggacagctcggtgccatccaactacccgtacctggccgactggccgaagtacaccctgttcgatctgtacgccagctacaagctgaccgacagcctgacgctgcgcggctcggtggagaacctgaccaaccgcgcctacgtcgtcagctatggggagacgctggccaataccctggggcgcggccgcaccgtgcagggcggggtggaataccgtttttaa

SEQ ID NO: 424360 - DNA, 954 bp, Serratia marcescens
atgaaaccgctaaccgcacaggcgcgacagcaggcggccgcctgggccgtgagcctggccgaaggggcgctgccggccgatcggcggcgagcgttggacgcctggttggccgccgatccgcagcatcgggcggcgctgcgtcaggcacgcctgctgtggacgacgctggggcagctgccgccagagcagcggcaggcgttacaaccgcaggtggcggcgctgaaaacgccatctcgccatcgatggccccgctgggcggtggcggcggcggtggcgatcgccgtttccttcggcgtttatcgcgggccagctctgtggatcggcatgcaggcggattatcaaaccgttcgcggcgaggtgcgcgaagtggcattgccggacggcagccgggtggcgctggacagcggcagcgcgatcgcgctggcgtattccgcaggcgaacgcaaggtgcggctgctgagcggcgccgcctattttatcgtcgcgccgttaggtggggcggaaagccgcccattcagggtggaggcggaaaacggtgtcacccaggcgctgggcacggagttcagcgtggcgcgcaccgaacggggcgtggacgtcagcgtgcatcagcacagcgtgcgggtgacgcttgagcgcggcgagcgctcgctggtggtcgcgcaacgccaggcggcgcattaccgcaacgggcagctgcagctgacgcggcaaacggccggcgatgacgcctggcggcgcggctggctggtgatcgaccgccaaccgctgccgcaggcgctcgcgcagctcaaccgctatcgcgcgacccgcatcgtggcggtcaatcccgcgctaagagcgcgcacggtgagcggcgtgtttgcgctcaataagctcgacgacggcgtcggcgccattcgtcaggaactctccgcccgccaactgaatctccccggcatcacgctgctttactga

SEQ ID NO: 424361 - DNA, 501 bp, Serratia marcescens
atgtccaattccgagttgcaggcgctgtttctgcgccatatgcggccgctgcaagcctatttgaacgccaaactgcgcgaccctcagctggctgcggacttggcgcaggaaagttttacccgcctgaccgagcagtatccgcagggtaatattctcgatatcgaggcctacctgtacaaaaccgccaaaaacctgatgctcgaccatctgcgccagcagcagcggcggcagaccgaagcggtcgaagacgacattctggcgcagtatccctccggtgaaccggcgcttgaacaactggcgatcgatagtcaattgctgcaactgttgcaacaggcgctggcggacatgccgccgcgcacgcagcagattttccgccttaaccggctcgatggcctgacccaggcgcaggtggcggcgcagctgggcgtgtcgctcagcacggtggaaaaacacctggccagcgcgctcgagcggctgatggcgcggatggaagaacaataa

SEQ ID NO: 424362 - DNA, 201 bp, Serratia marcescens
atgcgcgaaaatgatcaacctgcttatccacggagcgcccgcgtcgtagaggtgtttcggggcgacccgaacctgcatctgcgccgttttgaagtgcgcaccgacgacattgagccgaatacgctgctcagtgaacatgaaaccgagcaggaagcgcttgacgccaagcatcgctatgaggacgaggcgttagagctctga

SEQ ID NO: 424363 - DNA, 405 bp, Serratia marcescens
atgactcaacttaccccactggacctggtactcgatacgctgcagcaggtcgtcgccagccctgaacatcggccgacgcagctcgccgcccgtttcagtgcaggctaccgccagcaggtggatggcaaggtgctgaacttcgagcagtttgagcaacacatggcgctgctgaagcggcaaacccggcgcatgacgctgagcgtgatcgcggcggcggagcggggcgaggcggtgctgacccatcatctggtcgaggtggaaaagcgcgacggctcctgcagccgcgtgcgggtgctggcgcacttcaccgtgcgtgagggccgcatttgcgcctgcgacgaactgaccgagctgctggcgggcgcgcccggcgatcgcgatcttggctcgcgcgtgtcggaatga

SEQ ID NO: 424364 - DNA, 744 bp, Serratia marcescens
atgatgcagatccgcagccaacgccttcagcatgaaaaaaagcacctgacgccctggcaccggcacgaaggcggccagatctatctcttgacgcgcggcatgctggcaatggaactcccgggccggcaatgggcgatcaccggcggtacgctgggctggctgccgccgggatgcgcccatcaggcgctggcctgcggcgacgtggcgggctggagtctgtatctgccggtggaaagcgtgccggagatgccgccgctgccgcagctgttcacggcctctgcgctgttgcaggccctggtggagcgcatcgcgcagttccccgccggcccgctgagcgcgccgcaacggcggctgctgcaggtgctgctggacgaaatgcacgcggcaagcagcgcgccgttacaattgccgctgccgcaggacgccaggttgctgaacatcgcccgggcgctgctgaacgatcccgccagcccgcgcagccagtgcgactgggccatttgggccgggctcagcccgcgcaccctgagccgccgttttctgcaggaaaccggcatcagcttcgctctgtggcgccagcaggcgcgggtattgcgttcactggagggattatcacgcggcaaagcggtcggcgaggtggccgacgcctgtggctatgacaacgtcagcgcctatatcgccgcctttcgccgccgcttcggcgtcacgcccggggcgtactttgcgccggctcggcaaacggaatag

SEQ ID NO: 424365 - DNA, 525 bp, Serratia marcescens
atgacacaaaccctgttcatgataggcgctcgcggagccggcaagaccacggtaggcagcgcattggcgctggcgttgggctatcagttcgtcgataccgatctgtttatgcagcaggcggcgcagatgagcgtggcggaaatggtcgagcgcgagggctggctggggttccgccgccgcgagaccatcgcgttgcaaaccgtgaccaagccgtcaactatagttgccactggcggcggggcaatcctggcggaggagaaccgtcagtttatgcgtcagcatggcaccgttatctacctgcgcgcgccggccagcgtgttggcgcagcggttggaagagtacccggaagatgcgcagcgcccgacgctcaccggcaggccgatcgccgaggagatgctcgaggtgctggcggcgcgcgaagcgctgtatcaggacgccgcgcattacgtgatagacggcgccgccgatccgcagcgggtggtggaacaaatcctcgcggtgttgcctcgtgagacggtgaagtaa

SEQ ID NO: 424366 - DNA, 519 bp, Serratia marcescens
atgagcctgcagattcgtttggcgcagcagcgggatatcgtgcacttgatggcggttgaacgttcggcggcgcagctgtttcgccagcagccggaatggcgctttatcgccgaaggcgaggtgatggccccgcagcagcatgcctcatttatcgccgagcgccgtgaatggctggcggaaagcgacaacggcgagtgcgccggttttattgccgtgcaggctcagggggaagattggcacatcgccgaattgtcggtcgccggcacctggcagcggcagggcgtcggccgtcgcctgatcggcgcggtggcgcaagaggccaaacggcacggtgcgggccgcctgacgctcaccactttcattgaggtgccgtggaatgcgccttactaccggcggctgggattccggccgctcgacgacgcgcggctcacggccgctctgcggcggcacctggatgaggatctggcgcacggctttgctgcaggcagtcgctgtgccatggaatttacactatcgtaa

SEQ ID NO: 424367 - DNA, 2124 bp, Serratia marcescens
atgaataacaacaagcgcggctggtggtgcgcgttgcctttggcggcctgcgcaacatcgccgacgtgggcggcggaaaaagccgcatcgaaagaagaaagcctggtggtgattggccgcaaagacgccgacggcgtgcaaagctaccagccgttgaccagcgtcaccggcacccgcagcgaaaccagcctgctgaacgtgccgcaggcgatcgacgtggtgccgcagcaggtgattaccgatcaggcggtcagcagcctggacgaagcgctgtacaacgtcagcggcattacccaggccaacacgctgggcggtacccaggacgcggtcatgaaacgcggcttcggcgataaccgcgacggctcgattctgcgcgacggcgtgcgctcggtgcaggcgcgcaacttcacgccgaccaccgagcgggtggaggtgctcaaggggccggcttcgatgctgtacggcatgggcgagccgggcgggatgatcaacatgatcaccaaaaagccccagctgcagcagcatacccacgtggaaggctggggcagcagcttcaacggcggcggcggccagcttgacgttaccgggccgctcggcacgtcggggttcgcctatcgcatgatcgtcgatcacgatgaaaccgattactggcgcaactttggtcgcaatcgccagacggtgatcgcgccgtcgttgatgtggtacggcgagaacaccaccgtgcgcttggcctatgaacatatggaatatctggtgccgttcgatcgcggcaccattatcgattcgcgcaccggcaaaccggtgaatacgccgcgcgatcgccgtttcgacgaagcctataacgccacccgcggcgatcaggacagcgttaccctgcagatcgatcaaacgctcaacgagcgctggaaaagctcactgacctacgcctacagccgcaacagctacagcgacaaccaggcgcgcgccacggcgttgaacccggagagcggcgtgttgagccgccaggccgactcgaccgccaacgccgtcagccacgccaacgcggtgcaactgacgctcaatggcgacgtggactggggtagcatcaaccaccagatgctgttcggcttcgattttgaagataaccgtaccttccgcggcgacatgatccgcggcaaaaagaacagcgatttcaatatctaccatccggtatacggtctgatgccgccgtcgacggcggtcagcgccaaagacagcgaccagcgggaaaacctcaccagctacggttggtttatgcaggattccatccagctgaccgataaatggctggtgatgggcgggctgcgttacgacgctttcgacgtctatgccggcaaggggcggccgttccagaccaataccgacagctcggacagcaagctggtgccgcgcgccggggtggtctacaagctgacgccttatgtgtcgctgtacagcagctataccgagtcgttcaagccgaactcttccatcgccacccaaattggttcgctgccgccggagcagggcaagtcgtgggaagtcggcggcaagctggcgctgccgaacggcgttaccggcacgctggcgctgtttgacatcaccaagcgcaacgtgatggtcagtgagctggtggagggcgaaaccgtgacgcgcaccgccgggcgcgtgcgttcgcagggcgtggagctggacgtggccggtaatctcaccgactcgctgagcctgatcggttcctatgcgtataccgacgcgcgggtggtggacgatccggacaacaaggggaaagagatgaccaacgtggcgcgccacaccgcctcgctgttcctgacccagaatctgggcagcccgggcctgtacagcggcgatgaggtgcgcatcggcgccggcgcgcgttacgtgggccgccgcccgggtgacgccgccaacagcttctacctagataattacaccgttgccgatgcgttcgccgcttataccatgccgatcaacggctatcgggtgaaatggcagctgaacgtgaagaacctgttcgataaaacctactacccgtccagcggcggcaacctgcgcgtggcggtgggggaaccgcgtgaggtggtgctgcgcggcagtgtcgatttctaa

SEQ ID NO: 424368 - DNA, 1116 bp, Serratia marcescens
atgcgcaattccctcattttactgctgctttccctgtgctttggcgtgttttccgctcaggcgaagacggtgaccgatatcacaggccgccaggtcgtggtgccggacaacccgcagcgcatcgtggtgggggagagccgcatgctgtatacgctggcgctgctggagccgggcaacccggcgcagcgcatcgtcggctggccggcggatctggcgcggttcgacgcgcaaagctggcagctctatacgcagaagttcccgcagatcgccgcgatccccattatcagcggcaataatttccgccaggtcaacatcgaaagcctgctgcagctgaagccggatctggtgatcctggcgcgctacgcgcgtgaagacggcgacaacgatctgctggtttccgcgctgaacaaggccggcgtggcggtgatctacgtcgatctgcgcatcgatttgctgaataacaccgtgccgagcgtgcggctgctgggcgaagtgctcaatcgccagccgcgcgccgagcagttcatcgcgttttatcagcagcatatggtggtgatccggcaacggctggcgggctatcaggggccgaagcccaaagtgatgctgcacctgcatctggggcggcgcgacacctgctgcactaccgccgcgcacggcaatctcggcgatctgctgaccttcgccggcggcgacaacatcgccaacgccagcgtcaaaggggtgtatggcgagctgaacccggaaaccattctgagcgccaatcccgacgtttacctcgccaccggcatggccggcccgcagggcaaacggctgtccgatctgcgcctcgggccgcaggtcagccaacaggacgccgccgatagcttccgccggctgatcgccaaacagccaatgctggccagcctgcaggcggtgaaaaaccatcgcgcctggagcgtctggcacaatttttacctcagcccgtaccacgtggtgctggtcgagatgttcgccaaagcgttttacccggatctgttcgccgacattaacccgcagcagaccttccaacagctgtatcagcagtttttgccgttacctttttcagggacctattggagtcagttagataatgaataa

SEQ ID NO: 424369 - DNA, 462 bp, Serratia marcescens
atgactcaacgcatcattccgctgtcggagtgcccgcagtttgccgatgtgtgcgccgcctgggccttcggccagtggggctcacagcgcggcggaacgctggagcgcacccagctgcgcttcgcccaatgcagccggccgagcgacgatcacctgacattgatgatgatcgatggcgatcgcccggtgggcatggccagcctgtggcccagcgacgatcatcagcgccaggatctcaccccgtggctggccggcgttttcgtgcatcccgatcaccgccgcaagggcatcgcccaccgtctggaaatggccatcgtcgaggcggcgcggcagcgccatcactcggtcttgcatctcatcaccgataaatcggaagcgctgtacgccggctggggttggcagcctctggaacgccggcggcagtatgacgaagacgtggtggtgatggagaaaacgctgtag

SEQ ID NO: 424370 - DNA, 558 bp, Serratia marcescens
atgttaaatgcgacccggctgcaactgatgaatcacttcgcttacctgcagcaatttatggcttcgccgcgcaccgtcggcacgctggcgccttcttctccgtggctgtgccaggcgatgttgaaccagattgaatggacccgggcgttgtcgatcgcggagctgggcgcggcggacggcgtactgaccaaacgcattctggggcggatgcgcgccgatgcggcgctggaggctttcgagatccaaccccatttcgtgcatcggctgcgcggaatagacgatcggcggctgcaggtgatggcccattcggcaacccggatggccacggattacgacgtggtgttttcctgcctgccgttgctgtcgatcccggtcaggatcagcgtgcgcattcttcagcaggcccggcagcggctgctggcgcgcaatggcacgctggtgctgttccagtacagtcacctgtcggaaaaattgctgtcgcgctattttcactggaagcgcctgcgggtggtgcgcaacttcccgccggcgctggtgtatgtctgtacgccgcgttag

SEQ ID NO: 424371 - DNA, 285 bp, Serratia marcescens
atgaaacttatcccaagcatcgcagccgtattgatcgccgccgcttccttctccactttcgccgcgccgctgtcgtcggtgaaacaggtcaacagcgagcaggccgccaatctgcaaagcgtcggcgtagtgtcggtttccggcattagcggctcaccgcatgacgccatcaccgccctgaaagaaaaagccgcggcggacggcgccagccattaccgcattatcggtctggatacccccggggattccagcaactggcgcggcaatgcggaaatttatcgctaa

SEQ ID NO: 424372 - DNA, 1362 bp, Serratia marcescens
atgaaaataaaatcgctctccctgctgttggcttcactgtttcctgtattcacctacgctgccgacattgaggtggcgcgttatgtggtcggctttcccggcggggaacgcgtcgcgtatcagggggcgttcgccaagaatttcccgcaggggctgccggtggggatcggctcagggctgacgttcaacagcaagcagggcgacgatctggtgctgacgacgctgaccgatcgcggcccgaatgccgatgcccctgcggtgggcaagcaagaagccaagattttcgccaatccgcaattcgtgcccctgttgatggacattcgtattggcggcggcaaggccgtggccgagaatgcgcggcccttgcatgacgaaaaagggccgatcagcgggctgccgctgccgggcgagctgattggttccacgaacgaagtggcgttgaatgacgcgctgcaaccgctgtccggcgatcgccgcgggttggataccgaaggcatcatcggtgacggcaacggcggctattggctgtgtgacgagtacggcccgtttctgatccatgtcgacggcaaaggcaaaattcttgccaaatacggcccaacgccgcaggccggcgagcaggcggtggcgagcggtttaccgaacatcctgaagtggcgccagcccaaccgcggttttgaggggctgacccgaatgccggatgggcgcattctggcggcggtgcagagcacgctggatgtcgagggcaaaagcaaaaacaaggcgcagtttatccggctggtgagcttcgatccgcgcagtggcaaaaccgccatgtacggctatcccatcgatatcgacagctataaaaaagccaaagacgccaagattggcgatgtggtggcgttggacaaccagcgcgtcctgttgattgaacagggaagcgataaagataagacgatgatcaacaagatctatctggtggatctcgcgcaggccagcgatctgagcgcgtttgacgaccaggggaaagcgctggagttcgacgatgcgaaagagctcgccaaacgtggcgtgaagctggcgcagaaacgggaagtggcggatctgcgccagttgggctggcgccaggagaaagccgaagggttggcgctgatcgacgatcgcaggctggcggtgatcaacgacaacgatttcggcttgcaggccaagctggtggatgcgtcgccaaagagcaagaaaatcggcgactaccagttggagaaagaagggcggctgagcctcgacggcgacaagaccgacgcccgcatcgaattgcgcccgctggagcagccggagtcgctgagcgagctctgggtgctcaccttgccgcaccccttgaagtga

SEQ ID NO: 424373 - DNA, 696 bp, Serratia marcescens
atgtcaaagcgactttttgccgaattttttggcacattttggttggtgtttggtggttgtggtagcgcagtattagcagcggcattcccacagctgggtattggtttcctcggcgtcgcgctcgctttcggtctgaccgtggtgacgatggcctatgccgtcggccatatttccggcgggcactttaacccggcgatcaccgtcggcttattcgccggcggccgtttcgcggcgaaagacgtgatcccttacgtgatcgcacaggtgatcggcggtatcgccgcagcggcggtactgtatttgatcgccagcggcaaagccggtttcgacgccaccgcaggcggtttcgcctccaacggttacggcgaacactctccgggcggttattctctgcaatcagctatcgtgattgagctggtgctgaccgccttcttcctgatcgttattcatggcgtgaccgacaagcgcgcgccggcaggattcgccccgctggcgatcggcctgacgctgaccctgatccacctgatcagcatcccggtgaccaacacttccgtcaacccggcgcgcagcaccggcgtagcgatcttccagggcacctgggcgctgcagcagctgtgggtcttctggctggtgccgctggtcggcggcattatcggcggcctgatctaccgctgcctgctggaagataaaaaataa

SEQ ID NO: 424374 - DNA, 771 bp, Serratia marcescens
atgagcatcagcaacagccataaaaacgcggtagaccggcagttcggcgagcaggccaacgcctacttaaccagcgcggtacacgcgcagggcaaggatttgcagcgccttgcacagttactggaaccgcatgccggcgcgcgcctgctcgatctgggctgcggcgccgggcatgccagcttcacggcggcggccagggtagcgcaggtggtggcctacgatctgtcggcgcagatgctggcggtggtggagcaggcggcggcggaaaaaggcctgaacaacattcagctgcagcagggcgtggcggagtctttgccgtttgaggacgccggcttcgatctggtcatcagccgctattcggcgcaccactggcacgacgtcggccaggcgctgcgtgaggtcaggcgggtactcaagccgggcggcagagcgatctttatggacgtggtctcgccggggcatccgctgttggatatctatctgcaaaccgtggaagtgctgcgcgacacctcacacgtgcgcaactatgcgccgggcgagtggctgacgttgctgaccgaagccgggctggtggtgcgcgaggtgacgtcggatcggttgatgctggagtttggcagttgggtggcgcgcatgcgcacgccggcgcatttcgttaccgcgatccgtgcgctgcagcaaagcgtgtcgcaggaggtggcggcgcacttcgccattcagccggacggctcctttaccagcgatatcatgatgtttgaagtgacgaagggctga

SEQ ID NO: 424375 - DNA, 786 bp, Serratia marcescens
atgtcatcagaagccttatccgggccaaaggccctcggcgcgtttctgcgcgcacaccgcgaacgcatcacgccggaaatgctcggcctgcccagttcctcacgccgccgcaccagcggcctgcggcgcgaagagctgtcgcaaatcagcggcatcagcgccacctggtatacctggatcgaacaggggcgcgaggtgtccatttcccccttcacgctggcgcgcatcgccaaggcgctgcggctcggccccgccgaacgccactacctgtttaccctggcgcgcgtcgccgaccccgagcaggaaactcaccgcgaaaccgccaacgacgcggtgctgcaaagcgtgcaccagatgacggtgccctgttacctgctggacgtgacctggaacgtcgtcgcctggaacccgcaggcggcggcgctgttcagcggctggctggatgtggccaacagccccaacctgctgcacttcatgttcttccacccgctggcgaaaacgctggtcagcgattgggaagaacgtgcccgccgcgtggtggccgaattccgtgccgaaaccagccaccatcaaaacaccgaagagatgcgcgccttcgtgcgcagcatgacgcacaacagcgcggactttaatcactggtggaaacagcatgacgtgatggcgcgcgaaggcggcgagcgcgcgttcgagcaccctcagcaaggcgcgctgcgctatcgccagctcaccttccacccggcggagcacggcggcctgaagctggtgatgttgatcccgctgccgtaa

SEQ ID NO: 424376 - DNA, 747 bp, Serratia marcescens
atgcaatccgaagaacaacgccttatcgatggtctgtttggccgcctgaaagaagccgagaccaagacgggcccacgggatctccaggcagaacagcaaatcaatcagcatattcgcgagcagccttccgccccttattacatggcgcaggcgatgatcattcaggaagcggcgctcaagcagatggaccagcgggtcaaagagctggaagcccaggttgcgcagctgcagcaaaccgccaacggccaacagagcagcggcggtttcctggccggcctgttcggcggcggcagccgcaatacgccaagcccgcgtgaacagtatcaggcgcagcagcaaaatacagcggcctggaacaacgcgcagcaggggggctacgcgcagccgcagcagccagcctacgcccaaccgcagcaggcggcgccttcacgcgccggcggcttcctgggaggcgccttgcaaacggcggcgggcgtcgccggcggcgtggtattggccgacatgctgaccggcatgtttcgccattcgcagccgcaggaaatcgtgaacattatcgaagaaaccccggcgccgctggacgacagcgcgatgcgcaatttcgacgcctccaacaaccttgataccttcaacagcggcgacggcggcagcttcctgaatcaggacaacggcttccagaacgccaactaccaggacgaccaggactacgccgacgacgattacaacgacgacgacgattccttcctgtaa

SEQ ID NO: 424377 - DNA, 549 bp, Serratia marcescens
atgccgagctttaatccttcagccccgtacttcagcgaacgcctgcagatgcggccgccggtgatggcggacctcgaacgtttctacgccatctttggcgatccgcaaacccagcttttcaaccccgccggcccgctcaccagcgaagcgcaggccgcttcggcgctgcaggagcggctcaccggctggcggcaacacggctacggctcctgggcgctcgccctgcgcgaacggccggattgggttatcgggtttggcgggttgtcttggaaaccgctcggcgcgcagcgcaccgtgaacctcggctatcgcttcgacacccgcgtctggggcatggggctggccaccgagatggcgcgggcttcactgcaatacgggtttgtcgggctgggtctgggtgagatttccgccattgtgcgcgcggagaatcaggcttcgtggcgggtgctggaaaagatcggcatgcagcgtgtggatacgctggatgacgtgcccggcgcggcgccgagcctggtgtatacgctaaagcgcggcgactatcagggctga

SEQ ID NO: 424378 - DNA, 252 bp, Serratia marcescens
atgggaatcagtgaagaagaacacatccgccgtttgacccaggagaagagcgacatgggcaatacggcgaagtgggtggcgatcgtttccgccgtgtactttgccttgatggtgttttacggccacccgatcggcgtgttggcgatgtcgggcgcggtgttcatcgtctctaccaccacctggctgaaaaagcgtcagaaggtcaaatcttaccgcatggcgttggctaaaatcagcgacgatcagccctga

SEQ ID NO: 424379 - DNA, 453 bp, Serratia marcescens
atgacccctttatcaccattgccctatctccagcccggcgatcgcgcgctgttgttcgacggcgaatgcaatctgtgtcacgggctggtgaggtatcttattcgcgccgatcggcagcggtgcattctgttggcgacggtgcaatccgtcgaagggcaggcgatcctgcaggcgttggggctgccgaccgatcgtttcgattccgtggtctatgttgagcaggggtgctattggctgcgttcggctgcgctgttccaggcgctgcgccaattggggtggccgtaccgcgtgctggcgctggcgcgttacctgccgccgcggctggcggacaaggtctacgacgcggtcgccggcaatcgctaccggctgtttggccgcaacgacggcaccggcctgccgggcgccgatcagcccgggcgctatctgccccggcggcgggaaccgccggcctga

SEQ ID NO: 424380 - DNA, 330 bp, Serratia marcescens
atgaaacaagcaatcaagatcctggcgctgccctgcatgggcatggcgctgttgttcagcgcgagcgcgatatctgcccccgaggcgcctgcggccaaagcggtgccgcccgcggcggatgagccgatgcgcatgccgcctttcccgggcgggcacccgcccaagccggggttctgccacggcggcgaactgttctgcgccacctcggtcagcgacaatccggtggaaaccatcaataaactgacggcggtgatcccggcgggcagcgccaaacattacgaggtgcgcgtcgcggtggtcgccgtgccggacgccccgcctgcgcgttaa

SEQ ID NO: 424381 - DNA, 1176 bp, Serratia marcescens
atgaatgcattcagagataagcttaaggcccatgttcttcatgtggcctctgttggccagcattgcaatactgaggaaacgactaagcaggcattaattttgccgttattagaaaccttaggctttcatccgtatgaccccactaaggtgaaggcagagtatggtgctgattttccaggtgttaaagtgggtgagcgcgttgattacgcccttttttgccatgcggttcccgtcatgttcatcgaggcgaagtctttcaatcaaaatctgtcaaaccatagtccccagctatctcgctattttaatgcgacaccagaggtcacggtttctgcaataactaatggaaaagaatggcgatttttcaccgatctgaaagataagaacatcatggatgattcgccattcctgaaaatagattttaataatctaaacgattctgatattgatcagctttatagatttagacacgaccaatttcagcctgaagcgctgcgaacgttagctgaagaaagtatctatctgacttcatttacaaaaactatcagcgccagccttcgagacgttgattcagattttgttcgttatgtggcaagtcgctctaacgttcagcgtcagctaaaccaacgttttttggacacaataacgccattggttcgtttggctgttgaaaaagcagtgagtgcgatggtcgtttctggtctgtcagtgacgtcggaaagtgttgtaacgtctgagtcaccagatgaaggtgaaacgcaaaacagacccgacccgctcgccccgatcgttgaccccgagaatagtaaaatagtgacgacctttgcagaaaggtgcctgtttgacaatgtggcgatgatcttgggcactgaggcagagctggttgcgaaagataccgaaagctattacagcatcctctttcaagggaagacgacgcgttggattctgcgttatttcgacaataagcaacgcccaaccattttgcttccgcttgagatagacgatgccaggcaggctgagataactcgcgccggcctggagttggcagcaggggggcatatcattatcgaccgcccggaaaatattttgcggctaacggggttgatcgttgattcttaccaatattgtattaatgacgaaaactttaggcagaagagaaaagataagcaggaaagctag

SEQ ID NO: 424382 - DNA, 627 bp, Serratia marcescens
atgactgcaaattacaagcgcctcgacaaggaccaggccgccgtattgctggtggatcatcaggcagggctgctttcgctggtgcgcgatatcgatcccgatcggtttaaaaacaacgtgctggcgctgggtgatttagcgaagtacttcaatctgccgaccattctcaccaccagtttcgaaaacggccccaacggcccgctggtgccggaactgaaagcccaattccccgatgctcccttcattcctcgccctggccaaatcaacgcctgggataatgacgacttcgtcaaggcggtaaaagccaccggccgtaaacagctgatcatcgccggcgtagtgaccgaagtgtgcgtggcattcccggcgctgtcggcgctcaatgaaggctttgaggtctttgtggtgaccgacgcctccggcaccttcaatgagctgacgcgtcagtcggcctggagccgcatggaagccgccggcgcgcagctgatgacctggttcggcgtcgcctgcgaactgcaccgcgactggcgcaacgacatcgaaggcctgggcacgctgttctccaaccatatcccggactaccgcaatctgatgaccagctataacacgctgacgaacggtaagtaa

SEQ ID NO: 424383 - DNA, 882 bp, Serratia marcescens
atgaaaaaaatcctcggtattcacaacagcccggaagcacattgggtcggtaacggtttcctggtgaattcgctgttctcttataacgatttgggggcggaaatgagcccgttcctgctgcttgatcacgcggcgccaaccaaattccgctctgcctccggcacccgcggcgtgggtcagcatccgcatcgcggttttgaaacggtgaccatcgtctatcaaggcgaagtggaacaccgcgactcgaccggcagcggcggggtgattggccccggcgacgtccagtggatgaccgccgcctccggcattctgcacgaagagttccattcgcgggagttctcgcgcaagggcggcaccatggaaatggtgcagctgtgggtcaacctgccggccaaggacaaaatggccgagccgggttaccagacgctgctgaacgccgatattccggtggttccgctggcggacggcgcagggcaggtgcgggtgatcgccggggactttggcggccacgctggcccggcacgcactttcagcccgctcaacgtgtgggatatgaagctgaatgccggccacaccaccacgctgacggtgaaagaaggccatacgctggcgttggtgatgctgcacggtgcgattctggtcaacggcgaagaggtggtgcgcgaaacccaaatggtgcgtttcgaccgggcgggggattcgatcaagattgaagccaacaacgacgtcgcgctgctggtgctgagcggcgaaccgatcgatgagcctatcgtcggctacggcccgttcgtcatgaacagcgacgcggaaatccagcaggcgttccgcgatttcaacagcggcaagttcggcagcatgaacgccgaagcaagcgccggctga

SEQ ID NO: 424384 - DNA, 909 bp, Serratia marcescens
atgctgaccgatctgaacgatctgtttttcttcgccagcgtggtcgatcaccagggattcgcccccgccggccgggcgttgggcattcccaaatccaagctcagccgccgcgtggcgctgctggaagagcggctgggcgtgcgcctgatccagcgctcgacgcggcgtttctcggtgaccgaggtcggccaaaactattacgcgcactgcaaggcgatgctggtggaagcggaagcggcgcagcaggcgatcgaacagacgcgcgccgagccctgcggcacggtgcgcatgtcctgcccggtggcgatcctgcacacccgcgtcggcagcatggtggcggcctttatggccgactatccgaaggtgacggtgcatctggaagcgaccaaccgccgggtggacgtggtgggggaagggttggatctggcgatccgcgtgcggccgccgccgctggaagacagcgatctggtgctgaagatcctggcgcagcgcacctggtgcgtcgccgccagcccggcgctggtgcgtaccctcgggccggcgcacgcaccggaagacctgcgtaaatacccgacgctcgatctcggccccgcgcgcgctcagcaccaatggcggctgaccggcccgcagggtgaacgggtggagtgggaacacacgccgcggctggtcaccgacgacatgctgatgctgcgcaccgccgccatcgccggcgccggcatcgttcagctgccggcgatgatgatgcgcgacgacatgctgcgcggcgaactggtccagctgctgcccggctggcagccgcagggcggcgtggtgcatgcggtttacccgtcgcgccgcgggctgctgccggcggtaaggctgctgctcgattatctgggcgagcagttcaccagcatcgaagaggagtga

SEQ ID NO: 424385 - DNA, 384 bp, Serratia marcescens
atgaaaatagcccatgtagccctgtggacccgcgacatcgacgcgcagctggcgttctggcagcgctatttcaacgctgaggcgggcgaggagtatgtcagccgcaaccggccggggtttgtttcccgcttcgtcagcctggcggccgggccgacgctggagatcatgcgcgtgccgacgctgttgccggcgcagacccaggaagagcgggtgggctgggcgcacatcgcgctgtcgctgggggatgaggggcaggtcgatcggttggcgcagcgcgcgcagcaggagggtatcctgctgtccgcgccgcgctggaccggcgacggcttctacgaggccgtcatccgcgatccggacggcaacgcgattgaaatcaccgcctga

SEQ ID NO: 424386 - DNA, 783 bp, Serratia marcescens
atgtccaaactgctaccgaatgagcgccaccaggccattctcgacacgcttcgccaacaggggcgggtgctggcgctggagatggcgcagcggctgaataccaccgaagccaccatccgccgcgatctgcgccagctggcggcgcagaatctgtgcaaacgcatctatggcggcgcgctggcgccgacgccggccgaggggcccgttgcggcgcgcatggcgctcagcggcgatgagaagctggcgctggcgcagaccgcgctggggttgatcggtgaagagcagctgatcttcctcgacgccggcagcacccacctgtatctggcggatctgttgccgcgcgatcggcgtttgacggtggtgaccaatgcgttgagcatcgccggcaaaatgctggaacggccggggctccgcaccattctgatcggcggcgagctggatgcgcaggtcggcggctgcgtggacgccaaggcggcggaagagatagacggtttccatttcgatctggtgttcaccggcatctgcgcctacgacccggacggcggcttttccgcgctgagctaccaggatgccacgttcaaaaagcggctgctgacgcgcgccggcagcgtggcggtgctgtgtacccgcgacaagctcaatacctacgccccttaccccttcctgcccgccgggcgggtggatcatctggtgacggcgcgcggcgcgcacccgcagctcgagctgcaggtggcgcagggcggtggccaggtttggcacagcgatttaccgaccggagaatga

SEQ ID NO: 424387 - DNA, 618 bp, Serratia marcescens
atgttattgacgatcgcaaggtggctgtttcaactccccgggaagctgttcgggctgattttcaaaaatcgcctgaggatatttttgttcttcatgctggtcgccgttggggtgctcagcgccaagcgctatctgcgcgcccaccaatatgacgacgagttcagcctcgccgcccccgccgattacaaccgcgcaataaagcgcgaaatgccgctgcgcgaggcgcgtgaacagtgcggcgggccgctgcatgacaatgccgggcagccgtggcccgcctcagcgggttatctgcatcagccgacgcggctgcccacggccggtctgcatcggctgacgctggataatcagggcaacgattttgcggtgctggtcaagctggaaacgccgacggcgccgcagcagctggcggaagtctttattccgcccgccggcagcttcgaggtgaaaatcaatgcggacgcggaacacgtgatgaaaatcaagaacatcaagaccggctgcatgttccgctcccggccgttcaacctggataaacagcgcgattggcgcatgccgctgacgctacaaaaggacggcagcctgcagctgcagtcgataggggatcgccaattctga

SEQ ID NO: 424388 - DNA, 222 bp, Serratia marcescens
atgttgcaggggtgttccgtgaaatccaacgatgcgccaccgccgccgcaggtgaaaccgatcggcatggcgaacccggccgacgtgtactgcacccaaatcggcggcaagctgaacgccaaagagaacgcggcgggccagtattccacctgtaccttgccgagtgggcaggaaattgaaagctgggagctgttccgccgcgatcatccggtgaaaaagtaa

SEQ ID NO: 424389 - DNA, 489 bp, Serratia marcescens
atgatcaccaaacatcgtttactgctggctttggcgctgtccgctaccctggccagcggcgccagccaggccgccgggctgatggattccctcagcagcgcggcgggcgaactgagtaagtcgggcggcgacagcagcggcggcatgtcgctctcctcgttgaccggcctgctgaacggtggcgacaaggcgttgagctccagcagcatgaccaatgccgccggcatcctgcagtactgcgtgaaaaacaacgtgctgtcggctaacggcgccgaaggggtgaaagatcagctgctcagcaagctgggcatcaccagcaccgaaaacgccaagagccaggattatcagcagggcctgggcggcttgctgcagaccggcgaaggcaagagcctggatctgaacagcctgggcacctcgcagatcaccgagaaggtgaagcaaaaagcctgcgatctggtgctgaaacagggcaaatcctttatttcatga

SEQ ID NO: 424390 - DNA, 591 bp, Serratia marcescens
atgtttctcaaacggactcttttggcatgttctctggcgttgatatttcctgcactgccttcttacgctgaggttggtacagaaagtggcaataccgcgcaggctgaaaaaccgggtctatggcagcgttttaccgataacgtggcggagacctggaacaactcgcctaaccacgatctctatatcccggccattacctggcacaaccgttggacttatgatgatgaacatatcgataagtacaacgaacgcccgtggggcgccggttacggcatctcccgctacgacagcgacggtgactggcacggcatctacatcatggcgttcaaggactccttcaacaagtgggagccgatcggcggctacgcctacgagaagatctggcgcccgctggatgacaaggatttccgcctggggctgggctttaccgccagcgtcaccgcgcgtgacaactggaaatacattcccatcccggcgccgctgccgctggcttctatcggctatcagcggctgacgttccaggcgacctacattcccggcacctataacaacggcaacgtgttcttcgcctggctgcgctggcagttctaa

SEQ ID NO: 424391 - DNA, 429 bp, Serratia marcescens
atgaaaagctatcggcatattctggtactgattcacgatgagcgcgatgggctgccattgctgcgtcaaacggtggcaatggtgcgcgggttgccgatcgccatcaccgtcggccaccttaatgccgactatgcggagctggagtacggcagcgatgcgctggtcaaagatcgccaggcgcaggaggtgatcgccgccaaggcgatgctgagccggttggtgagcgccgtcgatgcgccggttgcggtcaaggaaatcgtcaccatccggcgctttaaggacgtcaacgatttcatttatcaggccggcatcgatctggtggtggtcgggcaccaaaaccgcctgttcggcctctattcctcatattctctggaatttgtgaaccgtctcgatgtcgatgtgttggtcaagcatcttgcccgcgagtag

SEQ ID NO: 424392 - DNA, 1680 bp, Serratia marcescens
atgaaaataactatcgggtcattcattctgcaacagcttcacgccctgaacgtcgatcgtatttacggcgtgcccggcgactataacctcagcctgctggagctgctggaaagcgacgaccggctggcgtttatcggcaactgcaatgaattgaacgccgcctacgccgccgacggctatgcccgaatgaagggcgccggcgcgctgatcgtcacctacggcgtcggcgatctggccgcgctgtccggcatcgccggagcctatgccgaatcctcgccggtggtctgcatcgccggcacgccgccgctgcacgcgatgaagaatcatcagctattgcaccatactctgggcgacggcaatttcgacaacgtcatgagctgttttaaacaattcaccgttgctcaagccttgattacgccggaaaatgccgcgcaggaaattccgcgcgttatttcccgcgcctggatagagaagaaaccggtgtatttacagctgccttccgatatttgcgacgtcgaaattgaaatcgccgcagccgcagcggcgccgcagttgccggccagcgataaatacaatgtgcaattagcggcgatggcgctgttaaccaaaataaaacgcgcgcagcgcccgatcatgttggtcgaccaaatggtggatcgctatcagctgcagcggttggtgatcgaagtcgctcaccgctttgccattccgctaaccaatatgccgaccgccaaatgcatcattccggaagataccgccggttggatgggcggctacagcggcaatctgtcgcgccccgaactgtatgaacgcatggcgcactcggactgcgtgctgagcttcggcgtgcgtctggtggactccaccaccggctatttctcgcagcaaattcccgccgccgctcaggtggatatccagccgttctcgctgaagctggacaacacctcctacccggcggtggcaacggcggatctgctgcaggcgctgctggatctgagcgaagacgcaccggtacagcccctggcgccgctgcccgatccgcgtgaaaagctggcgacgccgagcgacgcccccatcgaccaggcctatctgtggcaacggatccagcgatttatccgggcggatgacgtggtggtggtggaaaacggcacctcgggcgccgccatcggcggcatgcgcatgccgggcggcgtcaaggtggtcaaccaaccgatctggggctcgatcggctataccctgccggcgctgctcggcaccctgatggcagcccctgagcgccgtcacctgctgttcatcggcgacggctccttccagctcaccgcgcaggaagtgtctaccctgctgcgctgcgagcaaaagccgatcatcttcctgatcaacaacgacggttacaccatcgagcgttatatcctcggcgaaaactcgtcctacaacgacatcggcccgtgggactacgccaaactgccggcggtattgaatacccaggcgcagccgttcagcgtggcggtggaaaccacgcagcagctggaaatggccctggaacacgcctcgcggcaggatcggctggcgtttatcgaggtgaaagtgccgatgatggacacgccgccggtgatgaaagagttctgcaaccgctgcaacagctttaacttcggcctgaccaacccgcgccgcagcgcctga

SEQ ID NO: 424393 - DNA, 1104 bp, Serratia marcescens
atgccgatacctcgtttattccacccgatatccttccgtttgctgagcctggccgcgctgctggcgttggcgggctgtaccagcaaaaccaccaccacggcgccgacggcgcgccccgccgatgtcaaagcccgactgttgacgctgatcccggccaacgctggcgatcgtcagggctgggccaccgatattaccgccgccttcgccgcgcagggcatcgagccgagcgatgagaacctgtgttcggtgctggcggtgaccgaacaggagtcgacgttccgggctaacccgcaggtgccggggctgccgaagatcgcctggaaggagatcgaccgccgcgccgatcagatgcatatcccgaactttttggtgcataccgcgttgaagatctcgtcgtcgaacggccagagctacagcgagcggctggataaggtgcgcaccgagaaggatctgagcgatatcttcgatgacatgatcgaccgcgtgccgatggggcagaagctgttcggccatttaaacccggtacataccggcggcccgatgcaggtgagcatcgccttcgccgaggcgcacgccaaagggtacccttatccggtcgacggctcgattcgccgcgaagttttcagccggcgcggcggtatgtacttcggcattatgcatttgctggggtacccagccgattacagccggccgatttaccgctttgccgacttcaacgccggctggtacgccagccgcaacgcggcgttccaaaatgcggtcagccgggcgagcgccattccgttggcgctggatggcgatcttatcgacttcggcagcgacaagcccggctcgaccgagctggcggtgcgcacgctcggcaagcgcctgaacatgagcgacagcgccattcgccgggcgctcgagaaaggcgagacggccgactttgccgacaccgatctgtataagaaggtctttgcgctggcgggcggcaagctgccgcgcgagatgctgccgggcatccagctggaaagcccgaaaatcacccgcaagctgaccaccgcctggttcgccaagcgggtggacgaacgccgccagcgctgcatggcgcgcgccggcgggtaa

SEQ ID NO: 424394 - DNA, 864 bp, Serratia marcescens
atggagcagcatctgctttgctataaaaccctgccggaatggaacaacgacacgctgccggaagccttccgccagcgccacaacacccagagcggcacctgggcgaagctcaccgtgctaagcggcagcctgacgttcgccatgatgaccgaggacggcgccaccaccgagacctggcagttcagccccgaaagccagccgccgtttatcgcaccgcagcagtggcatcgcatcgtttccttctcggatgacatgacctgccggctggcgttttactgcacgccggaagattactaccacaagaaatacgaactgacgcgcacccactccgaagtgatcgaggcggcggcgcgcatcgcgccgggcaaggcgctggatctgggctgcggcggcggccgcaattcgctctatctcaatctgaaaggtttcgacgtcaccgcctgggacaagcacgcgccgtcgatagaccgcctcaatcagatcatcgacgccgagcagctgacccgcctgagcgccagcgtgcaggatctcaatacccaccgcttcagcggcgaatacgacttcatcctgtccaccgtggtgatgatgtttctcgaacgccagcaaattccgcatatcgtgcaaaacatgcaggacagcaccgtacgcggcggccataacctgatcgtggcggcgatggatagcgaggattatccctgcccgctgccgttcccgtttaccttcagcccgggtgagctgaagcattattatcgcgactgggagatcctcaaatacaacgaggacgtcggccagttgcacaagaccgacgccgccggcaaccgcatctcgctgcgcttcgccaccctgctggcgcgcaagctatag

SEQ ID NO: 424395 - DNA, 714 bp, Serratia marcescens
atgagcggcccgctggcggcgcggctggccgaattggactgggcggcgattgaacgcgaactcgatgcgcagggctgtgcgcggttgccaggcgtgctcagccaaaacctgtgccgcgagctggcggcgctctacccgcacgatgcgcactttcgcagccgcatcgtgatggcgaagcacggttttggccgcggcgagtaccggtatttcgcctatccactgccgcttccggtggccgaggcgcgcagcctgatgtatgcgcggctggcgccggtggccaaccgctggaacgccttgttgggcctggcggcgcgctatcctgccgaacacgaggcctacctggccgaatgccaccgggccggccaacggcggccgacgccgctgctattgcgttacgaaacgggggattacaactgcctgcatcaggatctgtacggcgagcgggtgtttccgctgcaggtggcgtttttactttccgcccccgaacgggatttcaccggcggcgaattcgtgttgaccgaacagcggccgcggatgcagagccggccggaggtggtgccgctacagcagggcgacgcggtggtgttcgccgtgcatcatcgcccggtggcgggggctaaaggctattatcgggtcaatctgcgccacggcgtcagccgggtacgttccggccaacgccacacgctgggggtgatctttcacgacgcgctatag

SEQ ID NO: 424396 - DNA, 1056 bp, Serratia marcescens
atgaaaaacgtaatcgacagcgccgatccgcgctggctggcgatcgtcagccgcgacaaacacgccgacggccgctttatctatgcggtgaaaaccaccggcgtgtattgctcgccttcttgcccgtcacgccagccgaaccggcaaaacgtggagttgttcgacgatgccgagcaggcggaggcggcgggttatcggccctgcaaacgctgccgccaggggctgacgccgttgaccgagcagcatgcgcggcagatagccgaggcctgccgctatatcgaacgggcggagaaagcgccgtcgctgcaggcgctggcgcgccacgtcgggttgagccaataccatttccaccggctgttcaaagcgatcaccggcctgacgccgaaaggctatgccgacgcgcagcgcagccagcgcttgcgcaccggtctgacgcagcaggagacggtgaccgacgcgattttcgacgccggctatggcgccaacggccgcttctaccggcaagccaacgccgcgctgggcatgacgccgaaggcctaccgggcgggcggcaaaggcatgcgcatccatttcgccgtcggtcgctgttcgctgggcgagatcctggcggcgcagagcgaggtgggcatctgcgccattctgctgggggacgatgcgcagcggttggtgcaggatctgcaggacaaatttcccaacgccgagctgatcggcggcgacgcgcagtatgaagcgctgatggctcaggtggtggggctgattgaagcgccggagaacgggctggcgctgccgctggatattcgcggcactgtgtttcaacagcgggtttggcaggcgctgcgggcgataccggtcggcgaaaccgtcagctatgccgatatcgcccggcgcatcggcgcgcccaaagcggtgcgcgcggtggccggcgcctgcgccgccaacgtgctggcggtggcgatcccctgtcatcgtgtggtgcgcaacgacggcgccctgtccggctatcgctggggcgtcgagcgcaagcaagccttgctggaaaaagaggcgcggcgatga

SEQ ID NO: 424397 - DNA, 639 bp, Serratia marcescens
gtgttagagagttttggcgtcctgaatttatggacctatttggccggggtggtcttcattatcattctgccggggccgaatacgctgtacgtactgaaaaccggcgtatcgcgcggcgtgcgcgccggctacaccgcggcgctcggcgtgttcatcggcgatgcaatcctgatcttctgcgcctatatcggcgtggcttcgctgatccgcaccacgccgttcctgtttaccctggtgcgttttctcggcgcgatttacctgctgttcctcggcgcaaaaatcctctacgccaccttcgtgcagaaggcgcaggcgcaacagcagcagattgagggcggccacagcattctgcgcaaatcgctgacgctgagcctgaccaacccgaaagctatcttgttttacgtgtcgttcttcgtgcagttcatcgacttcaactacgcgcacaccgggctgtcgttcaccattttggcgctgatcctcgaagccgtcagctttatctacatgagcacgctgatcttctccggcgcgatgctggcgcatttcttcaatcacaagaaaggcctggcgaagctcggcaacggcctcatcggcctgctgttcctcggcttcgctacccgtctggcgaccctgagctcgtga

SEQ ID NO: 424398 - DNA, 1500 bp, Serratia marcescens
atgtctgacaataccgtagccgtgctggatagcgtgtcgcgttttctcgatcgtcagcatgggctgtatatcgacggccagtggcgcgcgtccgccgcggaaggccgcctggcggtgtataaccccgccaatgggcagcagatctccaccaccgccgacgccaatgaacacgacgtcgcgctggcggtgcagtccgcccacaaagccttcagcgaaggcgtctgggcgcagcgtctgccggtagagcgcgaacgcatcctgctgcgctacgccgatttggtggagcaacacgccgaggagctggcgcagctggaaaccctggaacagggcaagtccatcaacatcgcccgcgccttcgaagtcggcagcaccctgaactggatgcgctacaccgccgggctggcgaccaaaatcaccggccagacgctggacgtctccattccgatgccgccgggcgccaaatatcaggtttatacccgtaaagagccgatcggcgtggtcgccggcatcgtgccctggaacttcccactgatgataggcatgtggaaagtgatgccggcgctggcggcaggctgctccatcgtcatcaagccgtcggaaaccaccccgctcaccctgctgcgcatggccgaactggcgagcgaagccggcgtgccgccgggcgtgtttaacgtggtcaccggccgcggcaccgtgtgcggcaaggcgctgaccgaacatccgctgatcgccaaagtcagctttaccggctccacgccggtgggtaaaagcatcgcacgcgcggcggcggatcgcctgacccgcgtgacgctggagctgggcggcaaaaacccggccatcgtgctgaaagacgccgatccgcagcaggtgatcgaaggcctgatgctcggcagcttcctcaaccaagggcaggtgtgcgccgccagttcgcggatttatatcgaagcgccgatctatgaccaactggtggccggtttcgaacaggcggtgaaatcgctgtcggtcgggccgggcatggataccggcgcgcaaattaacccgctggtgtcgctcgcgcaccgcaacaaggtggcggcctacctggacgacgcccgggcgaaaaacgccgagcttatcggcggcgcggccgggccggatgccaacggcttctacattccgccgacgctggtgatcaacccggatgaccggctgaacctgacgcgcgaggaagtgttcggcccggtggtcaacctgattcgggtggcgagcgccgaagaggcgctgagcaaggccaacgacaccgacttcgggctgaccgccagcctgtggaccaccagcctgcagcaggcgatggcgttgacgccgcgcattcaggccggcaccgtgtgggtcaacacccatacgctgatcgacccgaacatgccgttcggcgggttcaaacagtcgggcagcggccgtgatttcggcccggattggctggacgcttacaccgagtcgaaatcagtctgcatccgctattga

SEQ ID NO: 424399 - DNA, 900 bp, Serratia marcescens
atgacggcattggcaacgctccgggacgtcggcttcgaagagtggctggggaaaatcaacaccgcctgcggcagattctgcgcaaaaacgctggggccgggcttcagcggggcgatgcaggaattccgcgcccatgccctgcgcctgagcgtggtcgacgtgtctcaggcccggctgtaccgcacgccgcgcgagatcgcccgcagcgacggcgcgcacttttttaccgtcttccagctgcgcggcagcgcgttgatggagcagggcgagagccagacggtgctctctcccggcgacatcacgctgatcgacgcctcacggcccagcagctttaccttccagcgcgattcgcgccaaatctccctgctgttgccgcgcggctgcctgccggtgccgccgccttgtgcccagcgtctcggagcagagctcagcgcggtgcgcctcagccgccagctggtgctgagcagcatgcaggatcctcagcttgccgcggcggaaagcgaggcggtgctgaatgcgctggcggcgctgctgcgcccggcgctggcgctcgaacagacgcgcccggaggggcaacagccggttttcgacaaggcgctggcgttgatcgacaggcatattcagtcgccgcagctgcgcccggaatgggtggcggccgagttgggggtgtcgctgcgcagtctgtatcggctgttcgcccgtcaggggctggtggtggcgcagtacatcaggaaccgccggctggatctgtgcgcgcaggcgctgcgcagcgccgccgggcaggagaagctggccggagtcggcctcgactgggggtttgccgatcacagccatttctcgaccgctttcaagcagcgtttcggcatgtcaccgagcgagtaccgtcggcagtatcagtaa

SEQ ID NO: 424400 - DNA, 642 bp, Serratia marcescens
atgttggcaaacgttaagcgttcgttcgccgccgccgtcgtattgatgttggcgttgcccgcggcccaggccgcggattaccgtgtgggcgagcaatacacccggctggataagccggtggccgccgcgccggcggtggtggaatttttctccttctactgcggcccttgctatcagttcgctgaaacctaccgcgtaggcagcaccgtggcgcaggcgctgcccgccggcgaaaaggtcaccaagtatcacgtcagcctgatgggcaaactgggcaatgagctgaccgaagcctgggcggtggcgacggtactgggcgtagaagacaagattgaaggggcgatgttcgacgcggtgcagaaacagcgcgccgtcaatagcgccgaagatattaagcgggtgttcacggcggccggcatcgatgccgcaacctatgaaaacgcgcgccacagcctgctggtcaaagggttgatcgccaagcagaacgaagcggtaaaggcgttcgaggtgcgcggcaccccgtcgttctacgtagccggcaaatacaagatagacaatgccggcatggccagcaccagcgttgaaggctacgccaaagagtacgcggcggtggtgcggcatctgttggatacgcagccttaa

SEQ ID NO: 424401 - DNA, 405 bp, Serratia marcescens
atgaaaagactgaaaagcgcggcgctgttgttgccgctgttggcgctcagcgcctgcactcatcacctcagcagtgccgagcggcatgccaaacactacgtttatcaaacccgcgacgacttcgatccgcaattccgcaccgatgtgaacggcagcattaaaaacgccgtgccgatgttcgaacagttctaccagcaggggaaaaaggatcgcgcggcgggcgtggcgcgcagcgaggcgcagaaaaaggccgactatctggccagcccggaattccagcagaacatggaacacaaaaccattttcatcaatcgcgcctacagcggctctgacaatcctaagcgtcgccaggtgctgtcgcaggaagcggtgggcgcctattgggatggttacgaagggcgctga

SEQ ID NO: 424402 - DNA, 249 bp, Serratia marcescens
atgaaaccgatcgacaaaaacgtgggggagtacgacctcacggcggaaaaaaaagcgggcatgatcaccggcactatccgcggcgaactgccggacagcgacgccaacctgccgctgctgcccttctccggcacctttgccggcccgagcgtggccgaagccatcgccgatattcagcagcagttccccgacatcgaaccggcgattatcgacgacttgcgcgaggaactgctgaaggccggtttctaa

SEQ ID NO: 424403 - DNA, 768 bp, Serratia marcescens
atgaacgtgctgattgtgctggctcaccccgagccgcattctttcaatgcccatttggccgaacaggcgcggcaggcttatctggcgcaagggcatcaggtgaagacggtcgatctgtatcaggaggagtttgatccgcgcgagggtgccggtcattaccccagcagaaagcaggcggacaggttcgatgcgatgcaggagcagcgccatcactggacgactcaggcgctgccggcggagatccggcggcatatcgagctgctgcgctgggcggacacgctggtgctgcagttccctttctggtggttcggcgcgccggccatcctcaagggctggatggatcgggtgttcgtttacggcgggatctacgacagtcgccaccgccatgaaaacggcgtgatgcgcggcaaacgggcgctgctgaccgtcaccgccggcgcctctgctcaggcctgcgcaccgaacgggcgcgacggcgatatgcggctgatgctgtggccgatcatgcatgcgctgcactatatcggctttagcgtgctggagccgttcctggtttatggcgtgcgcggcgggttgacgggcgaggcgctgcaggcgcagaacgccgctttggcgcaggtgacgcaggcgtatcgggctggcttaagcgatcttgccgcctggccggcgatgcggttcaaccgcaatgacgattttgacgccgatctggcgctgaaggccggtgcgccggtctatagcccgttcgtgcgccaccgcgatccggtttag

SEQ ID NO: 424404 - DNA, 381 bp, Serratia marcescens
atggcctgtcccggcaacgtctattcgagtaaatgctccgcgcgcgatgcgctggcgctgatttccggcaagtgggtgatgctgatcctgcccgtgctggcacagcggccgatgcgcaacggcgagctgctgcgccgcatcgacggcatttcgcagaaggtgctgacgcaaacgctgcgccagttggaacgcaacgggctgctcgaacggctggatttaagtgaaaagaatcaggcacatgtggaataccggctcagcgccgtcgcctgctcgctggtcgagacgctgacggcgctcgaccgatgggcggaataccatttccccgagctggacgccgcccgcgagcgctatgatgcagaccgcaagcgcgcggccgattaa

SEQ ID NO: 424405 - DNA, 1602 bp, Serratia marcescens
ttgacgtttttaaaacaccctatcgccgcgctggcgctggcaagtgccggcctgctgtcggcgggcggcgcgctggccgcttccgatgcgctggtgtactgcactgtcgcctcgccggaatcgttcaacccgcagctctccagctccgggccgacctttatcgccacctcgcaggtgctgtacaaccgcttggtgacgctgcgcgaaagcgataaaacccccgccccttcgctggccaccgagtggagcgtcagcccggacggcaagacctacacctttaccctgcgccagggcgtgaaattcaacagcaacaaatacttcaccccaacgcgcgacttcaacgccgaagacgtggtgttcaccgtgatgaggcagaaggatccggctaacccgtatcacaaggtctccggcggcaactatgaatacttcaccgacatgggcctggacaagctgatcgccaaggtggaggcggtggacgagcatcacgtgcgcttcacgctgagccagcccaacgccgccttcgtcgccgactgggcgatggatttcgcctcgatcctgtccgccgaatacgccgacgcaatgctgaaaaagggcacgccggaatacgtcgacaactggccgatcggcaccgggccgttcgcgctgcagcagtacaaacaggattcgctgatccgctacatcgccaacccgcactactggcagggcgaagtggccagtaagcacctgatcttctccatcacgccggatccgcaaacccggctggccaagctgaaaaccaacgaatgccagatcatccccgcgccgctgccggaacagttcgccgccatcaaggccgacggcaacctgcagctgcacgacatcaccgggctgaacgtcggctatctggcgttcaacacccagaaaaaaccgttcgacaacctgctggtgcgccaggcgctgagctatgcggtggacaagaaagcgatcgtcgccgcggtgttcaaagacagcggcacgccggccaactcgctgctgccgccgggcatgctgggctacaacgatcaactgccggaatacgcctacgatccgcagaaggcgcgcgagctgctgaagcaggccgggctggagcagggctttgagaccgatatctggtcgatgccggtacagcgcccctacaatccgaactcgaagcgcatcgccgagatgatccagagcgactgggcgaagatgggcgtgaaggccaagatcgtcacctgggagtggggccagtatctggcagggctgcgcaaaggcgaacagcagagcgcgctgtacggttgggtgtcggacaacggcgatccggacaacttcgccaccctgctcggctgcgccggggtgcagagcggcgccaacgtggcgcgctggtgcgataaggattatgaccggctgatccagcaggcgattctggagaaccagccacaggctcgcgccaagctgtatcaacaggcacaggtgatcttcgccaaacaggcgccgtggctgccgctggccaccggcaaagtgttctacgccacccgcagcaaccttagcggctatgtggtggacgtgaacggcagcgacttcgccaaggccaaattgaactga

SEQ ID NO: 424406 - DNA, 525 bp, Serratia marcescens
atgccgtggcaaattcgcctgcactggctggtggcgatcctgctggtcatcacctgtgtcaccatcgagctgcgcggctttgccgaaccgggcagcgccccctggtacgtgctggttgtcacccacttcagctgcggcgtaacggtgttcgcgctgatgatcgcccgcctgttcctgcgctggcgccacccttcgcccgccatcgcgcccaaaccgcctaagtggcaaaccggcctggcgcacctgacgcacaccctgatttacctgctgctgttgacgctgccggtgctgggggtgtattcgcgctatctgggcggcaaggagtggtatctgttcggcctgtcgatgccgttcgccgacgtggccgatcggccgcaggcgcggatgattatcggctggcacaaaacgctggcgtcattcggctactggctgatcggcctgcatgccgccgccgcgctgtttcaccactacatcgtcaaggacaatgcgctggtgcgcatgctgccgttgatgaaaaagcgctga

SEQ ID NO: 424407 - DNA, 1287 bp, Serratia marcescens
atgcaaacccaattttttaatgtgaccgtcgaacaatgtgcctgccaacagacggcgcccgacaacctggtgaggatcatcgccgccggccaaacgttctttttttaccgtgacgacttcagcgacagcgaaaatctgctggccacgctcgccgccggcgatcgggtgaagattggcgcccatcgcctgcaggacggcagctactggctgcactggctgctgcacgagacaaaaggccggctggagcccgacagaacgctgaaatacaagctgaaatacttcgccctgctggtgctgggcgcggcgctggccggcggttttccggcagcctttttcatcatggacggggaagattcctggttgaccatcgttctgttctttatcgccgtaatcgccggccttgtcggcatcggcatggtgctgttcgtcggttcggagctgctgctgatcgggcatcgcggccgcaggcgcctgctcaaggcgctggatcgcgtgctgcaggggcaagacgtcacgccgcccggatcgctcagcctgaaaatccccggcatcaaataccgggccgtcagtgcagacgccgcgtcagtgcccgcagcgcagcaaaccgacgtccccctccccgacggcgtcgaggcctccggcatcgagacggtcaacgccctgagctacgaactcctccactatgagatcccgcgccaggtgcagtatttggacacctatgcgtggcgccagaaggagacgcacttcgcgttgacgacccgcgcgctcaacgtccccaataccaaactgcatccggtatttcgtcggcaacatccgcttttcatcgccaaaggcgatccgctgcaggtgctgtattgcgagaacgacaccgtccccgagttgcctacggtgcgtgggatcatcaaccaccgcgatcgccagacttacctcatcggcggccgccgctacttcaccgaatccggccttaacctgtgcgcgcgcgttgtcttcattctcggcgcgatcgtgacgtgctttgtgctcggcctggcggtggcggataacgccgataccccggcgggcttttacctggatgcctggaccctgaagcgccttggtagcgaattgccgccgattctgctgctgatgatgctgatgatcagcggcctggcgctgctgatcgagggcttcgcccagatctgccgcctttactcttttgaccagcaccgcacgtttaaaacgtttaaatacctgcgcaatctgcgccgcaggctatggcggcaggatcaggtgacggagctgaaatga

SEQ ID NO: 424408 - DNA, 1176 bp, Serratia marcescens
atgatgacgttagcgctttataaaagaccccttattatcctgacgctgtttttggccagcgcgctgggcgtctatttcctcgcccctgaacaacgctatgcgcagtggcaatggacccagagcgacgaggccttgccgacgatagcccgttacgatctcatccacagctacccggcgcaggacggcgctctgctgctcatcagcaaaaggagtgagcgcggggcctacaatagcttttacggctgggcggccaactatctcagccaggtgttgttcagcggcccgcagggattgcagatgctgggggaactcgacgagtctatccacgatgcggtttgcggcgggcaagagtgcgtgctttttctgtccaaggggcgccggctggtcgatgtgaaacagggcaccatcggggcgctgatcccctggccggagggcgacgacaaccggccttcctttatcggcggcaaactggtggcgctgccgggtaaacgcgcgctgtatctcatcagcaccgaaggcgtattctacagcccggactttggcgcccattggcggcaaacgctcgatctgccggcgctgttggaagcgcgtcagctgctgggttttgagcgcggcgaggaggactcaccgacggcttacgcctccggcaagcgcaaatccatacccgagatctttaccgccgttgacggcgatcgcgtgctgttctggatgaatccggtgctcggctccggcgccttgcacatcgccgttaacggcaaaaccggcgaggtggccgaaccgcattggctcacggtgcgcgtgacggaaagcgcgcaggccccggatggcggcatctacctgatcgcacagacgctggaaagagggctgtatcagctcctgcgttatcaatccgacgggcagttgaaggtactgctggagaccggcgataaatcgctgtatcagctgtgggcaggcaacgacaagctagtcacccaaacggataacggcgatgcgcgcctttcgctgattttcgatctgcgctcatccgacgtgcgctaccgccagccgttggagtatcgctacaacgggcgcgacgacgcacgccaaaccgtgatcgaaccggaaagccactatggcgatgacggggagcccccggcgctgccctacttcgttcgctaccgttccaccacgccgtga

SEQ ID NO: 424409 - DNA, 705 bp, Serratia marcescens
atgctgttaggttatggcgccggcgttgcagggctggtggcgctgttgttggcgctgctgctcgccggcatcctgctcgcctggtggggctggcgctacgcttctgcccgctgcggccgcccacgcccgccgctttcctggggcggctatctgctggcctcggcgctggcgatctacccggtggcgttcgtgctgatgcttatcgacatcgccatccaggatctcaagagccagcgggcggaagaacgctggaatcggcgcagctacctgacgctcgacgaagccaaaccgttcggtgaaatcacgctgacgaaaggcagctgggtaaaccggcaggaaccgcgcctgcccggcaccgaagacagccccatcacgatggatggcgtgaccgccgtgcgttttcctcggccgcagagcgtggccggcgtgccgatcattgccttcgaggttttaccgccggtaatggagctggcgagcacacacaccttctcccgcccgagcggccaaagggtgcgctgcgaagcgggttggctggtctctttctctttaccgccggataagccggccccgcagtgggaagagtggcaggccgggctgcctgcggcggcgtttcggcccagcgactggatctttagggagtgcttccccggcagcccgatcgccgtgctgaccttgcacaacggcgaagtcagggtgctgccttaa

SEQ ID NO: 424410 - DNA, 1098 bp, Serratia marcescens
atggccgcctgggcctttttgatcgtcggttggctgttgatttggcgggattacccgattttcggcgcgttgtgcatcacgctgttcgccgtgctgcaatgggccaaatacgccgcaaaaggcgtgcaaaaccccgaagaggccgcagagtggcgcaagaccgactggcgttcgcagccgattgaaatggcgcacgccggcgacagcgaccggcagattggcggcgtgggggagctgggcatgggcggccccaatttttggacgctgctgctgcgcgacggagcgattgtgcatggcgcctgtgcggcgccgcaggacgtggacggcggcaggttgcgcctgatcccgacccgcagccgcgagggtgaggggctgacggtgtacgaacctgccgcccgggcgatgtacgcgctgcctgcgctgaccgatcgcgagctggaagcagtggccggcggttccgccgaggcgctggcgcggctgcgggcgagctgtcggcaggcggtggccacgccgctgcgtcaggtgcgcggtctgtgggtgccacagtgggcagaggatccggcggatcgtctggagatcgccttacccagtggccgcgcgctggcagcgcgctcgacgttaccggcggatttgcgccatgcggacgatcctgccgcgctgctgcacgcgccgccttatgagctgttgctggataaccggccgaccgatcgcttggtgtgcgatctcgaacgcgtggcggaatcgccgacgggcgacggcttgagcgtcggcggctgccagttccgcggtgagcatatcgtcgatggtctgtaccatctgtacttcgccggcgagtggttcagcctgctctcctacgcgcacaaaccggcgggcgggcgcggttcggacaccaccttttttgtcgagcgggtcgagccgcaagacggcggcgtattcgtgattgaatgggatgcctacagcgtggggcctgacgggcgtgcgccgcgcgtagcggcgccgccggtcttggttatcgcagtaagctggcaggaaacgccgctgcagctgcccacggccaataaccgcgtgaccgtgcgcttgcccaacgccacggcgtaa

SEQ ID NO: 424411 - DNA, 528 bp, Serratia marcescens
atgaaaatcgttacaggcattatccttacctctgtggccgccttcagcggcgcggcttacgcggccgatgcgcagcctaccaccggcaacgcggatgtgacgctggaacacgtgcacgccgtgatggaaaacggcagcccggcgccgcagcacgacgcagcctgcaaaaaagaactttccatgccggaatcgaaatatatgggcatgaaggttaaaaccgattacaccatcaacagcagcaccatgatgatgtcggctaaatcgatgttcccatcgccaaacgacaaacagccgatggaactgacggtcgatctctccgcgctgggcctggcggatgtgtatgccttcggcgcctttaaaccggccgcgctgccgcaggcctatatttatttcactatcgacaaggattttaaaaatccggtcagcacctttatggtcattaaccaaggcaagcaatataactgcgtaatttccagctcgaataaaatgatgagtgaagaaatgcgcggcaagatgaagaaacagtaa

SEQ ID NO: 424412 - DNA, 219 bp, Serratia marcescens
atgagcagaaaagacaagctcgcggcggccctgctggccatcttcctgggtgggctgggcattcacaagttttacttagggatgaagtggtgggggctgttctacctgctgttctgctggacggggatcccggcgattgtcggctttatcgaaggcattatttatctgttccaatcggaagagaaattcaatcagaaatataatcctggtctgatttaa

SEQ ID NO: 424413 - DNA, 885 bp, Serratia marcescens
atggcaaaaagggagaactacaacgagctttacctgtttatgcaggtggtacgggaaggcagttttaccgctgcggctcacaggcttggcctggctcaatcggggataagccgttctgttcgcgagcttgaagaaaggttaggtgtccagctactggtgcgtaccacgcgtaagctatcgctgacgcaagcgggtgagcagctctatcagaaaacggagtccggatttgataccttagatcttgggcttgcgacactggcgcattatcgtgagaccccttccggcacggtccgcatcaatgccagccagcacgcgattgataaatgcctgctgccaaagcttgcggtatttaaacagcgctatcctgatatcaggctcgaactcatgaacgagagccggttcgtcgatattatcgaggaaagattcgatgcaggcgtccgtcttgggcctgaagtaggccagggcatggtcgcggtgcgcattacgcccgatatggagatggcgattgtggggactcctgaacattttcgtcgttacggttttccacaaaatcctgcggatttaaagacacatccctgtatcgcctatcagcttgccgacggcagcctataccagtgggaactccatcaggatgataaaaaaatcactcatcggccggaagggcaatgggccttatctgacagctatatggaggcagaagccgcgcggctgggcctggggctggcctatgttcctgtcgagttggttgccgatgatttagagcgtggggtgctaatcagggtgttacagcgttacagcctgcgaatggaagggttatttctttattatccccatcgcaatgtgtcccccgccctaagaatggtcattgagacattgaaaatttga

SEQ ID NO: 424414 - DNA, 1059 bp, Serratia marcescens
atgagttatgctgattcagtcaatccgaatgctcctgtttcgatgatcgataaatgggacaagacgtttgccgagagccagaaagtcgatcatcgtaaggtctcgtttcagaatcgatatgggatcaccttagtgggcgacctttatctccccaaagatcgtggcgatcgcaagctggcggcgattgccgtcagcgggccttttggcgcggtgaaggagcaatccagcggcctgtatgcgcaaacgctggcggaacagggatttgttaccctggcgttcgacccttcttatacgggggaaagcggcggctatccgcgtaacgtcgcctcgccggatatcaacacggaagatttcagcgcggcggtagatttcttggggctgcaaaaagaggtggatcgcaaccgtattgggctgctcggcatttgcggctggggcggcatggcgttaaacgacgccgcgatggatacccgcgtcaaagcggtggccaccagcgtgatgtacgacatgagccgggcgatgggccatggcgtaggtgatggcaaagaccgttattcgaccgccgaccgtcgtgccgttctgcagtatctgaatgaacaacgctggaaggatgcggaaagcggaacgttcgcacgaggtggccatgatattaacgtcgacagcaatggcaaggtcagcgcgggtgagcgcattctgccagaaaccctgccggccgatccgcatccggtgctgaaggagttctttgattactaccgcatgccgcgcggtttccacgaacgctccgttaactcgaccggggcgtggacggcaacgatgccgctgtcgtttatgaatatgccgctgctgagctacgccagcgaaattactatcccgacgcttatcgtgaccggtgaaaaagcccattcacgctattttgccgaagatgcttataaggcggtcggcagtaaagaaaaagagctggtgattgtccccggtgcaaatcatgtggacctgtacgacaatgcggccggtaaaatacctttcgctaagttcgaacaatttttcaaagccaatctgaaatag

SEQ ID NO: 424415 - DNA, 1128 bp, Serratia marcescens
atgaccctgtgcgtctttgtgctgattgcatcggaatttatgcccgtcagcctgcttacgccgattgcccgtgatttagacgtgacggaggggctggcgggacagggaattgccatctccggcgcgctggccgttctgaccagcctgacgctttcgacgttggctggaaatgtgaatcgcaagtacttactgctggggatgacgattctgatggccgtgtcggggctcgttatcgcactggcttccaactatctgatgtatatggcaggccgcgcgatgataggtattgcgatcggtggattctggtcgatgtctgcggcaacggcaattcgtctggtgccacagcatcaggttacgcgtgcgctggctattttcaacgccggcaatgcgctggcgacggtagtggcagcgccgctgggtagctatcttggagcgaccatcggatggcgaggcgctttcttgtgcttggtccccgtcgcggccgcggcctttatctggcagtgcgtgagtctgccgggtatgaatggcaataataaccctgcgtcacgcggatccgtattgcgcctgctcagtcgccctgttgtctccattggcatgctggcttgtggcctgttctttatggggcagtttgcgttatttacctatgtgcgtccgtttctggagttggtgacgcgggttgatttctctggcttgtcgctaattttactggttatcggtgtggccggttttattggcacgctggttgtcccggcattcctcaataggaaattctatctaacgctgatggccattcctgggctgatggctgtcattgccatcgccctgattcttgccgggcatcacgtttgggctgtctcgttgctgttaggcctctggggcatgctggcaaccgccgcgccaacgggatggtggacatggattacacgcacgctgcccgaggatgcggaagccggaggcggcctgatggttgcggtgattcagctctcgattgcccttggttcaacggcaggtggcatgatgtttgacagcctgggatggcgaagtacttttggcttgagtggcttattacttcttggtgcggtagcgatggcgtttcttacgtcccgtcaaaatagcaatacgtactag

SEQ ID NO: 424416 - DNA, 1254 bp, Serratia marcescens
atgctggagcagatggggaaggccgccaagcaggcctcctggcagctggcggtgctgagcacggcgaagaagaatcaggtgctgtcggtgatggccgacaggctggaggccaacagcgaagcgatcctgttggcgaacgaacaagacatggcgcaggcgcgcgccaccggcatgagcgaagcgctgctcgatcgcctgctgctgaccccggcgcggctggcggcgatcgccaacgacgtgcgccaggtgtgccgcctgaacgatccggtcggccacgtgctggacggcaacctgctggacagcgggctgaagctggagcgccgccgggtgccgctcggcgtgatcggcgtgatttacgaggcgcggcccaacgtcaccatcgacgtcgccagcctgtgcctgaaaaccggcaacgcggtgatcctgcgcggcggtaaagagacgcataacaccaaccaggcgacggtgaaagtgatccagcaggcgctggaacagtgcggcctgccggcggcggcggtacaggcgatcgacagcccggatcgcgcgctggtgaacgagctgctacgcctggatcgctatgtcgacatgctgatcccgcgcggcggcgccggcctgcacaagctgtgccgcgagcaatcgaccatcccggtgatcaccggcggcatcggcgtgtgccacacctacgtggatgccgacgtcgatttcgacaaggcgctaacggtcattgaaaacgccaagatccagcgcccgagcgcctgtaactcgctggaaacgctgctggtgaaccgcagcatcgccgccgagttcctgccggcgctgagcgccaaaatggcggcggcgggcgtgacgctgcacgcggcggaaaacgcgctgccgctgctgcagggcggcccggcgacggtggtgccggtgaacgcggaggattacgacgacgaatggctgtcgctggatctgaacgtgttgctggtggacgatatcgatcaggccatcgaccacatccgcacccacggcaccaatcactccgacgcgatcctcacccgctcgctgagcagcgccgagcacttcgtgcgcgcggtggactcttcggcggtgtacgtcaacgccagcacccgcttcaccgacggcggccagttcggcctgggcgcggaagtggcggtgagcacccagaaactgcacgcccgcggcccgatgggcctggacgcgctgaccacctacaagtggattggctacggcgacgatctggtgcgcagctaa

SEQ ID NO: 424417 - DNA, 1104 bp, Serratia marcescens
atgaacggcagccagacattggttgtgaaattgggcaccagcgtgttgaccggcggatcgctgcgtctgaaccgcgcccacatcgtcgaattggtgcgccagtgcgcgcagcaacacgccgcgggccaccgcatcgtcatcgtcacctccggcgccatcgccgccgggcgcgaacacctgggctaccccgagctgcccgccactatcgcttccaagcagctgctggcggcggtggggcagagccggctgatccagctgtgggaacagctgttctccatttacggcatccacgtcgggcagatgctgctgacgcgcgccgatctggaagaccgcgagcgcttcctcaacgcgcgcgacaccatgacggcgctgctggacaaccgcatcgtgccggtaatcaatgagaacgacgccgtcgccaccgccgaaatcaaggtgggcgacaacgataacctgtcggcgctggcggccattctggccggggccgacaaactgctgctgctgaccgatcagcagggcctctacaccgccgatccgcgcaacaacccgcaggccgaactgatccgtgaagtgcacggcatcgatgacgcgctgcgcgccatcgccggcgacagcgtctccggcctgggcaccggcggcatgggcaccaagctgcaggcggccgacgtggcctgccgcgccggcatcgacgtggtgatcgccgcgggcagcaaaccgggcgtggtggcggacgtgatcgaaggcaaaccggtgggcacccgtttccacgcgttggaaaccccgctggaaaaccgcaaacgctggatcttcggcgcgccgccggccggcgagatcaccgtcgacgatggcgcggtggaagcgatgatggcacgcggcagctcgctgctgccgaagggcattcgcgatgtgaagggcgacttctcgcgcggcgaagtgatccgcatccgcaacctggcggggcgcgatctggcgcacggcgtcagccgctacaacagcgacgcgatgcgcatgatcgccgggcaccactcgcaggaaatcagcgaaatcctcggttatgaatacggtccggtggcagtgcaccgcgacgatatgattgtcagttaa

SEQ ID NO: 424418 - DNA, 402 bp, Serratia marcescens
atgacgttaccgagtggtcaccctaaaagccgactaatgaaacgttttgccagcttggggccgtacctgcgtgaagggcaatgtgaaaacgaccgttttttctttgattgtttggccgtctgcgtcaatgtaaagcccgctccggagaagcgcgagttctggggctggtggatggagctgcaggcggaagaggcgcgcttcacctattcgtaccaattcggcctgttcgacaaagaaggcgactggacggcgcaaaacattaaggatgatgaagtgaacgccaagctggaagacaccctgcgcgacttccatcgccgcttgggcgagctgctggcgaccatggaactggggctggaacccgccgacgatttcaaagaaaaactgatcaaactctccgcctga

SEQ ID NO: 424419 - DNA, 1248 bp, Serratia marcescens
atggcacaggccaacctttctgaaattcttttcaagcccaaattcaaacaccctgaaacctcgacgctggtgctgcgcgcgcgcaacaatgtgagcgccgccatgcattccgcattggaaggtgacaccaccggcagctggtaccgcatgctgaatccgctgctgtgggcctggcgtggcgtcagcccgatcgaaatccacgaagtgctggcgcgcatcgccgcctcggacgccgaacgcagcaatccgcagcggctggataccgtggtgggctaccgcaacggcaactggatctacgagtggatccatcagggcatgcagtggcagcagcgggcgacggagcagcaggatccgctgctcggcggccaatactggctgaaggccgcgagcctgtacagtatcgccggttacccgcacctgaagggcgacgagctggccgaacaggcggagatgctcgccaaccgcgcgtacgaagaggcggcgctgctgctgccgtatcagttgaaagagctggagttccgcatcgaaggcggcgccagcgtcaccggcttcctgcacatgccggagaagggcgaagcgccgttcccgacggtgctgatgtgcggcagcctcgatacgctgcagaccgactatcatcgcctgttccgcgactacctggcgccgcacggcatcgccatgctgacgctcgacatgccgtcgatcggctcctcctgcaaatggaagctgacgcaggattccagctacctgcaccagcaggtgctgatccagctggcctcggtgccgtgggtggatcatcagcgggtgagcgccttcggcttccgcttcggcgccaacgtggcggtgcggctggcctacctggagccgcagcggctgcgcggcgtagcctgcctggggccggtagtgcatcgcctgctgtgcgacagcagcacccagctgaacgtaccggacatgtatatggacgtgctggccagtcgcatgggcatggccaacgcctccgacaacgtgctgaaggtggagctgaacagctactcgctgaaaatgcaggggctgctggggcgccgttgcccgacgccgatgatctccggctactgggagcgcgatacgctcagcccgaaagaggagtcgcagctgatcgtcacctcctcggtgagcggcaagctggtcgccatcccgcgcaccccggtttacgacagtttccaccgggcgttgctgcaaatgtccggctggctgaaggacaaaatgcgttaa

SEQ ID NO: 424420 - DNA, 459 bp, Serratia marcescens
atgagcgaaaaatacgttgttacctgggatatgctgcaaatgcacgcacgcaagctggcgcaccgcctgctgcctgccgacaaatggacgggcatcattgccgtaagccgcggcggcctggtgccggcggctctgctggcgcgcgaactgggcatccgccatgtggataccgtctgcatttccagctacgaccatgacaaccaacgcgaaatgaaagtgctcaagcgcgccgaaggcgacggtgaaggcttcatcgtggtggatgatttggtggataccggcggcaccgcgaaagcgatccgcgatatgtacccgaaagcgcatttcgtcaccatcttcgccaaaccggcgggccgtccgctggtggacgactacgtggtcgacatcccgcaggacacctggatcgaacagccgtgggatatgggcgtcagcttcgttccaccgatcggcggccgctaa

SEQ ID NO: 424421 - DNA, 1461 bp, Serratia marcescens
gtgtctgaattgtctcagctttcgccacagccgctgtgggatattttcgccaagatctgttctatcccccacccttcttatcatgaagaagcgctggcgcagcacatcctcacctgggccaaagaaaagaacctgcacgccgagcgcgatcgggtcggcaatatcctgctgcgcaagccggccaccaaaggcatggaaaaccgcaaaccggtcgcgctgcaggcgcacctggacatggtgccgcaaaagaataacgacaccgtgcacgatttcgccaaggatccgatccagccttatatcgccggcgagtgggtgaaagcgcgcggcaccacgctgggcgccgacaacggcatcggcatggcctctgccctggcggtgctggccgacgacagcgttgagcacggcccgctggaagtgctgctgaccatgaccgaagaggccggcatggacggcgccttcgggctgcagccgaactggctgcaggcggatatcctgatcaataccgactccgaagaagaaggcgaaatctacatgggttgcgccggcggtatcgacttcatcactaccctgccgctgcagcgcgaagcggtgccggccggttatcaaaccctgaagctgaccctcaagggcctgaaaggcggccactccggcgccgagatccacgtcggtctgggcaacgccaacaagctgctggcgcgcttcctgttcgcccatgcggcggcgctgaacctgcgcgtgctggatctgaacggcggcaccctgcgcaacgccatcccgcgtgaagcctctgcggtggttgcggtgccggcggacaaggccgacgcgctgaaagcgctgagccaggagttcctggccgtgctgcagaacgaactctccgccaaagagaagaacatcaccgtgctgctggagccgaccaccagcgcttcgcaggcgctgagcgccgacagccagcagcgcttcctggcgctgctgaacggtacgccgaacggcgtgatccgcatgagcgacgcagtaaaaggcgtggtggaaacctcgctgaacgtcggcgtggtcaccaccagcgaaaacgaagcggaaatcatctgcctgatccgttcccttatcgacagcggcaaagactacgtggtcgagatgctgaccgcgctgggccagctggccggcgccaaggtggcgccgaagggcggctacccgggctggcagccggacgccgactcgccggtgatgcacctggtgcgcgagctgtatcaggagctgttcgacaagacgccgaacatcatggtgatccacgccggcctggaatgcggtctgttcaaaaagccttatccagacatggacatggtctcgatcgggccaaccatcaccggcccgcactcgccggatgagcaagtgcatatcgaaagcgtcggtctgtactggaagctgctgacctcgctgctgaaagcgatccctgagcgcgcataa

SEQ ID NO: 424422 - DNA, 1062 bp, Serratia marcescens
atgcgtaaaatcattcatgtcgatatggactgtttcttcgcggcggtggaaatgcgcgacgatcccagcctgcgcgatatcccgctggcgattggcggcagcgccgatcggcgcggggtgatcagcaccgccaactacccggcgcggcgctacggcgtacacagcgccatgtccacggcgatggcgctcaagctgtgtccgcatctcaccctgttgccggggcgcatggcagcctacaaagaggcctcgctgcacatccgcgaaatcttcgcccgctataccccgctgatcgagccgctgtcgctcgatgaagcctatctcgacgtgacagacagcccgcaatgcaacggctccgcgacgctgatcgcccaggagatccgccaggcgatcgccgacgaacttaacctcaccgcgtcggccggcgtcgcgccgatcaagtttctcgccaaaatcgcctctgagatgaacaagccgaacgggcaatacgtgatcacgccagcgcaggtgccggcgtttttgcagcagctgccgctcagcaagatccccggcgtcggcaaggtgaccgccaagcggctggaagaggtggggcttatcacctgtgccgacgtgcagcaatacgatttggcgcagctcctcaagcgcttcggcaagttcggccgggtgctgtgggagcgctgccagggcatcgatcggcgcgaaatctcggcggagcgcctgcgcaaatcggtaggggtggagcgcacgctggcggaagacattcacgactgggaagactgcgaaacgctgattatcgacaaactctatcccgagctggagatgcggctgcgcaaggtgaaaccggatctgcacatcgcccggcagggcgtgaagctgaagtttcaggattttcagcaaaccacccaggagcacgtgttcccggtgctgaaccagcaggatttgctggaggtggcgcggcaggcgtggcgcgagcggcgcgaagggcgcggcgtgcggctggtggggctgcacgtgacgctgctcgatccgcagttggagcggcagctggcgctgccttgggaataa

SEQ ID NO: 424423 - DNA, 897 bp, Serratia marcescens
atgatcagattttctcatttgctgctggcttccgcgctgtcgctgagcgcgctggcggccagcgccgccgccggtcacgcgccggcgatcgtcgcccaccgcggcggcaccgccgatgcgccggaaaacacccgcatcgccatcgaaaccgcgttgaaaaacggcgccgacgccatctggatcaccctgcaagaatccaaagacggcgtcatcgtgctgtatcgcccttcggatctgaaaacgttgaccaaccgacagggcccggtctctgcctataccgccgcgcagctggccgagatcgacgccggctgggctttcgccaagggggatgcgcacccgttccgcggccagggcatcggcattccgcggctggacgacgtgcttaaagcgtttccgcacatcaccttctatctggacatcaaatccccggacgccgatccggcgcagtttggcaaggcgctgctggcgacgctggaaagcaccgacagcctgaaccgcatccgcgtctactctaccgacgccaaatacctgcaggcgctgccgccggccatcccacgcttcgaaagccgcgacgagacccgcacgctgctggccaacgtcaccatggcgcaccagtgcgatgtcaaaccggacaaccgccagccgcgctggtacgggctggagctgaagcgcgaggtggaagtggtggagaaatataccctcggcgaagggcgttcgaaggcgtttctgacctgggataaagagtcgatggactgtttccgctcgcagggcccggcgcacatcatcctgttcggcgtcaactcgccgcaggattatcagcaggcgctggcgctgggcgccgacggcgtgatggtcaactcaccggccgaggcgaaaagcttccgcaaggcgaaataa

SEQ ID NO: 424424 - DNA, 420 bp, Serratia marcescens
atgaaccgcattattttggctggaatgctgactttgctgctcgccggctgtatgcacatgaacgatccgaggccaaagaactacgcggccagcgtcactgtggttgataaccacgtttgcgtgcgggttcaaccggaaggggacgagcggttggccggcgtcattatcgaagaaatcggcaacgccaacgctatcttcggcaagaacttcgcggataacgagatgcctgcggtcaccgcggctacgtgtattcccgacgataactataaattcgaagacgggaagtcttacggggtatcggtgacgctgttgtcgcgggataaacgaagtaaaggtattgagcctgctgcccggctatttggggcagggtttagtgtacgcaatgaaaatggcatcatccaggtggttcctgctcactaa

SEQ ID NO: 424425 - DNA, 534 bp, Serratia marcescens
atgggacaacaacaagaaaggataaaacgggcgttaacggtgggtgaaattaatttggcccgttcggtgtttggccgttcagttttctatgagaaggtgtatgtccactgcgatagctatctgccgtttggattgcaagccagcagaacggccatggcgcccaacggagaaatctggtttagacaagctttgtataaggctgacttttccacggccgccgcaggtttccagcatgtatttatccacgaaatgagccatgtctggcagcatcaaaaaggcatgtgggtgagaatccgagggctattgagttgggctgctgaatacaaatatcgactcgatggtaaacagctgttgcataactactctatggaacagcaggcttcaatcatcgctgattattggttcctgaagaagtatggttacactatctggctgggggcgattaacaatggcgtcaattttcagggtgtaacggataaaacgatcgccagaaaatacgaatatgcgctttctcagttttttaagcagaggtaa

SEQ ID NO: 424426 - DNA, 171 bp, Serratia marcescens
atgctcctggcttttccctttctctcagactggattattggccacgttgagggcgaggatcagatgtcggctaacttcgagttgctggcgattggcttagtgttgtgctgtttcgtgggaggttcactcggcaacttgacctattcaaaatcaaatacctcccccaaataa

SEQ ID NO: 424427 - DNA, 228 bp, Serratia marcescens
atgttgacggtattcgccgccaccttcgtgttgttcctactgatcgtcggcgggatgtcgctgggttacgtgttcaaacgcaaaagcctgcagggcagctgcggcggcatcaccgcattggggatggagaaagtctgcgactgcccggaaccctgcgatgcgcgcaaaaagcgcgaagctaaagcggcacagcggcgcgagcagctggacaagcaccgcattctgtag

SEQ ID NO: 424428 - DNA, 1032 bp, Serratia marcescens
atgcgcgcattggcgatgaagaactggctgacgggcgtggcgctgagcgccaccctgctgctgaccggctgcgggccggaacaggtggatctgacgggtaaaaccatgggcacctcgtattcgatccgttacgtggccggcgacgatacgccgtcggcgcgcgagatgcaggcggagatcgataaacggctggagcaggtgaacgaccagatgtccacctaccggccggactccgagctgagccgcttcaacgccagccgcgatattgaccggccgttcccggtttcgccggcgactgccaaggtggtgcgcgaagcgctgcgcatcaaccgcgtgaccgatggtgcgctggacgtaaccgtcgggccgctggtcaacctgtggggcttcggcccggaagggcggccggataaagtgccgagcgaggcggagctggcgcatcgtcgcgcctggaccggtgccgacaaactggcggtgcagggcagcgcgctggtgaaaagcatccccgagctgtatgtcgacctgtcgtcgatcgccaaagggtacggcgtggacgtggtggcggagtatctgcaatcgcaacacgtgaaagactacatggtggatatcggcggcgaagtccgcacccgcgggcgcaacggcgagcaaaagccgtggcgcatcgccatcgagcgcccgaccgccggtgcgcagcagcaggcgcagctggtgatccagccaggggagatgtcgatcgccacctcgggtgactatcgcaactacttcgagcaggacggggtgcgctattcgcacaccatcgatccgatcaccggccggccgatcaaccaccgcctggtgtcgatcaccgtactgagcccgacctgtatgaccgccgacggcctgtccaccggcctgaacgtgatggggccggagcgcggcctggcgctggccaatctgctcggtatcccggtgttcatgatcgtgaaaaccgccgacgggtttgaggagcgttattcggacgcgttcaaaccctacctgaaaaagagttcgtga

SEQ ID NO: 424429 - DNA, 1224 bp, Serratia marcescens
atggaaattattttaggcgtagcaatgttcaccaccatcgtgatggtgctggtgttgctgatcctgttcgccaaatcgaagctggtgaacaccggcgacatcgcggtggagatcaacggcgatctggataagagcttccatgcgccggcgggcgacaagctgctcaacgtgctctccagccaggggatcttcgtctcctcggcctgcggcggcggcggttcctgcggccagtgccgggtggtgatcaaagagggcggcggcgatatcctgccgaccgagctctcgcacatcaacaagcgcgaagcgaaagagggttgccgcctggcgtgccaggtgaacgtgaagcagaacctgaagatcgagctgccggaagagatcttcggcgtgaagaaatgggagtgcgaggttatctccaacgataacaaagccacctttatcaaagagctgaagctgaagatcccggatggcgaagacgtgccgttccgcgcgggcggtttcatccagatcgaagccccggcgcacgacatcagctacgccgacttcgacgtgccgcaggagtatcgcggcgactgggacaagttcaacctgttccgctaccgctcgacggtgaacgacaccacggtgcgcgcctactcgatggccaactacccggaagagaagggcatcatcatgctcaacgtgcgtatcgccacgccgccgccgaacaacccggacgtgccgccgggcatcatgtcttcctatatctggtcgctgaagccgggtgacaaggtgaccatctccgggccgttcggcgaattcttcgccaaggagaccgacgccgaaatgatcttcatcggcggcggcgcgggcatggcgccgatgcgttcgcacatcttcgatcagctcaaacgcctgaactcgaagcgcaagatcaccttctggtacggcgcgcgttcgctgcgcgagatgttctatgaagacgacttcaaccagctgcaggcggagaacgacaacttcacctggcacgtggcgctgtcggatccgcagccggaagataactggaccggctacaccggctttatccataatgttctgctggagaactatctgaggaatcacccggcgccggaggactgcgagttttacatgtgcgggccgccgatgatgaacgccgcggtgatcaagatgctgaaagatctgggcgtcgaagacgagaacatcatgctggatgactttggtggctaa

SEQ ID NO: 424430 - DNA, 597 bp, Serratia marcescens
atggaacactatatcagcctgtttgtgcgcgcggtgttcgtcgagaacatggcgctggcgttcttcctcgggatgtgtaccttcctggcggtctcgaagaaggtctcgaccgcctttggcctgggcatcgcggtgaccatcgtgctcggcatttcggtgccggtgaacaacctggtctacaacctgatcctgcgcgacggcgcgctggtggaaggcgtcgatctgagcttcctcaacttcatcacctttatcggcgtgatcgcggcgctggtgcagattttggagatgatcctcgatcgcttcttcccatcgctgtataacgcgctcggcatcttcctgccgctcatcaccgtgaactgcgccatcttcggcggcgtgtccttcatggtgcagcgcgactacaacttcgccgaatcggtggtgtacggcttcggctccggcaccggctggatgctggcgatcgtcgccatggcggggatccgcgagaaactcaagtatgccaacgtgccggcgggactgcgcggcctgggcattacctttatcaccaccggactgatggcgctgggcttcatgtccttctccggtgttcagttgtaa

SEQ ID NO: 424431 - DNA, 630 bp, Serratia marcescens
atggctgattccaaagagataaagcgggtcctgctggggccgctgttcgacaataacccgatcgccctgcaggtgttgggcgtctgttctgcgttggcggtgaccaccaagctggagacggcggtggtgatgaccattgcggtgacgctggtcacggcgttctccagcttcttcatctcgctgatccgtcaccatattcccaacagcgtgcgcattatcgtgcagatggcgatcatcgcctcgctggtgatcgtggtcgatcagctgctgcgcgcctacgcgttcgagatctccaagcagctgtcggtgttcgttggactcatcatcaccaactgtatcgtgatggggcgcgccgaggcttacgccatgaagtcgccgccgatcgagagctttatggacggcatcggcaacgggctgggctacggggtgatcctggtgctggtcggtttcctgcgcgagctgattggttccggcaagctgttcggcgtcccggtgctggaaacggtgcagaacggcggctggttccagccgaacggcctgttcctgctggcgccgagcgcgttcttcatcatcggcctgctgatctgggtgctgcgcaccctgaagccggcgcagatcgaaaaggagtaa

SEQ ID NO: 424432 - DNA, 795 bp, Serratia marcescens
gtggcgaatgaagcgaaaaacgacggcatcggtaaaacgctgctggtagtgctgctgctgtgtctggtgtgttcagtggtggtggcgggctccgccgtcggcctgaagtccaaacagcaggagcaaaagctgctcgacaagcagcgcaatattctcgacgtagccggcctgttgcagccgaaaatggagagcgagcaggtcaagcgcctgtacagcgagcgcatcgaaccgcgcctggtggatctgaacagcggcgagtttgtcgccggcaaggcggcggcgttcgatctgggcgccgcgctgcgcgacgacgccaaaagcgtggcgctggcggcgggcgacgatccggccggcatcaagcgccgcagcaaccaggcggaaatctacctggtgcgcgacgaaagcggccaggtgaacaagattgtgctgccggtatacggcaccggtctgtggtcgatgatgtacgccttcgtggcgctggataacgacggcaacacggtcaagggcatcacctactacgaccagggggaaaccccggggctgggcggcgaggtcgagaacccgtcctggcggcagcagtgggtcggcaaacagctgttcgacgacaacggccagccggcgatccgcgtggtgaaaggcggcgcgcgtcagggggatgtgcatggggtggacggcctgtccggcgccacgctgacctccaacggcgtgcagcatacgtttgatttctggttgggcgagcacggcttcggcccgttcctgaaaaaagttcgtgaaggagcgctgaaaaatggctga

SEQ ID NO: 424433 - DNA, 1242 bp, Serratia marcescens
atgggcctgaagaattattttgagaagatagagcatcacttcacgccgggcggcaaactggaaaagtggtacccgctgtatgaagcgaccaccacggtgttttacacccccggcacggtgacgcgtggcgcttcgcacgtgcgcgacgccatcgatttgaaacgcatgatgatcctggtgtggctggcggtgttcccggcgatgttctggggcatgtacaacgtcggccaacaggcgatcccggcgctgcaccatctgtacagcggcgacgagctgcaacaggtgctggcgggcgactggcattatcgcctggcgcagtggctcggcgcctcgctggccgccgacgccggctgggtcagcaagatggtgctgggcgcctgttacttcctgccgatctacgccgtggtgtttgtcgtcggcggtttctgggaagtgctgttcgccattatccgcaagcatgaggtcaacgaaggcttcttcgtcacctctatcctgttcgcgctgatcgtgccgccgaccctgccgctgtggcaggccgcgctgggcatcaccttcggcgtggtggtggccaaagagatcttcggcggcaccgggcgcaacttcctcaacccggcgttggccggccgcgccttcctgttcttcgcctatccggcgcagatctccggcgatctggtgtggacttccgcggacggtttctccggcgcgacgccgctggcgcagtggagcgcaggcggggcgcacagcctgagcaacgtggctaccggccagtccatcagctggatggacgccttcctcggcaacattcccggctccgtcggtgaagtctccacgctgatgatcctgatcggcggggcgattatcctgttcggccgcgtggcttcctggcgcatcgtcgccggcgtgatgctcggcatggtggcttccgccctgttgttcaacgccattggttccgataccaacccgatgttcgccatgccgtggtactggcatctggtgctgggcggtttcgccttcggcatgatctttatggcgaccgacccggtttccgcctccttcaccaacaaggggaaatggtggtacggcattctgatcggcgtgatgtgcgtgctgatccgggtggtcaaccccgcctatccggaaggcatgatgctggcgatcctgttcgccaacctgttcgcaccgctgttcgattatctggtggtgcaggccaacatcaagcggagaaaagcccgtggcgaatga

SEQ ID NO: 424434 - DNA, 1350 bp, Serratia marcescens
atgattaagatcagaaaagggttagatctgccgatagccggagccccggttcaggcgatccaagacggcccgaacattcagcatgttgccctgcttggggaagagtatgtcggaatgcgtccctccatgctggtgcaggaaggcgataccgttaagaaaggccaggcgttgttcgaagataagaaaaaccccggggttttcttcacggctcccgccagcggccgcatcgccgcgattaaccgcggcgagcggcgcgtattgcaatcggtggtgattgcgctggaaaacggcggcgatgaccagctcgagtttgcgcattacccgctgggtgaactggcccagttgccgcgcgaacaggtcgagagcgaactgatcgccagcggcctgtggaccgcgctgcgcacccgtccgttcagcaaaacgccgagccccggcagcgaaccgcgcgccattttcgtcaccgcgatggatacccggccgttggccgccgatccgcaggtgatcatcgccgagcagcaggcggcgttcaacgccgggctggtggtgttggcacgcctgacggcgggcaaggtgcacgtatgccacgccgccggcgcctccgttggccagcagagcggcccgcagatcgcctacagcgaatttgccggcccgcaccccgccgggctggtgggcacccacattcacttcctcgaaccggtcagcctgaagaaaaccgtttggcacatcggctaccaggacgtgatcgccatcggcacgctgttcaccaccggtcagctcgatacccgccgggtcgtggcgctggccgggccgcaggtggcgcagccggcgctgctgcgcacccgcctgggggccagcctcgaggagctgaccgccggccgcctgaaaaacggcgagaatcgggtgatctcaggttcggtgctgaacggcatgcacgccaccgggccgaacgcctggctcggccgcttccactcgcaggtgtcggtgctggaagaagggcgcgacaaagagctgttcggttggatcgtgccttcgccgaacaagttctccattacccgcaccacgctggggcacttcctgaagaacaaactgttcgccttctcgaccaccactaacggcggcgaacgcgccatggtgccgatcggcaactacgagcgggtgatgccgctggatattttgccgacgctgctgctgcgcgatctgctggcgggcgacagcgacagcgcgcaggcgctgggctgtctggagctggacgaggaagatctggcgctgtgcaccttcgtttgccccggcaagtatgagtacgcgccggtgctgcgcgaggtgctgaccaagattgagcaggaaggataa

SEQ ID NO: 424435 - DNA, 771 bp, Serratia marcescens
atgagcaaaatcgcgctgttgtttgcgatgcttgtttctatgccgatgatcacggcctgcagcgccagcgagcaggtacccgaagcgccggtagttaaacagcaattattgggttcgccggtctatattcagatcttcaaagaggaacgcaagctggaattgtatgccaaaatgggcaatgaattccgcctggtcaacacgttcccgatctgtaatttctccggcgggctgggtcctaaacgccgtgaaggcgactttaaaagtccggaaggcttttatagcgttgacgcgcgccatctgaaacccgacagcaagtattatcgggcgatcaatatcggtttccctaatgattacgataagtcgcagggctattccggcgcttatctgatgatccacggcgaatgtaaatcgatcggctgttacgcgatgaccaacacctatatggacgagatctatcgctacgtcgaagccgccttcgcctatggccaaagccgcgtcaacatcagcatttacccgttccgcatgaccgagcaaaacctcaagcgccatgcatcatccagctatatcgccttctggcgccagctgaagccgggctacgattacttcgcgaagaaccaccagccgccgacaatgggcgtggtcaatggccagtacgtcttgggtcaaccgctgatgagcagcggcggcatgatgacgcagtacgcgtcagccagcccgacgcccaacaccaatcccttcgctcagaacaagccgctcaccgaagtgaaataa

SEQ ID NO: 424436 - DNA, 804 bp, Serratia marcescens
atgtgtgaactgctcgggatgagcgcaaacgtaccgaccgatatctgcttcagctttaccggcctggtacagcgcggcggccgcaccgggccgcataaggatggctggggcattaccttctatgaagggaacggctgccgcacattcaaggatccgcagccgagcttcaactcgccgatcgcccgcctggtgcaggactatccgatcaaatcctgcgcggtggtgtcccatattcgccaggccaatcgcggcgaagtggcgctggaaaacacccacccgttcacccgcgaactgtggggccgcaactggacctacgcgcacaatggccaattgaaaggctatcgtcagctggataccggcacgtttcgcccggtcggccagaccgacagcgaatacgcgttctgctggctgctgcatcagctggcgctgaaatacccgcgcaccccgagccaatggccggcggttttccgctatatcggcctgttggcgagccagctgcgcaagaagggggtgttcaacatgctgttgtcggacgggcgcttcgtgatggcctattgttccaccaacctgtattggatcacgcgccgcgcgccgttcggcaaggcgacgctgctcgatcaggacgtggaaatcgattttcagcagcagaccacaccgaacgatgtggtcacggtgatcgccacccaaccgctgaccgccaacgaaacctggcacaagattgagccaggcgagttcgcgttatttcacttcggtgagcggcttgttctgagcgaagggattggtgttgggcgtcgggctggctga

SEQ ID NO: 424437 - DNA, 582 bp, Serratia marcescens
atgtaccacgaccttattcgcagtgaactgaacgaagcggctgataccctggcgaaatttatcaatgacgacgccaatatcgacgccatccaacgcgccgcggtgctgctggcggattccttcaaagccggcggtaaagtgatttcctgcggcaacggcggttcccattgcgacgcgatgcacttcgccgaagagctgaccggccgctaccgtgaaaaccgcccgggctacccggcgattgccatctcggacgtgagccacctgtcctgcgtcagcaacgacttcggctatgagtacgtgttctctcgctatgtggaagcggtaggccgcgaaggcgacgtgctgctgggcatttccacctccggcaattccggcaacatcatcaaggccatcgacgcggcgcgcgccaaggggatgaaagtgatcaccctgaccggcaaggacggcggcaagatggcgggttccgccgatgtggaaattcgcgtgccgcacttcggctacgccgaccgcattcaggaaatccacattaaagcgattcacatcttgattcagctgatcgaaaaagagatggttaaggcttga

SEQ ID NO: 424438 - DNA, 2457 bp, Serratia marcescens
atgatggttcttagtatcgtcgttttcctggctctcctcggcgtggtgttctaccaccgagtgaaccttaccctcagcagcctgatcctggtggcgtacaccgccgccatgggtgcgatcggcctgtggagcttctggctgttgctgccgctggctatcgtgctgctgccgctgaacctttcctctgtgcgccgttccctgctctccgcgccggcgctgcgcgccttccgcaaggtgatgccgccgatgtccaccaccgagaaggaagcgatcgacgccggcaccacctggtgggaaggcgatctgttccgcggcgcgccggactggaacaagctgcacagctacccgaaaccgcgcctgacggaagaagagcaggcgtttatcgacggcccggtggaagaagcctgccgcatggccaacgacttccagatcacccacgaactggccgatctgccgcctgaactctgggcatacctgaaagaacaccgtttcttcgcgatgatcatcaagaaagagtacggcggtctggaattctctccttatgctcaggcgatggtgctgcaaaaactggccggcgtttccggcatcctggcgatcaccgtcggcgtgccgaactccctcggcccgggcgaactgctgcagcactacggtaccgaagaacagaaaaaccactatctgccgggcctggcgcgcggcgacgagatcccttgcttcgcgctgaccagcccggaagcgggttccgatgccggcgccattccggacgtgggcaccgtgtgcatgggcgactggcaaggcaagcaggtgctgggcatgcgcctgacctggaacaagcgctacatcacgctggcgccggtcgccaccgtactgggcctggcgttcaaactgcatgacccgaaccgcctgctgagcgacaacgaatccccgggcatcacctgcgcgctgatcccgaccagcacgccgggcgtggaaatcggcaaccgccacttcccgctgaacgtgccgttccagaacggcccgacccgcggcaccgacgtgttcgtcccgatcgattacattatcggcggcccgaaaatggccggccagggctggcggatgctggttgagtgtctgtcggtaggtcgcggcatcaccctgccgtccaactctaccggcagcctgaaatccatcgccctggcgaccggcgcctacgcgcacattcgccgtcagttcaagatctccatcggcaagatggaaggcatcgaagagccgttggcgcgcatcgccggcaacacctatgtgatggacgccgccgcttcgctgatcacctatgcgctggtgcagggcgagaagccggccgtgctgtcggccatcgtcaaataccactgtacgcaccgcggccagcagtcgatcgttgacgccatggacatcgccggcggtaaaggcatcatgctgggcgaatccaacttcctggctcgcgcctatcagggcgcaccgatcgccatcacggtggaaggcgcgaacatcctgacccgcaccatgatgatcttcggccagggcgcgatccgctgccatccttatgtgctggatgaaatggcggcggcgcagagcaacgatctgaacgccttcgataaatcgctgttcggccatctgggccacgtcggcagcaacaaggtacgcagcttctggctgggcctgaccaacggccgcaccagcgccacgccgaccaaggacgcgacccgtcgttactatcagcagttgaaccgcctgagcgccaacctggcgttgctgtcggacgtttccatgggcgtgctgggcggcagcctgaagcgccgcgagcgcatctccgctcgcctgggggacatcctcagccagatgtatttggcttccgccgtgctgaaacgctttgacgacgaaggccgtcagaaagaagatctgccgctggtgcattggggcgtgcaagacagcctgcataaagccgaacaggcgctggatgatctgctgcgcaacttcccgaaccgctttatcgccggcgcgctgcgcttcgtggtcttcccgtttggccgcgtgcataccgcaccgtccgaccgtctggatcaccagttggccaagatcctgcaggtgccttccgccacccgcagccgtctggggcgcggtcagtacctgacgccgagcgagcataacccaatcggcctgctggaagcggcgctggccgacgtgatggccgccgagccgattcacgagcgtctgtgcaaggcggccggcaaaaatctgccgttcacccgcctggatcgtttggcggagcgcgcgctggaagaaggcaagatcagcgccgatgaagcgagaattctggtgaaagccgaagagagccgcctgcgctccatcaacgtggacgactttgcgccggatgcgctggcggccgccaagccggaaaagccggcggcgcagtctaagcgccaacagcagaccgaagcggcttag

SEQ ID NO: 424439 - DNA, 153 bp, Serratia marcescens
atgcagcaaaaacgggtcgtacttaaactggtgatcgtctgtatgacgctgatcgcgttcatctggctaacccgcggttcgctgtgcgaactgcgcatcaggctgggagactcggaggttgcggccactttggcttacgaatccgaacggtaa

SEQ ID NO: 424440 - DNA, 1200 bp, Serratia marcescens
atgtcgctttatcgtacgtttacggctgccgatgccgttgaatatgcccgccaatacgggcaggtggccgatccgcaggcgctggtgagcgccgacgagatcggtgacggcaacctgaacctggtgttcaagatccgcgatcgcgaaggcgtgagcagggtgatcgtcaaacaggcgctgccctacgtgcgctgcgtgggcgtatcctggccgctgacgctggatcgggcgcgtatcgaagcggaaacgctgcgggttcacggcggtttctgcccgcggcatacggtaaaagtcttgcatcacgatcccgaattggcagtgatggtgcaggaagatctctccgatcatcgcatctggcgcagtgagctggtacagggcaactatcacccgctggcggccgggcagttggcggaatacctggcgcagacgctgttccacacctccgatttttatcagtcggcgcagcagaagaaggcggaagtcagacgtttcactaaccccgaactgtgccagatcaccgaagacctgttctttaccgatccctatatcgaccatgagcgcaatcagttcgaggtggcgctgttgccgcaggtgcaggcgctgcgcgaggatgcgccgctgaagctggcggtcgccggcctgaaacatcgctttctcagcaaggcggaggcgctgttgcacggcgatattcacagcggttcgatcttcgtggcggaaggccggttgaaagcgatcgacgccgaattcggcttctacggcccgatcggtttcgatatcggtactgcgttaggcaacctgctgctcaactattgcgggctgccggggctgttcgggccgcgcgacgccgccgccgggcgcgagcagcgcctgcaggatgtgcgcgagctgtggctgatcttcgccgatcgctttttggcgttgtgccatcagcaaagccgggatgcggcgttggcgacgccgggttacgccgagctgttcctgcaacaggtctggaccgatgcggtcgggtactgtggcaccgaactgattcggcgcaccatcggcctggcgcacgtcgccgatctggacagcatcgccgacgctgatatgcgcctcgactgtcagcgccatgcgctgggattggggcgcacgctgatcgtcaatgcgccgcagatcgagcatattgacgcgctgttggcgcgcattcgtcagcagggctaa

SEQ ID NO: 424441 - DNA, 1029 bp, Serratia marcescens
atgcaagcgcttaacaccaccagcttgaccctgcaggacaaccgcctttggatcctcgatcagcaagccctgccgcaggaaaagcggtggcgcgcctgcgacagcgtggaggaactggtcgggcacattcacagcctgcgggtgcgcggcgcgccgctgatcgggctgtccgccagcctgctgttggcgctgctggcggaacgcggtctgacgcgcgccgagctggaacaggcgctgcacacgctgcgcgccgcccgcccgacggcggtcaacctgatgaataatctggatcgcatgaagctggcgctggcggagcctgattgggtgccggcgatggtgaacgaagcgctgcggctggtggaagaagatcgccggctgtgcgatcgcatcgccgatcacggcgctgggctggtcaagcccggcagccgcctgctgacccactgcaataccggcggattggccaccgccggcgtcggcaccgccatcggcgtgctgctgcacgcccaccggcagggcaaagtgcaacaggtatgggtcgatgaaacccggccgctgctgcagggcggccgtctgaccgcctgggaattgggcgagctgggcattccctatcgcctgatctgcgattcgatggtcgccagcctgatggcgcagggccaggtcgatgcggtatgggtcggcgcggatcgcatcgccgccaacggcgacgttgccaacaagattggcacctacagcttggcggtgctggcgcactatcacggcatcccgttctacgtggccgccccgcacaccacccacgatccgcactgcccggacggcgcagccatcccgatcgagcagcgcgcggcggccgaagtcaccggcgtttcaggtagcttcggcgcctgccagtgggcgccgaacgatgcgccggtctacaatccggcgttcgacgtcacgccggcgaagctcatcagcggatggatattcgacagcggcgtgattacgccgcagcaggttgaagcggggattttccagcgggcgttgggttaa

SEQ ID NO: 424442 - DNA, 543 bp, Serratia marcescens
atgagtggattgaccattttcagcgatacagcgccgcagcaaccgctgtggcagagccgtgatgcgcaggagatccagcggcagttggcgcagattggcgtgcgctttgagcgctggcaggcggatcgcgagctgggcgacaatccgcagccggaggcggtgatcgcggcctaccagcatgagatcgatcggctggtggcggaaaagggttaccagagctgggacgtgatcagcatgcggccggaccatgagcagcgccaggcgctgcgtgaaaaattcctgtccgaacatacgcacggcgaagatgaagtgcgctttttcgtcgagggcgcagggctgttttgcctgcatctggacggcaagatcttccagatcctgtgtgaaaagaacgatctgatctcggtgccggccaacacccggcactggttcgatatgggctcggccccgcatttcaccgcgatccgggtgttcgacaacccggaaggctgggtggcgcatttcaccggcgacaagatcgccgatgcttatccgcgtttggactga

SEQ ID NO: 424443 - DNA, 690 bp, Serratia marcescens
atgatccgcgccatcgtgactgatattgaaggcaccaccagcgatattcgctttgtgcatcaggttctgtttccttacgcccgcgaacggctggcagattttgtgcgccgccatgccgctgagagcgaagtcgccgcaccgctggcggcgctgcgcgctgaaattggccaaccgcaggccgatctcgacgtgctgatcgccgcgctgtaccgctttatggatgaagaccgcaaatccaccgcactcaaagcgctgcagggcatcatctggcgcagcggctaccgcgagggtgatttccgcgggcatctgtatccggaagtcgccgggcagttggccgcctggcagcggcaaggggtgaaactctacgtctattcctccggttcggtggaggcgcagaagctgctgttcggccacagcgacgcgggcgatctgcagccgctgttcagtggctatttcgatacgcacgtcggcgccaagcgtgaaaccgcgtcgtaccgcaacatcgcgcaggctatcggcatcgcgcccgacgagctgctgtttttgtccgacatccgccaggagctggatgcggcgcaggccgccggctggcatacctgccagctgatccgcgatgaggcggacgtgcagagccgacatccgcaggttaaccgttttgatcgcatagatttaggggagatcgtctcatga

SEQ ID NO: 424444 - DNA, 615 bp, Serratia marcescens
atgacggagaatccgcaacttaccgcattgctggcggcctgccactggattggcaacaaaggctggtgcccggcgaccggcggcaacatgtcgctgcgcctggacgaacgtcagtgcctggtcaccgagtccggcaaagacaagggtagcctgagcgccgccgattttctgcgggtggatattgccgacaatcatgtgccgagcggccgcacgccgtcggcggagaccgggctgcatacgctgctctatcgcctgtctgcgcatatcggcgcggtgctgcatactcattccgtcaacgctaccgtcctgtcgcgggtggaacgcggcgatgcgctggtgctgcaggggtacgaaatgcagaagtcgctggccggccagcgcagccacctggacagcgtggcgatccccatattcgacaacgatcaggatatccctcggctggcggcgcgcgtggcggcctatgccgaggccacgccgctgcaatacggctttctggtgcgcggccacggtctgtattgctggggaagccaggtggcggaagctcgccgccatcttgaagggctggaattcttgttccagtgtgaactgcaacgccgtttactggaggcgaaatga

SEQ ID NO: 424445 - DNA, 1161 bp, Serratia marcescens
atgagcacttccgcattgattcccgaaagcaaactgccctcgctgggcaccaccatctttacccagatgagcgcgctggcgcagcagcaccaggcgatcaacctgtcgcagggcttccccgatttcgacggcccggactacctgaaagaacgcttggcctggcacgtcgcccagggcgccaaccaatatgcgccgatgaccggcgtggcgccgctgcgcgaagccatcgccgacaaaaccgccgagctgtatggctggcagccggacgccggcagcgaagtgactgtcaccgccggcgccaccgaagcgctgttcgccgccatcagcgcgctggtgcgccccggcgacgaggtggtctgtttcgatcccagctacgacagctatgcgccggcggtgacgttggccggcggcatactcaaacgcatcgccttgcagccgcccgcgtttgccgtggattggccagcgttcgtcgccgcgctgtcgccgcgcacccgcctggtgatcgtcaacacgccgcacaacccgtccgccaccgcctggcaggcggaagacatgcagcagctgtggcacgctatcgccgaacgcgaaatctacgtgctcagcgacgaggtttacgaacacatctgcttcgccaaaggcggccacgccagcgtgctggcccacccgcagctgcgccaacgcgcgatcgcggtgtcctctttcggtaaaaccttccacatgaccggttggaaagtgggctattgcgtggcacccgccgcgctgagcgccgaggtgcgcaaagtgcatcaatacctgaccttttcggtcaataccccggcccagctggcgctggcggatagcctgcgcgccgagccggagcactggcgacagctgccggcgttctatcgcgccaaacgcgaccgctttgtgcaggcgctggcgagcagccgactggaaattttaccctgcgcgggtacatacttcttgctggcggactacggcgccatctccgatctggacgatgtggcgttctgccattggttaaccgagcacgtgggcgtggcggccattccgctgtcggtcttctgtgccgatcctttcccccataaattgatccggctgtgcttcgctaaacaggacgccacgctggatgcagctgcggagcggttatgtcgactttaa

SEQ ID NO: 424446 - DNA, 774 bp, Serratia marcescens
atgtcgactttaaaaattaccctgttgcagcaacctttggtctggcgcgacggcctcgccaatctggccgccttcgacgcgttgctggcgccgatcgccggccgcgatctcatcgtcttgccggagatgttcaccaccggcttcgccatggatgccggcgagagcgccctgcccgaacagcaggtgatcgactggctgcacggttgggcggtgaaaagccacgcgttaatcggcggcagcgtggcgctgaaaaccgacgagggcgcggtcaaccgtttcctgctggtggagccgggtggccaggtgcatgcctatgacaaacgccacctgttccgcatggccggcgaacacctgcactaccgggccggcaaccggcgtgaaatcttcgaatggcgcggctggcgcatcctgccgcagatctgctacgacctgcgttttccggtttgggcgcgctatcagcaggattacgatctggcgctatacgtcgccaactggccggcgccgcgcagtcaccattggcaaacgctgctggcggcgcgggcgattgaaaaccaggtgtatgtggcgggctgcaaccgggtgggcgacgatcccaacggcctgagctacagcggcgacagcctgattatcagccctcagggcgagatcctggcggatgcggagccaggcgcggccacgcggctggacgccgagctgtcgctggaaaccctgcagagttaccgcagcgccttcccggcctggcgcgacgccgacagctttctgcgtttagactga

SEQ ID NO: 424447 - DNA, 1254 bp, Serratia marcescens
atgacgccgctggaggcgcagcaggctgccgcacgggtgatggcgcgctgtgacgagctggcggcgatcagcgcggagcccggtaaattgacgcgtctttatctgtctgcggaacatcggcgcgccaacgctctggtgggtgaatggatgcgcgagagtggcatgcaggtttggcaggacagcgtcggtaatatctgcggccgttatgaagggctcacgcccgctgcccctgcgctgctgctcggttcgcatctggacacggtgcgcaacgccgggcgctatgacggcatgctcggcgtgctcacggcgctggaaacggtgacgcactattaccgccaggggcgccgtttgccgctggcgctggaggtgatcggttttgccgacgaagagggcgcgcgctttggcgtcacgctgctcggcagccgcgggctgaccggccaatggccgcaggagtggctggcgcagacggatgccgacggggtgagcatcgcgcaggccatgcgcgactttgggctggatccggcggcgatcgcacaggcgcgtcgcgcgccaaacgaaattcgcgcctatctcgaattgcatatcgaacaggggccgtgcctggaggcagccgacctggcgctgggcgtggtgacggcgatcaatggcgcgcgccggcttacctgcactttcagcggtgaagcgggccacgccggcacggtgcctatggtgcagcgcaaagacgcgttggcggccgcggcggaatggataacggcggtcgaaacgctgacccgcgccgccgatccgcatttggtggccaccgtggggtgtattgaatgtctgccgggcgcggtcaacgtgatccccggcgaagtgcgattgacgctcgacgtccgcggcccgcaggatgcgcaactggcggcgctgttgacggcgttgctggcgcaggcgcaggcgatctgcgtacgccgcggcgtgcgcttcgccagtgaagagttttaccgcattgacgccactgcctgcgatagcgagctgcagcaatgctggcaggcggccgtcgagcaggtacaggggcggagcctggcgctgccgagcggcgccgggcacgacgccatcgccgtggcggcgcactggccggtcggcatgctgttcgtgcgttgcgccggcggcgtcagccatcatccggccgaagcggtgcggcaggcggacgtggcgctggcgatccaggcctattgcctgacgatcgccggctgggaaaagggggagtcagtctaa

SEQ ID NO: 424448 - DNA, 1245 bp, Serratia marcescens
atgttggatatctcgcaattcgatcagattaacccaccggcgcgtctgctgatggggccggggccgatcaacgccgatccgcgcgtgctgcgcgccatgtcgagtcagctgatcggccagtacgatccggcgatgaccggttacatgaatcaggttatggcgctgtatcgtgcgctgttccgcaccgaaaaccgctggacgatgctggtggacggcacctcgcgcgccggtatcgaggcgctgctggtttccgccattcggccgggcgataaggtgctggtgccggtcttcggccgtttcgggcatctgctgtgcgagattgcccgccgctgccgcgccgaggtgcacacgattgaggcgccgtggggcgaggtgttcagcgccgatcgcatcgaagacgcgattaagcgagtgcgcccgcgcctgctgctgacggtgcagggcgatacctccaccaccatgctgcagccgctgcatgagctgggcgatatctgccgccgccacggcgtgttgttctacaccgacgcgacggcttccttcggcggcaatccgctggagaccgatgcctgggggctggatgcggtctccgccgggctgcagaagtgcctgggcggcccctccggcagctcgccggtcactctcagcccgcagtttgaagagattgtgcgccgccgtaaatgcgtggaggcggggatccgcaccgccgagcatgccgacggcgacgacgagatgatttactccaactatttcgacatcggcatgatcatggattattggggaccggaacgcctgaatcaccataccgaagccaccagcatgttgttcgcagcgcgcgaatgtgcgcgggtgatccttgaagaagggctggatcaggccatcgcccgccaccggctgcatggcgcggcgatgctggcgggcatccggggcatggggctggcggtgttcggcgatctcgaacaccgcatgaataacgtgctcggcgtgatgatcccgccgcaggtgcacggcgaacaggtgcggcagatgatgttgaacgacttcgccatcgaaatcggcacctcgttcggcccgctgcagggcaagatctggcgcatcggcaccatgggctacaacgcgcgcaaggattgcgtgctgcaaacgctggcggcactggaggcggtgttgaaccggttgggcttcgccacgcaacagggggaggccctccaggcggcctgggacctgtacgatgcaggacggcttgaatga

SEQ ID NO: 424449 - DNA, 840 bp, Serratia marcescens
atgcaacggttcgacgaacgcctgcgccgcgactacccacagctgacgccgcaggagcagcgggtggccgacttcatcttcgatcactatgacgatttgatcggttacaacagcgccgagctggcgcgtctgagcggcgtttccaaagccacggtcagccgcttgttcaaacggctgggctaccccaactaccgcgccatgcgcgatgagctgcgcaccctgcgccaaagcggcatgccgctgaccgacagccgcgatgcggtgcagggcgatacgctattggcgcggcactgtaagcaggaaatggccaatctcacccgctgggtaaagcagatcgatgcggtgcagttcagcgcggcgatcgccgcactggcgcaggcgcgaagcgtgatgctgctggggctgcgcaacagctatccggtggcgatgcacctgcgtcagcagctgatgcaggtgcgggagcaggtgctgctggcgccgcagccggggcaaacgctggcggaagatctggcggggctgacgccgcaggacatggcggtggtggtggcgttccgtcgccggccgcgccagataaaagcgctgctggcgctgttgcaaagccgcggggtgccgacgctgctgatctgcgaaccgcaggcgcaggcgttgttcccactggtcaactggcacttgaccgtgccgctcgacagcgtgtcggcgttcgacagctatgccgccgccatgagcctggccagcctgctcagcaatgcgttgctgcatgagcggctggcgcaggggcggcagcgcattcatcacgtcgccgaactgttccaggcgctggacgaactggagctgcgttaa

SEQ ID NO: 424450 - DNA, 879 bp, Serratia marcescens
atgtccgccagctacagaatttttgatatcaccctgaaaagcaaaacgctgatttcaccttcgctggtgcgctgcgtgtttgaaggtgcggatattcatcggatgaagcttgaagcgccggatcagcgcatcaaactgttgttcccggcggcggacggccagagcccgcagttggccaacggcccggattggtacggcgattacatggcgatccccaaagaacaacggccggtgatgcgcacctatacgctgcgtgcgctgcgccgtgagcagaatcagatggacgtcgaattcgtgctgcatggtgtgaacggcccggcttccgcctgggcgacccacgccgagccgggtgacgccattcagacggtcgcgcccaacggcgagttcggcggcgacagcggcggctacgaatgggcgccgccggcgcagttgcagcaggcgctgttgatcgccgatgagacggcggtgccggcggcgatgggcattctggagcagctggcgcagcaggccaatccgccgcgggtgcaggcgttcttcgaagtgccggtggcgggggattgcctggatttggcccgtttcccgttcgccgaggtttactggctgccgcgtgacgtgggccgccaactggcgcatggcacactgctggtggaagcggtgcgccagcgggtcgatatccccgcttcggcgtgcgcgcaggcgcagtccctggcggaaagcagcctgagcgatgaggtgctttgggagcgggcggccggcggtaacgctttttatgcctgggtggcggccgagtcttccacggtgaaaacgctgcggcgttatctgatcggcgaacgcgatctggatcgcgctaccgtcaacttcatggcctattggtgctga

SEQ ID NO: 424451 - DNA, 2241 bp, Serratia marcescens
atgaaacgcaaacacctttgggtattgaacccttgtctgctggcaatgcttgcgccggcggcttgggcagaagatcagaaaaccagcaacgaagagcagttggtggtctccgccagccgttcgcaccgcagcgtggcggaaatggcgcagaccacttgggtcatcgaaagccaggagatcgaacagcaggtccagggcggcaaagagatcaaggacatgttggcgcagctgatccccggcatggacgtcagcggccagggccgcaccaactatggcatgaatatgcgcggccgttcgatgatggtgatgatcgacggcgtacgcctgaactcatcgcgcagcgacagccgccaattggattctatcgatccattcaatatcgatcatattgaggtgatttccggcgcgacctcgctgtacggcggcggcagcaccggcggcctgatcaacatcgtcaccaaaaaggggcaaccggaaccgcaggtcgagttgcagctcggcggtaaaaccggctttggcggccataacgatcacgacgagaacgtggcggcggcggtcagcggcggcaacgacaacgcctcggggcgcctgtccgtttcttaccagcgctacggcggctggtatgacggcaaaggcaacaaggtgctgatcgacaacacccaaaccggcctgcagtattccgatcgccttgatgtgatgggcaccggcaccctcaacatcgacgatcatcaacagttgcagctgaccacccaatactacaaaagccagtccgacggcgaccacggcctgttcctgggagaaaacttcgcggcggtgaccggcaacgccaaggcctacaacagcggtagcttagattccgaccgcatccccggcaccgaacgccatctgatcaacctgcagtattccaacaccgatttcctcggccaggatctggtggcgcaggtctactaccgcgacgaaaccctgaccttctacccgttcccaacgttggcgggcaaagcgccgaactattacgtcagcagcattggcgcctcgcagcaaaaaaccgacttctacggcggcaaactgacgttaaacagcaaacctgtcgacgcgctgacgctgacttacggcatcgacgccgagcatgagagcttcaacgccaaccaacagttctttaacctggcgaaggcgcaacagtccggcggcatgacgctggagaacgcctacagcaccggccgctacccgagctataccaccagcaatctggcgtcgttcctgcaggccagttacgacatcaacccgatcttcaccctgagcggcggcgtgcgttaccagtacaccgaaaacaagatcgacgacttcgtcggctataaccagcagcaggcgatcgctaccggtgccgccgcctccgccgacgccattccgggagggaaaaccgactacaacaatgcgctgttcaacgccggcctgttggctcacctgaccgagcgccagcaaacctggttcaacttctctcagggcttcgagatcccggatccgggcaagtattacggcaacggcacctacgcgctgaacggcggccactaccagctgctgaaaagcgttaacgtcggcgattccaggctggaaggcatcaaggtcaatgcttacgagctgggctggcgctataccggcgataacctgcgcacgcaaatcgccgcctactactcgctgtccgacaagagcatcgccatcaacaaaaccgacatgaccatcaacgtcaatgcggataagcgccgcatctacggggtagaaggcgcggtggattatttctttgaagacagcgactggagcgccggcaccaacttcaacgttatccgttccgaaaccaaggtcaacggcgaatggaagaagctggtggtggataccgccagcccatcgaaagtcaccgcctatgtcggctgggcgccgggcgactggaatctgcgcttacagtcgcagcagaccttcgacgtgtcggacgacggtgattacaccaaggtcaattccactcagggccgcaagatcgatggctacaacaccctcgatttcctcggcagctatgccctgccggtggggaaaatcagcttcagcgtggaaaacctgctggacaaggagtacaccaccgtttggggccaacgcgcgccgatactgtacagcccaacctacggttcgcctgagctgtacagctataaaggccgtggacgtaccttcggcttgaactactcggtgttattctga

SEQ ID NO: 424452 - DNA, 744 bp, Serratia marcescens
atgatctctacaaccaccagacagattgtcctcgataccgaaaccaccggtatgaacaagcttggggtgcactacgaagggcaccgcatcatcgaaatcggtgcggtggaggtgattaaccgccgcctgaccgggcgcaatttccacgtttacatcaagccggacaggctggtggatccggaagcctacggcgtacacggcatcagcgacgacttcctggccgacaagccgaccttcgttcaggttgccgaggaattcctcgactttatccgcggcggcgagctggtgatccataacgcggcgttcgatatcggctttatggatcacgaattccgcatgctgcagcagggcatcccgaagacagagaccttctgtaccatcaccgacagcctgctgatggcgcgccgcctgttcccgggcaagcgcaacaacctcgatgccttgtgcagccgttatgagatagacaacagcaagcgtacgctgcacggcgcattgctcgatgccgagatcctggcggaagtctatctggcgatgaccggcggtcagacctcgatagccttccagatggagggggatacccagcaaaacgacgccgcgcaagagattcagcgcattgtccgcccggcgaccgcgatgaaagtggtctacgccagcgacgaagaagtgaaggcgcatgaggcgcgtctggatctggtggcaaagaaaggcggcagctgcctgtggcgcggagcgccggccgaataa

SEQ ID NO: 424453 - DNA, 468 bp, Serratia marcescens
atgctcaaacaggtagaaattttcaccgacggctcctgccttggcaaccccggccccggtggctacggcgcgatattacgctataagcagacggaaaaaaccttcagcgagggttttcgtctgaccaccaataaccgcatggaaatgatggcggcgatcgtggcgctggaagcgctgaccgtgccctgcgccgtgacgctcagcaccgacagccagtatgtgcgccagggcatcaccagctggatccataactggaagaagcgcggctggaaaaccgccgacaaaaagccggtcaaaaatgtcgatctgtggcagcggttggatctggccattcagcgccacgaggtaaaatgggaatgggtcaagggccacgccggccacccggagaacgaacgttgtgacgtgctggcgcgcgaagcggccggtaagccgacgcaggaagacgtcggttaccaaccggaagcctaa

SEQ ID NO: 424454 - DNA, 720 bp, Serratia marcescens
atgaaaccagcccatactctacaaaagctcaccggcccgcagtcttgggcggagctgccgtggggggaatactatcgtgaagccctcgagcggcagttgcaaccctggtggccaaagctgttcggtttccatctgctgaagatgggcatgctaagcgccgagctggccacggacaaatgcgcgatttcccatcaggtcaacgtagggttggagggggaagggctgcaggtgatcgccgatgcttatcaactgccgtttgccgccaagtcggtggatgcctgcctgttggcgcatacgttgtcctacgcggacgatccgcaccgcatgctgcgtgaagtagacagggtgttgatcgacgatggctggttggttatcagcagcttcaatccgttcagcctgctgggattgggcaaactggtgcccggattgcgtcgccgccagccctatgtcagccgcatgtttacccagatgcgactgctggattggctcagcctgctgaattatgaggtgttgtaccaggcgcgttttcacgtgctgccatggcaccgcaagggcggcaagtttttatgcactcatttgccggcgctggggtgcatgagcgtgattgtggcgcgcaaacgcaccttgccgctgacgcccacgccgatgaaactgggggcgagaaaaccttctctcagccgcgcggtaggcgcgaccaagagctatcgcaaactgccttag

SEQ ID NO: 424455 - DNA, 756 bp, Serratia marcescens
atgaatcttatcagcattcccgccttccaggacaattacatttggttattggatgaccggcaggggcgctgcattatcgtcgatccgggtgaggcgcagccggtgctcgaagcgctgcagcgcctgcagctgacgccggcggcgatcctgctgacccaccatcatcacgatcacgtcggcggcgtggcgcagatcttggcgcaatatcccggcctggctgtctatgggccgcaagaaaccgcggacaaaggcgccaaccacatcgtacgcgacggcgacacctttgccatcgatggccgccaatacaagactatcgccgtccccggccatacgttgggccatgtggcattctatagtgctccttatctgttctgcggcgacacaattttctccgccggctgcggcaggctgtttgaaggcagcgccaaacaaatgtacgactcatttcaacaactcgcgcaacttcccgataacaccttaatttgctgcgcgcatgaatatactctttcaaatcttaagtttgcgcgggctattttgccggaagatcgagagattgaaacatatcaacaacatgttgaagcgttaagggcaaaaggccaagccagcgtgccaaccacattgcaattagagcgcaaaattaacctatttttacgttaccatgacgctgatttacaaaagaaattaggctttaattcaccaccggaaagccttcattcagttttttccgaattacgcctgcggaaagataacttctaa

SEQ ID NO: 424456 - DNA, 1056 bp, Serratia marcescens
atgtactggatagtcgggcagattaagaaacgtaatatgccgatggaactggtactgctacccatagtggagagcgcttttgacccccacgccacgtcaagtgccaacgccgcagggctatggcaaatcgtgccgcaaacgggtcgcaattatggtttgaaaaacaatcagtggtatgacggtcgacgcgatgtcgtcgcctcgacaaccgctgcgcttaacatgatgcagcgcttgaaccgtatgtttaacggcgactggttactgaccgtagccgcctataacagtggtgaaggccgcgtgatgcaagcggtgaaggcaaacaaacgccaaggtaagccaaccaatttctgggcattgtcgcttccgcgtgaaacgtcaatctatgtcccgaaaatgctggcgctgagcgacatcatcaagaacagcaagaagtacggcgtgaaactcccgaaaacggatgaaacccgtgcgctggcgcgtatcgatgtcgggcagcagatccagctgactcaggcggctgagatggcggggctttcagtcaccaagatgaaagcgtataacccaggctacaaaaaaggcgttacggcacccaacgggccccattacatcatggttcccaaagggcatgccgagcaactgaaagactcgctggccgatggccagatcgccgtgactcagccaacgacgcagttggcgaagaacagcggtttgaccggtggcagttcatataaagtgcgctccggcgacaccttatcgggcattgccaagcggctgaacgttaagaccagcgatttgcagagttggaacaacttacgcgccaagagcgccataaaagttgggcaaaccctgcaagtggccagcaatactggcggtaacagcagtattacctatcaggttcgtaaaggtgattcgcttgccagtatcgcacgtcgtcacggcgtcgatattaacgacgtgatgcgttggaattcaacgctcggtaaaggcaacagccttcaacccggtctgaagttaaccctgtttgtcggcaacaagctgacgccggacacctaa

SEQ ID NO: 424457 - DNA, 669 bp, Serratia marcescens
atggtgtggaatattttcaaacagcagcgagccgactggctttcggtgctgaaaaaccatggcaaagatgcgcagctggtgctgttgcaagaagcgcaaactacgccggagctggtgagctacgctaccgccaactatctggcggccgatcaggtgccggcctttgtgttgccgcagcacccttccggcgtgatgacgctggcggccgctcatccggtttactgctgcccgctgcgcgagcgagagccgctgctgcggctgtccaagtcggccctgatcaccgtttatccgctgtataacggcgagctgttgatggtggtgaacatccatgcggtgaactttagtctgggagtcgacgtctacagcaagcagctggggccgatcggcgagcagatcgccagccaccgggggccggtgatcatggccggggacttcaacgcctggagccgcaaacgtatcaatgccttgtatgactttgccggtgagatggcgctgcgcgaagtgagcttcgccgacgatcaccgccgtaaggcttttggccgcccgctggactttgtgttttatcgcaatcttggggtcgtagaggcgtcggtactggtgaccagcgcgtcggatcacaatccgctgttggtggagttccacccggaaaaagattctcccgactggtga

SEQ ID NO: 424458 - DNA, 888 bp, Serratia marcescens
atgaaagcgaattcggacgagcttatcaccttcgtcaccgtagtggaaagcggcagcttcagccgggcggccgagcgcctgcagcaggccaactccgtggtcagtcgaacggtaaaaaagctggagagcaagctgggggtaaccctgctcaaccgcacgacacgccaaatcagtctgacccaggaaggcgaaaactactttcggcaggtgcagaaagtgttgagcgatatggccgcagcggaaaatgcgttgatggaaagccgtcaacgcccgcaggggctgctgcgcgtcgatgccgcaacgccggtcgtcttgcatctgttgacgccgctggtcgccgagtttcgtgaacgctatccggaaatgtcgctatcgctggtctcttcggaaaacttcatcaatttgatcgaacgaaaagtggatatcgcaatccgcgtcggcgagctgacggactctacgctgaaagcgcgcaagctgatggccagctatcgacgcatcctggcctcccccgcctacctggcgcaatatggcgcgccaaagacggtagccgacctggagcaccattgctgcatcggctttaacgatctgcccaatctgaaccgctggccgctgacctgtgccgatggtcgacaactggagatcgttccggggctgaccaccaacagcggtgaaacccagcgtcacctgtgcctgcacggcaacggcatcgcctgcctgtcggactttatgagtgatgaagacgtcaaacgcgggaacctggttccccttctggtaggagacacgctgccactcgaaatgccgatcaacgcggtgtactacagcgatagcgctgtcagtaaccgcctgcgcagctttatcgattttatcagcgagcggctaaagcaataa

SEQ ID NO: 424459 - DNA, 804 bp, Serratia marcescens
gtgagcatccctgcatttggtttaggtacttttcgccttcaggatcaggtcgttatcgactctgtgagcacggcactcgaattgggctatcgggctatcgataccgcacagatctatgaaaacgaagcggccgtcggccaggctatcgccgctagcggtgtgccgcgtgacgagttgttcatcacaaccaagatctggatcgcgaatctggctaagggcgccttaattcccagtctgcgagatagcttggccaagctgcagaccccgtatgtcgatctgacgctgattcactggccatcgccaaatgatgaggtgcctgtcgcagagtttatggctgaactgctggaagccaagcgattggggctgacccgtcagattggtgtatctaacttcaccatcgatctgatgcagcaggcgattgatgcggttggcgccgatcagattgcgactaatcagatcgaactgtcaccgttcttgcagaatgaaaaagtggtggcgttcgcacggcaacatggtatcgccatcacctcttatatgacgctggcgtatggcaaagcgttgcaggatgagacgatcaaaagcattgccgcccgtcacaatgcgacgccggcacaggtggttctggcttgggcgttgaaactgggctacgcggtgatcccttcttcgaccaagcgcgaaaacctggaaagcaacctgttagcgcagcaactgacgctgagtgacgaagatatggcgcagattgcggcgcttgaaagcaacggccgattggtcagcccggaaggcctggcacccaactgggactaa

SEQ ID NO: 424460 - DNA, 1431 bp, Serratia marcescens
atgtccgattcaacattccctaaaggatttttatggggcggcgctttagccgccaaccaggcggaaggcggctatcgcgagggcggcaaagggctgaccaccgtcgatatgatcccgcacggcccgcaccgcatggcggtcaaactcgggctggagaagcgctttagcctgcgcgacgacgagttttaccccagccacgacgccatcgatttctaccaccgctaccgcgacgacatcgcgctgatggcggagatgggctttaccgtgttccgcacctccatcgcctggagccgcatctaccccaacggcgacgagctgacgcccaacgccgaaggcatcgccttctaccgcagcctgttcgaagagtgccgccaatacggcatcgagccgctggtgaccctgtgccacttcgacgtgccgatgcacctggtgaccgaatacggctcctggcgcagccgcaggatggtggagttcttcacccgctacgcccgcacctgcttcgaagccttcgacgggctggtgaaatactggctgaccttcaacgagatcaacatcctgctgcacagcccgttctccggcgcggggctggtgtttgaagcgggcgaaaaccccgaacaggtgaaataccaggccgcgcaccacgaactggtggccagcgcgctggcgacgcgcatcgcccacgaagtgaaccccgccaaccaggtgggctgcatgctggccggcggcaacttctacccgtggtccagcaagccggaagacgtgtgggccgcgctggagaaagaccgcgagaacctgttctttatcgacgtgcaggcgcgcggcgcttacccctcctacgccgcccgcgtcttccgcgagaaaggcgtcagcatcgtcatggaaccggaagacgccgacatcctgaagcacaccgtcgacttcgtctccttcagctactacgcctcgcgctgcgcctccgccgacatgaacgacaacaacagcagcgccgccaacgtggtgaaatcgctggcgaacccgcacctgccgcgcagcgactggggctggggcatcgacccgctggggctgcgcatcaccatgaacatgatgtacgaccgctaccaaaagccgctgttcctggtggaaaacggcctgggcgcgcacgacgaattcaatgcagcaggcgagattgaggacgactaccgcatcagctacctgcgcgaacacatccacgccatggccgacgccatcgacgacggcgtgccggtgctgggttacaccacctggggctgcatcgacctggtggccgcctcaaccggcgaaatgagcaagcgctacggctttgtctacgtcgaccgcgacgaccagggcaacggcaccctcgcccgcacccgcaagaaatcgttctggtggtataagaaagtgatcgccagcaatgggggggatttggggtag

SEQ ID NO: 424461 - DNA, 1443 bp, Serratia marcescens
atgccgaagaactacgcagagatctcgcacgccatcatggccgccctgggcggcgcgggcaatatcgaggccgtgacccactgcatgacccgcctgagattcgtggtgaaagacaaaacgcggatcgacaccccggcgctgaaggccatcgacggcgtgctgggcgtggtgcacagcggcgagcagtgccaggtgatcatcggcaacgaggtggccaaggcctatcaggcggtgctggcgctcggcatgccgggcgcggcggcccccgccgccccggtgaaacgccaactcaccctgaagggcatcggcgccggcattctcgacgcgctggtgggcaccatgtcgcccctgatccccgccatcatcggcggctcgatggtgaagctgctggcgatgatcctggacatggccggggtattcgaaaaaggctcctcgaccctcgtcatcctcaacgtaatcggcgacggcgcgttcttcttcctgccggtgatggtcgccgcctcggcggcgctgaagttcaaaaccaacatgtcgctggcgatcgccatcgccggggtgctggtgcatcccaactttatcgatctgatggccaaggcggcgcagggccaggcggtggagttcgccttcatcccggtgacggcggtgaaatacacctacacggtgatcccggcgctggtgatgacctggatcctgtcgcacatcgaacgcggggtggatcgcatcaccccggcggtgaccaagaacttcctcaaaccgatgctgatcgtgctgctcgccgcgccgatcgccattctgcttatcgggccgctcggcatctggatcggcagcggcatctctgcgctggtctacaccgtgcacggctatttgggctggctctccgtggccatcatgggggcgatttggccgctgctggtgatcaccggcatgcaccgggtgtttaccccgaccatcatccagaccatcgccgagaccggcaaagaaggcatggtgatgccttcggagatcggcgctaacctgtcgctgggcggcgcttcgctggcggtggcgctgaaaaccaagaaccgcgagctgcgccagaccgcgctggccgccgccgcctccgccatcgtggcggggatttccgaaccggcgctgtacggcgtggcggtgcgcctgaagcggccgctgattgccagcctgatcagcggcttcgtctgcggcgcggtcgccggcatcggcggcctggccagccattcgatggcctcgcccgggctgttcaccagcgtgcagttcttcgatccggccaacccgatgagcatcgtgtgggtggtggcggtgatggcgctctcggtggtgctgtcgttcgcgctcacgctaatactgggcttcgaggatctgccggaaaacgccgccgcgcccggccaaaccgcaccggcggcgaacgccgccagcgcaacgcattga

SEQ ID NO: 424462 - DNA, 1023 bp, Serratia marcescens
atggcaacgatactcgaggtggcgaaaaaggccggcgtttcaaaggcgacggtgtcgcgcgtgttgtccggcagcggctatgtcagcgaggagaaacgcgcgttggtggctaaagccatcgcggaaaccggctatcggcccaacctgctggcgcgcagcctggcgaccaacaccactcaaaccctcggcctggtggtcaccaacaccctctacagcggcaactacttcagcgaactgatggcgcagtcggcgcgcatcatggaggcgaacggccgccaactgatcctggcggacggcaagcacaccgccgaagaggagcgggccgccattcagtttttgctggatctgcgctgcgacggggtgatcatctatccgcgttttctgtcgatcgcggaaatggacgagatcgtctcccaacaccgccagccgattctggtgatcaaccggcggctgcgactgaacgacagctactgcatcttcagcgatcagcacgccgccggcgcggcggcggtggcgcacctgatcgcgcgtgggcatcgcgacatcgcctttatcaccggctcgctcgattcccccaccgggctggagcggctttccggctacaaatccgcgctggcgcagcagggcatcgcggttaacgaggcgttgatcgtcgaggggaaatggcacgcgcaaagcggtgtggcggcggtcgatgcgctgctggccggcgggcagccgttcagcgccatcgtcgccggcaacgacgagatggccatcggcgcgatgaagcggttggcggagcgcggcgtggcggtgccggaggcggtatcggtcatcggcttcgacgacatcccgctggcaccctataccgtgccgtcgctgtcgagcatgaagatgccggtcaccgagatgatccaggagaccatcaaccgcctgctgtcgatgctggacggcggcgagctgagcaagcgccccagcttcccggcctgcctgatcgagcgcgagtcggtggcggccgggccgtattggggtggtaactga

SEQ ID NO: 424463 - DNA, 879 bp, Serratia marcescens
atgtctacgtccccccagcggttactgcaggaatatcatcagcaagcacaggactatgcgctgtcggacatgctgcgtgcgcggcgcggcgtgttggccgccgatgtcgacatcgagctggatgaaccccaccgcgcggggctgaagatcgtggtgatccgccgcgggcgtctgcgctgtgaaagcggaacggggccgcaggtggagctgaacggtccttcgctgttgctggccgccgggcgggacgactttgtgttgaacaacctgttccaggccggcgaaccgctcgattacaccctgctgcagttctccgccgcctggctggaacagaacgatgtccgcctgccgcccggcctcgatgggcggcggcatgcgcaattggtgccgctggcggcgccggcagcgctgatcggccaggcccggcaactgttcgcctgcccgctgcacgagtcgcagcgcgggctgtggttcagcgccagggccaacgagctggcggcgcattgcctgcatcaatgctggaaccgcagcgctgccgcgccgtctgttggcgtgcacctggccgcgcgcgatgtggcgcgcctgcagctggcgcgcgaaatcctgttggcggagatggagcagccgccgagcctggatcaactggctcagcgcgccgggttgaacacccgcaaactcacgcaagggttccgccagctgtttggcgccagcgtattcggcctgctgcaggagcaccggctgcaaaccgcttggcgcttgctgagcgagcaggatctgcacgtttccaccgtcgcctggcaggtgggttatacgccggcgcacttctccgtcgccttccgcaagcgtttcggcgtcatgccctgcgacgtcaaaaagcgttag

SEQ ID NO: 424464 - DNA, 1677 bp, Serratia marcescens
atgctgagtgacctgcgggcgctgacgcgtcctttccgcatcatgctgtattccgcgctggcgctgcaggcgctggccggcgtcagttcgctgtttccatggctggcgatagcccggctggtggacgccgatccggcggcctatcccttctggcttggcgtcgccgccggtggcctggcgctgtggctgttcgcccaaacgctggcgctgcacctcactcatctgctcgacgcgcgtttgtgtcatcggctgcgcagccaattggccgccaagctggtgcgtctgccgctgaactggtttgtgcggcagggcgagagcggcgccgcccgggcgctgtcgcaggacattcaggcgctgcatcagctggtggcccatgcgccggcggagttggtgcagctggccgtggtacccggctgcgcgctggcgctgctggcggcggtgcagtggccgctgctgctgttcgcgctgatacctttgctggcggccgcgctgctgtttcacgtcatccgttcgccgcacctgcggccggcgtttgaacaacgcgatcgggcgtttcggcagttgaacgacgattatcggcagctggcggcgcatccgctgttggcgcgccagtttcccggtgcgggcatcgaagcgcgtgcgcggcagagcctgcggggctttctcgccgcctttcaccgttggctgcggcgtatcggcgcgctcggcgccgtgacccaattactgctcagcgccgcgctgtcggccggttggctgttgctcggcgcccgctggctggtgcccaatctcacgctggcggagctggcgctgttcgtgttgctgttgcgcagcgtggcgcaaccggtgatggcgatggggcacggcggcgatgcattgcgtgcggcgacgctggccgccggccgcattcgggcgctgctggcgcatcccgaaatacgctggggagggcgctcgacgatcgcttcggcgccgcagggggcggcgctgcagctgagcgatctcggttgccggcacgacgaacgctggttgctgcagggcgtcaatctggccgtcgaaccgggagaatggctggcgattgtcggggcgtcgggcagcggtaaaagcacgctgctgcggttgatcgcccgttatagcgagccggatagcggaacggtatcgctcgacggcgtgctcgccgacgcgttctcggcgcaggcattcaatcagatggtggccgtggtgccgcaggagaatacgccgccggcgatgtcgctgcgcgacaacctgacgctgttcgtcggcggggccgacgatgcgcagctgcggcgcgtgctggccgtgctggggctggcggcgcgtttgcaggataggttggacgatacgccttcgctttccggcggggaggcgcagcgtctcgccatcgcccgggcgttgctggcgcggcggccgctgctgttggccgacgaaccgacttcggcgcaggatcggcaaaatcgcgaacgcattctgacggcgctggcgcagctgcccgccacccggctggtggcaacgcacgacgcggaactgtgccgccgcgccgatcgggtggcggtgctggcggaggggcggttgctggcggtcggcacgcccgccgagctggcggatcatccggcattgttggcggcgttggccgagcgccaggaggcggacgatgaagtttga

SEQ ID NO: 424465 - DNA, 1638 bp, Serratia marcescens
atgaagtttgagttggtgaaagcgttggccccggcgctgttgctgatggcgctggccgccgcgttggatggcgtctgcgccttgctgctggcggcagcggtggcgaactggcagcaaaatcccggccattggctagggctgctggcgctggctacgcctctcttgctggcggtgcagtatgcggcggcctcccgcggtttcttcgccggcggcgcggtgatgagcgcgttgctgcgggcgctgttccgccgtctgccgcgcgcgctgtcgccgcaggagcaggcaccgggtctgttggccggggccatcggtcagacgatgtcggcacccgcgcacctgctggcgccgttggttggcgcggtcgtcacgccgctggcgctgatcgccgggctggcctgcctgagcccgggagtggcgctgatgctgctggcggcctgcgtgctgttgatgctggtgttgcgcggttcggcggcccggctgcaccggcgagagcgagagcttggggaggccaatcagagtattgaaggggcgctgatgcagtttgcccgtcatcaggcattgctgcgcttcggctacgggcaggcggccgccgccgaggcgttgacgcaacggttggatgaccatcatcgggcgcacgccgcgctgctgcgccaaagcttgccatatcacctgttgttcagcgccgggctgcagctgacgctgttggcggcattgtggttcggtgcccatgaggtgctggcgcagcgcctgaacgtcgcccaatggctggcgctgatgattgtcctggcccgcttgttggagccgttgcttcagctttctcacctcgatcaggcgctgcgtcagttgaagagcgcgtgggcgcaactgcggcaggcgctggcgtcgcccacgttgccgctgccggaacgggacggcgccgcgccgcaggacgacggcatcgcgcttgaggcgctgagcctggcggcggcgcacggcggctggcggctgcgggaaataggcggagcctgcgccgccggagagatgttggcgatcgtcggcccttcgggcgccggcaaaagcagcctgctgagcctgatggcgcgcacgcaggatccgacggcggggcgggtgttctacggcggccgtgacgtgcgcgcgttgtcggcgcggcaattggcgggcggtcgcggcgtgatgtggcaagacaatcgcctgctgcgcggcagcgtgcgctggaatctgacccaggggcgaacggatatcggcgatgagcgtctgctggcgctgttggcggcgctggatctgccgcccgacgtgctggaagaagaggtcggcagcgacggcgatcgtttctccggcgggcagaagcaacggctgtgcctggcgcgcacgctgctgcagggggcgccacgattgttgttggacgaaccgggcgccagtctggatctgcgcaacgccgagcgcgtggcggccctgctggccggctggcccggcacgcgggtcgtcgtcacccacgatcccgcgttggcctgtcgggcggatcgagtgtgggtgctggaaggcgggcggctgacggcggcgggcagcccggatgcgctgcgcgaggcggggggctggttcgcccgtttctgccaggcgaaaatgaccggcgatcgatag

SEQ ID NO: 424466 - DNA, 2139 bp, Serratia marcescens
atgcgactcattcacctctcaccagtggcggccgcgatgcgccacggcgcgttgctgtgcgcgctgtgcggcaccggggcgctggcgcaggatgcgccggccaaaacggacgtaaaagaagataccctcaccgtgaccgccggcgcggcggcgcgggatgactatgtggctcccggcgtcaccacgctggggaaaatcccgctgaaaccgcgtgaagtggcccagtcggtcagcgtgatcgatcgccagcagatggagcagcagaatctcacatcgctggatgcggtgatgacgcgcgccaccggcgtcaccagcgcccccttcgtgttgctgaccaccgcgtggtatgcgcgcggcttcaagatcgattcgttcgaactggacggcgtgccgacgctgctgggcaataccgccagctcgccgcaggacatggcggtgtatgagcgggtggagatcctgcgcggctccaacggcctgctgcacgggctcggcaacccggcggccacggtcaacatggtgcgcaagcacggactggcgcaaaaccgcgcgcagtttaccgccagcgccgggagctggaatcagtatcgcggcgaagcggacgtgggcggcccgctgaacgcgtcgggcagcgtgcgcggccgtgcggtgatggcatgggaagatcgcgattatttctatcgcgtctcggatcagaaaacccgtttgctgtatgccaccgtcgacgccgatctgacgccggataccctgctgcgtgtcggcgcgcagtaccaaaccatcgattccgtcaccaatatggccggggtgccgatggggaaagacggcagcgatctgcacctgccgcgcagcacctatctggacgtggactgggatcgcttcaaatgggacaccacgcggctgttcgctgcggtggagcatcggctgaacgacgactggcaggtcaagctgagcggcgactatctgcacgccaagtctcgcctgctgtatgccggcgcctggggcaacgtcgatccggccaccggcgacggcgcggcgctgatgggcggcgcctatcgttttcgcaatcagcagctggggctggacgccagcctgaacggcaagatcgacgcctgggggttgcggcacgagctggtcgtcggcgccagctacacccatgccgaagaagaacagttcactgcacggtttgattctgtgtttcaggtgccggtgaacgtctaccgctgggatccgcacggcgtgccgaagccagcgatcggcgcttacagctcgccggggtcgaccaaaaccgttcagcgcggggtgtacggcatgggccgcattaaactggcggagccgctgacgctggtggccggcgcgcgcgaaagctggtggcaactgcgttcgcccagcgacactctggaagagaacgcgcgtctgaccccctacggcggcctgatctgggatttcgccaaagactggtcgtggtatgccagctacgccacggtgtttcagccgcagagcggcaaaacctggagcgggcagatgcttaagccggtggagggccgcacgctggaaagcggggtgaaggcgtcgctgatgaatggcgcgctcaacctctcggccgcggcgttccgcatcgatctggagaacaacccgcaggtggatcccgatcacccgggcggcggtttcgatacctggtatatcagcggcggcaaggctcgcagtgaaggcttcgagctggaagggcgcggatacctcacgccatggtgggacgtcacgctcggctacacctataccgacacgcgctacacccgcgacgccggcaaccaggggcgcgcctacaacagcctgacgccgcgtcatatgctgcggctgtggagcgattacgacctgccgtgggatcagcgcaagtggagcatcggcggcggcatccaggcgcagagcgcgttcagcagcgccaatggcgcgacgacgctgcgccagggcggctatgcgctggtcaacgcacggctggggtatcgcatcgacgagacctggtcggcggcgctcaacgtcaacaatctgttcgatcgccgctactacgcagggcttttctcgccgcagtggaacaaccgttacggtgaaccgcgcaacctgatgttcaccgtcaaggccgagttttga

SEQ ID NO: 424467 - DNA, 249 bp, Serratia marcescens
atgaatatgcgcgtatgggcggcgtgcctcggcagcgccatggggggcgttaccctggcgctgcttttggcgcgcggctatccctcggccgacccgctcgatcggctttacggcgcgctgtttctggcgttgttcggcggcatcgcgttgctgacgtatagcctgctggcgccggactggcgtcgcacgctgctgcgcgcctggttgtggtggccgctgccgctggcgctgctggaggcgtggcgatga

SEQ ID NO: 424468 - DNA, 1422 bp, Serratia marcescens
atgaacgccgtcgcgcgacgggctttggcggcgctgcatcggggctgcggcgcgttgttcggctgcgcgctgttcgtggtcctgttcaccggctgctggagcctggccggcgacagtttcacgctgtggtggaacggcgtgacgatgagcggcgagcaacggccgttggcgcagctgctggacgacgcgaaagcctacggtgaagacggcgcggcgccttacgtcatgctgccgagcgcgcgttatccggtgattcgcttttgccgcgccccggacgactgcgccctcgcgttgagcgccgtcagcgggcggctggtcagcctgacggcgccgaccacgctgttggtgacgctgcacaagaacctgtttctcggctttcccggtcgggtgtttctcagtttgttcggcatcgcgttcgctttgctgctgatcagcgggattgcgctgcatggtcgacggctgcgccagctgttgcagctgcggcggcgtcaggggctgcgggtgctgctgttcgatctgcacaatctgttggggctttggtgctatccgtggctggtgatgttcgctttgaccggcgcgttatccggcctcggcgcgctcggtactgtgctgctggccgaccgcgtcagccccggtgcgccgcagcgggtgatggcgcagctgatgggcggtgcgcaacctgcaccgcccttgcctgacgccgggcgtactcttgcgcagacgatggcggcgctgcggcgccaggcaccggaatttacgccgcaaaccctgcagcgcgcgccggatggtgcattgctggcggtgggcggcgtcactcgcggtattcccagcagcgcgctgttcgagcaatttcgtttcggcagcggcgagcagccggcgctgatgcggcgcagcgccgctcatcaggggccatggacgcgcgcgttcatcgccgttcagccgctgcactatggccaatacgcctggttgccgcgggcggcggcggcggtgagcgcgctgcattttttggccgggttcggcgcggcgacgctggcgctgagcgggctgggattgtggtgcctacggcagccgcagcgccgtgccgcgcgctttatcaccggcgtctgctgtggtctgacggtggcgggaagtctgctgttggccgcccggccgctggcggcgttccctgccgcctggctgttttggggaatgtggggcgcggtggcgctgttggcgtggcgagtttggccggggtggttattgttcctcagcggaatggccagcggtacggcgctgctggtggcggcgctcggccatatgctcagcgccggccccggcctgtactggctggacagcgctttactgttagtcagcgcggctctgttcgccgccggctccttgttatggcaatcgcgcggcgcctggccgcgccaattggagtaa

SEQ ID NO: 424469 - DNA, 1227 bp, Serratia marcescens
atgcgacaactattgcaacatcggcatctggtgctgaccctggggctgctctattttagtcagggcatcccgatcggcatcgccatggatgcgttgccgaccctgctgcgccatgacggcgccagcctgcaggcgctggcgtttttgccgctggtggggttgccctgggtggtgaagtttctttgggcgccgctggtggataatcactggtcgccacgcttcggacgccgccgcagttggattattccgctgcagtgcgtggtgacgctgtgcctgatcctgctcagcgcggtcggcatttccgcggcggcggcagggctgtgcgtcgcgctgctggccgtcgcgtcgctggccagcgctacgcaggatatcgccactgatggcatggcggcggaacacgtcagcggtgagttgctgtcgcgcgtcaatgccattcaaatcgccggggtgatgagcggcttcttcgtcggcggggcgggcatgatgatgctgagtgcccgggtaggcgtgcagggtgcgctgctggcgatggcgatcttccctgccgtcagcctgctggcgattggccgcttccgacaacacgccgatctgccgcccgaacgcgccgattcgcgtccggccagcctgctgcgcacgctgcgccgtcgcggcgcggcgcggttgctgacgctcacgctgctgtcggcggtgaccgcggtatccggcttcgggttggccaagctgtttttaaccgatcacggttggacgccggcgcaggtcggccagatcggcatggccggcggcatggtgacgctggtgctcgggtgcggtggcggcgcctggctggtgagcctgctcggggtgtggaaggcgttcgcggttggcctgggttgtgcgctgtgcgcctcgctgtgctggctggcgatggccaactggggtctgcaatccggcggcgtgatcgccgcggtgatgggaggcgcgctggcttccggagtgacctcggtcgctatcatgactgccggcatgcagttcgctgcgcagggcgatcaggcgggcacagacatgaccatggtgcaaagctcgcgcgatatcggggaaatggtcagcaatatgctgatggtggggatgaccgccagcctgggctaccgtttttccttcgcgttggcggccgcgctggccgtgctgctgctgggcatcaatctggccagcaaccggcaccctgcggcggtgcggcggcaagaagagtag

SEQ ID NO: 424470 - DNA, 423 bp, Serratia marcescens
atggcaaacaacgtgatgctagtagcattaaaggcgcttaacctgtgcgcgagcacttatatcgtcatcaaactgagcacggtattagccatcggcatcatgttccttattgtctcttacgccggcgtgggggacgttgggctgtccaatctcctcgccggggcattcattatcctgccgctgttggtcgtcgtcggcggaacacttatcgtctgcgccgtcgccgcctatctcaacctaaaggcgccctatcgtaaaaaagcgctgttctttagcctgctgctgggcagcatctctgcggctggcctgctgttgccctacacgcgcgagttcgcgctatccacggcagccgccagctccctggcgttgggcagcgcgctggggatttttgctttgtcgaagagacgggttcaagcgttgtag

SEQ ID NO: 424471 - DNA, 963 bp, Serratia marcescens
atgaaacccattgcagtcaccatcctgaccggctttttgggcgccggcaaaaccaccctgctgcgccacatcctgaacgccgaacacggctataaaatcgcggtcatcgagaatgagttcggcgaagtgccgatcgacgacgcgctgatcggcgatcgcgccagccgcatcaccacgttgagcaacggctgcatctgctgcagcaaatccaacgaactggcggacgcgctgctggatctgctggatggcgtcgacagcggccagctggcgttcgatcggctgatcatcgaatgcaccggcatggccgatcccggcccgattacccagacctttttctcgcacgagatcctgtgcgagcgcttcctgctggacggcatcatcaccctggtggacgcggcgcacgccgagcagcaactgagccagttcagcatcgcccaagcgcaggtgggctacgccgaccgcatcctgctgaccaaaaccgacgtggcgccggactgcgaagcgctgatccagcggctgcagcggatgaacgcccgcgcgccggtctacaaggtgacgcacggcgacatcgatctaagcgtgctgttcgacatcgaaggctttacgctgaacgacaagctcaacctgacgccgcccgccccgctgttccgccgcatcccgcagccgcagagcgacatccgctcaattgtggtgacgctggaacggccgctgccgctgatgcaaatctccgacgtgatggaaggcctgctgctggaatacgccgacaacctgctgcgctacaaaggcattctgtctatcgaagacgagccgcgccgcctgctgttccagggcgtgcagcggctgtataacgccgactgggatcgggagtggctgcctggtgaggaacgtcggagcactttggtatttattggtgtggatctgccggaggaggagattcgtggaaggattggggggttggggtaa

SEQ ID NO: 424472 - DNA, 204 bp, Serratia marcescens
atgttcggaaatctcggccaggcggggaagtacctcgggcaggcggcgcgcatgttggtgggcgtgcctgactacgatacctacgtccagcacatgaaagacaaccacccggacaagccggtgatgacctataaagaatttttccgcgagcgccagcaagcgcgctacggcggcgacggcaaaggcggcatgcgctgctgttaa

SEQ ID NO: 424473 - DNA, 2181 bp, Serratia marcescens
atgaaacgagaggggattttaaagcacattccgtggatgctgctggggatactcggcgcagcctgcctcggcgtggtggcgctgcgccgcggcgaacacatcagcgcgctgtggatcgtcgtcgcttcggtggcggtgtatctggtggcctaccgctactacagcctgtacatcgccaccagggtgatgaagctggacgccggacgcgccaccccggcggtggtcaacaacgacggcctgaactacgtgccgaccaacaagaacgtgctgttcggccaccacttcgccgccatcgccggcgccgggccgctggtagggccggtgctggccgcgcaggtcggctacctgcccggcacgctgtggctgctgggcggcgtggtgctggcgggggcggtgcaggactttatggtgctgttcatctcctcgcgccgcaacggcgcctcgctcggtgagatcatcaaaaaagagatggggccgataccgggcaccatcgcgctgttcggctgcttcctgatcatgatcatcatcctggcggtgctggcgctgatcgtggtgaaagcgctggcggaaagcccgtggggcgtgttcaccgtctgctccaccgtgccgatcgcgctgtttatgggtatctacatgcgctacctgcgccccggccgcgtgggtgaagtgtcaatcatcggcatcgtgctgctggtggccgccatctggttcggcggcgtggtggcgcacgacccgtactggggcccggcgctgacctttaaagacaccaccatcaccttcacgctgatcggctacgcctttgtctccgccctgctgccggtgtggctgattctggcgccgcgcgactacctggcgaccttcctgaaaatcggcgtgatcgtcgggctggcgatcggtatcgtgatcctcaaccctgagctgaaaatgccggcggtcacccagttcgtcgacggcaccggcccggtgtggaaaggcaccctgttcccgttcctgttcatcaccatcgcctgcggcgcggtctccggcttccatgcgctgatcgcctccggcaccacgccgaagctgttggccaatgagaccgacgcgcgctttatcggctacggcgcgatgctgatggagtccttcgtcgccatcatggcgctggtggcggcttccatcatcgagccgggcctgtacttcgccatgaacaccccgccggcggcgctgggcatcaccatgccggatctgcaccgcttaggcaccgaagacgcgccgatgatcatggcttcgctgaaggacgtcaccgtgcatgcggcggcggcggtcagttcctggggcttcgtcatcagcccggaacagatcctgcagaccgccaccgacatcggcgaaccttcagtgctgaaccgcgccggcggcgcgccaacgctggcggtgggcatcgcccacgtgttccatcagatcattccgggcgccaacatgggcttctggtaccacttcggcattctgttcgaggcgctgttcatcctgaccgcgctggacgccggcacccgctccgggcgctttatgctgcaggatctgctgggcaacttcgtgccgttcctgaagaaaaccgactcgctggtggccggcatcgtcggcaccgccggctgcgtcgggctgtggggctacctgctgtatcagggcgtggtggatccgctcggcggcgtgaagagcctgtggccgctgttcggcatctccaaccagatgttggctgccgtggcgctggtgctgggcaccgtggtgctgattaagatgaagcgcacccaatacatctgggtgaccgtgctgccggcggtgtggctgctgatctgcaccacctacgcgctggggctgaagctgttcagcgacaacccgcagttggaaggcttcttcttcctggccggcgagtacaagcgcaagatcgccgaaggcggcgccgagctgagcgcccagcagatcgccaacatgaaccacatcgtggtgaacaactacaccaacgccgggctgagtattctgttcctgctggtggtgtacagcatcatcttctacggggtgaaaaccgcgatggcggcgcacaagaacccgaaacgcaccgaccaggaaacgccttacgtgccggtgccgcaggccgcgcccgccgacggcgtaactgagggggaggtcaaagtttcgacccagcattga

SEQ ID NO: 424474 - DNA, 885 bp, Serratia marcescens
atgaaaaccatgccaaagctggctcatctgacgatgttcaaggacattgtccactgtggaagcttgcacgaggccgcgaaaaagctggccatctcgcagccgacgctcagccgggtgctgaaagagctggaaatgaccatcggcgcgcggctgctggagcgcagcaaccgcggcgtgcgcctgacggcggtcggcgagctgttttaccggcgaatagacgccgccaccaatcagttgctcaacgcgtttgacgaactgcgcggcctgagcgctgacggcgagaagcgactgcgggtggggatgagcgtcgatccgctgctttgctatctgcctcaggtgctcgaaggcttcaaccgccgctacccgcatacccgggtgacggtggtggaggacggcccggaaggcctgctggcccggctgcgaaactgcgagctggatttggcggtcagcagcctgaacggcgcggcgggcggcgccgatctggccatgcaggcgctgaaaagcgagcgcttctcgctctatcagggaggcgatctaaccgcagccgggcaaccgccggccgaggccaaatgggtggtgccgcgctcctgctcggtggggcatgccgccatccgcgagatcgccgaacgctacacgccgcacggccagatcgtcgagaccgactcctttctggcgacctggtgcctggtcaggcagcagggctatatcgcgctgctgagcgatcgggtggtcgcgcactacgccccgcagctgcacctgcagaaaatcccgacgcaggagatagacatcagcgcgcgcttttacgtctttacccgccatgagccggcgacgccgccgctcagcgccgcgtttatccacctgctgcaggccatgcagacggcctga

SEQ ID NO: 424475 - DNA, 693 bp, Serratia marcescens
atgcatttcattcatacactgctgacgctgctgaccgcgtccgtcctgggcgccgccatcggctacgaaagacagttccgccagcgcaccgccgggctgcgcaccaacacgctggtggccaccagcgcggcgatcttcgtccatctggccatgaccatcgacggcagcggcggcgcggtgcgcgtcatttcctacgtggtctccggcgtcggctttctcggcgccggggccatcatgaaagaagggatgaacatccgcggcctgaacaccgccgccacgctctggggctccgcggcggtcggcgcctgcgccggctgcggcctgtacggcgatgcgctggccgccacgctgttcgtgctcgccgccaacaccctgttgcgcccgctggtcaatatggtcaacaagcagcccttcaatgacgttaacggcgagtctacctaccagatttgcgtcattgccttcgagcatgagcagcgtgaggcgctggccaaattcaaacaggtgctgcaaggggaaaactgctttatctcgcatctggatatcgaacccttcggcgacgatgacgtggagatcaccgccacgctgatgccggcctccgtcaccacgccggtgctcgaccagaccatcaataaattgctgaacgacagcatgatgaaacaggcctattacagccgcatcgccggctccggctga

SEQ ID NO: 424476 - DNA, 780 bp, Serratia marcescens
atgttggtaaaaaaaaccacgctgctgacggtcaataacgtcagcaaaagcgttcagcctaccggtaaagaaaaacgtctggtgctgaatgaaatcaatttgcgcctttacgacaacgaggtcgtcagcattttggggcagtccggctcgggtaaatccaccctgctgcgcatgctttccggcctgatcgcgccggatctgggcaccgtgatgctgggggataaaaaagtctcggggccgaatccgcagatcaacatggtgttccagaccttcgccattttcccgtggctgaacgtctaccaaaatatcgccttcgggctgcaggcgcaggatttgccgccgcaggtggtcgaagcccagacgctgaaaatgctcgatctggtcgggctcacgccctaccgcgacgcctacccgcgcgagctttccggcggcatgcgccagcgggtcggcttcgcgcgcgcgctggcggtagaaccgatgctgctgttgctggacgagcccttttccgcgctggacgtctataccggcgaacacctgcgcagcgatctgctgcgcatctggagcacgcgccagatcaaaacccgctccatcgtgctggtcacccacagcgtagaggaggcggtgatgatgtctgaccgcatcctcctgctgggcgccggcaccctcgacggctgctatcacatcacgcagcgccgcgaggcgcgcacccgcgaggggatgcagcctctgacggacaaaatcagcgagacgctcagccggcagatcgccgccgcgcactga

SEQ ID NO: 424477 - DNA, 1083 bp, Serratia marcescens
atgaaccataaaagcgtgctgatgacgctggtcatcctgctgccggcggccgccaccggcgcggaaatcgtcaataaagacggcaataaactggatctgtacggccaactgaacggcgtgcattacttcagcagcgacgccgacaataacggcgaccgctcctatacccgcttcggcttcaaaggcgagacgcagatcggcgacgggctgacggggtatggccaatgggaatatcaggcagggctcgatcagccggagagcgccgggccgggcgacagctatacccgcctgggctttgccggattgacgttcggccactggggcagcctggattacggccgcaactacggcctgctgtatgacgtggccggctggacggacgtgctgcctgaattcggcaacgacagctacgaagcggccgacaactttatgaccggccgcgccaacggcctgctgacctaccacagccgcagcctgggcggtctggtcgacggcctggatctcggcctgcaatatcaggggaagaatcggggggacaacgctcaacgggcgaaggatatccagacgcaaaacggcgatggctacgcattttccgccacctacgacaccggcgtggggctcaacgttggcgccgcctacgccaactctgcgcgcacgctggcgcaacagcgcttcggcctggctgacggcgatcgcgcccgggcctggacgctggggctgaaatacgaccaggacaacctctacctggcggcaagctacgcgcgtaccgagaacatgacctacgtcgacggcgatcgctacgccggcttcgccccccgcgcagacgccgtcgaggcggtcgcgcagtatcacttcgattccggcgtcacgccctcgctggcctacctgcaaacgcgcggccgcaacctgcccggcattggcgatgccgatctggttaaatacctggatctggcgctgaattacagcttcaacgccaacatgtcgacctacgtggagtacaaactcaacctgctgcaacggcagaacgccgtcggcgccggcgccgacgacatcgtcgaaaccggcatcatgtatcagttctga

SEQ ID NO: 424478 - DNA, 792 bp, Serratia marcescens
atgctgactcaagacgtgattatcagcgcccgccggctgaacaagacgtttatcggcgaaaacaagcgccccaaacccgtgctgcgcgacgtgacgctgaccgtgcacgccggcgagttcgtcaccattctggggcaatccggctcgggcaagtccacgctgctgcgcatgctggccgggctgatcccaccggacagcggcacgctcacgctggcgggcaaaccggtcgacggcccgagcgccaacgtcggcatggtgtttcagtcctacgcgctctatccctggctgacggtgtacgacaacatcgccttcggcctgctggcgcaacggctgccgccgcagacgatcgccgagcggctgggagcgctgctgcgcctggtgggcctaaccggctatgagcacgcctggccgcgcgagctctcgggcggcatgcgtcaacgggtgggcttcgcccgggcgttggcggtagagcccgacctcttgctgctggacgaacccttctccgccctcgatatctttaccgcgcaaaaactgcggggcgacctgctggcgctgtggggagacaaccggctgcgcacgcgcgccatggtgatggtgacgcacgacgtcgaagaagcggtgctgatgtccgatcgggtgctgatcctggacgcgaccagcaaacggatcgacgacgagttcagcgtcaatatcccgcgtgcggcgcgcaaccgggacagcctgcggcacctcaccgatcggatccgcagctgcctgtacaaaaaaatcgcgcaagcgcaatcggccggttaa

SEQ ID NO: 424479 - DNA, 1722 bp, Serratia marcescens
atgcaaaataaccggggtacatctgttttcagaaagtcttatttaaatgactttatcgttatcgccatcggtgtttttttcattgccttttttattcgtgcctggggtgacatgcacggtgacttcaatgaacaaaacgtctctgccattagtcttgatgcctggaacctgctttattattcgctcagaaccagcatgcgctttctcctcggcatggcctggtcgctgctgttttctgtggtattcgccgtgctggccgcgcgctatacgccactgcgccgggtgatcctgcccttcgtcaactttatggagtcggtgccgctggtggggttcctgaccttcacgaccgtgtattttctcaacctctacccgcacagcgtgatggggctggagtgcaccgccatcttcgcggtgtttaccggccaggcttggaacatgatgctgacgctgtatcagacgctgcgcatcgtgcccaaggagctggatgaagccgcccgcagcttcaattacaacccgtggcaacgcttctggcggctggagttcatctattcggtgccgggcctgctgtggaacgccatggtgtcgcaatccgccgcctggttcgccctggtggcctccgaagccattccggtcggcgatcgctcggtcgaactgcccggcgtcggctcctacatcgccgaagcgctggcgcagcagaacgtgccggcgatcctgtatgcgatcgtcgcgctggccgccaacatcgtgctgctcgatcagctggttttccgcccgctggtgcgctataccgcgcgcttcaaatacgaagacgtcaccgccagccggccgctcggcaatccgtggttctacaacagcctagccttctcgcacgtcggcgcggcgctcggccgcacgctgcgcgcgctggctgacctgtggctgttcaagctgccgcggctgtggtacgccctcggcctgcaccgcctgttcaggctcaccgccaaggggaactggctgtggcgcagcctgtggtatctcggcgtggtgctggcctgcgtctggttcggttaccggctgtgggaatacttccccaaacagtacttcgccatgctgccggaatggatgctgctcaccaccgcgcgcgtggccgcggccatgctgctcagcgtggcgatcttcacgccgctgggggtgtggatcggcatgaatccgcggctggtgaagatcttccagccgatcatccagatcctggcggccattccacccaacattttctacccgctgatcgccgccttcatcgccatttatcatcaggatctcggctggtgggccatcccgatgatcatgctgggcacccagtggtacgtgttgttcaacgtgatcgccggcgtttccgccattccgacgcagatcaccgaagtcagcgaaaccttcgggctgcgccgcttccgctggtggcgctactacatgctgccggcgatcttcccctacatcgtgacgggcatcatctccgccgccggcggcgcctggaacagcgccatcgccgccgaggtgatccagtggggcagtaccaccctcagcgccaccgggctgggcgcgtttatttccgtcgtcaccgacgccggcaagaacccggagtccgcactgggctgcgccgccatgtgcgcgctggtggcgctgtgcatcatcttcgtctggcaaccgctgtatcgcatcgcggaaaccaaattcaaatatgactga

SEQ ID NO: 424480 - DNA, 690 bp, Serratia marcescens
atgtctcgtttggtgctgatttccaacaagcagtgcgacggtaaggatctggcctgcgccggccagacgctggcgaccgatgccgaaccggggctgtggctcggctggaacggcgacgtgcagaatttcgcgcagcgcccgatcagctgccggcagcgcgccggttacgatcagatgacctttccgctgtcgatcgaggagtttcgccgccactatcagggctattaccacgacggcctgtggccggtgttccacaaccagccggagaaggcacacttcacgccggaaaactaccgcgcctatcggcagctgaaccgccggtttgccgatatcgcctgcgagcacctgtgccccggcgacaccgtctgcatcgacgactaccagctgctgccctgcgcccaggcgctgaaggagcaagggctgctgaacgcctgcgcgttcttcttccacctgccgttcccgtcggcggcgctgctgcggcgcatcccggaacatcgccagctgatcgcttcgctgctgttctacgatctgatcggctttaccaccaccgacgatcgcaacgcctttctcagctgcctggcggccgagttcccgctggagatgctgcccgacgatcagatccaggccaacgggcatctgttcgccaccggcattttccccgccggcatcaacggcaggcaggtttattga

SEQ ID NO: 424481 - DNA, 411 bp, Serratia marcescens
atgaatatgcaaccgcaacgggcgcccgtgcagccgctactctgctggcgcaaaggcgtttttcatatcagcaccgatcggcagttgttggatatcgaggcgatccaacgttttctcagcctgccggatcgggcggcggccgagcgcctggtgtaccacggcctgtgctttggcctgtaccgcaagcgccacctgctcggcttcgcccgcatggtgaccgattacgccaccttcgcctcggtgagcgaactgttcgtcagcgccgaataccgcggcgtcgggttgggaagctggctgacgcgctgctgcctggcgcatccggccttgcgcggcctgcgcgtcacgctgcccgccctgcaagcaccctggcgcgccgatggttcggcacacgccctgcgcgcccttcactga

SEQ ID NO: 424482 - DNA, 1371 bp, Serratia marcescens
atgcattctaatatcatcggcttcaatccgctgctggcggagctgcccgcttcgccaacgcgcgccttccacaaagagctggaacactacctgcagcgctatccgcagaccgagcagctggatatttatctgcacgatctgaacggccagctgcgcggcaagcggctgccgatcgccgaagcctttgggctggagaaaggctgctacttcccgctgtcgatctacgccctggatctgcacggccgggtgattgaagaaagcgggctggggcagcgggcgggcgagccggaccgtctgtgcctgccggtgcccggcacgctgcgcccctgcgcgcgcgatcctgaacgccacgcccagctgctgctgacgatgcaaaacgccgacggcggcgcctgcgagctggagccgcgcgtggtgttgcaacgggtgctgaagcgcctgcacgagcgcaactgcttcccggtggtggcggccgagctggagttctacctgcaggatccgcagcaccccgccgcggcggaaacctgcccaacgcagagctttgcggtggatgcgcccgagcgccaccatgcgctgctgagcgacatcgaacggcacgcccgcctgcaaaacctgccgttgaccggcgtggtggccgaagccgcctccggccagtacgagctgaacctgcatcacagccggcgcgtgctggaagcctgcgaccagatcatggcgctaaagcgcctgacgcggcagattgccgagcaacatcaccagcacgcctgctttatggccaagccctgcgcccacgccgccggcagcgggctgcatttccacatcagcctgcagaacgagcatggcgagaacctgctgaccggcgcgccgggcgaactgagcgacaacatgcagcaggcgatggcgggcatgctggcgctgatgccggcgtcgatggcgatcctggcgcccaacatcaacgcgttccgccgcttccgccccggcatgcacgtgccgctgcgcgcctcctggggccacaacaaccgcacggtggcgctgcgcctgccctgcgccgacagcgccaaccagcgcatcgaataccgcctggccggcgccgacgccaacccttatctggcgctggcggtgatgctcggcggcctgctgcacgggctggaacagccgctgccgctgccgcccgccgccaacggctgcgagagcgacaacgccgcgcccttgccgctcggccaacaggaggcgctggcgctgttccgccacagcgatccgctgcgtgagctgctcggcccggcgttctgcaccctgtggcacacctgcaaaaacgccgaactgcgccgcttcgaggaacaggtcaccgccgccgaactcggctggatgctgtaa

SEQ ID NO: 424483 - DNA, 321 bp, Serratia marcescens
atgatgaagagaatagggctgcttatcgccgcgctggccgcgttcaacgccaccgcgtcttccccacaggcgtgggccgagagcgaaagggcgatgcgcgccgcctgcctgaaagccagcgggctaaaaaacgccagggtggaaggggcgatcgttcactacggcgacgacgtcggctattcggcgctgtttatcggcgggcgctatccgcagccgtttatgaaaaacaagccgggcagggagctgtgcttatatcagcgcgccacgcagaaggcggcggtgcaggcggtggaggggagcaacgcgtctgctcaaccttga

SEQ ID NO: 424484 - DNA, 396 bp, Serratia marcescens
atgaaaacccttgtcatattatgcttaacgctgctggttttaagcgcctgcatccaattcattggctaccgtcgccataaaaaagagtttgacgcgttctatcaacattacgccggcagtggacattttattccgccctacctcgcctttgccgacggcctcggcatgctaggtacctcattgaaggtacagtggtttctttggatcctgaagaggaaaaaaatcaagattaggggtcaggtttggctcgatgcgaaaacctatgatttcgtgcaaaaaaccgcctctcctgagctacagaaatggctggcgatggattttatacttttactcgtagaggccattattaccaccgtgggctgtatttttatttacctcatcaagcatcaaggttga

SEQ ID NO: 424485 - DNA, 390 bp, Serratia marcescens
atgaaaatcgctatcgtcctgttcttcactctgacattgattagcgccctggttcagtacctttactatcggcgctataaaaaagaattttctgaattctatcaacgttatgtacaaagcgcccatcccttgcctccatttgtcatcttcgcggataaccttggtttgctcggtgtgtctatcaaagcgcaatggttccgttggatattgaatggcagaaaaataaagatagggaaaaacgcttttctgagcccaaaaacctacgaattcgtgaatgaaaacacatctcaacgcctcaaaaactggcttcgaaaagacttcatcttaagcgtgctgaaaatggggggtttggcgttgatgtgtatctttgcttttttgagcaaggcataa

SEQ ID NO: 424486 - DNA, 474 bp, Serratia marcescens
atgaaagaatatgcgcaaatcaaacacgcgctggggctctccagtaaatcgctggtgcatgaatggagcaccgccggcgtcggtgccatcaagggctattcgaactacgtcgacagcgccagccgtgcggccaagtttatgaaagccggcggctggataggcatcggattgagtgggctgaacaccaccaacgacgtctacaacgcctgcaccaccggccgtgaacaggagtgcgccaagatcgcggtgaagggatacagtcattttgcggcaagtactgcggcggggattttggggggtgaaggtggtgcgatgttagcaatgacagcttgtagtatcgtcttaggcgcctccacgtttggtaccggtattttagcttgcggtatagcaggcgctgctctgggtggcgcagctggcagttggggtggcgatgtagccgccgacagcattactggtttcatttttggtgaataa

SEQ ID NO: 424487 - DNA, 444 bp, Serratia marcescens
atggaacagaagtccagcagcatcgcaccgggctattgcatcgcccaacaaaccggcccgctcgccttccacgccaactacctgttcggtggcaagccatccgaagcggcacgcttttttatgcagctcaatgccgatacgccgctggttcaaccggggaaaatgctgatcgtcgccgatccgcgcaatcataatcaatctacgccgatcgccgccctgatgcaggccaagagccgcaccagcaaagcggtgaaagccggtgacagcgatttctccaccttcttgcaccgcaattacgccgctatcgccgccttcaccagctatggggaaacgtcgtcgggctggcttcggatgccggagaacgctacttcagccagatcaaaaatatcctggtcgagattgaaaaaacctaccaaaatcagttccgcacgagtggcgctttga

SEQ ID NO: 424488 - DNA, 351 bp, Serratia marcescens
atgtggacggtaatgacaacggaagagtttgatcggtggctctgtgagcaggatgaatcgacgcaggaaaaggtgttggccgcgctggtgatgctcgagcgtgccgggccttctctccggcggccttttgtcgacgtgctgaaaggttcgttgcatcccaacatgaaagagctgcgtattcagcacaaagggcggccgattcgcgcctttttcgccttcgatccggcgcggcaggcgattgtgctgtgtgcgggcgacaaaacgggtaatgagaagcggttttataaagtgatgctgcccattgcggatgcgcagttcacccaatatttgatgtgttatttcaaggagtaa

SEQ ID NO: 424489 - DNA, 300 bp, Serratia marcescens
atgagcaccttaaagcaactgctggcctcccgcaccccggagagccgccggcgcatcgaggaaatggccgaagagatgctgtttgaagcgcacctgcaccagctgcgggaagcgctgaatatttcccaacaggaactggcgaaaacgctgggcatttcccagccttcggtcgcggccatcgaagggcgcggcaacgagctgaagatttcgaccctgaaacgctacgtggaagcgatgggcggcacgctgcgcctggacgttgagctgccgggcggcaagcacgtcgggtttacggtctaa

SEQ ID NO: 424490 - DNA, 918 bp, Serratia marcescens
atgaaaatgagcatcaaacagttacgcgcgtttttagcggtagctcacactctgaacttcgcccaggccagcgagcggctgaatatttctcagccggcgctcagcctggcgatccgtgggctggaagacgcgctgggcgggccgctgctgctgcgcaccacccgccgggtgacgctgacgccggagggggaaaccttctttccgatggcgcgccagctgctggcggactgggacaacgcggaagaggcaatgcgccagcgcttcaccctgcagatgggcaaggtggcgatcgccgccatgccgtcgttcgccggcaacccgctgccgccgatcctcaaggcatttcgcgatcgttacgccggcatcaacgtggcggtgcacgacgtcatcaacgagcaggtgtttgaaatgatccgcgaagggcgggtagagatgggcatcgccttcgagccggagccgagcgacaccctgcacttcaccccgctgtgtcgcgatcgctttctggcggtggtgccgaaggattcggcgctggcgcgcaaggcgcaggtaagctggaaggagctgctgacgctggatttcatcaccctgcagcggccatcggcggtgcggctgctgctggagcaggaactggcccgcagcgggcgaacgctggaggtggcgtttgaaagccaccagctggtgacggtcgggcgcatggtggccaacggcctcggcgccagcgcggtgccggcgctgtgcgagcaacagatggatgagctgggggcggtctgcgtgccgctgatcggcccgatcatcgaacggcgcgtgggcctgatccgcctggcgcagcaccaactctcttccgccgcgcaggcgctggcgaccgtgatcgaacgggaaatggcggggagtggcgcgcagcccgcgcttagaccgtaa

SEQ ID NO: 424491 - DNA, 699 bp, Serratia marcescens
atggcagggctcgacaaacgcgtcggcagctaccaggaagcgctggcaggcctgacggacaacatgacggtgctggcgggcggctttggcctgtgcggcatcccggaaaatctgatcgaagagatccgccggcgcggcgtgcgcggattgacggtggtctccaacaactgcggcgtcgacgggttcggcctcgggcggctgctggaaactcatcagatccgcaaggtggtgggatcttacgtcggcgaaaacgcgctgttcgagcagcaggcgctcagcggcgagctggaggtcgatctcacgccgcagggcacgctggcggagaagatccgcgccggcggcgccggtatcccggcgttcttcaccgccaccggttacggcacgccgatcgccgaaggcaaagaggtgcgcgagttcaacggccgcccttacatcatggaaaccgccatcaccggcgatttcgccatcgttaagggctggaaggccgatcacttcggcaacgtcatctaccgccacaccgcacagaacttcaatccgctgatggcgaccgccgggcgcatcacggtagtggaagtggaagagatcgtggcgccgggcgagctggatccggcggcgatccacacccccggcatctacgtcgatcggctgattcagggcaccttcgagaagcgtatcgaacaacgcaccctgcgggcataa

SEQ ID NO: 424492 - DNA, 654 bp, Serratia marcescens
atgcttacccgtgaacaaatggcgcagcgcgtggcgcaagagctgagggacggttactacgtcaacctgggcatcggcatcccgacgctggtggccaactacgtgccggcgggcatggacgtgatgctgcagtcggaaaacggcctgctggggatgggcgagttcccgaccgagcagcagctggacgccgacatgatcaacgccggcaagcagacggtcaccgcgcgcctcggcgcgtcgatcttcgattcggcgcagtcgttcgccatgatccgcggcggccacgtcgatctgaccgtgctgggggcgtttgaagtggacgtcgagggcaacatcgcctcgtggatgatccccggcaagatggtcaagggcatgggcggcgcgatggatctggtggcgggggcggagaacatcatcgtggtgatgacccacgcctcgaagggcggcgagtccaagctgctgccgcgctgcacgctgccgctgaccggcgccaactgcatccgcaaggtattgaccgatctggcctatctggaaattgaagacggcgccttcgtgctgcgcgaacgcgcgccgggcgtcagcgtggcggagattgtcgccaaaaccgccggccggctgatcgtgccggagcaagtaccggaaatgcgtttctga

SEQ ID NO: 424493 - DNA, 1185 bp, Serratia marcescens
gtgcaacaacgtgaagtggtgatcgtggcggcgacgcgcacgccggtcggcagttttcacggcgcgctggcgccgttgacggcggtggaactgggcacggcggcggtgcaagggctgctggcgcaaagcggcgtggcgccgcagcaaattgatgaagtgatcctcggccaggtgctgaccgccggctgcgggcagaatccggcgcgccagaccgcgctgaatgccgggctgcccgttacgacgccggcgctgaccatcaacaaggtgtgcggctctggtttgaaggcggtgcatctggcggtgcaggcgatccgcagcggcgacgccgacgcggtgatcgccggcggccaggagagcatgagccagtcgccttacctgatggccggcgcgcgcgccggtctgcgcctcggccacgcgcagatggtggacagcgtgatccacgatggcctgtgggacgcgttcaacgactaccacatgggcatcaccgccgagaacctggcggagagatacgccatcagccgtgccgagcaggacagctttgcgctgcgctcgcagcagaaggcgcaggcggcgcagcaggccgggcgtttcgcgcaggagatcacgccggtgacggtgccgaagccgaagggcgaagcgttgcttgttaagcacgacgaacagccgcgcgacaccagcctggaggcgctggcgcggctgcgcccggcgtttcgcaaggagggcacggtgaccgccggcaacgcctcttcgctcaacgacggcgccgccgtggtgttgctgatgagcgcggaaaaagccgctgaattgcgtttgccggtgctggcgcgcatcgccggttacgcctcgtcgggcgtcgatccggcgatcatgggcatcggcccggcgccggccgcgcgctgctgcctggagaaagccggctggcggctggaggaggtcgatctgatcgaagccaacgaagccttcgccgcgcaggcgctggcggtgggcaaagaactgggctgggaggcggagcgggtcaacgtcaacggcggggcgatcgcgctggggcatccgatcggcgcgtccggctgccgcattttggtgtcgctgctgtacgaaatgcagcgccgcggggtgaacaaggggctggcgatgctgtgcatcggcggcgggcagggcgtggcgctggcggtagagcgcccgtaa

SEQ ID NO: 424494 - DNA, 924 bp, Serratia marcescens
atgcagtcatctgactatgcggtactgggcgccggattgatgggggtgggcatcgccacccactttattcgccacggccatgaggtgctgctgtacgacccggatccgcagcgcctggcggaagcgccggcggtggcgagcggcattctggccgagctgagcgacgtcgggcagtttgataacgctgagcgcgacgcggcgctggcgcggctgcgcgtgaccggcgatctgaacgacgtggagcgcgcccggctgcttatcgaggcgatcccggaacggctcgagctgaagcacgcgttgtatgaacagttggaagggctgatcgccgacgacgcggtgattgccagcaacaccagcggcctgccgccggacgagctggcggcgcgcatgacccacccgcagcgcctgctgatcgcccacttctggcacccgccgcacctgatcccgctggtggagatcgtacccggccgcgccaccgatccgcgccatctggcggcggtgcaggtgctgctcggcgggatggcgctggaggcggtgctgctggagcgcgccgcgccggggtttgtcggcaaccggctgcagtttgcggtgctgcgcgaggcgctgcacatcgtccacagcggcatcgccagcgccgaggtggtggatcaggtgatgcgcgcctcgctggggcggcgctacgccatggtcggcccgctggaggccgccgacatgaccgggctgccgacggtggcggacatcgcccgccacctgttcccggaactggcgaccggcgacgagatgatggcgctggtggaacagcggctgcagcgcggcgataccggccagcgcagcggccggggattttatctttgggatgacgcacgcagggaacgcattcaacggcgacgggcgcatcagctgcgctttgcgctgaaaccgtaa

SEQ ID NO: 424495 - DNA, 1392 bp, Serratia marcescens
atgagcgttttgattgccctggcagcactgggattactgatgctggccgcctaccgcggctacagcgtgattttgttcgccccgatcgccgcgctgggcgcggtgctgttgaccgatcccggcgcggtggcgccgaccttcaccgggctgtttatggagaagatggtcggcttcgtgaagctctacttcccggtgttcctgctgggggcggtgttcggcaagctgatcgagctgtccggcttctcccgttcgatcgtcgcggcggcgatccgcattctcggccggcgtcacgccattccggtgatcgtgctggtgtgcgcgctgctgacctacggcggggtgtcgctgttcgtggtggcgttcgcggtctatccgttcgccgccgagctgttccgccagagcggtatccccaagcggctgatcccggccaccgtggcgctcggcgctttctccttcaccatggacgccctgccgggcacgccgcagatccaaaacatcatcccgaccagcttcttcggcaccaatgcctgggccgcgccctggctggggctgatcggctcgctgttcatcatcgcggtcggtctgctgtatcttgaacgccagcggcgcaaggcgcagctgaagggagaagggtacggcaccgatctgctgaacgagccggaaaccccggacgacatcaacctgccgaacccgctgatcgccatcctgccgctgattttggtcggggtattcaaccttggcttcacccattggatcccgcagtggtacggcgccagccacgagctgacgctgccggggctggccaagccgatcgccaccgacgtggcgaagatcaccgccatctgggcggtggaagcggcgctggtgtcgggtattctgctggtggtggtgttcggttttcgcaatattcgcggccggctggcggaaggcagcaagacggcggtcggcggggcgattctggcggcgatgaacaccgcctccgaatacggcttcggcgcggtgatcgccgcgctgccgggctttttggtgctgtcgcaggcgctgtcggcgatccccaatccgctgctgaacgaagcgatcagcgtcaccctgctggccggcatcaccggatcggcctccggcggcatgagcatcgcgctggcggcgatggccgataatttcgtggccgccgcccacgccgcgcatatcccgctggaagtgctgcaccgcgtggcctcgatggccagcggcggcatggacaccttgccgcacaacggcgcggtgatcaccctactggcgatcaccggcctcagccaccggcaggcctatggcggcatcttcgccatcaccctgatcaagagcgccgcggtgctgttcgtgatcggcgtgttctacctgaccggcattgtttaa

SEQ ID NO: 424496 - DNA, 771 bp, Serratia marcescens
atgagtgtacaaggcaaaaccgcgctggtgaccggctcgaccagcggcatcggcctcgggatagcgtccgtgttggccgccgccggcgcgcgcgtgatcctcaacggcttcggcgacgtggcgcaggcgcaagcgcaggtcgcgcagctgggcgccgcgccgggctatcacggcgccgatctcggcgatgcggcccagatagcggacatgatgcagtatgccgaacgcgagttcggcggcgtggacattctggtgaacaacgccggcattcagcacgtggcgccgctggatcagttcccggtggagaaatggaacgccatcctcgccatcaacctgtcggcggtgttccacacctgccgattggcgctgccggggatgcgcgagcgcaactgggggcgcatcatcaacgtggcgtcggtgcacgggctggtggcgtcgaaagacaagtcggcctatgtggcggccaagcacggcgtggtggggctgaccaagacgctggcgctggagaccgcgcgcacgcccgtcacctgcaacgccatttgccccggctgggtgctgacgccgctggtgcagcagcagatcgacaagcgcattgccgccggcaccgacccgcagcgggcgcgcgatgagctgttggcggagaagcagccgtcgcaagagttcgtcacgccagagcagctcggcgagctggcgctgttcctgtgcagcgatgcggcggcgcaggtgcgcggcgccgcctggaacatggacggcggctggctggcgcagtag

SEQ ID NO: 424497 - DNA, 1137 bp, Serratia marcescens
atgagaaaaaatacaacgccaatattcattggcggcgtcttgctgtcggcgttatccgccggcgcacaggccgagatcaccattctggataaaaacccgcagagcaatgtgttgctggcaccgctcagtttaaaggtgggcggcagcattcgccccgagtggatcttcaataacggcccggagccgggctatgacaaaaacggccacgacggcggcacgcgttttcgcttcagcggcgactatgcgctgacgcaggacacctcgatcatcggctattacgagtggggcgtcgatctggcgcacgcgctcagctgggacgggcactataacgaagacggcaagcgcgactatcagcgccagctgtacgccggtttcaaagacgatcgttacggcaccctgacctacggccatcaatacggcatctattattcggtggtcggcatcaaaagcgacgtctgggataacgatggccacgcgggcggcaccggcataggtatttccggcgactacgacggcggcaataaaccgaaaaacagcatcaagtacaccaatgatttcgggccggtaacgctgtacgccaactatttattgccggaagacgatctgcacaccgcggataacttgatttatcgccgcaagggcgggggcgggctgggcttcgattacaaggtgacgaaggatttcaccttcagcgcggcctacagttataccgacgcgaagatcaaagacaatctgtacaacgaaaaggattatcaccagcagctgtccggcaccgcgttgacctggcagccgaacaactggtacatcgtcggcaccgccagctactacaaagactatgtgccgagcacccgccagcgcacgctgtcgcacttcttcgccggtgacggctacgggttggaaggcttcgtcggttacaccttcaatatcgacaagccgttcctcaaatcgatccagccttacgtggcggcggactcgttgcggctgaagggggacgaggcgtatcacgccaaccacgtttacctcggcgcgggcaccaccatcggttacggtctgtcggtgtatgtggagcgcacgctggccaacagcagcgacaacgagccggactccacctggattacggtgttctacgacttctga

SEQ ID NO: 424498 - DNA, 822 bp, Serratia marcescens
atgaaagtacagatcccccgtcactgtctggatatcgatcaggtgccgcgtccgctgtttgccctgcaaggttcgacccttgagcaggattgggaagtcgagccacaccgccaccagaaggcgcagctgatctatacggtacgcggcatgatccgctgcgaagtggaaaacgggctgtggctggtgccgccgcagtgcgcgctgtggatgccgggcaacgtgttgcacaacgcccagggcgccggctccaccgaagcctactgcctgttcgtcgatcaacatgccgccgccggtctgccgcaaaactgctgcacgctgtcggtctcgccgctgctgcgcgagctgctgctgcaggccagcaccttcgagccgctctacgatgaacagggcgccgaggggcgcctgacggcggtactgctggaccagctggcggccgcgccgatcgagaatctgcacttgccggtgtccgacgacgcgcgcattcggcagttgaccgaaggcatgctgagcagcccggcggacaaatccacgctagggcagtgggcgcagcgcatcggcatgagcgagcgttccctcagccgcaccttgcaacagcagatgggcatgagcttcggccactggcggcgccaactgcacgtgatgctggcgctgcagcgcctgacgcagggcgagagcgtacagacggtggcgctggatctgggctacgagagcgccagcggcttcgtcaccatgttcagaaaggcggtaggcaaaccgccggcgcgctacctggcggagcgcaacgcctctggagaaaccctgggcggcgcaattaccatgtga

SEQ ID NO: 424499 - DNA, 378 bp, Serratia marcescens
atgtcattggataccgccgattttccgctggtatggatgcgccaaagcgggcgcgatacccaggccgagctggccgaattcagcgcgctgctggcgcgcgccgagccttttgtcctgatgaccgaccgcagcgtcggcgatgaagaagaagagcatgatcgcgatgcccgcacccaggtcgcgctgtggaaacgcgataaccgcgaggcgctgaagctgtgggtgaaaggcatgatcatgctggagccggacgacgccaaacgcgcggcggcggaagagttcgccgaatacggcgccaagttctggggctatccggtgctggtggccgccgatgaagccgcaggccgggtattggcgcagacgttattgttaaaataa

SEQ ID NO: 424500 - DNA, 876 bp, Serratia marcescens
atgcaccagcaacaggtgattgaacagctgctggcctggatcgagcagagcctggatcagccgctgacgctggacgacattgccgccaagtccggctactccaagtggcatttgcagcggatgttcaagcaacataccggccatattctcggcacgtacgcgcgccgcagaaggctgaccgccgccgcgcgcgaactgcgcctgaccggcaccagcgtggcctgcatcgccgacacttaccagttcgattcgcagcagaccttcacccgttgcttccgcaagcagttcggtctgccgccggccagctatcgccgcagccaggattggtcgagctatggcctgcagccgccgctgcggctgaccgaaacaccgttgccgcaggccgatatcgtgacgctgcccgccatgcagctggtgggccatacccagcggcgcagctttacgctggggcagttggcggcctccaagtgcgagctgcgccgccacgcctggcggcagctgctgccgccgcaggcgctgccggaggtggtatacggcctcaccagcctggaggttgacaggcaacgccggggtaacccgcgcatggcctataccgccgctctgccggacgaaggggcgatgggagagcgggtgactatcgaacagggggagtatgcccgtttcacctatcaagggcaggcggaagggttacaaaactttatcgcgcggctgtatgacaccgcgatgccgcagatgaacgccgtccgccggccggggcaggatatcgagcgtttctacccggcgcaggagggcagctgcccgcttggcggcgcggcgatccgctgcgagtatctgatccctatccggcgggtggaagcgttggccgccgccagttag

SEQ ID NO: 424501 - DNA, 921 bp, Serratia marcescens
atgaaaatgagcattcgcgcgttattaaccctgtttacggcactggttgcattcagccaggctgccttcgccgtcgtttacccgctgccgccaaaagacagccgtttggtgggcgaaaatatccaaatcaccgtaccggaagacagcaaactgccgctggaaagcttcgccgcccagtatcagatggggctgagcaacatgctggaggccaacccgggcgtggatccgttcctgccgaaggccggcagcaccctgaccatcccgcagcagctgatcctgccggacgcgccgcgtgaaggcatcatcatcaacagcgccgaaatgcgtctgtactactacccgaaaggctccaacaccgtggtggtgctgccgatcggtatcggccagctgggtaaagacaccccgctgaactggaccaccaccgtgcagcgcaagaaagacggcccgacctggacgccgaccgccaagatgcgcgccgagtacgcggccgacggcgagatcctgcctgcggtgttcccggccggcccggacaacccgatggggctgtatgcgctgtatgtcggccgcctgtacgccatccacggcaccaacgccaacttcggcatcggcctgcgcgtgagccacggctgcgtgcgtctgcgcgccgacgacatcaagtacctgttcgagaacgtgccggtcggcacccgcgtgcagttcatcaacgaaccgatgaaagccaccgtcgaaccggacggctcgcgctacgtggaagtgcacaacccgctgtcggccaacgaagagcagctgcaatccaaagatccggtgccgctgaccatctccgcgccggtcggcaaagtgctgatggacgccggcgtcaaccagagcgaagtggacgcggcgatcaaggcccgttccggtatgccggtgaaagtgaactga

SEQ ID NO: 424502 - DNA, 2040 bp, Serratia marcescens
atgaaaaggaatcgtcgtatcgccatgtgtcttacgctattgttttcttgccactcagcaaaatcagaagaggaaaacattctcgttattgagcaaagaagtacgcatatcaatgaaacgtccaccgcaacccgaaccatgacgccattaaagctgataccacaaactgtcgacagcgtttatgttgaccaggccaccgcctttggccagccaacattaagcgaagctttgagtggcgttcccggcgttaacgccagtggagacacccgttttgacaacgtcaaaattcgcggtttttccgccggtaatgacttactgttggacgggtttcgtgatgatatgcaatatacgcgcgatctgagcaatattgagcgtatcgatgtgctgaaagggccggccgccgtattatatggacgaggaagcagtggcggaattattaatcgcatcagtaagaaaccgcagaaaggtaaaggttcgaaagtcactacgcaaataggagaatacggttttaaacgcctgcacgccgacatcaaccacgatctcgatgaaagcacaatttttcgctttaatgtcgctcaggagaaggcaaatagctttcgccacggcgtctcacgcgacaaaatcttactggctccttcaggactatggaaaatcacgccgcggcttaatgggttgttgcaatacgattatcaaagtagcaaacgtacgcccgatcgcggcattccagcggtaaacgggcgccccgctaacgtcgccatcggcagtgtatacagcgataccgaaaacgactatatccatgaccgattccactcgttacgttcgcgcctgaattatgaactgaacctccagtggcaattgcgtcacctgctcatgttcagctcgctcaatagccagttcgataacacctacgtcactggcgttagcggagataacgtcaggcgcgcacgatggcaacaagacctgcacgccaaaaatatcagcagcaatcttgaagccgaagggctggtacatgctggggcattcgaacaccaacttctgatcggcactgaacaaagctggcaaaatcgcaacccaaaactctaccgcaataatcgccccttccctatcaaaaatctattcgcgccagaaaaattacgacaacagcatgacggtaatatgctgctggccagccacagccgccatcaggttcgaaatagcgcattctacctgcagaaccagatggcaatagatgactggcacctcgtcgccagcctgcgcggcgatcgcttccacgtcaccagcaatcggtacgatagaaaccttcaggagtccagaaacaacaacaacatcagccccaggctgggcgtggtatggcaacccgttgcggcacacgctctgtacacgtctttcagcaaaacctatgctcccgtcggcggcggattgatcggcataacgccagagaataaaaataaccgcctgtcgccggaatatacccgtcaatttgaaaccggcgtaaaaagcgattggttggagcagcaagtcaccactacgctttccctctaccggcttgaaatgtataaccgccgcacccgagatccggagaatccagacatattgcaactgacgggccagcaacgtaccgatggcttggaactgagcatgaacgccaacctcacagcaaacctttatctgcgcggcggtatggcgttgcaaaatgcctcgtttctcaaagcagaggaacaattccagggcaagcgccccaataatgtgtcgcggcgcaacggtgagttgtatataggctatagagacaagtcaggctggttcagtgaggccggtgtaacagcagtaagtaagcgtttcgccgacaatcaaaacaccactgctttacccggctatcagaggtatgacgtgcgtatcggttatggcgggaaacgctgggatctgcagttaagtgccgaaaacgtgttggataataggtattacctcagtgcaaccagcgccgcacaaatccagcctggttcgccgcgtcaaataaatctctccgcatcctatcgcttctag

SEQ ID NO: 424503 - DNA, 408 bp, Serratia marcescens
atgcgtaactggaacgaaccgaaaaagaacaaagcgcacatcgaactgatcccgatgatcgacgtgatgatgtttttattggtgtttttcgtcttgattagcctgaacgtcatacctgcgctcgggctgaaaacgcagctgccgtccgccggcagcgcgcagcagctgaagccgcagaagaaagcgatcatcacgctgggggccgacgaacagctgcagctggatggccagccgatcgcgctcgacgcgctggtcaacacgttgaagcaacagcagcaggccaaccagaccaccaccatcatcgtcaacagcgacaagggcgtggcggtcgagcggctggtggcggtgatggacaacctgcgccagggcggtttcttctccgtctccatcgcgacacggaagctgtga

SEQ ID NO: 424504 - DNA, 744 bp, Serratia marcescens
atgtatctgctctatcgctcacgtcatcttttcagctggttgccggcgctgattgtcgccggttgcctgctgttcgccagccagcaggcggcgctgaagatccagccgcgctacgacgaaaccgccatcgaactggcgctggtggagcctgaaccggcgcctgaacctcaaccggaaacgccgccggagccccagccagaaccgccgccgcccgagccggagccggagccgatccccgaaccggtagtgccggcgccggaaccgatcgtggaagccaagccggtgccaaaaccgcagccgaagcccaaacccaaaccggtgaaagagaaagccaaaccggcagagaagcctaaaccgacgccggcgcccgccgccccgcgcgcgctggtcagcaaaccggcggcgcagcccgcaccggccgcgccgaaggtgaatgcgcaggcgatcgaaaacggctatctgctggccttgcgccgcgagctggaacagcgcaagcgctacccaagcgggcgccaggcctcgctcgagcgcccgcagggcaacgtcgaagtgtggctggaggtcgatcgcagcgggcgggtgctctcttccggcatcgccaacaaagccgccaacatgctgctgaatcgcgcggcgatgagcagcctgcaaagcatcagttcagtgaagccgttcccgagcgaggcgttcgccgggcaaacaaccaaaagatttaccgcgacgttcaattatcaggcgccttag

SEQ ID NO: 424505 - DNA, 2244 bp, Serratia marcescens
atgaaatcgtttaatcgttctgggatctatctggcggtgatgtcggcgatgctgccgggcgccgcgctggcggccgacgccaccgatgtcggcaccatcagcgtcaaggggcagtcgctcggcggcggcatgatggtgcaggatgacagcgccaaggcgcgctccaccgtcaccaaagaagcgatggacaaaatgccgtcggcggccaacgccatcgataagctgaaatacacgccgggcctgaacgtcaacagcaacgacgccagcggcctgagcggcgtggactacaccatgcgcggcatgaactcggatcagatcggcctgtcgatggacggcatcccgatcaacgactccggcaactacgcggtatacccgaacctgctgggcgatgcggagaacctggaagaggtgttcgtcacccagggctcctccgaagcggacggcccgcacatcggctcgagcggcggcaacatcggcctggtgacgcgccgcccggcgaaagacttcggcggtttcctcaaacagacgctgggcagcaataacctgagcaaaaccttcgcccgtctggagaccggcgaatacaacggtttcagcaactggatatcttattcgcacaccgaggcgaagaagtggcgcggcgaagggcgcctgtactccgacaagttcgagatgaactcgctgtatgaagacggcaacggcaacagcagcaatctggtgatgaagtacaaccgccagaacaacaccaactacaacaccctgagcaaggcgcagttccaaaacgatgggcgtggtaccgattacgccaccacgccggagtacaacagcaaagggcagttgaacaagtattacaagatcgaacgcaacccgttcgagaacttcacgctatcgttcacccagaaactgcagctgcgcgacgacctgtcgctgaccctgcagccgtattactactggggcaacggcggcagtttcaacggccagacggcctcggtattgtccagcacgtcggacagagccgggcagtatgacctcagcaacctgcagtccaacacctattaccgcccgtcgtggacccaaacctggcggccgggcatcaccaccaagctgaagtgggacatcaacgagcagcacagcctggatatcggctactggtatgagcgtgcgcgccagctgcaaacccagccgttcatcagcatcaaggacgacggcaacccggcgcagatttggggaaaacctggcggctccgatcaggtgaaggacgccaacggcaatacggtgcaggggcgcaaccagtacaccatcaccccggcgcagaaggtgtggctgcaggatacctggttcgccacgccggactggaccttcgtcggtggcctggcctatcagtatgtggagcgcaaaggggacaaccgcggtagcctgtataacgtgccggagaagcgcaaagccacctatcatgaattcctgccgaacttcagcgccagctataaggtgaatcaggaaaaccaggtgttctacaacctgacgcgcaacatgcgcacgccgccaaactacgtgctgtacaacgtcggcgactcgctcagcaccaagccggaactgagctggaaccacgaactgggctggcgtttccagcaagaggacatgctgctgagcgccacgctgttctacatgcgctacagcgatcgccaaatctccaccaccaacgcggccggcgactacgagatgatgaacatcggcaacgtggagaacaaagggctggagctggagtggagcggccagttgccgcataacttcaactactacacctcgtatacctacaccgaatcgaagcagaagaacgacatcgtcagcaacggcgggctgccgctgccgacttccggcaaagaggtgccgaacgtgccgaaaaacctgctgaacatgacgctgggttatgacgacgggctgtattacggcagcgtcagcggcaagtacgtcagtgcgttctacggcgatctgaccaacgacgagaagatcggcggccgcacggtgttcgatctggcggcgggggtgcatctgccggtggacaagaaaatcgtcaaaagcgccgcgctgcgttttggcatcagcaacctgtttgacaaggaatacctgacctcggtgcgcaccaccaccttcaacgcggcgccttacggcggcgtgagggccagcacgccgtattacaacgtcggcgaagaacgcaccttcagcgtctcgctggaagccaccttttaa

SEQ ID NO: 424506 - DNA, 651 bp, Serratia marcescens
atggacgccaatctgttgcacgacattattttctacgtgatgtacgccgcgctggcgattgcgctggtgatcatcatcgaacgcacgctgtacttcgcctacacccagcgccaggcgcgccggctggagcaggcgctgacgccggacgtgcgccgcgccgccgatctgccggacgagctgacccagcgcaacagcctgccgatgacggtgatcgcgccggtactggcgcagaaacaccacgccggcgaccgcgaggcgatcggcgatctgatcgacgcccagtacctgctgagcaagccgccgatggcgcgcggcctgtggctgctggaaaccgtggtcaccgccgcgccgctgctggggttgctgggcacggtgatggggatcatcgaaaccttcaaggcgctggccgcctcgggggtgtccgagccgagcctggtgtcggccgggatgggcaccgcgctgtacgccactggcctcggcatcgccatcgcgctgctgtgcctggtggccaacaacttcctgcagagccgcatggagcgcatcaacgaactgctgaaggtgctgctgatccgcgccggccaaccggccagccgcccggagagcggcagcggcgaacaatgggttgacagcggggcgccgcgctatgcctaa

SEQ ID NO: 424507 - DNA, 1179 bp, Serratia marcescens
atgttgagccagagcgccgcggcgcgttttgctattcccggctatgagctggtgtacaccgcaccggtggaaaccgcgctgcaggccgacgatctgcgtaacaccgccgaggtgtggcgcgagatgttcgacgcggcgaaaacccgtatcgatctgggacagttttacgtggcgaatcaggacggttcgctgctggacggcgtgctgcagcacctgaaggcggccggcgaacgcggggtgaaaatccgctttttgctggaagagaagggccttcgcatgtctaccgccgagacgctggaacagctgaaggcgatccccaatctggagctgcgcatcattccttaccagaagctgagcggcggcattctgcacgccaaatatctgctggtggacggcgagcaggcgttcgtcggcagccagaacttcgactggcgcgcactggaacacattcacgaaaccgggctgcgcatcagcgacgccaaggtggtggggcagattcaggcgatcttcgaacaggactggcaggcgcaggcgctgttggcgcaggataagccggtgccggcgctgcccgattcgccgccgacggcgcagccgcagggcaactatctggcggccagcccgcgcgcctacaacccggcgggggtgattgactcacaggccgagctgccgcgcctgctggccggcgccaagcggcgggtgcgggtgcaggtgatggactacgcgccgctgtcgttcggcccggaacgcagccgccccttctatgcggtgatcgacaacgcgttgcgcagcgcggcggcgcgcggggtgcagatcgagctgatggtggccaactggaacaccaaaaagccggatattgcctggctgaagagcctggcgctggtgccgaatgtgcagatcaaggtggtgaccattccgccggccagcagcggcttcattccgttcgcccgcgtcatccacagcaagctgatgaccatcgacgatgagattgcctgggtgggcaccagcaactggaccggcggctatctggacaactcgcgcaatctggagctggtgatgcacagcgcggcgatgagcgggcggttggacaagctgtaccaacagctgtggaacagcgtctacgccgaaccgttgcggctggattacgactacccgccgcccaagccgggcggagaatcctga

SEQ ID NO: 424508 - DNA, 1110 bp, Serratia marcescens
atgacgcagcgcgctcaggatctgggcattatcatcggacagggcacgcccggcccgctgaacgccatcaccgacgtgcccggcgtgcgcgtcggccataccagcatccatgccgatttggcggacgggcgcagcgtgcgcaccggcgtgacggtgatcgaaccgcgccccggctccgcgcgccacgcgccctgcttcgccggggtgcacgtgttgaacggcaacggcgacgccaccggcctggaatgggtgcgcgaagcgggcctgctgaccagcccgatcgccttcaccaacacccacagcgtgggcgtggtgcgcgatgcgctgatcgcgctggagcgtgaaacgctgcccgcgggcgataacgcggtgtattggaatatgccggtggtgatggaaaccttcgacggcctgctcaacgacatcaacggctttcacgtcaaggccgagcacgtgcgccaggcgcagcaggcggcccggggcggcttgccgcaggaaggcgcggtcggcggcggcagcggcatgatctgccatgaattcaaaggcggcagcggcaccgcgtcgcgacgcttgcccgccgatcagggcggctggacggtgggcgccatcgtgcaggccaaccacggcaagcgcgagtcgctgctggtcggcggttacccggtaggccggcatctggggcatctcccctcgccgttcacgccgcagttgccgcatcccggcatgggctccatcgtggtggcgctggcgaccgacgcgccgctgctgccgcaccagtgtgcgcggctggcgcagcgcgccagcatcggcatcgcccgcaccggcggcggcaccgaggactcgagcggcgacattttcatcgccttcgccaccggcaacgacggcctgccgcccgccgactacgccaacaaaggcgccttcaccacgccgctgcgcatggtgaacaacgactatatttcggcgctgttcgccgcggcggcggaagcggtggaagaagcgatcgtgaatgcgttgctggcggccaataccgtcagcggcaacggccaccgggcggaagggttgagcgccgagcagctggtgacggcgctggagaaggccggctggcggcgctaa

SEQ ID NO: 424509 - DNA, 1377 bp, Serratia marcescens
atgaaagagtccgcccctgaacacaccttcaaaggcaatctcagcgtcctcgacgtggtgatgatcaccgcgtccggcgtgacgccggccagttcgatcttcgtcatcgccccgctggcgatcgccaacgccggcagcggcgcctttctgtcgtttctgatcgccgcctgcgtcgccgccgccatcgcgctgtgctatgccgaactcggcgccgcacaccccagcgccggcggcgaatacagcatcatcaagcgcctgttcggcaccctgtgcgggttgcagacctatctgtttatcctcagcgcctcgctgttcgtgccggcggtgctggccaccggcgcggtgccctacctgaacaccgcgctgggcacccagttcgacgcctcgaccgccggcatgctcaccgtgctggtcggcggcatctgtgccattttcaacatcaaggccaacgccctgctgaccggcgcctttctggtggtggaagtggcggtgctggcgctgatcgcctggctcggcttcagccacccgcatcagagcacggagatcctcaccgcgccggtgatgctggacgcgcagggcagcctggcgccggtgtcgctgccgctgatcgtcgccatggtcggggtcgcgctgttctcctacaacggctacggcgcggcggtgtacatggcggaagacatgcgcgaacagggcaggccgatggcgatcgcgatcatgctgacgctggctatcgtggtgctggtggaactggtgccgttcaccgccctgctgatcggctcgccgtcgttgacggagatggccaaacaggccgatccggtcggctatgtggtcaccgagctcggcggcccgacgttggcgcgggtggtaagcggcgcgatttatctgtcggtgttcaacgccatcatcgccatcgtggcgcagttcagccgcatgatgttcgccagcgggcgcgacggcttctggctgccgacgtttaaccgggcgctgaaaatcatccacccgcgcttcggcaccccctggatcgccaccctgctgttcggcgtgccgtcggcgctgctggcgttttgctccgatctcgaatcgctgacctcgttcaccgtgatcctgctgctgctggtgtacatcatcatggcggtggcggcgctgatcagccgccgtcgccgccacttccaccacccgtacctgatgccgctatggccgctgccggtggtggtggcgctgctgtgctgcctgtacgtgctgtggacgattttgatcgccagcagcctgaaagactttattatcattgccggcatcatcggcttcgggctggcgctgaaccatctgcgcggccgccaaccggcgcccctcgccgccccctcaatagaaggagaataa

SEQ ID NO: 424510 - DNA, 1503 bp, Serratia marcescens
atgaccattacccattggatcaacggcgagcccgccgccggcggcgaacgcagccagccggtttacgacccggccaccggccaatcggcgcaggaggtgcagctggccgaccgcgccacggtggagcgcgccatcgccgccgccgaacaggcctatcccgcctggcgcgacaccccgccgctgaagcgcgcgcgcatcatgatgaagctcaaggatctgctggagcagcacgccgatgccatctgccaactgatcaccaccgagcacggcaaggtgctcagcgatgccctgggcgaactgcagcgcggcatcgagaatatcgaatacgccggctatgtgccggaactgctgaagggcgaacacagcaaagaggccggcccgggcatcgacagctggagcgagtttcaaccgctgggggtggtggcgggcatcacgccgttcaacttcccggcgatggtgccgctgtggatgtggccgatggcggtggcgtgcggcaacactttcgtgctgaagccttccgagcgcgtgccttctgccgcgctgtatatcgcgcggctggcgacggaggccgggctgccgccgggggtgctcaacgtggtcaacggcgatcgcgaagcggtggagacgctgctgcatgacgggcgcgtgaaggcgatcagtttcgtcggttcgacgccggtggcggagcacatctatcacaccggctgcgcgcagaacaaacgggtgcaggcgttgggcggcgccaagaaccacgcggtggtgctgccggacgccgatatccctggtgcggtcggcgcgctgatgggcgcggccttcggctcctgcggccagcgctgcatggccatcccgctggtggtggcggtgggcgacggcaccgccgaagcgctgatcgccgggctgcggcaacagatggccgccatgcgcgtcggccccggcagcgacaaccgcaacgacatggggccgctggtgacccaacagcattatcagaaggtgaaaggctatatcgatcagggcgtggccgaaggcgccgagctgctggtggacggccgcgaactgcgcgtgaccggcgcggacggccgccccagccagggctatttcctcggcccgacgctgttcgatcgcgtgacgcccgacatgcgcatttatcaggaggagatcttcggcccggtgctcggcgtggtgcgcgcggcgtcgctgccggaggcgatggccttgatcgacgcccacgaatacggcaacggcacctgtctgttcacccgcgacggcgaggcggcgcgctacttctccagccgcattcaggtcggcatggtggggatcaacgtggcgctgccggtgccggtggcctaccactcgttcggcggctggaagcgctcgctgttcggcgatctgcacgcctacggcccggacgccgtcaggttctacaccaaacgcaagaccgtgacccagcgctggccggcctccggcgatgcccggcgcgccagcttcagcttcccgtcgggataa

SEQ ID NO: 424511 - DNA, 1341 bp, Serratia marcescens
atggccgctgaaaatcacccgctaaatagtctcgatgccgaagggttagaggcccattggatgccttttaccggcaaccgtaattttaaagcgcagccgcgcatcattactcaagccgcgggggcgtattacaccagccatgacggcagaaagattttcgacggcctgtccggattatggtgctgcggattggggcacggccggcaggaaatcaccgatgccgcccagcgccagctggcgacgctggattactcgccggcgtttcagttcggccacccgctgtcgttcgaactggccaacaagatcaaggcactgacgccggcggggctggattacgtattcttcaccggctccggctcggaagcggcggacacctcgctgaaaatggcgcgcgcttactggcgcgccaaaggccaggcgggcaaaacctgctttatcggccgggaaaagggctatcacggcgttaacttcggcggcatctcggtcggcggcatcgccggcaaccgcaaaacgttcggcgccggcgccgaggcggaccacctgccgcacaccctgctggccggcaacgccttttcgcgcggcatgccgcaacagggggcggagctggcggaagagctcaaccgcatcatcgcgctgcgcgacgcctcaacgatcgccgcggtgatcgtcgaacccttctccggctccgccggggtgatcgtgccgccggtcggctacctgcagcgcctgcgcgaaatctgcacccagcatgacatcctgctaatcttcgacgaagtgatcaccgccttcggccgctgcggcgcgatgaccggcgccgaggcgttcggcgtcacgccggacatcatgaacatcgccaaacaggtgaccaacggcgcgcaaccgatgggcgcagtggtggtgcggccggagatctaccaaaccttcatgaacggcggcgagccggactaccagctcgaattcccacacggctacacctactccgcccacccggtcagctgcgcggtcgcgctggcgacgctggacatcctgcagcgcgaacagatggtggagcgcgtacaggcgctggcgccctatttcgagcgcgcggtgcacagcctgcagggagccaaacacgtcgccgacattcgcaacatcggcctggcggccggcattacgctggcggcacggcccggcgaaccggcgcggcgccccttcgaggcggcgatgcgctgctgggaaagcggattttacgtgcgctacggcggcgacaccctacagctggcgccgccgttcatcagcagcgaagcgcaggtcgatgcgctgatcaacgccgtcggcgacgccctcaacgccaccgaataa

SEQ ID NO: 424512 - DNA, 930 bp, Serratia marcescens
atgcaagtaaaaaagcgcgcgctgttagggcaattgtcggatatggatctgcgtttgctgcgggtattcaaggccgtggtcgactgcggcggcatgagcgccgccgagctggagctgaacatcagcctgtcgaccatcagcaagcacatcaaggatctggagcagcggctgggcctgacgctgtgccagcgcgggcgcgagggctttgcggtcaccgacgaggggctgttgatctaccaggaaacggtcaacctgctggcggccaccgaggcgttccggcgcggggtggacgaggtacaccagcgcctgggcgggcagctgcacgtggcgatattcgaccatacggtcagcaatccgcaggcgcagatcggccgagccatcgcgttattcagcgagcgcgcgccggaggtttctttgcaaatgtacgtggagccgattaataccattgaacgcggcgtaattgacgggcaatttcaggttggcgttattcccatgcaccgcagcgcggaaagtttatcttatcattcgttattcagtgagaggatgttcttatattgcggcgcgcagcatgaattattttccgccccccatgaaacattaaattgggatctgctgcacaattatgccttcgctggattaggctaccattcgccgaatatggaactgagcctgcagcaacatttgcatcgcaaggcgacggggttcgcgcaggagtcgatcgccacgctgatcctctccggcaaatacgtcggctttttgccggatcactacgcggcgtttttcgtggcgcagaacctgatgcgggcgatcaaaccggcgctgttccgctatcactgcgaatactccagcgtgctgcgccgctcgccggtgccgcagcgggtggtgaagctgttccatgagtgcctgctggcggcccacggaacagcgtga

SEQ ID NO: 424513 - DNA, 1128 bp, Serratia marcescens
atgtccgtcagccacatcatcgccaaccgccagacctggttcggccacggcagcatccggcaactgccgccgctgctgcttgccgatccgcagccaacgctgctgttcagctgccgatcttttctcaacggcccggtgtacgccggcctgcgcgaatcgctggcgccactgttcatcggcaccgagatcgtcagccacgaggcgtcaccgcaggaaattgacgcctgggtggcgcgctggcgcggccaagcccggcgcgtggtggccatcggcggcggcagcgtgctggacgccgccaaggcgttctccgcgctggtggagcatccgctgccgacgctgcgctatatggaaaaggtgggcgacagcaaaatcagcggcgccaccctgccgctgatcgccattcccaccaccgccggcaccggcagcgaggtgacgcagaacgcggtgatcaccgacactcaggtcagcaaagtgaaggcctcgctgcgccacaataacttcgtgccgcacaccgccattctcgatccgcagctgctggcgggcgcgccggacaaggtgctggcctactgcgccatcgacgccttcacccacctgttcgaggcctatctgtcgaaaaccgccggcgccatgacgcgcgacatgtcgctgagcggcatccgccacttccttgcggcctggccggcgctcaaccgcagcgatgcggcgcgcgaagcgattatgcaggcttcctacctcggggggctgacgctgagcgccgccgggctgggggtgatccacggcatcgccggcgagatcggcgcgctgcgcgactaccaccacggccaggtctgtggccgcctgctgctgccgttcctcgccctgctggaaaacagcgaacagccgcagcaacgcgcgctgatggccgagctggccgcgcgcctgtatccgcactggcagggcagcccggagagctacctgaccgatttcatcacccgccacgccatcgcgccgttctggcaggacgatttgccgatttccggccaggaactggcggttgcgctggacaaatccaacagcaagaattcctggatcgactatgcgccggcgcagcggcaacggatgatcgaagaggcatttcgcgtcgaatga

SEQ ID NO: 424514 - DNA, 759 bp, Serratia marcescens
atggatattcaggttgaacgcttgtctgcggtgatcgatgcggtggccagcccgcgcttttatcccagcctgttgaactggctggaaggttttttcgccttcgacaacgccatcgtttatgccttcgaacgcggccggccgccgcgctgcctgatcaaaaccgagcgggaaaacagcgatgcggtcaaccagctctatcaacagggcgcctacctgcaggatccgttttaccgtgcgctgaacgacggcggcgcaggcgaggtgctcacgctgcgccagctggcgccctgcgggttttatcacagcgactattaccgtaatttttatcgcaagaccggctggcacgacgaggccggcgtgctgctgcagctgacgccggagcgcgggctgggggtgttcttcggctcggcgcgccgcacggtggcggtgcgctacccgcagcgggcggatctgcgcagcgcgctgacgctggtgaaaagcgtggcgcggctgcacggcgaagtggtggcggcgccggccgaggccgacacggggaacgacgatggcgcgcaggcgcgttatctgctgacgccgcgcgagcgcgagatcgtcgatctgatcctcgccggctgcggttcgcagcagattgccgaccggctgttcatcagcctcggcacggtaaaaaatcaccgcaagaacatctacggcaagctgaacatcggctcgcaggccgaactgttcagcctgctgctgaccgccccgcagcgccgcagcgcgtga

SEQ ID NO: 424515 - DNA, 1302 bp, Serratia marcescens
gtgaacaacgaaatcgagtccttaacctactacgcggcgaccaaaaaatacgatctgcgcttcccgacgctggaagaggatctggacgtcgacgtggtgatcatcggcggcggcttctccggcatcaacactgcgctggagctggcggagaagggcatcaccaacatcgccattctcgaaggccgctatctgggttacggcggcaccgggcgcaacggcggccaggtgatggccggcatcggccacgatctggagaagatcaagcgccacgttggcccggccgggctggaaaccatcttcaaaatcagcaacctcggcgccggcatcatccgcgaacgcatcaagaaatatgacatcgacgccgacttctgcttcggctacggctatctcggcagcaatgcgcgccaggagaagaccctgcgcggctggctgaaggagttcagggcggtagcgccgcaggaggagattgagctctacaccggggcggaggtgaagcaggtggtgggctccgacgcctacacctgcgcgttgaaacacatgggcggcggccacgtgcattcgctcaacctgctgctgggcgaggccaaggcgctgagcggctacggggtgaaaatcttcgagaacagcagcgtgctcaacgtggagtatggcccgcgcatcacggtgcgcaccgccatgggctcggtgcgcgccaacaagatgctgtgggcctgcaacggcttcctcaacggcatggagccgcagatctaccgcaagaccatcaatacctacgccttccagctggccaccgagccgctgtctgacgatctgatccgccagatcagcccgatccgcggcgcctacagcgacatccgcccggtgatcgactattaccgggtgaccaacgaaaaccggctgctgttcggcagcgccacccgcctgatcgaatacttcccgtcggatctcaaggcctggaaccgcaacctgatgctgaaagtgttcccgtacctgaaagacgtgaagatcgatctggcctggggcggcccgctgtgctgcagcgccaacctgttcccgcagatcggcacgctgccggatcgcgacaacgtgttttacgtgcagggctactccggcttcggcgtgacgccgagccacatcgtgtgcaaggtgctggcggaaggcatgagcgaaggatccgatcgctacgatctgatgagctcgatcccgcacgtcaacatcttcggcaaggacaagctgcggcgggtgatgaccaccgccggtaaggtttggcaccagacatccggctactggaaaggccgccgttaa

SEQ ID NO: 424516 - DNA, 366 bp, Serratia marcescens
atgaaaccgttactgcttaaacaaccgctgccggaactgctggagatcggcagcgtcagcaacctgggcgccacggtgatcgccggcacgccgaccgtcggcgtggccagcatcttcggcgagccgaccgacaacctgaactgcggcgtgttcagctgcacccgcggcagcttcgtgatggagtatccgttcgccgagcacgccacggtgtgggaaggcagcgcgaccctgaccaacgaacgcaccggcgaatcggtgcagtatcaggccggcgattcctggttcgtcgagaaaggcaccccggtgcgctgggacatcacctcggatcgcttcgtcaaacactacctcgccatcgtcgagggctga

SEQ ID NO: 424517 - DNA, 807 bp, Serratia marcescens
atgcccgaacaaaccgtcagctttatcaaaggccgtcacggcgacatcgccgtgcatgattggggaaatgaccagccgcgctatctggcgctgctggtgcacggctacggcgagcatctcggccgttaccaatacgtggcgcgcacgctacaggcgcagggcgcgcgggtgtttggccccgaccatctcggccacggcctgtcgcagggcgaacgcgtgctgatcgaggattatgacgccgtggtcgacgacgtgcagcgcgtggtcagccatttccggcagcgataccccgccttgccgctggtggtgatcggccactcgatgggcggcatgatcgctacccgctacgtgcagcgctatggcgaggaggtgcgcgcgctggtgctgtccggcccgctgcttggcgacagaacggcgatctccgatctggccgaactgccgacgatccccgacgcgccgctggataccgctaccctggcgcgcgatccggcggttggcgcggcgtatcaggaagatccgctggtgtggcacgggccgttcaagcgccccaccctgcgcgccatgcagcggatcctcgccgccatcaacgccgggccgggcttcggcgcgctgcccacgctgtggatccacggcgacgacgatcggctggtgctgatgagcgaaacgcaaaccgcgctcgatcgtctgcgcggcgacgatttcgaacggatgatcaatgcgggcgggcggcacgagagctttaacgaaaccaataaggatcggatcctcaagcgggtgaccgattttattgcgcgggcgttaggctaa

SEQ ID NO: 424518 - DNA, 1113 bp, Serratia marcescens
gtgaaaagaacaaccggtttcttgtttgatgaacgctgtttctggcacagcaccggcctgcacgccaccaccctgccggtcggcggctgggtacaaccgccctcgggcgccggccacgccgagtcgccggaaaccaaacggcgcatgaagaacctgatggacgtgtccggcctgtcgcgccagctcaccctgctgagcgccgaaccggcgacggaagaagacctgctgcgcattcaccccgcccactacctgcagcgtttcaaacaggtgagcgacagcggcggcggcctgctgggagaggaagcaccgctggggccgggcagctatgagatcgccaaactctccgccgggctggcctgcgcggcggtggaggcggtgctgcagggcgagttggataacgcctatgcgctgtcgcgcccgccgggccaccactgcctgccggatcaatcgatgggtttctgcttcctggccaatattccgatcgccatcgagcgcgccaaggcccgctacggcctcggcaaggtagcggtgctcgactgggacgtgcaccacggcaacggcacccagcacatctattggcagcgcggcgacgtgctgacgctgtcgctgcatcaggacggctgcttcccggcgggctattccggcgaacgggatcgcggcgaaggcgccggggcgggctgcaacgttaacgtgccgatgctggccggcgccggcgacgacggctacctgcacgccatgcggcgcatcatcatcccggcactggaaaaattcgagccggagctgatcatcgtcgcctgcggttacgacgccaacgccctcgatccgctggcgcgcatgcagctgcacagcgacagcttccgcgccatgaccgcgctggtgcaggacgccgccgaccggctgtgcggcggcaagctggtgatggtgcacgaaggcggctacgccgaatcctacgtgccgttctgcgggctggcggtaatggaacagctgagcggcgtgcgcactgaagtgcaggatccgttgctggcgttcatccagcaacagcagccgcgcgacgcctttaatcgcttccagcgcgaagcgctcgacgaactggcgcgccagttcggcctgtaa

SEQ ID NO: 424519 - DNA, 1188 bp, Serratia marcescens
atgtccagtgattcggtttccgcgcccgccgtcggcgcggcgctcccctgcccgccgcggctgctgaccgccattatcgtcttcgccgccatcgcgccgggcattctgatgaccgcccccgccgtggccgcccagctcgccgcgcagtggcagctcggcccggcgcagatcggccacctgttctccaccgaactcggcgccatgagcctggccacgctgccggcgtggtggtggatcgggcgcatcaactggcggcgggtcgctacgctgtcggcgctggtgtttatcgccggcaacctggcttcggcgctggcgcaggattttaccctgctgctgccgctgcgctttatcgcctcgctggcgggcggcaccctgatgatcctgtgcatcacctgcgccgccggcaccgccaatcccagccgggtctatgccttctgggtgctcggccagctggtgctgggcgcggtcgggctgctggtgctgccgccgctgttcgcgcacttcggcctgatggcggtctacctgattctggcggccatcatgctgtgctgcctgccgctcatcccggcgttccccaacggtttcaccgctgcccgcgccgcccgcagcggccccgccgcctcgctggcgcgcaagctgtgcgccgtgctggcggtgctgaccttttacatcagcctgagcgcggtctggacctttatcggcggcatcgccgccggcgccgggctgtcgccggcccacagcggccaggtgctggccgtcgccaccttgctcggcatcgtcggcgcgggggccgcggcgctgatcggcgcgcgcttcggcggcgggcgcccgatcgtactggggtacgccctgctgctggccagcgtggcgctgctgacgggccagcccctgctgctgcgcttcgccctggcggccctgctgttcaagttcacctggaccttcgtgctgccgttcattctggcgcgcgtcgccgggttggataacgacggcaagctgatgaacggcatcaacctggtgatcggcggcggcatggccatcggcccgacgctggccggctctctgatcgaatattccggcggtttcaacgccttgctgttcggcgcgctgggctgcgcgctgctgtcgctgctgttgatttcgctggcttcgccgcgcgcatcgcgccgtataacaggaggagaaaggtga

SEQ ID NO: 424520 - DNA, 648 bp, Serratia marcescens
atgcacagcacagcatccgatgcctttatcaacagttgtttggcgaccattacgcacctgatcccggtgtccgccggggtgttttatctggtcgatcgcgacctgcggccggatcactacatcctgtatggcatgcccgataaaacgcatcagcagtatctgaaccacttccaacagatagacccgctgcaaccggccaatttccatcgccaggacatcaccatggtcggcatgagcccggcggcgatcgccggcaaccgccgctattaccacgactttatgctgccaaacgacatgcgcgacatgacggagatcttcatccgccagcgcaagcgcatcgtcgctggggtatcgctgatccgcgatacgccgtttaccgaagtggagcgcggccgcctgcgcgcggtgctgccgctgatcgagctggcgacgcgcgatctgctgcccgacggcgaggcgcagatgctgaccgccaaagagcaagagatcgtcaacctggtgcgcgaaggcgccagcaataagcgcatcgccctgaagctgggtatttcgctgtccacggtgaaaacccatatgcgcaatattttcgccaaaaccgacgtggtgaaccgcaccgaactggtcgccggcggctttctcgcccacggttaa

SEQ ID NO: 424521 - DNA, 1713 bp, Serratia marcescens
atgcagaaaaaaacgttggcggtggcgttgagcggcgccttatcgggcctggcgcagggggcggacgccgatcgccccaatgtgctgatcattctggtggacgacatgggctactccgacatcagcccgttcggcggtgagataccgacgcccaacctgcaggcgttggccgaacggggcgtgcgcatgagccagtactacacctcgccgatgtcggcgccggcgcggtcgatgctgatgaccggcaacaccaatcagcaggccggcatgggcggaatgtggtggtatgagagcaccgccgcgcagccgggctatgaaatgcgcctgaccgaccgcgtgaccacgctgccggagcgttttcgcgatgcgggttacgccaccatgatggcgggcaaatggcatctgggctatgtcgacggcgccaaaccgaccgatcgcggcttcgagcgcgccttcgcctttatgggcggcggcaccagccatttcgacgatgcgaaaccgctgggcaccgtggaggcgttccacaccttctacactctgaacggcaaacgcgtgtcgttgcccaaagatttctattccagcaaggcctatgccgatcaactggaacagtggatccgcgatacgccgcaaaataagcccgtcttcgcctatctggccttcaccgcgccgcacgatccattgcaggcgccggatgactggatcgccaaattcgacggcaaatacgacgccggttaccagcaggcctatcagcagcgcattcagcgcctgaaagcgctgggattgatttccgaacgcacgccgatgccgacgctggcgctggataaggcctggaacgcgctgacgcccgagcagcaaaaatatgaagccaagaccatgcaggtgtacgcggcgatgatcgcttacatggacgatcaggtcggcgcggtgctgaacaccctgaagcagaccggccgcgaccaaaatacggtgatcgtgttcgccaccgacaacggcgccaaccccgccagcggcttctactacggctcgaagccggagtattggcggcagttcgacaacagctacgccaacctcggccgcaagggctcgttcatctcctacgggccgcactgggccaacgtcagcaacgcgccgtacgccaattaccacaaaaccaccagcgcgcagggcggcatcaataccgatttcatcatctccgcgccgcggctgaaggggcgcggcggcatcgaccgcacgccgatggcggtgtatgacatcgccccgacgctgtatgactatgccggcatcgacgccaacaaaccgctgaaggccaaaccgaccctgccgatggtcggcgtcagcttcaaacgctatttcagcggcgaggccgacggcgtgccgcgcgcgacctacggcgtggagctgcataaccaggccgcctatgtggacggcgtctggaagctgcggcggttggtgaaggccgggccgacggcgcagatggcgccgtgggggctgttcaacctgcatgacgatccgctggaaacgcgcgatctggccgccgccaacccggagcgagtcaaacggctgagcgaggcgtatcgccgctttgcgcagcagggcatggtcattgaagccaaaggcgcagcgatcgactacctcggcgtcgacgccagcaccggcgactacatcggcctggatccgttgactcacaaaccgttgccgcaggcggcgccatga

SEQ ID NO: 424522 - DNA, 1185 bp, Serratia marcescens
atgaacctggtccagctgcgcgcgcagcagatcccggtagagagcgaaccgcgcgcggcggcgccttttcatctgttggtgaagccgatcggcgccggctgcaacctgggctgccgctactgctactatccgcagcgccagcaggagcggacgcgcaagatggacgacgacctgctggcggaatttatccgcggctacatcgccgcccagccgcgttacagccgcgagatcaacttcgtctggcagggcggtgagccgctgctggcggggatcggtttttacaagcgggcgctggcgttgcaacgccgctacgcgccgccgggcgtgcggatcagcaacagcctgcagaccaacggcaccctgctgaacgacgcctggtgccggctgttccggcagcatcactttatcctcggcgtcagcctggacggcgatcgcgaggtgcaggacgcccaccggccggacaagcgcggcggtgccagctatgacgcggcgctgtgcggcattaagctgttgcagcgccatcagatcgatttcaacctgctgatggtggtgcacgacggcgtcgcggatcgcgccgaggcgatctacgatcatgcggtggcgatcggggcgcgctatttgcagttccagccgctgatgctggaaggggatgcgcccaccgccggctatgggctgagcgccgccaactgggggcgtttcatgctggcggtgtaccgccgctggcgcagccgcgggcacgttggccaggtcttcgtaatgaacatcgagcaggtctacgcgcagtatttcacccacgtcagccccagctgcgtacacgccgaacgctgcggcggcaatctggtgatggagccggacgggcggctttacgcctgcgatcatctgatcaacgcgcagcacctgctcggccatgccgatcgccacacgccgctcgccaccctggcggcaagggcggcggagatgccgttcggtaaaaacaagagcctgcgtcgcgagtgccaacgctgcagcgtgaaaagcgtctgccagggcggctgcccggcgcatgtgggcgaagatcgctacaaccggctgtgcgccggctattacgccttcttttccgcgctgctggcgccgctgcgtgcctacccgcgcagcccgcagggggcgatgcagtggcgcgccgccgtgagcgcggccgcaggttga

SEQ ID NO: 424523 - DNA, 1494 bp, Serratia marcescens
atgaacctgtcgtcgcggttgcacgcccacctggctcgaggcaaggtcggctttcccaccaccctggccagttcggtcggggtgatcatggccagcccggtgatcctgacggtcaccagcggcttcggcatcggcggcgacaccttcgcgctggcgatgctgatcgccttcatcatgatgcaggcgcagctcaccaccttctccgaagcggcggcgctgctgccgacctccggttcggtttacgactacatctcctgcggcatggggcgctttttcgccatcaccggcgcgctgtcggcctacctgatcgtgcacatcttcgctggcaccgccgagaccattctctccggcatcatggcgctggtgaacttcgagcacctcaacaccctgatggaaagccacaacgcctcctggatggtcggcgtcgggctggtcatcgtgttcggcctgctcaacgcgttcggcatcgaggccttcggcaaggcggagatcgtgctgaccttcgccatgtggagcacgctggtgattttcggcatcgtcgggctgctgtcgccgcatgcggtgccgctcgagggctggttcggcagcacgctgagcctgaacgatcccttcgcggtgttcagcctgatcggcatggcgatgttcatgttcgtcggctgtgagctggtgacgccgatggcgccggagatcaaacgttgcgatcgggtgatcccgcgcgcgatggcgctggggttgtgcggcgtggcggtatgcatggcgctgtatggcgcggcgctcagccaccaggtggaaaacgtggtgatcgacgccgccagcggcacgcgtctgctggaaacgccgatggccatcccggcgttcgccggccaggtaatgggccagttcggcaaatactggctcggcgtcggcctgctgttggccggcgccgcgaccatcaacacgctgatggcggcggtgccgcgcattctgtacggcatggcgctggacggcgcgctgccgcgcatgttcgcctatctgcacccgcgctttaaaacgccggtggtcggcattctggtggcggtgttgatcccctgcgtacacgccttcgccattcagggcaacctcgacaggatcattccgctggtgctggcggcggtgtgcgcctggggcgtggcctacctgctggtgacctgctcggtggtgatcctgcgcgtacgccgccccgatctgccgcgcgcctataaatcgccgtggttcccgctgccgcagatcgtttccagcgtcggcatcgtgctggccatcgtttacatcacgccgccgggaatgaacccgagcgacatctacattccctttggctggatgatcggcctgaccgccgcctatgcgctgttctggacgctgtgcgtgcagaaagtgaatccgttcaagccggtgccggtcgagcaggtgctggagaacgcgttcgccaaaggtgaaaacgaggaggcgcagtttgatcggcttacttccctcacttaa

SEQ ID NO: 424524 - DNA, 591 bp, Serratia marcescens
ttgatcggcttacttccctcacttaatcgcgcctggcggcgagcgccgtcgggctatcggccgggcgccgcgctggatcgtctggcgcgcaacctggaaccctacgcgtgcgaacgcctggcaccgggcctgctgcggctgacgctgccgcaggggccgcagatcgagatcggcgaacaggtccaggggctgtttatggcgcatatcgtcagccaccgctttcggttgcagggcgcgtgcgcagcgcagcccccgctgacgctggacgtggtgaccggcggctggctgcggcggcgcggggtgcgttatctgctgcgccagcgccacgcggccgcgcagcgggtgctggacggcctgcagcgctacccgcagatcggcgagacgctggcgcagctggattttcgccgcgtgcggctgacggtgaaagacgggcgctggcaggtggatatcgagcatttcgccgcatcggaggtggtcagccgtttgccggccggccgccgctatttgcggctggatgccgaacagcggcggctgctgttgagcagcctgctgatgatcggccaactgatggagaagctgaatcatgaatag

SEQ ID NO: 424525 - DNA, 783 bp, Serratia marcescens
atgaatagagtggttgtgattaccggcggcggcaccggcgtcggcgccgcctgcgcccgtctgctggcggcgcagggcgatcgggtgttcatcatcggccgccgcccggaaccgctggcggcgctggcgcaagagatcggcgcgcaggcgctggtgggcgacgccgccagcggcgagagctggaaccacgcgctgctgccggccattctgcgcgaagccgggcgcatcgactgcctgatcggcagcgccggcggcatgggcttcaagcgcatcaccgagatgaccgacgcgcagtggcaaggggcgatggacagcaacctcaacagcgccttcgccagcgcgcgcgcctgcctgccggagctgattaaaagcggcggcaacctgctgttcgtggcctcgatcgcctcgctggccgccgggccggaggtctgcggctacgtcaccgccaagcacgcgctgatcgggctgatgcgctccatcgcccgcgactatggcccgctgggcgtgcgcgccaacgcggtgtgccccagctgggtgaccacgccgatggcggacgaagagatgcaactgctgatggacgcccatcagatttcgctggagcaggcttaccagatggtctgccgcgacgtgccgctgcgccgcccggccagcgccgaggagatcgcccgcgtctgccgtttcctgtgttccagcgaagcttcaatcattaccggcgcggcgctggtggccgacggcggctccaccatcgttgacgtgccgaccctggctttcacttccctgtaa

SEQ ID NO: 424526 - DNA, 798 bp, Serratia marcescens
atgagttcagaagcggtattcattcaggttggcgcgctggcggaaggctttgcgccgcacagcaatacgctggaacggcagcacgggctggcgggcagcacgctgacgctgcgctttagcgacggcgcgacgcagcgctgccggtttaccgacgagcagacgctggagtggggcgaacggcgcggcgtcgcctatcgcgccaccagcattcgccccggcgtgctgttcatcgattttctcgatcccgcccgcgccaacgccagcattacgctggtatgcgaccgcaatcagggcaacttcaccgcggtatatggtcagctgccggacgaagcgcaggcgcggctcgatgccttcagccgggtggaacaggggctgccgctgaccgcggtcgaggccgagttccgcttcggcacgctggatgacgccgacgtggcgccgccgggctttaccgatgagttgatcggcatgcgcaacatgtacacctacagcccgaccgagcggtacgagcacatctacctgaacgacaacttctacgcctggcagtgtctggacggggtggagaaagggctggcggacgtcgatcgctgccactacgtgaaggtggcagagcagctttatctgttcgtctggcgcgagaagatcatcccgacgctgggcgtggtgatgatcgatctgcagggcatgcgcaccgacggcaagatcctcggttatcagggcagcgatttcagcacgctgagcaactttgcggtcggtgcccatgcgcaggtgctgaacaccacgcgccacccgcgaggatag

SEQ ID NO: 424527 - DNA, 792 bp, Serratia marcescens
atgagcgcaacctatgcggccgacgccttcgcggggcaggcggtgctggtgaccggcggcgcgcagggcattgggctggcgatcgtcagcgcctttgcccggctgggcgccgaggtgacgatcgcggacgtgcagctgccgcaggcgcaggcggcggcgcaggcgctgcgggacgaagggctgagcgtgcaggcgctggcctgcgatctggccgaaccggggcagatcgccgagctggtggcgatggtgggcgagcggcatcaacggctggacgtggtgatccacaacgccgcttactttccgctgacgccgttcgccgccatcgacgcggccctgctgcaacgcacgctgagcgtcaatctgatggcgccgttctttctggcgcaggcggcgctgccgtggatgcgccgccggggcggcggctgccttctggtgacttcgtcggtgaccggcccgcgggtggcctacccggggctggcgcactacgctgcctccaaggccggggtgaacgggtttattcgcgcggcggcgctggagctggcggcggagaaaattcgcgtcaacggcgtggagccggggatgatccgcacgccggcgatggccaacctgggcgacgcgcaggtgaatcaggcgatcgccgcctcggtgccgctcgggcggctgggggaaccggaagacatcgccgcggcgatggtgtttctcgcctcgccggcggcggcctacatcaccggccagacgctggtggtggacggcggcgcgctgttgccggaaacgaattctctgcttacttga

SEQ ID NO: 424528 - DNA, 453 bp, Serratia marcescens
atgcatgaatcgttaaccatcgccctgctgcaggcgcgtgaaaccgccatggggttcttccgcccgatcctgaaaagccacaatttgaccgaacagcagtggcgcatcatccgcgtgctggccaacagccgctcgatcgaattccacgagctggcggcggaaacctgcatcctgcgccccagcctgaccggcattctctcgcgcatggagcgtgacaagctgatcttccgcctcaagccggtcaacgatcagcgcaagctgtacgtgtcgctgacccagcagggccaggatctgtatgaagtggcgcgccaccaggtggaacagggctacgccgagattgaagccgccttttcgcggcagaaaatggaccagttgatgacgctgctggacgagctgatcaccctgggcgacagcctgcccgccaacgtcaccgcgcatcccactaagaagtga

SEQ ID NO: 424529 - DNA, 633 bp, Serratia marcescens
atgaaaggcaccgtattttccgttgcgctgaaccaccgcagccaactggacgcctgggatcaggcgtttcaccagccaccgtatcagaccccgcccaaaactccggtgtggtttatcaaaccgcgcaacacccacctcgccaacggcggggcgatcccgtttccggccggtgaaaccgtgcagagcggcggcacgctggcggtgatcatcggcgataccgcgcgcaaggtgccggttgagcaggtgagccgttatctggccggctacgcgttggccaacgacgtcagcctgccggaaagcagcttctatcgcccggcgatcaaggccaaatgccgcgacgggttctgcccgctgggggagatcggccagctggaggccgccgatcggctggagatcgtcaccgagatcaacggcgtggagcaggatcgctggtccaccgccgatctggtgcgctcggtgccggagctgatcgccgccatcagcgatttcatcaccctgcagccgggcgatgcggtgctgatcggcaccccgcaccagcgggtggagatcaaaccgggggatgaggtgacggtgcgcgccgccggcctgcccacgctgaccaaccgcgtcacccaagcaggagccgcatcatga

SEQ ID NO: 424530 - DNA, 765 bp, Serratia marcescens
atgaaacatgcccgtattcgccatcatggccaggccgtcaacgtccaggtggacgaccagctgcgcgtcacgctgccgaacggcgaggtgctgcaggagcgcgaagtggaatggctgccgccggcgcagggcacggtgttcgccctcgggctgaactatgccgaccacgccagcgagctggaattcaaggcgccggaggaaccgctggtgttcctcaaggcgccgaacaccctgaccgggcaccgccaggtgtcggtgcgcccggccggcgtggagtacatgcattacgaagccgagctggtggcggtgatcggcaagaccgcgcgcaacgtcagccgcgagcacgccatggagtacgtggcgggttacaccctgtgcaacgactacgccatccgcgattacctggagaactactaccggccgaatctgcgggtgaagagccgcgacaccctgacgccgatcgggccgtacatcgtcgatcgcgacgacgtcgccgatccgcaccggctggcgctcagcacctacgtcaacggcgagctgcgccagcgcggcagcaccgccgacatgattttcgacattccgttcctggtcgcctacctgagtgaattcatgacgctgcagccgggcgacatgatcgccaccggcacgccgaaagggctggccgacgtgcagccaggcgacgaagtggtggtggagatcgagggcatcggccgtctggttaaccacattatcagtgaaaaagattacgaggagagcctgcgttga

SEQ ID NO: 424531 - DNA, 828 bp, Serratia marcescens
atggtgtatccgcagcaggaacagcgcttagatgatgggaagaatgggtcgaccgcgatgagacgacggccagcccactcacttttatacctgagctgtcggatgagttccgaccagcctgcatcagcaatgctttttgccaactgtggattacgcatcatgtttttcacgcttagcgactcgacgcacacaacttggttttcgttaatgagtgtgcgggacaacttatgcaggttgtccaggcggcaatccgcaatttttgcatgcaaccgggcaactttttggcgagctttagtgcggttttttgaacccagttgtttcctgcttaatcggcgctgtagcaatgcaagccgcttggcattcttggctgtattgcgtgggttgtcagctttaaatccgctgtccgtgaccaatagacgagttagaccaacatctattcccactattgatgacgtaacaggtaatggctccggctggacttcgcatagacagctgacgaagtatcgacctgcagagtccttgctcacagtgactgtcgaaggggacgacggcagtttacgcgaccagcggatgttcagaggcgttttgcttttcgctatgtatagatgtccttctcggtacctaaaagcactggcggttaactcagcgacttgcttgtggcgtttagatttaaaggccggatatgaagttcgaccttcaaagaagtttttaaaagcagtctgttggtggcgtaagcattgctggagtgggacgcatgaaacgtcatttaaccaagcgaattcaggtgttctcttgaggatggttaatcgtgcgctagcttgggcataa

SEQ ID NO: 424532 - DNA, 1455 bp, Serratia marcescens
atgaaaaccatcaaccattggatcaacggcaagaatgtcgccagcaaagagtatttcaccaccaccaacccggcgaacggcgaggtgctggcggaagtggcctccggcggccagctggagatagaccaggcggtggcggcggcgaaagaggcgtttcccaagtgggccaacacgccgatgaaagagcgcgcgcgcctgatgcgtcgcctgggcgagctgatcgaccagaacgtgccgcagatcgccgaactggaaaccgccgacaccggcctgccgatccaccagaccaaaaacgtgctgatcccgcgcgcttcgcacaacttcgagttcttcgccgaggtgtgtcagcagatgaacggcaagacctacccggtggacgacaagatgctcaactacacgctggtgcagccggtgggggtatgcgcgctggtgtcgccgtggaacgtgccgttcatgaccgccacctggaaaaccgcgccttgcctggcgctgggcaacaccgcggtgctgaagatgtccgaactgtcgccgctgaccgccgatcgcctgggcgagctggcgctggaggccggcattccggccggggtgctgaacgtggtgcagggctacggcgccaccgccggcgacgcattggtgcgccataaagacgtgcgcgcggtctctttcaccggcggcaccgccaccggccgccgcatcatcgaaagcgccgggctgaagaaattctccatggaactgggcggcaagtcgccggtgctgatctttgaagacgccgacatcgagcgggcgctcgacgccgcgctgttcaccatcttctcgatcaacggcgagcgctgcaccgccggttcgcgcatcttcattcaggagagcatctacccggaattcgtcaaacgtttcgccgagcgcgccaaccgtctgcgcgtgggcgatccgcaagatcccaacacccaggtgggggcgctgatcagcccgcagcactgggaaaaagtctccggctatatccgcctcggggtggaagaaggggcgaccctgttggccggcggtccggacaaaccggccggtttgagccacggcaacttcctgcgcccgacggtgctggcggatgtcgacaaccggatgcgcgtggcgcaggaagagatcttcgggccggtggcctgcctgctgccgttcaagtcggaagaagacggcctgcgcatggccaacgatgtggaatacggcctggcgtcatacatctggacgcaggatgtgagcaaggttctgcgcctggcccgcggcatcgaagcgggcatggttttcgtcaacacccaaaacgtacgcgatctgcgccaaccattcggcggcgtgaaagcctccggcaccggccgcgaaggcggcgaatacagcttcgaagtgttcgccgaaatgaagaacgtgtgcatttccatgggcgaccacccgatcccgaaatggggcgtctaa

SEQ ID NO: 424533 - DNA, 1074 bp, Serratia marcescens
atgacgacaaaacttaccactaatgctgtccctgctcccgacgtcgtgcgctgtgcctacatggaaattcaggtcacgaaccttaaagccgcacgcgaattttacgtcgatatcctcggcctggtcgtgaccgccgaggatgacaaaaccctctacctgcgttcgatggaggagttcattcaccataacctggtgctgcgcgaaggcccggtcgccgccgttgcggcgtttgctttccgcgtgcgcacgccggaagacgtcgatcgcgccgaagcgtatttcaaggcgcttggctgtcgcaccgagcgtcgggtgaacgggttcgccaaaggcatcggcgatgcggtgcgggtcgaggatccgctcggcttcccgtatgagtttttctacgacgtgcagcacgtcgagcgtctggcctggcgctacgatctgtatacgccgggcgcgctggtgcgcctcgatcactttaaccaaatcacccctgacgtgccgcgcgccgtggaatacatccaggggctgggctttcgcgtaacggaagacatccgcgatgaagacggcgtggtttacgccgcctggatgcgccgcaaggcgacggtgcacgataccgcgatgaccggcggcgccgggccgcgcatgcatcacatcgccttcgccacccatgaaaagcacaatattttggccatctgcgacaagctcggcgcgctgcgcaaatccgatttgatcgaacgcggccccggccgtcacggcgtctccaacgcgttctacctctacctgcgcgatcccgatggtcaccgcgtggagatctacacgcaggattactacaccggcgatccggacaacccgaccgtgacctgggacgtgcatgacaaccagcgccgcgactggtggggcaatccggtggtgccgagctggtataccgaaggatcgctggtgctggatctcgatgggcagccacagccggtcatcgagcgcagcgcgcccagcgaaatggccgtcaccatcggcgcagacggtttttcctacacccgtgagggcgatacggaaaaaggtttcaaacttggcaatacgctgtaa

SEQ ID NO: 424534 - DNA, 387 bp, Serratia marcescens
atgccccatttttacgctgaatgtaccgacaacatccgccgcgaggcggatttgcccaccctgttcgccaaggtcaacgaggcgctggcggcgaccggcatctttccgctggccggcgtacgcagccgcgccatctggctcgacacctggcagatggccgacggcaagcaggactacgccttcgtgcacatgacgctgaagatcggccacggccgcagtctggaaagccggcagcaggtgggcgagatgctgtttgcgctgatcaaggaacactttgccgcgctgatggcgcagcgttacctggcgctctctttcactatggaagagctggatccggtgctgaattacaaacagaacaatgtccacgcgctgttcaacaaggcgtga

SEQ ID NO: 424535 - DNA, 804 bp, Serratia marcescens
atgctggataaagagcaggttaaccgcgccgtacagcgcctgcatcaggcggaaaagagtcgtgaacagatccgcgcgctgtcgctcgatcatcccgagatcaccatcgaggacgcctacgccattcagcggcagtgggtggagctgaagatcgccgaggggcgcacgctcaagggccacaagatcggcctgacctcgcgcgccatgcaggtgagctcgcagatcactgagccggactacggcgcgctgctggacgacatgttcttcaacgacggcagcgacattccgatcgatcgctttatcgtgccgcgggtggaggtggagctggcgttcgtgctggccaagccgctgcgcgggccgaactgcacgctgttcgacgtctacaacgccaccgactacgtcattccggcgctggagatcatcgacgcgcgcagccacaacgtcgatcccgagacgcagcggccgcgcaaggtgttcgacaccatctccgacaacgccgccaacgctggggtggtaatgggcgggcggccgatcaagccggatgcgctggacctgcgctggatagctgcgctgctgtaccgcaacggcgtgattgaagagtccggcgtggcggcggcggtgctcaaccacccggccaacggcgtggcctggctggccaacaagctggcgccgtatgaggtggagctggaagcggggcaggtgatcctcggcggctccttcacccggccggtgccggcgcggcgcggcgacaccttccacgtcgactacggcccgatgggctgcatcagctgccgctttgtctaa

SEQ ID NO: 424536 - DNA, 795 bp, Serratia marcescens
atgttaaccaaccacttcaagcgtgcgctgcaggaaaaacgcccgcagatcgggctgtggctcgggctgtgcagcagctacagcgccgagctgctggccggcgccggtttcgactggctgctgatcgacggcgaacatgcgcccaacaacgtgcagacggtgctggggcagctgcaggcggtcgcgccttacccgagccggccggtggtgcggccgccgtggaacgacgcggtgatcatcaagcaactgctggacgtcggcgcgcaaaccttgcttatcccgatgattcaaaacgccgaacaggcgcgcgatgcggtgcgcgccacgcgctatccgccgcacggcgtgcgcggcgtcggcagcgccctggcgcgcgcttcgcgctggaaccgggtgcccgattacctgcagcaggccgacgagcagatgtgcgtgctggtgcagattgaaacccgcgaagcggtaaaaaacctcgacgccattttgcaggtggaaggggtggacggcgtgtttatcggcccggcggatctcagcgccgatatgggcttcgccggcaatccgcagcacccggaggtgcagcgcaccatcgacgacgcgattgcccgcatccgcgccgccggcaaggcgcccggcattttgatggccaacaaggcactggcgcagcgctatctggaagccggcgcgctgttcgtcgcggtgggggtggacaccaccctgctggcgcgggcggcggaagccctggctgacgagttcaaacagggcggggtgcaagcgccttcatcgggagtttactga

SEQ ID NO: 424537 - DNA, 1371 bp, Serratia marcescens
atgaaccacgtcgattcgctgccgccggccaacccggcgcagcaacataaagcgttaaccgccgccgagcaatcggtgattaaaaagttgtttcggcgcctgatcattttcctgttcgtgttgtttgttttctctttcctcgaccgtatcaacatcggcttcgccgggctgacgatgggcaaagatctcggcctcagctcgaccatgttcgggctggcggcgacgttgttctatgtcacctacgtgatcttcggcattccgagcaacatgatgctgagccgggtcggcgcgcggcgctggatcgccaccatcatggtgctgtggggcatcgcctccacctgcaccatgttcgccaccgggccgaccagcctgtacgtgctgcgcatgatcgtcggcatcaccgaggccggtttcctgccgggcattctggtgtacctcacctactggttcccggcgttctaccgcgcccgcgccaacgccttgttcatgatcgccatgccggtgaccatggcgatcggctcgctggtctccggctatatcctggcgctggacggggtgatgaacctgaagggctggcagtggctgtttctgctggaaggcattccgtcggtgctgctgggcgtggtggtgtggttttacctcgacgatacgccggccaaggccaagtggctgaccgacgaggaaaaatccagcctgcaggcgatgatggaggccgataagctgcagctggtgcagcccaacgggccgagcagccaccgcgcgctgcagcaacgcagcctgtggcgcgaaattttcacgccgatcgtgctgatgtacacgctggcctatttctgcctgaccaacaccctgagcgcgatcaacatctggacgccgcagatcctgcaaagcttcaaccagggcagcagcaacgtgacgatcggcattctggcggcgatcccgcagatctgcaccatcgccggcatggtgtggtggagcaaacgatccgacaggctgcaggagcgcaagcatcacaccgcgctgccgtatctgttcgccgccgccggctggctgctggcgtctgccaccgatcacagcctgatccagctgctggggatcgtgatggcctcggtcggctcctttaccgccatggcgatcttctggaccacgccggatcagtcgatcagcctggaagcgcgcgcggtggggatcgcggtgatcaacgccaccggcaatatcggatcggcgctcagcccgctgttgatcggctggttcaaggatctgaccggcagcttcaactccgggctgtatttcgtctcggcgctgctgatcgtcggcgccgtgctggtgtggcgcatcccgatgaaggattcgcgcccgagggcgacgccttga

SEQ ID NO: 424538 - DNA, 897 bp, Serratia marcescens
gtgcggaaaagtaccggctttatcgccaacatcgatatttgcaaagagtatgacgcgcgctacgccgccgacgaggtgcactacgaaaccttcgccgggctggcggcattcttcggccgtgacatgcaggtgcactggcacgactgcttcttccaggtgcatttcctggaaaccggcaagatagagctgcagctcgacgatcagcactattcggtgcaggcgccgctgttcatccttacgccgccgtcggtgccgcatgcgttcttcaccgaaccggacagcgacggccatgtgctgacggtgcgccaggagctgatttggccgctgctggagcgcctgtatcccggcagcaacctggcgctggacatgccgggcatctgcctgtcgctggccgatgcgccgcaggagctgacggcgctcagccactactgggcgctgatccgccgcgagttcggccagaacctggccgggcgcgaacagacgctggcgctgctggcgcaggcggtgttcacgctgctgctgcgcaacaccgcgctggaagacaacgccaacagcggcgtgcgcggcgaactgcagctgtttcagcggttcaacaagatggtggacgagcgttttcgcgagcacctgccggtgccggagtatgcgcaggcgctgggagtgaccgaatcgcggctcaacgatctgtgccggcgcttcgccaaccggccgcccaagcggctgatcttcgatcggctgctgcgcgaggccaaacgcatgctgctgttcagcgcctgcacggtgcatgaaaccgcctacagcctcggcttcaaggatccggcctatttcgcccgttttttcaatcggctggaaggctgttccccctcgacctaccgcgcggcgcaacacgccctttcgtaa

SEQ ID NO: 424539 - DNA, 1563 bp, Serratia marcescens
atgaaaccagaagactttcgtgccgacagcaaacgcccgtttaccggcgccgaatacctgaaaagtttgcaggacagccgcgaaatctacatttacggcgagcgcgtgaaagacgtcaccacccacccggcgttccgcaacgcggcggcgtctgtcggccagctgtatgacgcgctgcacgatccggccagccaggatcgcctgtgctggaataccgacaccggcaacggcggctatacccacaaatttttccgctacgcccgcagcccggaagagatgcgccagcagcgcgatgccatcgccgactggtcgcgtcaaagctacggctggatggggcgcacgccggactacaaggcggccttcggctgcgcgctgggcgcttatccggagttctacggccagttcgccgacaacgcgcgccactggtacaaacgcattcaggaaaccgggctctatttcaaccacgccatcgtcaacccgccgatcgaccgccacaagccggtcaacgaggtgaaggacgtttacattcaggtggagaaagagaccgacgccggcatcgtggtcagcggcgccaaagtggtggccaccaactcggcgttgacccactacaacttcatcggcttcggttcggcgcaggtgatgggcgataacccggacttcgcgctgatgttcgtggcgccgatggacgccgaaggggtgaagctgatttcgcgcgcctcctacgaactggtggccggcgccaccggatcgccgttcgactacccgctctccagccgcttcgacgagaacgacgcgatcctgattatggatcatgtgctgatcccgtgggaaaacgtgctgatctaccgcgatttcgaccgctgccggcgctggagcacccagggcggtttcgctcggctgttcccgctgcaggcctgcgtgcgcctggcggtgaagatggacttcatcaccgcgctgctgcaaaagagcctctcgtgcaccggcgtgctggagttccgcggcgtgcaggccgatctgggcgaagtggtggcctggcgcaacctgttctggtcgctgagcgacgcgatgtgcgccgaagccacaaaatgggaaaacggcgcctacctgccggattccgccgcgctgcaaacctaccgcgtgatggcgccgatggcctacaccaaggtgaaacacatcatcgagaagaacgtcaccagcggcctgatctacctgccgtccagcgtgcgcgacatgaacaacccggagatcgacaagtacctggcgcgctacgtgcgcggatcggacggtatggatcacgtcgaacgcatcaagatcctcaagctgatgtgggatgcgatcggcagcgaattcggcggccgccacgagctgtatgagatcaactacgccggcagccaggatgagatccgcctgcagtgcctgcgccacgcgcagggatccggcaacatggatcgcatgatgcagatggtcgacaagtgcctggccgattacgatcagcacggctggaaggtgccgcacctgcggaacaatgacgatattaatcagttggataatctgctgaagtaa

SEQ ID NO: 424540 - DNA, 516 bp, Serratia marcescens
atgtctcaggaaaatgaacagcgcctgcgctttcgcgacgccatggccagcctgtcggcggcggtgaatatcgtcaccaccgacggcccggcggggcgctgcggcatcaccgccacggcggtgtgctcggtaaccgatacgccgccgacgctgctggtgtgcatcaaccgcaacagcgcgatgaacccggtgtttcaggaaaaccgcaggctgtgcgtcaacgtactcaaccacgagcaggagctgatggcgcgccacttcgccggcatgaccggcgtcagcatggaagatcgtttccggctgaaagagtggcaactcggtgcgctggggcagccggtgctgcgcaataccctggccagcctggaaggggagatcgagcagatccagagcatcggcacccaccagatgtacctggtgcagatcaagcagatcgcactgagcgaagccggcaacgggttgatctacttcaagcgcaatttccattcggtgatccacccgatggcggtgccggcctga

SEQ ID NO: 424541 - DNA, 1143 bp, Serratia marcescens
ttgaagaactctgtctccgctttattgctggcgctgggcctgtgcgccgcgccgctggccgcgctggccacccccccgcagctggcttcgcaaatcgtcgaccagtatgccgaacatattttctacaacagcggcgccaccggcatggcgctggtggtgatcgacggcaatcaggtggttaaccgcagctttggcgataccaaacccggcaacaacctgcgcccgcgcccggattcgctgatccgcatcgcctcgatcaccaagctgatgaccagcgaagtgatggtgaaaatggcggcggcaggccaggtcaaactgaccgatccgctgcgcaagtacgcccccaaaggcgcctatgtgccggcttacaacgccgggcagccgatcaccctgctaaacctggcgacgcacaccagctcgctgccgcgcgagcagccgggcaaaaagccgccgaagacgccggtgttcacctggccgaccaaggcccagcgctggcagtggctggctcatgccaacgttacggtgccgccgggcgtacgcgccgcctactccaacctggcgtatgacctgctggccgacgcgctgtcgcgcgccgcgggcaagccctacaacgcgctgctgaaagagaaaatcaccgcgccgctcggcatggtcgacaccacgctgacgccgagccccgagcagtgctcgcgcctgatggtggcggcggccggcccgagcgcctgccgcgacaccaccgccgcggccggcagcggcggcgtctactccaccccgcgcgacatgcagcgctggatgcagcagttcctctcctccagcgccagcggcccgcgcaaagccaccgccgccagcgagcaaaccatgtacttccagcgccacgatctggtgtcgctgaagggcatggacgtgccggggcaagcggatgcgctggggttgggctgggtgtatatggcgccgaaggacgggctgccgggcatcattcagaagaccggcggcggcggcgggttcattacctacatggcgatgatcccggcgaaaaacgtcggggtgttcgtggtggtgacccgctcggaactgagcaagttcaccaacatgagcgatccggtcaaccgcctggtgagcgatctggcggccaacaagagttga

SEQ ID NO: 424542 - DNA, 759 bp, Serratia marcescens
atgccgattacccgactggaaaacccaagaatttacagacagatagcagaccagctcaaacgtctgatcgaaaataacgaatttccgccgggcagccgcctgccctcggagcgggatctcgcccagcagttgcaggtcagccgcgcgtcggtgcgcgaagcgctgatcgcgctggaagtgatcggcctggtggacgtcaaggtcggcaacggggtgatcgtgcgctcgcaaacgccgctggcgccgtcgcaggagccggtgatggcgcaggccggccgcaaccaatgggcggagatcgacgacgaactgaatattgaactggatttcaacgccgagctgccgccgttttcactgctgcaaacccgcctgttgatcgaaccggagaccgccgcgctggccgcgcgccacgccaccgacgaagagctggcgggcatccgcgccgcctacgagcagaactgccgcgataaccgcgccggctccgccactcaccccggcgatcggctgttccacatccgcatcgcccaggccagcggcaacccggcctatgcgttcattatcggccacctgctcggccaccgttacggcagcatgtttcgcgtgctgcagcgccactatacgccggacgacatgccgcaccgttccgagcaggaacaccgggcgatcctggcggcgatcgaagcgcgcgacgtgcgcggcgcccgcaaggcgatgaaggcgcacctcgatgaagtgatcgccattttcgcccgcgcgcagtag

SEQ ID NO: 424543 - DNA, 741 bp, Serratia marcescens
atggatttaaccgggaaacgcgtactgatcaccgccgccgggcaagggatcggttttaccaccgccaggctgttcgccgccgccggtgccgaggtgatcgccagcgacatcaacctcgagcgcctgcagggctgcgccgggatccgcgcgctgacgctgaacgtcaccgatccggccgccatcgcggcggcggcggaagcgatcggcccgatcgacgtgctgttcaactgcgccggcgtggtgcacagcggatcgatcctcgattgcagcgaagatcagtgggcgttcgcgctcgatctcaacgttaccgcgatgttccgcatgatccgcgccttcctgccgggcatgttggcgcgcggcaaaggctcgatcatcaacatgtcctcggtggcctcgagcgtgaaaggggtgccgaaccgcttcgcttacagcgccagcaaggcggcggtgatcggcctgacgcgctcggtggcggcggactacgtcacgcagggcatccgctgcaacgccatctgccccggcacggtggagtcgccgtcgctgcgccagcgcattgccgagcaggcgcgcgagcaggggcgcagcgagcaagaggtgtatcaggcgttcgtcgcccgtcagccgatcgggcgcataggcaccaccgaggaaatcgcccaactggcgctgtatctggcctccgacgccagttcgtacaccaccggcacggtgcagatcatcgacggcggctggagcaactga

SEQ ID NO: 424544 - DNA, 846 bp, Serratia marcescens
atgaaacttttacgttacgggcaacccgggcaagagcgccccggcatgttggatgcgcagggccgcctacgcgatctgtcgcagcatatcgccgacgtggggggcgccgcgttattgccggcgtcgttcgccaaactgcgcgcgctggacagcgccgcgctgccgctggtcgaagggcagccgcgcctcggcgcctgcgtcggcggcatcggcaagtttatctgcatcggcctgaactacgccgatcacgcggcggaaaccggcgcggccattcctgaagaaccggtggtgttcaacaaatggaccagcgcggtggtcggcccctatgaccaggtggagatcccgcgcggctcgcagaaaaccgactgggaagtggagctgggcgtggtgatcggccagggcgggcgctacatcagcgaagcggacgccatgcgccacgtcgccggctactgcgtgatcaacgacgtttcagaacgcgaatatcaaattgaacgcggcggcacctgggacaagggcaaaggctgcgacaccttcgggccgatcggcccctggctggtgaccgccgatgagatcgccgatccgcacagcctgaacctgtggctggaggtggacggcaagcgctatcaggacggcaacaccagcaccatgatcttccgcattccgcagatcgtcagctacctcagccgctttatgagcctgcagccgggcgacgtgatctccactggcacgccgccgggcgtcggcatggggcagaaaccgcagcccatctatctgcgggcgggccagacgatgcgtctgggcatcgaagggctgggcgaacagcgccagcaaaccgtacaggcctaa

SEQ ID NO: 424545 - DNA, 1278 bp, Serratia marcescens
atgaccaccattaccgcactgcgggttgaagacattcgtttccccacgtcgctggggctggacggatccgacgccatgaatccggatcccgactattccgccgcctacgtgatcctggagaccgatcgcgcggatctcagcggccacgggctgacgttcaccatcggccgcggcaacgagatctgctgcgcggcgatccgcgcgctggagcatcagatcgtcggcgagcggctggaagatatcgccgccgacatgggcgccttctggcggcgcttcaccagcgacagccagctgcgctggatcgggccggacaagggggccattcacctggcgaccggtgcggtggtcaacgcggtgtgggatctgtgggccaaatcggtcggcaagccggtgtggcggctggtggcggagatgacgccagaggagctggtgcgctgcatcgacttccgttacatcaccgactgcatcacgccgcaggaagcgctggcgctgctgaaacagcgtgccgagggcaaagaagagcgcctggcgcggctgctgcaggaggggtatccctgctacaccacctccgccggctggctgggttatccggacgacaagctgcgtcgcctgtgccaggaagcagtcgacgccggtttctcctacctgaagctgaaggtagggcgcgatctggaagatgacatccgccgggtgcgcatcgcccgcgaggtgatcggcccggatcgccggctgatgatcgacgccaaccaggtgtgggaggtggacgaagccattccgtgggtgaagcatctggcgttcgccaaaccctggtttatcgaagagccgaccagcccggatgacgtggaagggcaccgccgcatccgcgaaggggtggcgccggtcaaggtggccaccggcgagatgtgccagaaccgcatcatgttcaagcagttcatcatgcgcggcgcggtagacgtggtgcagatcgacgcctgccgcctcggcggcgtcaacgaagtgctggcggtgatgctgatggcggccaaataccaactgccggtctgcccgcacgccggcggcgtcgggctgtgcgagtacgtgcagcacctgtcgatgatcgactacctgtgcattgccggcacccacgaaggccgagtgatcgagtacgtcgatcatctgcatgaacactttgtcgatccctgcgtgatcaacggcgcggcctacatgccgccgagccgccccggctattcgatcgagatgcattcgtcgtcgatcgagcagtatcggttccgcgggtga

SEQ ID NO: 424546 - DNA, 864 bp, Serratia marcescens
atgccgcgcatcgatgctcaccagcactactggcgctatcacccacagcactacccgtggatcgacgagcggatgagcgtgctgcggcaggatttcgatccgccccggctgcggccgctgttgcaggaacaggggttcgacggcgcgctggcggtgcaggcgcgccccagcgaggaagagacgctggccctgctggcgctggcggagcagggcgagggcttatgcggcgtggtgggctggctggatatcgccgcgccgcagctggcgcagcgtctggaggccttgcggccttatagcgcgctgcgcggggtgcgccatcaggtgcaggacgaagcggatccggcggcctggctggcgcggccggaagtgaagcgcggcatgcaaacgctgcagcgcaccgggtatgtgtacgagatcctggtgacgcaccggcatctggcggccgcggcggcgttcgccgcccgccacgatgagcactggctggtgttggatcatctcggcaagccggatatcgcgcgcggcgcgcggcactgggcgcagcaaatccggccgctggcggcgctgccgcacgtggcctgcaagctgtcggggctgatcaccgaggcgccgggtggccggtggcgggcggaagaactgctgccgttcttcgacgccgcgctggaggcgttcggcccgcagcggctgatgttcggctccgactggccggtgtgcctgctggccggcgattaccgccaggtggtgcaactgtgcgaacaggcgctgtcgacgctgggggccgccgagcaggcggcgatttggggcgacaccgcctggcgaatttacggtttaacggagtctggttatggatctgtatctgcaagataa

SEQ ID NO: 424547 - DNA, 777 bp, Serratia marcescens
atggatctgtatctgcaagataaggtggtgctggtcaccggcggcggtgccggcatcggcgcggcgattgctcatgtgctggccgaagaaggcgcgatcccggtgctggtcaccaacgccgcgccggaggcggcgctgctggccgatttgcagcggctgcagccgcgcaccgaggtgatcctcaccgaactgtgcgacgaggcggcctgccgccgcgcggtcagccagacgctggcggccttcggccgcatcgacgggctggtgaataacgccggagtcaacgacggcgtcgggctggaggcggggcgcgaagccttcgtcggctcgctggaaaagaacctggtgcactactacctgatggcgcacctgtgccaggcggcgctgcaggaaagccggggcgctatcgtcaacatcgcctccaagaccgcgctcagcggccagggcggcaccagcggttacaccgccgccaagggcgcggtgctggcgctgacgcgcgaatgggcggtgtcgctgcgccatgacggcgtgcgggtgaacgcggtggtgccggcggaggtgatcaccccgcagtaccagcgctggctcaacaccttcgccgagccgcagcggcagatggcgaaaatcaccgcgcgcattccgctcgggcagcgcatgaccacgccgcaggagatcgccgataccgtggcgtttctgctgtcgtcgcggtcatcgcataccaccgggcagtggctgtcggtggacggcggctacctgcatctcgatcgggcgctgacgtga

SEQ ID NO: 424548 - DNA, 360 bp, Serratia marcescens
gtgagcggcgcgacggcagggcggagccgtttctgccaggcgctcgatctgattgactcaccggcgctgattgcggagtacctgcagcatcatcagcgcatctggccgggcatcgccgcgcatttgcgcgagcacggcattctggacatggagatttaccggttgggcacccggctgttcatgatcgtggaggtcagcgccgatttcgacgctgcgcgctttgacgccgccagcctgaacaaccccgaagtacagcgatgggaagcgctgatgtggcactaccaggccgccaccccctggacgccgcagggcgaaaaatgggtggaaatggcgcggatattttctctgcaacagcaataa

SEQ ID NO: 424549 - DNA, 1230 bp, Serratia marcescens
atgcttgctgaaaaaagtgcggcctccgcgcagccgggcgtcgccgtgaccgccaatctgcgctgggcctttatcctggtcaccagcctgttcttcatgtgggggctgtcctatggcctgctggacgtattaaacaaacattttcaggagacgttgcacgtcaccaaggcgcaatcagggctgctgcaggcggcctatttcggcgcctatttcctggtggcgctgcccgccgggtactttatggaccgcaagggctataaggcgggcattctggtcgggctgtgcctgtatgcgctgggggcgctgctgttcgtgccggcggcatcggccaacagcttcggcgtgttcctgtttgcgctgttcgttatcgccagcggcctgggctgcctggaaacggccgccaacccgtacgccacggtgctgggcgacgcgcagggcgccgaacggcggctcaacctggcccagtcgttcaacggcctcgggcagtttatcggcccgctgatcggcggcacgctgttcttctccgccagccagtccgccggcggcggcgatcagagcgcggtgaagatgacctatgtggcgatcgccgtgctggtgctgctgatcgcgctgttgttcagccgcacccggctgccggcgatccgtgaagaggagaaaccggtgcacggcgtgatagcgcagggcttatggcagcatccgcatttcgtcggcggggtgatcacgcagttcttctacgtggcggcgcaggtgggcgtgggggcgttcttcatcaactacgccaccgaacactggcgcgatgtgtctaaccagagcgcctcttacctgctgtcgatcgccatgatctgctttatggtcgggcgcttcttcagcacctggctgatggggcgagtcaaaccggcgacgctgctggcggcctatgcgctgatcaacatcgcgctgtgcggcgtggtgatgctgagtgtcgacggggtgtcggtggtggcgctgatcgcggtgttcttctttatgtcgatcatgttcccgaccattttcgccctgggggtgaaaaaactgggtaaacacaccaagcgcgccagctcctttatgatcatggcgatcgtcggcggcgccatcatgccgtactttatgggggcgctggccgaccgttacagcaccgcgctctcttatctgttgccgctgctgtgcttcgcggtggtgctggtttacggcctgcggcagcgccgcgcctga

SEQ ID NO: 424550 - DNA, 1203 bp, Serratia marcescens
atgagtgccttacacgccggcggcggcgcaaaaccctggctggcgaccttcgccatcggcctatccacctttaccgtcgtcacggcagaaatgctgcccgtcgggctgctgaccccgatagtcagcaccttgaacgcatcgataggccgcgccgggctgctgatttccctgcctgccctgttcgccgcgctgttcgccccgctggtggtgctgggcgcccggcgcacagatcgccgcagcctgctgatcgtctttctgctgctgctgatcgccgccaacctgctggccgccgccgctacctccatggcgctgctgttcgctgcgcgcatcctgctgggcttttgcatcggcggtatctgggccatcgccggcggattggcggaacgtctggtgccgccggcctccgtcggattggcgctgtccgtcatcttcggcggcgtagcggcggcctcggtgctcggcgtgccgctcggggtgttcctcggcgaagcgctgggctggcgcatggcgtttctggccgtcgccgtcctggcggcgctgaccctgctcctgctgctgtgcgtgctgccgccgctgccggtcacgcaggcggtgagctggcggtcgttcaccgcgcagcacgcgaatcgccggttgctcctcgggctgctgctgacgtttctgctggtcgccggccactttatggcctacacctttgtccgcccgctgctgcagacggtcgccggcatcgagagccgctgggtggggccgctgctgttcgcctacggcgccgccggtatcgtcgggaatttcatcgccggccaggccgccaccaaacggctgcgccgcaccctggcgctgatcgccttcgggctggcgctcgccgtcctgctgctgccgctgctgggccgcgcgccgctgagcggcggtgccttcctcctgctgtggggcatcgcctacggcggcgtttccgtgtcgctgatggcgtggatgctcaaggcggcccccgacgcggtcgaggtcgcctcttcgctgtatatcgcgctgtttaatctggcgatttcctgcggctcgctagcgggcgggctggtggtggacgccggaggcttgacgataaacggcgtgctgtccggcatcgtgctgctgctggcgctggcgatcctgatgcgaacgcgcccacaggcgctgacaacggcggcgaaggccgattcgccgccgggttga

SEQ ID NO: 424551 - DNA, 912 bp, Serratia marcescens
atgccgttggataacctgaccgacctgctggtgttcattcgcgtcgccgacgcctgcagcttcacgctggcggccgagaggctgggcatctcccgctcggcggcgggcaaatgcgtgatccgattggaggagcgattggccacccggttgctgcagcgcaccacgcgcagcgtcagcctgaccgaagacggcgcggtgttttacgagtatgcgcagcgcatcctgtcgcaggccgaagaggcggaaacggcgctcaatacgcggcggcaaaccccacgcgggcggctgcggctggatctgccggtttcgttggggcggttgcatatcctgccgattctgcgggagtttttggcgcagtggccggaggtggacgccgacgtcagcttctccgacgattacagcgatctggtgcgcgacggcatcgacgtggctgtccgcgtcggcggcaacgacgacagccggctggtgcggcgggtgctcgcgccacatcgcctgatcacctgcgcggcgccggattatctggcgcggcacggcacgcctgcaaaaccggaggcgctgggcgatcacgagacgctggtcttcagccatcaggggctgccagcgccctggcgctatttggtcaacggccaactgcacgaacagccggtgcgcggccggatgcgtttcaacaacgtcgaggccttgagggatgcggccgtcgccggagccggcctgtgccaggtgggggcgtttctggtcggcgagcagattgcggccggcacgctggtgccggtgctggagcgctattgccgcccggggccgccgatctgcgccgtctatcccagccggcgccatctctcccccaaggtgaaactgtttctggcggcgatcgaacggcgctggcagggcaaggcgatttgggaaaccgcttag

SEQ ID NO: 424552 - DNA, 1197 bp, Serratia marcescens
atggcaaatccttatttcaacctgttcaacgccccgggcagcaaggcgttttcctctgccgggctgatcgcgcgcctgccggtctcgatgaccggtatcggcatcatcaccatgctctcacaggtacgcggctcttattggttggcgggcgcggtagcggcgacgttcgccttttccatggcgctgcttgcgccgcaaatcgcgcgcgcggcggatcgtcacggccaaagccgcgtgctgccgtatgccaccgggatcagcacgctcgccctgctactgctgttgctctgcacccactatcgggcgccggagtggacgctgttcgtcttcgccgcgcttgcgggcggcatgcccagcatctccgcgatggtcagagcccgctggagcgaaatttatcgcggcacgccacagctgcacacggcattttcattcgagtccgtgttagatgaagtggcctttatcgtcggcccaccgatcgccgtggggcttagcgtttcactcttcccagaagccggtcctctggtggccgcgctgcttctggtggcgggcgttgcggcattcgcctcccaaaaaagcactcagcccccggtctaccccctcaataaccagcggcagcgcgccatcctggccatgccgtcaatgcagatcctgctgctggcgctgatcgccctgggcaccatcgtcggcaccgtggacgtcatcagcgtggccttcgccgagcagcaaggacagccggccgccgccagcatcgtgctgtcggtttacgcgttcggctcctgcctggccgggctgattttcggcgcaatgaagatccccgtccccttgcctcgcctgttcttatacgcggcgttcgccaccgccttcaccaccctgccgctgctgtgggtgcacgatgtcttgacgctggcggcggcgatgtttgtcgccggattgttttttgcgccgaccatgatcattgccatggggctggttgaaaacatcgtgccgccctcccggctgacggaggggttgacctggatggtcaccggtctggggataggcgtggcgctcggcgccgcattggcgggcctggcgatcgatgccgccgggatagcggccggcttcggcgtcacgctcaccgccgggctgatcgtgctgctggtggcggccggcggctaccgcttaatgcggcgaacgctggccttgaaagcggcgtga

SEQ ID NO: 424553 - DNA, 597 bp, Serratia marcescens
atggcacgtaaagcgcgcgcagaaatgattgaagaaacccgacaaaaactggtggcggccgcccgtcagcagttcggcagcgtggggtatgccgagacggtggtggatgaactcaccgcgcaagccggcatgacgcgcggtgcgctctatcaccattttggcgataaaaaggggttgttcctggcggttgtgaaggcgattgatgctgaaatggatgcgcgtcttgccgacattaccgcgcgtacggcggatgactgggaggcgtttgcggcgcgttgtcgcggttatttgatcatgatgacggagccgcaagcgcaacgcattttgttgcgcgattcaccttcggtgctgggggctgaatatttgcaggccagtaagctgcaatgcattgtctggatgacgggcgcattgcaggcgttgatggcgcaggggcgcatcgctgtcgccgagccggaatcgctggcgcatttgatcaacggcggcctgatggatgccgcgctttggatcgcgcaccagccggatgagaaaaccgctttggagcaggcgttggccggtttgtcgttgttgctgaacggcttgcggccaacggccgcttaa

SEQ ID NO: 424554 - DNA, 1086 bp, Serratia marcescens
atgaacgcccgttcttatcaggaattactgaacagcaagcagcgcctggcattatttctttttctaatgatgaatgccgcctcttccatatttacgttattgttcccttttagggatgtcccttcttttactctgcctttattatgcatcccgttattttgtctggcggcggcgctattttctctgcatacgccgcggcaatacctgtacaaactcaatctgttcgccagcgtgctcggcctgctgtgggctgcacatatctacgttaaaagtcaatattgcctgccgaataaccaagattttttattaattagtttgttcagcatcttttttatcagcgctatttctctgacggacaactttaccgccttttgtttacacgctgtgccttccgcaatgatgatcctggctttagacggtatgcataataccctgcggatattattcaccacgctattgcctattattgctttctccattcatcacctgatgttgaaacgcagtgaaatctttacccacgcgctggtggccaacctgtataacgagcgggacaaattcaataatttgagcatgctcgatcccctgaccggcctttataaccgtcgcgggctggagaataagatcaacatgctgctggaaccgcaaaccggccgccactacgtgctgctgctggatatcgaccacttcaaggtctacaacgacagctacggccacgccatgggcgaccgggcgctggtgcaggtggcgatcgccatccgcgatgcggtgcgttcgcgcgacatcgtggtgcgctacggcggggaagagtttttggtgctgctgaccaacgtgcacgaaggctacgcggcgcagctggccgaacgggtgcgccaacgggtggcggaactgaatatcccgcacggcgccagcccgcagcacagcggtacgctgacgctcagcgccggcatctcggcattggaaaaactggacgtcgaatcggcgatcggcgcggccgacgccgcgctctatctggcgaagcacagcggccgcaacaatattcagctggcgcaaaacgtccagcccgccctgctgctgccgcaggagtaa

SEQ ID NO: 424555 - DNA, 285 bp, Serratia marcescens
atgctcactgccatgattgccgcatgcgggctgtggggcgtcagctggtgcctcggcgatcgcctggccagcgcctggggcgttttgctgccatgcgcgctgatgccgctgctggccttgatcgatctggatatgatgcagctgcgcagcctgatcgtgatagcgatgttggcgacgctggtgatgctgttcaacagccggctgcgtcattatctgctgctgccttcctgcatggcgctggcgggcggcctggcggcggtcagcctcaacttcagcttcgggtaa

SEQ ID NO: 424556 - DNA, 945 bp, Serratia marcescens
atggatcaggttcaagccatgcgcatttttacccgcatcgtcgaactgggcagcttcagccgggcggccgagcgcctgcagctgccgcgcgccacggtcagcaacgcgttgaaacggctggagcagcggctgggcgtgcgcctgctgatccgcaccacccgccaggtgcaggtgaccagcgaaggcagcctctactatcaacgctgcgtacagttgctgggggcgcttgaggaggcggacacgctgttcagccaccataagctgcagccgtccggcaaagtgcgcatcgatatgccccattcgctggcgcgccagattgtcattccggcactggacgacttttaccgccgctatcccgacatcacgctggcgctgggcgccaacgacacccacgtcgatctgttgcgcgaaggcgtggactgcgtgctgcgcgcctgggaaaccgaagacgacagcctggtggcgcggcgcatcgcccagctgccacaggtcacctgcgcttcccccgcttacctgcaggcctgcggcacgccgcgcgacatcgatagcctggcgtcgcaccgcgcggtggggtatttttccctggccagcaaccgcgattacccgctggaattctgccgcggcggcaaagtggaactgcgcgaactccccgcccggctgagcgtcagcggcgccgacgcctacatcgctggcgcgcgggccggcatgggggtgattcaggcggcgcgctattcgcttgccccctggctggaacggggtgaactggtggaagtgctggcggacacgccgcctccgccgatgccgatttacatcatgtatccgcccggccgtttcctggcgccacgggtcagggtgttgattgattggctgatttggctgtttgaccagcggaaaagcggcgatatggctgtttttccagcaaacgcccgcaatgcggggaaataa

SEQ ID NO: 424557 - DNA, 993 bp, Serratia marcescens
atgcaacaacgtaaactgggttctcacggccccctcgtctccgccttggggctgggatgcatgggcatgagcgacttctactccaccggcgccgatcggcaggaagccatcgccacgctgcaccgggcgctggagctgggtgtcacgctgctcgacaccgccgacatgtatggcccgcacaccaacgaggagttggtgggggaagcgatcaagggcaaacggcaacaggtgttcctggccaccaagttcggcatcctgcgcgatccggcggatccttcggcgcgcggcgtcagcagccggcccgagtatatccggcgctcggtggaaggcagcctgcggcgcttgggcgtagaagagatcgatctttattatcagcatcgggtcgatccgcaggtgccgatcgaagacgtcgtgggcacgatggcggatctgatccgcgaaggcaagatccgccatatcggcctgagcgaggcgtcggtcgccacgctggagcgggcgcacaaggtgcatccgatcaccgcgctgcagaccgagtattcgctgtggacgcgcgatgccgaacagggcgtgctggcggcctgtgagcgcctcggcatcggctttgtgccttacagcccgttagggcgcggtttcctcaccggcgctatccggcggccggaggatctggccgaggacgatttccgccgcggcaacccgcgcttccagggggaaaacttcgcccgcaacctggcgctggtggagaaggtgggtgagctggcggcacagaagggcgtcaagccttcacagctggcgctggcctgggtgttggcgcagggcgagcacatcgtgccgatccccggcaccaaacgccgtcgctatctggaagagaacgtcgcggcggcggagataacgctgagcgcggccgagctggcggcgatagacgcggtgtttccgctgagtgcggcggccggcgatcgctacggcgcggagtcgatgacctatatcaacggctaa

SEQ ID NO: 424558 - DNA, 1041 bp, Serratia marcescens
atgtctgcattaacccccgccagtgaagtcatgctgcgccacagtgatgaatttatcgaacgccgcgtgctgtttgccggcgacctgcaggacagcctgccggcccaattcgaggccgcggacgtgcgcgtccacactcagcaataccatcactggcagttactgaaccggacgatgggcgataacgtgcagttcggtttgaccgtcgatcccgctttcgtcgccgactgcgacacgctggtttactactggccgaagagtaagcaggaagcgcaattccagctgtgcaacatcctggcgctgctgccggtgggcgtagacgtgttcgtggtcggtgaaaatcgcagcggcgtgcgcagcgccgagccaacgctggaaggccacgttgcgctggtgaaaatcgacagcgcgcgccgctgcggcctgtatcacggccgcctggacgcacagaccgagttcggcctggacgactggtgggacagctatcagctgcacgatctggaagtgaaaacgctgccgggcgtgttcagccgcgacggcctggacgtcggcagctcgctgctgctgtcgacgctggaaaaacacatgaaaggcaaggtgctggacatcggctgcggcgccggcgtgatggcctcggtgatggccaagctgtcgccgaaggtgaaacttaccctcagcgacgtcaacgccgccgcggtggaatccagccgcgcgacgctggccgccaacggcatcgaaggcgaagtgatcgtcagcaacgtttactccgacatcaccggccgtttcgacatgatcatctccaacccgccgttccacgacgggctgcagaccagcctgaccgccgccgaaaccctgatccgcggcgcggtgaaacacctgccgatcggcggccggctgcgcatcgtcgccaacgccttcctgccgtacccggacattctggacgccaccttcggcagccacgaagtgctggcgcagaacggccgcttcaaggtgtatcaggccaccgtcggccgcccgccgcgcgcgccgaagaagaaataa

SEQ ID NO: 424559 - DNA, 438 bp, Serratia marcescens
atggcatcaaaacgcgactggctgttacaacaactgggtattacgcagtggacattgcgccgcccgggcgtgttgcagggcgaagtggcggtcagtctgccgcccgaggcgcgcctgctggtggtggcgcagacgctgcccgcaccggacgatccgctgttttgcgacgtgctgcgcagcctggggctgacgccggcgcaaacctacagcctgacgccggaacaggcggcgatgctgcctgaagagaccgcatgcaacagttggcggctgggcgtggcggaaccgcttgcggtcgccggtgcgcagctacacagcccggcgctggccgagctttcccaagacgcgggggccaaacgcgccctctggcagcagatttgtcatcatgaacacgatttctaccctgacggcggccgacctggccacggccttcaccattga

SEQ ID NO: 424560 - DNA, 444 bp, Serratia marcescens
atgaacacgatttctaccctgacggcggccgacctggccacggccttcaccattgagcaagccagccacgctttcccctggacggaaaccaccttcgccagcaatcagggcgatcgctatcttaacctgaagctgagcgccgacggggagatggcggggttcgccatcacgcagatcgtgctggacgaagccacgctgttcaacatcgccattcatccgcagtaccagcgccgtggctttggccgcctgttgctcaacgcgttgattgaacggctggagagccgcggcgtggtcacgctgtggctggaagtgcgcgcctccaaccaggcggcgatcgcgctgtatgaagatctcggtttcaacgaggtcaccgtgcgccgcaattattacccgagcgcccacggccgcgaagacgcgatcgtgatggcgctgccgctggcgtaa

SEQ ID NO: 424561 - DNA, 1590 bp, Serratia marcescens
atgtctcctagtgaatttgcccgcgaagtctccaaaagaagaactttcgccatcatctcgcaccccgatgccggtaaaaccaccattaccgaaaaagtactgctgttcggacaggcgatccagaccgccggtacggtaaaaggccgcggctccagccagcacgccaaatccgactggatggaaatggaaaagcagcgtgggatctcgatcaccacctcggtgatgcagttcccgtaccgcgacagcctggtcaacctgctggataccccggggcacgaagacttctccgaagatacttaccgtactctgaccgccgtcgactgctgtctgatggtgatcgacgccgccaagggcgttgaggatcgcacccgcaagctgatggaggttacccgtctgcgcgacacgccgatcctgaccttcatgaacaaactggaccgcgatatccgcgatccgatggaagtgatggatgaagtcgagcgcgaactgaagatcgcctgctcgcccatcacctggccgatcggctgtggcaagctgttcaagggtgtttaccacctgtacaaggatgaaacctacctgtaccagaccggtaaaggccacaccattcaggaagtgcgcatcgtcaaaggcctgaacaacccggagctggatgcggcggtgggtgaagatctggcggcgcagttgcgcgatgagctggagctggtgcagggcgcttcccacgagttcgatcaggaggctttcctgagcggcgagctgaccccggtgttcttcggtaccgcattgggcaacttcggcgtggatcacatgctggacggcctggtggcctgggcgccggcgccgatgccgcgcaaaaccgacacccgcgaagtgacggcggcggaagagaaattcaccggcttcgtgttcaagatccaggccaatatggatccgaaacaccgcgaccgcgtggcctttatgcgcgtggtttccggccgctacgagaagggcatgaagctgcgccaggtgcgcaccggcaaagacgtggtgatctccgacgcgctgacctttatggccggcgaccgttcgcacgtggaagaagcctatccgggcgacatcatcggcctgcacaaccacggcaccattcagatcggcgataccttcacccagggtgaagacatgaagttcaccggcatcccgaacttcgcgccggaactgttccgccgcattcgcctgcgcgatccgctgaagcagaaacagctgctgaaggggctggtgcagctgtccgaagagggcgcggtgcaggtgttccgtccgatcgccaacaacgatctgatcgtcggtgcggtcggtgtgctgcagttcgacgtggtggtagcgcgcttgaagagcgagtacaacgtggaagcgctgtacgagtcggtcaacgtgtcgaccgcgcgctgggtcgagtgcgacgacgtgaagaagttcgaagagttcaagcgcaagaacgagatcaacctggcgctggacggcggggacaacctgtcctatatcgcgccgaccatggtgaacctcaacctgacgcaggaacgttatcctgatgtgaccttccgcaagacgcgcgaacactga

SEQ ID NO: 424562 - DNA, 615 bp, Serratia marcescens
atgaaaaagaccaaatttgcacactcgctgatggctgttgtattgggttctgtgttggtcagcggcagtgcgctggccgaagagagtctgctcaacaaggcgtctaacgccgcggacagtgctggtgccaaaatcgatagctccatgaaaaaagttgacggttacatggatgacagcgcgataacggctaaagttaaaagtgcgttggtggaagataaaaccatcaaaagttccgacatttcggtgaaaaccgaaaaaggcgccgtgaccctgagcgggttcgtcggcagccaggcgcaggcggagcatgcggtcgctgtcgccggcaaggtggaaggcgtcaagaccgtcagcgacaagctgcacgtgaaagatgaagccaaccagtcgatcaaatcgtatgccggcgacaccgccaccaccagcgagctgaaagccaagctgctggccgatgacatcgtgccgtcgcgcaatgtgaaagtggaaaccaccgatggcgtggtgcagctttccggtgaggtgaaaacgcaggcgcagtctgagcgtgcggaaagcatcgccaaggccatcgacggcgtgaaaagcgtgaaaaacgacctggtggtcaagccgtaa

SEQ ID NO: 424563 - DNA, 162 bp, Serratia marcescens
atgtttcgttggggcattatctttttagtcatcgcgcttatcgctgcggcactggggttcggttcgctggcgggcaccgccgcctgggcggctaaaatcgtgtttgtcgtcggcattatcctgttcctggtcagcctgttcaccggccgccggcgcccttag

SEQ ID NO: 424564 - DNA, 186 bp, Serratia marcescens
atgaacagcgacatcatcgtcgggcgctggaaacagctgaaaggccaggtatggcaggcattggccgaatggtccggcagcgattgtgtctggctggccggcagtaatgatttcctcgccggcgtgctgcaagaggattacggaagagagcgagacgcggtatcctcggagaaaacgtctcactga

SEQ ID NO: 424565 - DNA, 1119 bp, Serratia marcescens
ttgggatacagaatacccatcacgctcggcaatatagaaccgctggcgtctaagccctttcggccaggcaagatggcgctggtctgcgaaggcggcggccagcgcggcattttcaccgccggcgtgctggacgagtttcagcgcgcgggctttaaccctttcgacctgctgatcggcacgtcggccggcgcccagaatctgtccgcctacatttgcgggcaggtgggctacgcgcgccgggtgatcacccgttacaccacctcggctcaattcttcaatccgctgcgcttcgtgcgcggcgggcatctgatcgatctcgattggctggttgatacggcggcggcgcagatgccgctggcgatggacgtagcggaacggcactttaccgacgggcgcgagtttctgctgtgcgcctgccgcagcgacgatttcgaaccgacctatctgccggcgcagcgcgagcgctggctgccggccatcaaggcgtccagcgccattcccggcttctatcgccagggcgtggagctggacggcatcagctatcaggacggcggcatcagcgatgcgatcccggtggaagaggcctatcgccgcggcgccgacaccatcgtagtgatccgcaccgtgccttcgcagatgtactacaccccgcagtggatgaagcgcatggaacactggctgagcgacagcagcctgcagcagatggtgcgcatcctgcagcatcacgagcaaagctatcaccgcatccagcgctttatcgagaagccgccgggcaagctgcgcatcttcgagatcttcccgccgaagccgctggccagcaatgcactgggcagccgactggggtcgctcaatcaggattatcacctggggcgccgctgcggccgctatttcctggccaccgtcggccagtggatggcgcagccggagccggacggcatgaaggtgaaaaaagcgctgtcgcgccgcctgatccagccggagaacgtcagaatgccttcgccgatcgtgaccgacatcgtcatgccgtccgatcttggcgcgcagccggaggccgcggtggtggcgccgaagatcattctgccgggcgatctgccgccgggtgaagggggcgcgctgtga

SEQ ID NO: 424566 - DNA, 783 bp, Serratia marcescens
gtgagctatgcctttaccgacacccactgtcatttcgatttcccgccctttaccgggcatgagggcgagagcctggtgcgagcggcaagcgccggcgtcacgcgcatcatcgtcccgacggtcaccgccgatcgcttcgcgcgggtgctgcggctggcgcaggatcacgcgccgctgttcgccgcgctggggctgcatccgctgtatatcgcgcagcatcatgagccgcagttggagcaactggcggcgctgctggctgaacggccgcgcaagctggtagcggtgggggaggtcgggctcgatctgtatatggacaacccgcagttcgagcgccagcaaagcgtgctgctggcccagctgcggctggcgaaacagcatgacctgccggtgatcctccattcgcgccgcacccacgatcagctggctgcggccctgcggcgcgtgcagctgccgcgccgcggcgtggtgcatggcttcgccggcagcctgtcgcaggcgcaggcgtttatccgcctcggctattacatcggcgtgggcggcaccatcacctatgagcgggcgcagaaaacgcgcggcgtgatggcgcagctgccgctcgaggcgctgttgctggagaccgatgcgccggacatgccgctggcgggctatcaggggcagccgaatcgccccgaacgcgccgccgaggtgtttcaaacgctgtgcgagctgcggccggaaccggccgacgagatcgccgcccatctgcagcgcaatgctcaggcgctgtttgccatgccggattga

SEQ ID NO: 424567 - DNA, 1278 bp, Serratia marcescens
atgcaactcatcatgagcctagtcggcatggcggtgctgatcgccattgcggtgctgctctccagcaaccgccgggccatcaaactgcgcaccgtcgcgtgggcgttcatcattcaggtcggcatcggcgcgctggtgctgtatgtgccgctgggccgcagcatcctcggcagtatgtcgaacggcgtggcaaacgttatcgcctacggcaatcagggcatttcgttcattttcggcgggctggtgtccgacaagatgttcgaggtgttcggcggcggcggcttcgtgttcgcgctgcgcgtcctgccggtgatcgtgttcttctcctcgctgattgcggtgctgtactacctcggcatcatgcagttggtgatccgcgtgctgggcggcgggctgcaaaagctgttgggcacctcgcgcaccgaatcgctgtcggcgaccgccaacattttcgttggtcagaccgaagcgccgctggtggtgcgtccgtatatcgccaccatgagccaatcagaactgttcgcggtgatgtgcggcggcctggcctcggtggccggttcggtgctggcagggtacgcgcagatgggcgtgccgctggaatacctgatcgccgcgtccttcatggccgcgccgggcgggctgctgttcgccaagctgatggtgccggaaaccgagcagacccacgataaagacgatgcgatgaagctgatcgccgaagaggatcgtccggccaacgtgatcgacgcggcggcttccggcgcggcctccggcatgcagttggcgctgaacgtcggtgcgatgttgctggcgtttatcgcgttgatcgccttgcttaacggcattctcggcggtatcggcggctggttcgattatccgcagctgtcgcttgaactgatcctcggctgggtgttctcgccgatcgccttcctgatcggcgtgccgtggagcgaggcgatgaccgccggttcgttcatcggccagaagatcatcgtcaacgagttcgtcgcctacatgaacttcggcgcctatctgcgtccggacgacgtagtggcggcggaaggcctgcaggtgctgtcggcccataccaaggcgatcatctccttcgcgctgtgcggcttcgccaacctttcctcggtggcgatcctgctgggcggtctgggcagcatggcgcccaatcgtcgccacgacatcgcgcgcttcggtctgaaggccgtggcggcgggcacgctgtccaatctgatgagcgccaccatcgccggcttcttcctggcgctgtaa

SEQ ID NO: 424568 - DNA, 780 bp, Serratia marcescens
atgaccgaattaaccgcagcagcgcaacgtgcgctgaatttgatggatttaaccacgctgaatgatgatgacaccgacgagaaagtgatcgcgctctgtcgtcaggccaacagcccggccggccacacggcggccatctgcatctacccgcgttttatcccggtggcgcgcaaggcgctgcgcgagcaaggcacgccggatatccgcatcgccaccgtgaccaacttcccgcatggcaacgatgatatcgacatcgcgctggcggaaacccgcgcggccatcgcctatggcgcggatgaagtggacgtggtgttcccttaccgcgcgctgatcgccggcaacgaacaggtcggcttcgagctggtgaaacagtgcaagcaggcttgccaggcggccaacgtgctgctgaaagtgatcatcgaaaccggtgagctgaagcaggccgatctgatccgcaaggcgtccgagatcgccatcaaggccggggcggactttatcaagacctccaccggcaaggtgccggtcaacgccacgctggaaagcgccgagctgatgatgtcggtgatccgcgatatgggcgtggcgaagacggtgggcttcaagccggccggcggcgtgcgcaccgcggaagacgcgctgcattatctgcagcttgccgatcgtattctgggcgaaggctgggccgatgcgcggcatttccgctttggcgcttccagcctgctggccagcttgctggccgcgctgggccaccagacccagaccgccggcggcggctactga

SEQ ID NO: 424569 - DNA, 1323 bp, Serratia marcescens
ttgttcctggctcaagaaattattcgtaagaaacgcgacggccagccgttaagcgaagcggaaatccgctttttcatcaacggcattcgcgacaacgtggtgtcggaagggcagatcgccgcgctggcgatgaccatttatttccatgacatgagcatgccggagcgcgtggcgctcaccatggcgatgcgcgattccggcaccgtgctggactggaaaagcctggcgctgaacggcccgatcgtcgacaagcattcgaccggcggcgtgggcgacgtgacctcgctgatgctcggcccgatggtggcggcctgcggcggctatgtgccgatgatctccggccgcggcctggggcataccggcggcacgctggacaagctggaagccattccgggcttcaatattttcccggacgataacgccttccgcaaaatcattcaggacgtcggcgtggcgatcatcggccagaccagctcgttggcgccggcggacaaacgtttttacgccacccgcgacatcaccgccaccgtggattcgatcccgctgatcaccgcctccattctggccaagaagctggcggaagggctggatgcgctggtgatggacgtgaaggtcggctccggcgcctttatgccgacctatgcgctgtcacaagatttggcgcaggcgatcgtcggcgtggccaacggcgcgggctgcaagaccaccgcgctgctgaccgacatgaaccaggtattggcctccagcgccggcaacgcggtggaagtgcgtgaagcggtgcgcttcctgaccggcgaataccgcaacccgcgcctgctggaagtgacgctggcgctgtgcgtggaaatgctgctttccggcggcctggcgcaagacgaggccgacgcgcgcgccaaactgcaggcggtgctggacaacggcaaggcggcggaggtgtttggccgcatggtagcggcgcagcaggggccgatagacttcgtcgaacgctacgatagctatctgccggcggcaacgttgagcaagccggtgtatgctgaaaagccgggcatcgtcagcgccatggatacccgcgcgctgggcatggcggtggttgcgctgggcggcggccgtcgccgggcgagcgacgccatcgattacagcgttggcctgaccgaggtggcgcgcctgggcgagaaagtgggtgcccagcagccgctggcgatgatccacgccaacgatgaagagagctggcagcaggcggccgatgcggtgcgcagcgcgatgacgctgagcgacaaggcgccggaagcgacgccggtggtgtataagcgcatcacggaataa

SEQ ID NO: 424570 - DNA, 1224 bp, Serratia marcescens
atgaaacgcacatttattatggtattggactccttcggcatcggcgccagcgaagacgccgaacgttttggcgatcagggttccgacaccctgggccacatcgccgaggtttgcgcgcgcggtgaggccaacgtgggccgccagggcccgctgacgctgcctaacctgagccgtctgggcctcggcaaagcggcggaagagtccaccggcaacttcccgcaggggttggatcgcaacgccgacatcatcggcgcttacgcttacgccagcgaactctcttccggtaaagacacgccgtcgggccactgggaaatcgccggcgtgccggtgctgttcgactggggctatttcaaggacgagcacaacagcttcccgcaggcactgctggacaaactggtcgaacgcgccaagctgccgggctacctgggcaactgccactcatccggcaccgtgatcctcgatcagctgggtgaagagcacatgaaaaccggcaagccgattttctacacctccgccgactcggtattccagatcgcctgccatgaagaaaccttcggcctggatcgcctgtacgagctgtgcgaaatcgcgcgtgaagagctgaccgaaggcgggtataacatcggccgcgtgatcgcgcgtccgttcgtcggcgacaagccgggcaacttccagcgcaccggcaaccgtcacgatctggcggtagagccgccggcgccgaccgtgctgaaaaagctggtggacgagaagagcggcgaagtggtgtcgatcggtaaaatcgccgacatctacgccaacgtcggcattaccaagaaggtgaaggcgaccggcatcgacgcgctgttcgacgcgaccctgatcgaaatggaaaaggccggcgacaacaccatcgtgttcaccaacttcgtggacttcgattcctcttacggccaccgccgtgacgtggcgggctacgccgccgcgctggagctgttcgaccgccgcctgccggagctgctgaagctggtgaaagacgaagacatcatcatcttcaccgccgaccacggctgcgacccgacctggccgggcaccgaccacacccgcgagcacatcccggtgctggtttacggcccgaaagtgaaaccgggctcgctgggccaccgcgagaccttcgccgacatcggccagaccgtcgccaattattttggcctgtcgccgatggattacggtaagagcatgttctaa

SEQ ID NO: 424571 - DNA, 732 bp, Serratia marcescens
atggctacgccgcacattaatgctgagatgggtgatttcgctgacgtagtactgatgccgggcgatccgctgcgtgcaaaatacatcgccgaaaccttcctggaaggcgcggtggaagtgaacaacgtgcgcggcatgttgggcttcaccggcacctacaaaggccgccgcatctccgtaatgggccacggcatgggcatcccgtcctgctccatctatgcgcgcgagctgatcgcagaattcggcgtgaagaagatcattcgcgtgggctcctgcggcgcggtgcgtgacgatatcaaactgcgtgacgtggtgatcggcatgggcgcgtgcaccgactccaaggtgaaccgtctgcgcttcaaggacaacgactacgcggcgatcgccgacttcgacatggtgcgcaacgcggtcgacgcagcggcggcgcagggcatcccggcgcgcgtgggcaacatcttctccgccgatctgttctacaccccggatccggacatgttccaggtgatgaagaagtacggcatcctgggcgtggaaatggaagcggccggcatctacggcgtggcggcagagctgtacgaagagttcggctgcaaggcgctgaccatctgcaccgtgtccgaccacatcctgcgtcacgaagcgaccacggcggcggaacgccagaccacctttaacgaaatgatcgttatcgcgctggaatccgtgctgctgggcgacaaagcataa

SEQ ID NO: 424572 - DNA, 1344 bp, Serratia marcescens
atgctcaccgttgaacaagttttgcgtcatgggccggctacggctcgtcaactgacagaagcgttaggcatcagccagccgacgctatcgcgccgtctccgtgaactggcgggcgccgtattgatcctcggtaaaggtaaggcgacgcgctatgcgttgcggcgcgggatcggcggtgagaggcagtttccgctatatcgggttgatgaacggggtaaggcgcacctgtttgccacgctttgcccgctgtatcctgccgataactgtgcggtgtgcgatgagcgcagcggagagtggcagctctatgacggcatgccatggtatttgaacgacctacggccgattggctttctcgggcgagcctggggaaaagcagcggcgcgcgagttgaatttgccggaggatgtgcggcgatgggatgaaggtcaacgcttgttggcgctctgccgttatggcgaagacatgaccggcgatctgttgcctggtgccgacagctatcagcgttggttaatgcgggatacagccgtcgccatcacggtggaagataaaatcgagcgttacgccgcattgtctgtccaggcgctggccggggagctggtaggctcttccgccggtggcgagcaacccaagtttgccgcctatgctgagctggcgccagggcgccgtgcgcatgttttggtgaagttcagcctggcgccgacgcatgtcattgcacagcgctggagcgatttgctgatcgccgagtcgctggcgttgcagacggtcgccgctgcgggattgcctgccgcatcggcgcaaatcctgttcggtgctgaccgacaatgctttttagagatcgagcgctttgatcgcatcggtgaagaagggagggtagcgatggtgtcgctggaggcgctggatgccgagttcagcggcagcggccacgccaactgggtcgtggccgccgagcggttattgcagcaaggggtgatcgatcactcagtctaccaacgggttgccctgtattgggcctttggccggttgatcgccaacagcgatatgcaccaaggcaacctgtcgttcttgcggataacccagcggccggtcatgttggcgcctttgtatgatatgttgccgatggcttttgccccggcaagcagcggtaatctgcgccacgacgcgctggagatccgtttgagcaacgaggtgagcggcgccgtctggcggcaagcggagctattggctctcgagttctggcggcgaacggcgcaacatgacgacatcagcgaggcgttccgggcgattgccgagcaaatgttggtgcaactgcagaagctgcacgatcacattcagcgcctggcctga

SEQ ID NO: 424573 - DNA, 684 bp, Serratia marcescens
atggctcgcgctaaactgaaatttcgcctgcaccgtaccgctattatcctgatttgcctggctttgctggtgcttctgatgcagggtgcctcttattttagcttgagtcaccaaatggcgcgatccgaacaggtcgaagagctggcgcagacgctgaccaaacaggtcgcctacagcctggcgccgctgctggacgacgacggcaacaacccgcgcatcgacgccatcctcaagcagctcaccgatcacagccgcattctcgacgtcagcgtgtatcagctggacggcacgctggtctcccacgccggggagcagataagtatacgcgatcggctgtcgctcgacggcaagcgcgccggcagctacttcaaccaccagttggtcgaatccattcagggcaaagacggcccgatcggctttatccgcatcaccctcgacacccacgtgctggcgaccgaatccaagcaggtggacaacaccaccaacctgctgcgcctgatgatcctgctggcgctggcgatcggcatcattctggcgcgcaccctgctgcaacaccgccgcagccgctggcagcagtcgccgtacctgttgaccgccaacacgccgttggcagaaggcaatacggtggaagacgacgaagaggatgcgcctgaggcaaaacaggaagcgccgaagaaggggtaa

SEQ ID NO: 424574 - DNA, 978 bp, Serratia marcescens
atgtcaaacagtctgacctattgcgatcttccggcggagatctctcaatggccgggtcttcccctttcgctcagcggcgacgaagtgatgccgctggactaccgggcgggcaataccgggtggctgttatacggcagaaagctggacaaggcgcgcattacacaattccaacgcaagctgggcgcggcgatggtgatcgtcaccgcctggggcgtggacgactatcaggtggtgcgcctggcgggcaccttgacgccgcgcgccaagctgctggcggcggagagcgggctggacgtggcgccgctcggcaagatcccgcacctgcgcacgccggggctgctggtgatggacatggattcgacggcgatcgagatcgagtgcatcgacgagatcgccaagctggcgggcgtcggcgaacaggtggcggaagtcaccgaacgcgcgatgcgcggcgagctggactttaccgccagcctgcgccagcgcgtcggcacgctgaaaggggccgacgccaacatcctcaagcaggtgcgcgacgagctgccgctgatgccggggctgaccagtctggtgggcaagctgcaggcgatgggctggcatgtggcgatcgcctccggcggcttcacctactacgccgaatacctgcgcaaccggctgcggctggtggcggcggcggccaatgagctggagatccgcgacggcaagctgaccggcgaagtgctggggccggtggtggacgcgcagttcaaagccgatacgctgctgcggctggcggagaagctggagatcccgctggcgcagaccgtggccatcggcgacggcgccaacgatttgaaaatgatgcaggcggcggggttgggcatcgcctaccacgccaagccgaaagtgtatgaaaaagcgcaggtggcgatccggcatgcggatctgatgggcgtgctgtgcattctcaccggcagcctgaaacacgaagtgcgataa

SEQ ID NO: 424575 - DNA, 1386 bp, Serratia marcescens
gtggcaaaagcggcaaaacgggcatttgtgtgcaatgagtgcggggcggactatccgcgttggcaggggcagtgcagcgcctgtcatgcctggaacaccatcacggaagtgcgtttggccgcgtcgcccgcagcggcgcgcaacgatcgcctcagcggctatgccggcgacgccggcgtcagcaaggtgcagaagctgtcggaaatcagccttgaagcgctgccgcgcttcaccaccggctttctcgagttcgatcgcgtgctgggcggcggcgtggtgcccggcagcgccattctgatcggcggcaaccccggcgccggcaagagcaccctgttgctgcaggtgctgtgcaaactgtccgagcagatgaaaaccctgtacgtcaccggcgaggagtcgctgcagcaggtggcgatgcgcgctcatcggctggggctgccgaccggcggcctgaacatgctgtcggaaaccagcatcgagcagatctgcctgatcgccgagcaggaacagccgaagctgatggtgatcgactcgatccaggtgatgcacatggcggacattcagtcttcgccgggcagcgtggcccaggtgcgcgaaaccgccgcctacctgacgcgcttcgccaagacgcgcggcgtggcgatcgtcatggtcggccacgtcaccaaagacggctcgctggccgggccgaaagtgctggaacactgcatcgactgttcggtgctgctggacggcgacgccgattcccgcttccgcaccctgcgcagccacaagaaccgcttcggcgcggtcaacgagctgggggtgttcgccatgaccgaacaggggctgcgcgaagtcagcaacccttcggcgatcttcctcagccgcggcgatgaagtcacttccggcagttcggtgatggtggtgtgggaaggcacccggccgctgctggtggagatccaggcgctggtggatcactcgatgatgtccaacccgcgccgcgtggcggtgggcctggagcagaaccggttggcgatcctgctggcggtgctgcaccggcacggcgggctgcagatgtcggatcaggacgtgttcgtcaacgtggtcggcggggtgaaggtcagcgagaccagcgccgatctggcgctgctgatgtcgttggtctcgagcctgcgcgatcggccgctgccgaacgatctggtggtgttcggcgaagtggggctggcgggagaaatccgtccggtgccgagcggccaggagcgcatctccgaagcggccaagcacggtttcaagcgcgccatcgtgccgcacggcaacatgccgaagaagccgccggccaacatgcaggtgtttggggtcaagaagctggcggacgcgctcgacgtgctggaagagttttattaa

SEQ ID NO: 424576 - DNA, 1275 bp, Serratia marcescens
atgccgcaatttgattacctgaagacgtccattaagcaaaagggctgtactttgcagcaggtggcggatgccagcggcatgaccaagggctatctgagccagctgttgaacgacaaaatcaaaagtccgagcgcgcaaaagctcgaggcgctgcaccgttttctcgggctggagttcccgcgtaaagaggttaaagtcggcgtggtgtttggtaaattttacccgctgcacaccggccacatctatctgatccagcgcgcctgcagccaggtggacgaacttcacgttatcttgtgccacgacgaaccgcgcgaccgcgagctgttcgagaacagttcgatgtcgcaacagccaacggtcagcgatcgcctgcgctggctgctgcagaccttcaagtaccagaaaaacatccatatccactcgttcgacgagcagggcatcgaaccctatccgcacggctggaacgtgtggagcgacggcatgaaggcctttatggaacagaagggcatcgtgccgagcttcatctattccagcgaagcgcaggatgcgccgcgctaccgcgagcatctgggcatcgaaaccatcttggtcgatcccgagcgttcgttcatgaacatcagcggcaatcagatccgccaggatccgttccgctattgggactatatcccgaccgaggtgaagccgttcttcgtgcgcaccgtggcgatcctcggcggcgagtcgagcggcaagtcgacgctggtcaacaagctggccaacatcttcaacaccaccagcgcctgggaatatggccgcgattacgtgttttcgcacctgggcggcgacgagatggcgctgcagtactccgactacgacaaaatcgctctcgggcaggcgcaatacgtggatttcgcggtcaagtacgccaacaaggtggcgtttatcgataccgatttcgtcaccacccaggcgttttgcaaaaagtacgaggggcgtgaacaccccttcgtgcaggcgctgatcgacgaataccgtttcgatctggtgatcctgctggaaaacaacacgccgtgggtggcggacggcctgcgcagcctcggcagcaccgccgatcgcctggcgttccagcgcctgttggaggagatgttgcgcgccaacaacatcgagtacgtgcacgttgaatccagcgattacgaagagcgtttcctgcgctgcgtcgagctggtgcagcagctgctggcggcggacgccggccggttggcgaatgcgcccgcccatcgccacgccgcaggctga

SEQ ID NO: 424577 - DNA, 1434 bp, Serratia marcescens
atgtcttatcgcttactcgctctctggttgatctgctatgccgcagcctggacgctgctgaccgttcatctcgatcccaccctgccttacgacgccgtcgaggcgctcaattggggcttcaacgccgagtggggctcaccgaaaaatccttggctggtcggtgcggcgatgcagccggcgatctggctcccgtggctgccgctgaacctgtactggtatggcgggcacttcatcgccatcgccatcggcatgttgggcgtctggctattggcgcgccgcctgagcggcagcacctcgctggcctggatggcgctgctgacgctcaacctgtccggcatcatcaatttcgacatcattccctacaacgacaattacctgttggtgatgctgtggccgtggatggcgctgttcttccacctggcgatctcgcgttcggccaactggtggccggctttcgcattggtggccggtctggcgatgatggcgaaatactcgaccttcgccttcgtctatttcgcggcgctgtcgacgctgttcgtaccgcagatccgccgctgctatcgccagccgcagttctatctggcggtggcgatctggttggcgctggtgctgccgaacctgttctggctgtggaaccatgacttcgccgccttcaagtgggtggattcgcagatcaagatgcagctcaacctcgatatgctgcagtcgctgctgctggtgttctatccgtcgctggcgctgtgggtgatcctgcggcgcagcggggcggtgctggcctggccagcggcgttgccgatgcgggtgttgctgtgggtctacctgttgccgctcggcatcattaccttctggttctctttcaacgtcggcggccggctgaccgagtggctgcagccgttcttcatgctggcgcccgcgttgctggtcggctgcgtgcgccagccgccggtgcgttcgctgcgcgcggcgaccatcgggctgatgtgcgcggcgttggcggtctatctggggtatgccgcggtgatgctgggcaacgtgcgcaacgccggccagaaaatggtgggtatcaaggcgttcagcgtcggagtggagcggctgtggcaggagcggtatggcgtcagcctgcgctacgtcggcggcgaatacctgtcgcagtggatgacggtgtacgccggctcccggccgcagaccattacgcgctggtctaatcatacgcgcccgaatatctacaacgtcaacatcagctatccgcagattgcgcagcacggcgtcgctctgttcgggcggttgggtgaagactgcgcgcacagcgacttcggcggcgagctggcccactggccgaagatgcgcctcgattggcagcagacgctgacgttccgcgccgatccgcatgccgacgagcagacgctgtgcgtcggcttcgttcgtccgcagtaa

SEQ ID NO: 424578 - DNA, 1002 bp, Serratia marcescens
atgtcgataaaagccattgccgtagacccgcagaaccccgccggtttcatcgaaatctcactggagatgccggttcccggccagtacgatctgctggtggcagtgaaagcggcgtcggtcaacccggtggacaccaaagtgcacgccggtctgcaaaagagcggcctgcagcagccgcgcatcctcggctgggacgccagcggcgtggtggtagacgtgggcagcggcgtcagcggcttcaagcccggcgatgaagtgtggtacgccggcgacatcacccgccccggcagcaacagcagccaccagctgatcgactcacgcatcgccgcgcacaagccgcgcagcctgaactgggccgagtccgccgccctgccgctcaccgccctcaccgcctgggaagcgctgttcgaacacctgaacattcaggatgcgccggagcacaagacgctgctgatcatcggcggcgccggcggcgtcggctcgctggccattccgctggccgcgctgcgcagcaaggtgaaagtgatcgccaccgcctcaaggccggaatccgccgcctggtgccgtgagcgcggcgccgatctggtggtggactaccgcgatctgaagggcgagctggcgcagcacggcatcgagcaggtggattacatcctgtgcctgaacgataccgacggccactggccggcgatggccgagctggtcgcgccgctgggccatatctgcaccatcgtcgagaacgcgcagccgttggatcaaaacgcgctgaagctgaaaagcgccgcgctgcactgggaattcatgttcacccgcagcatgttcaccaccccggacattgcgcagcaggggcgcatcctgcagcaggtggcgcagctgctggacgagggcaagctgagcaccacgctgagcgaaaccctgcacgggctgtcggtagagacgctgaccgccgcgcatcaacggctgctcggcggccatatgcaaggcaagctggttatcgcttactaa

SEQ ID NO: 424579 - DNA, 912 bp, Serratia marcescens
atggaattcaaacagctgcaggacatggcgctgttcgcgctggtggcggagtgcggcagcttcaccgccgccgcgcagcgcgtcgggttgccgaagtccagcgtcagccagcgcatcagccagctcgaacagacgctggggctgcgcttgctcaatcgtaccacgcgccagctgaacctgaccttcgccggtgagcgctatctggaacattgtcaggcgatgatgtccgccgcggaacgcgccgatctggcgttgcagcggctgcgcgataacccgagcggccgcctgcgcatttcaacgcccgccgggctgggggcgaccctggtggcgcggctggcggcggattttcagcgccaatacccggacgtttcgctggaggtgtcggtatccgatgccatggtggatctggtgcaggaaggcttcgacgccgcgctgcgcaccggcaagccgcaggattcttcgctgatcggtcgccgtctcgggtatgcgccgcgctatctgttggccgcgccgtcctatctggcgcagcatccgccgatcgaacacccgcagcaactgcaacagcatcgctgcattgcccaccgcgcctggacggcctggaacctgcgctacggcgacgactactaccgttggcagctgccgctggcgcacaccaccgacaacctgctgtatgcgcgtgaatgcgctatcgccggcgcggggatcacgctgttgccggcgtttctcagccgcgaggtggtggcgcggaagctgttggtggaagtcttgccggcgtggcgcgcggagggcaacgagctgtatctggtttacccgagccgcaagctgaactccccggcgctggcctgcttcatcgatgtggtgctgcagcatccggcgttcgacgactatgcccgcgagctgccgcgggaataa

SEQ ID NO: 424580 - DNA, 996 bp, Serratia marcescens
atgcagaatcgccaaatcatcctcggcaaactcccacagggaaagctgaccgtcgattgttttcagactcgcgagaccccgatgccgatccccggccccggagaggttctgttgcgcacgctttacgtgcctttggatgcggccagcagagcctggatgcagggcgtcacctatcgttccggattgcagccaggagacatcatggccgcgacgacgctggccgaagtcgtcacgtcgcgctctcccctgctggccgccggcgatatcgtgttggcggaaaccggctggcaaaccttcacggccctgccggcggctgaggcgctcaaacagccggacatcgttccgcatacgcacttgctcagcgtttacggcgtacccggactcaccgcttacttcggcctgctggaatgcggacgccccaaggccggtgaaaccgtcgtcatttccgccgccgcaggggcggtaggcttgttcgccggacaaatcgcccggctccacggctgccgcacggtgggcattgccggcggcgccgccaaaacggctctgctgacggacaggctgggtttcgacgcggcgatagattataaggcggggaatctgcatgacggcctgcgccgctcgtgccccaacggcattgacgtgctgttcgacaacgtcggcggcgatattttggcggcctgcctgccgcacatggcgaaacaggggcgcattgtttgctgcggcgcggtgtcgcagtacgatacggcctccccaccggccgcgccggccgggatccccggtttgctgatcgtcaacagcttgacgatgcgggggttcctggtggccgacttccttcaccgacaagaacaggcgctgacggcgctcacggcctgggtcgcggagaagaaattagcggtcatcgaagatctgatcgccggttttgagctgctgcccgcggccttggttggcctgctggcgggggagaacacaggaaagcgcatcgtgcaagtgacgtaa

SEQ ID NO: 424581 - DNA, 969 bp, Serratia marcescens
atgaacaaacaaacgcccatcggctctggcttcaacgccaccaccaccgccgccgacgtgctcaaagatcgtcaactggccggcatgacggcgctggtcaccggcggccattccggcctggggttggaaacgactcgcgcattgacgcaggcgggagcacaggtgattgtcgccgcccgcgatcccgtcatcgcccgcactcgtctggccctcgccggtatcagcaacgtcgacatttatgagcttgatttggccgatctgaacaacattagagagttcgcgcaacatcttctggcgaccggcgtccacctcgatatggtgatctgcggcgccggcatcatggcctgtcctgaaacccgcatcggcccaggctgggaggctcaattcgcgatcaaccacctggggcattacgcgctggtgaaccacctctggccggcattggcgggcggcgcccgcgttgtcgtcatctcctcttccggccaccatgccagcgccatacgctggaatgacgtgcagtttcacagcggctatgacaagtggcgggcctacggccagtcgaaaaccgctaatgcgttattcgccgtgcacctcgacaaacgaggacgagccgccggtgtacgcgccttcacgctgcatcccggcatgatccccacgccactgcagcgttacctctcgcaggaagagatgctcgcattggactggatcgacgccaacggcaaacccgcccacccggaaatgctgaaaacgccgcaacagggtgcggcaacccaggtgtgggcggcgacatcgcctcaactcaatggccttggcggattgtattgcgaagactgcgatatcgcccggcgcaacgatgacgagggcctttccttcagcggcgtaaaaagctacgccgtcgatcctgaacaggcccaacgcctgtgggaattgtcggcgcaactcaccggcatcgacatcttcggcaagatttaa

SEQ ID NO: 424582 - DNA, 906 bp, Serratia marcescens
atggatcctttatcggaagtgctggcgccactgaacagccagaatgcgtttttcggcggcctgaaggccggcggcgactgggccgttcattttcccgctccgcaaggcgggaagttcaacgcggtggtgcgcggcggctgttggttggcggcggaagggctggcagaaccgctgtggctggcggccggcgactgtttactgctgactcgcagcctgccgctgaccgtcggcagcgacttgtctcttccggcgctcgacgccgacgcgctttatctgcaggcgcaaaacggcgtggcgagctgcggcgagggggaaacgtgcctgtttatcggcggccgttttagctttggcgaggaggtggagcggctgttcggcagcctgcccgcgttgatggtgatccgcgggggcacggaagaggcagccgtgctgcaatgggcgctgcagcggctggcggatgagctggtgaggccttcgccgggcagtacgttgatggcgcatcatctggggcaaatcatgttgacccaggcgctgcggatttacctgatgggggaggagagtgcggcgtccggctggctacccgctttgtttgatccgcgcatcggcgccgcgatgcaggcggtacatgccgatccggcccggcgctggacggtggcggcgttggccgacgcggcgagcgtttcccgttcgacgttggcgctgcgcttcaagcagaaagccggcatggcgccgctcgagtacgtgtcgcgctggcgcatgctgctggcggcgcgggcgctgcgtaccggcggtgaaccggtctccgctatcgcgcagcgtttggggtacgattccgacagcgctttcagccacgcgttcaaacgcgtgatggcgtgctcaccgcgcgactatcgccgggcgcaggcgtaa

SEQ ID NO: 424583 - DNA, 1668 bp, Serratia marcescens
gtggctcaatacgtctataccatgcaccgcgtcggcaaggtggtaccgccgaagcgtcatattttgaaaaacatctccctgagcttcttccccggggccaaaatcggcgtactgggcctgaacggcgccggtaagtccaccctgctgcgcatcatggccggcatcgataccgatatcgaaggggaagcgcgcccgcagccgggcatcaagatcggttacctgccgcaggagccgcagcttaacctcgaacacaccgtgcgtgagtcggtggaagaagcgctggcggaagtggtcggcgcgctgaagcgcctggacgaagtgtacgcgctgtacgccgaagaaggtgcagacttcgacaagctggccgccgaacagggccgcctggaagagatcattcaggcgcacgacggtcacaacctcaacgcccagctggaacgcgccgccgacgcgctgcgcctgccggactgggacgccaaaatcgcccacctgtccgggggtgaacgccgccgcgtcgcgctgtgccgcctgctgctcgaaaagccggacatgctgctgctggacgaaccgaccaaccacctggacgccgagtccgtggcctggctggaacgcttcctgcacgacttcgaaggcaccgtggtggcgatcacccacgaccgttacttcctggataacgtggccggctggatcctcgaactggaccgcggcgagggcatcccgtgggaaggcaactactcttcctggctggagcagaaagacgcgcgtctggcgcaggaagcgtccgccgaagccgctcgccgcaagtcgatcgagaaagagctggagtgggtgcgtcagggcgccaaaggccgtcagtccaaaggcaaggcccgtttggcccgcttcgaagagctgaacaacaccgaataccagaaacgtaacgaaaccaacgaactgttcattccacctggcgcacgcctgggcgacaaagtggtcgaagtcagcaacctgcgcaagtcctacggcgaccgcctgctgatcgacgacctgtcgttctcggtgccgaaaggggcaatcgtcggcatcatcggcccgaacggcgcgggtaaatccacgctgttccgcatgatgtccggccaggaacagcctgattccggcagcatcgtgctgggcgacaccgtcaagctggcgtccgtcgatcagttccgcgacagcatggacggttcgaaaaccgtgtgggaagaagtctccggcgggcaggacatcatgcgcatcggcaacaccgagatgccgagccgcgcctatgtcggccgcttcaacttcaagggcgtcgatcagggcaaacgcgtgggcgagctgtccggcggtgagcgtggccgtctgcacctggccaagctgctgcaggttggcggcaacgtgctgctgctcgatgaaccgaccaacgacctggatatcgaaaccctgcgcgcgctggaaaacgccctgctggaattccctggctgcgccatggtgatctcgcacgaccgttggttcctcgaccgtatcgccacccacattctggactaccaggatgaaggcaaggtggaattcttcgaaggcaacttcaccgagtacgaagagtacaaaaagcgtacgctgggcgccgacgcgctcgagccgcaccgcatcaagtacaagaagatcgccaagtaa

SEQ ID NO: 424584 - DNA, 498 bp, Serratia marcescens
atgatacagcaactgtttaaaggtcgtttttcactgctgacgatggtgttcgtcgccctgctggcgctcgccggctgccagagcaaaccgcagggcctgacgcccgagcagatcgcgctgctgcaatcgcagggcttcaaactgaccgataacggctgggagttcggcctgtcggataaagtgctgttcggcaacaacatcggcaagctgaacccggaaagcaccgagacggtgcagaagatgggccgcgcgctgctgagcgtcggcatcaccaagttccgcctggacggtcataccgacaactacggtgaagacagctataacgaccagctctctctgcgccgcgccgatgcggtggccgatctgctggccagcgtcggcattccgcgcgccaatatcgaaacccgcggcatgggcaagcgcgatcccgttgccgacaaccgcacctccagcggccgcgcggaaaaccgccgcgtcgcgatcgtcgtcacgccataa

SEQ ID NO: 424585 - DNA, 1248 bp, Serratia marcescens
atgaggctgttgcacagaaaccgcgccggcaatgcgcgcccgacgctgggccgagtgctgcagcgggtgcatcttgggctggcgctgatcgccgtcggcaccgccggcatctttttgacgctggtggcgctgtttgcgctgcgcgcctatgccgaccacaacctgcacctgatcgcgcgctccatcagctataccgtcgaggccgccgtggtgtttgaagacggcgccgccgcgcgtgaggcgctgatgctgatcgcctccaacgaagagatcctggaggcgcgcattctggataataaaggcaagatgctggccagctggcgccatccctccgacagcccgctgcacggtctggagcagatggttgcgcactgggcgctgcccgagccggtcatcctgcctatttctcacgggggcaaacaggtcggccaggtctggttgagcggcaacggcggcagcctgttgcgtttcctgttgcgcggcctggtcggcatgatcgcctgcatggtgctcagcaccctgtgcgctctggtgttgtcgcgccgtatgctggtcggcatcgtcagttcgctggacgacatcgccaacgtggcgcacgcggtgcgccgcgatcgcaccttcggcctgcgggtgccgtcggcgccgatcgccgagctgcatgagctcagcaacgatttcaacggcttgctcgacgagctggaggcctggcaggcccatctgaagcaggagaacgactcgctggctcaccgggcgacgcacgacagcctgaccggattgccgaaccgcgccttcttcgaagggcggctgagccgggcgctgggcgatatcgaaccgccggcgaaattggcggtgctgtttatcgacggcgatcgcttcaaggaggtgaacgacagttatggccacgccgcaggcgatgcggtgctgaccaccattgccgggcgcattcgcgcgcagctgcgcgagaccgatctggtcgcgcgtctgggcggggatgaatttgccgtgctgctggcgccggtacacggcacggaagatgtcctgcagatcgctgacaacatcatcgattgcatgacgcaaccggtcattttgccgaacgacgaggcggtcattacctctctgagtatcggtattgcgctgtaccctgatcacgcgtcgacgcctcagggtcttttgcacgaagctgacgatgcgatgtatcaggcaaagcatcgttataacggaggctggcggctggctatacataaataa

SEQ ID NO: 424586 - DNA, 606 bp, Serratia marcescens
atggcgaataagaccgcgatagcgatgcgttgcgcaaaaagccccgtgccgggcttccttgacgcacgtctgaatatcggtcgcctgctgctgatcgtgttgttggtgctgctgacgttgtccgggcctgcgcgcgccgccgatgatccctatcaaaaacgcacgcacgccgtgacgaccgtggtggtaggcatcatcagctacgcccgctggtcgcgtgaacccaatccgatccgcttgtgcgtgaccgcacccacccagtatgccgaagggctgttcgatccgatcctgctgagcgccccgcgtccgattaaagccgagcgtgtgccgttcgacagcccaacgctgagtaccggctgcgatgtcatctacttagggaacatcaccgccgcgcagagacaaaatttcatgcagcgcatttccggcaactccattctcagcatcagcgagaacgatagcgaatgctccgccggcagcgcattttgcctgcagatcgatggggaccaggccagtttcaaggtcaacctggacgctctggcgcgcagcggcgtgcgcgttcaccccaacgtgctgcagctggcacgcaaacaggcgccgccgctatga

SEQ ID NO: 424587 - DNA, 1929 bp, Serratia marcescens
atggtcaaggtggacaagcgacggctgttggcaatgggcctgtgcctgacggcgttttcaggcgcggcgctggcggattctctggatgcgcaacgtcagcgctaccagcagatcaaacaggcgtgggacggcaatcagatgggcgtggtggcgcagctgatgccgacgctgcgcgattatccgctttatccttacctggaataccgcgagctgacacaggatctgagccaggcggggttctccgaggtgaacgactttatcaaacgcaacccgacgctgccgccggcgaaatcactggccccgcgcttcgtcaatgagctggcgcggcgcgaagactggcgcaccctgttggccttcagcccgcagccgcccaaaccggtggcggcgcgctgcaactattactacgccaagtgggccaccggcgatcagcaggcggcctggagcggcgccgacgaactgtggctgaacggcaaaacgctgccgggcgcctgcgatcggctgttcagcgtctggcgcggcgcaggcaagcagacgccgctggatattctggcgcgcatgaagctggcgttgaaggagggcaacagttcgctggtcagcaacctctacagccagctgccggccgactaccagaccatgggcaacgccctggtgcgcttgcaaaacgatccgaccaccgtggaagccttcgcccgcagcgtggggccgaccgactttacccgcgccgccaccggcatcgcctttgagcgcctggcgcggcaggatgtggaaaacgcgcgggcgatgatcccgacgctcgcgcggctgcagaaaatgagcgacgacgagcggctggggctggaagaggcggtggcctggcgcctgatgggcagcgatgccacctatgaacaggcgcagtggcgcgatcgggtgattctgcgcagccgttcgccttcgctgctggagcgccgggtgcgcatggcgttgggcaacggcgatcggcagggcgtggcgacctggctggcccgcctgccggaagcgtcgcgcaacaaggatgagtggcgctactggcgcgccagtcagttgatggacgaaggcaaacgcgccgaaggcgaggagatattgcgtaacctgatgaccgaacgcggcttctatccgatggcggcggcgcagaagctgaacgccacttacccggtgatggtggcggtggcggccaagccgcgcgcgtcgctggtcgacgggccggaggttgcccgggtgcgcgagctgatgtactggaacatggacaacctggcccgcagcgagtggggctcctacgtcgccagccgcagccgaccggaacaagaggcgctggcgcgctacgcctttgagcaaaaatgggccgatctgagcgtgcaggcgaccatcgtcggcaagctgtgggatcacctggaggaacgcttcccggtcgcctggccgcaggagttccgccgcgccaccgataacaaggggatcaccaccagctatgcgatggcgatagcgcgccaggagagcgcctggaatccgaaggcgcagtcgccggttggcgcttccggcctgatgcaggtgatgccgcgcaccgcgcagcatacggtgcagatgttcaatattcccggctacgtcggcccgagccagctgttcgatccgcagaccaacatcaccatcggcaccagctatctggagtcggtctatcagcagttcggccgcaaccggatcctgtcgagcgccgcctataacgccggcccgtcacgggtgaacacctggctgggcaacagcgcggggcgtatcgatccggtggcgttcatcgaaagcattccgttctcggaaacccgcggctacgtcaagaatgtgctggcctacgatgcgttttaccgctatctgacgcaccggccggccaaggtgctgaccgacgccgagtggcagagacgttattga

SEQ ID NO: 424588 - DNA, 330 bp, Serratia marcescens
atgacgcaattatcgttaaacgaccccgctctttcagaacaaggcaatgaggattggctgcgcttcgtcgcgctgctgcagaattcgtttgcgcaagagctgcatcaaccgctgctgcagctgatgctgacgccggacgagcgcaccgcgctgggcacccgggtgcggatcattcaggaactgatgcgcggcgagatgagccagcgcgagctgaaaaatgaactgggcgcggggatcgccaccatcacccgcggctcgaacagcctgaaagcggcttcacccgagctgaaacagtggcttgagcagcagctgttgcacgacgcgccctag

SEQ ID NO: 424589 - DNA, 519 bp, Serratia marcescens
atgtaccatgttgtcgctgcaactaccaacccggcaaagatcaaggctattcaactggccttcgatgacgtctttggcgcgaaccaataccgcattgaatccgttgacgtcgccagcggcgtctcgctgcagccaataggcaaccacgaaacccgcaccggttcgcgtcaacgcgtcatggaagcgcgccaggtcagacccgaggccgatttttgggtcggcgtggaagccgggattgaagagaatatgaccttcgcctggatgaccatcgagaacccgcacatccgcggcgaatcccgctcggcgagcctgatgctgccggaagtcatcttacaaggtattcgcgccggtcgcgaattgggcagcgaaatggcggcgatcaccggcaatgccgaggtgaagcgccagggcggcgccatcggcgtcttcaccgacggccggctgagccgcaccagcgtttaccaccaggcgctgctgctggcgctggtgccgtttcacaacgccatctatcagcaatag

SEQ ID NO: 424590 - DNA, 648 bp, Serratia marcescens
atgttacaggtatacctcgttcgccatggcgaaacggaatggaacgcggctcgccgtatccagggtcagtccgacagcccgttaaccgccatgggtgaacaccaggcccgtctggtcgccaggcgcgtcagcaaggaaggcattacgcacatcattaccagcgatctggggcgcacgcgccgcaccgcgcagatcatcgccgaagcctgtggctgcgaagtgataggcgatccgcgtttgcgtgagctgcacatgggggttctggaagaacgcctgatcgacagtttgacgccgcaggaagagcagtggcgcaaacagatggtcgatggtactcctgacggccgtatccctcaaggcgaatccatggaggagctgggcgagcgcatgcgcgccgcgctggagagctgcctgatgctgcctgaaggcagcaagccgctgctcgtcagccatggcatcgcgttggggtgtttgatcagtacggtgctggggctgccggcctatgcggaacgccgtttgcgcttgcgcaactgttcactgtcgcgcgtcgatcaccagcagagcccgtggctggcttccggctggatcgtggagaccgcgggcgatgtcacgcatctggacatgcccgcgttggacgaactgcagcgttaa

SEQ ID NO: 424591 - DNA, 870 bp, Serratia marcescens
atggatcaagccggtatcattcgtgatctgcttagctggctggaaagccatttggaccaacccttgtcgctggataacgtggcggccaaggccggctattccaaatggcacctgcaacggatgttcaaagatattaccggtaacgccatcggtgcttacatccgggcaaggaggctgtccaaagccgccgtcgcgctgcgtttgaccagccggccgattttggatatcgccctgcagtatcgcttcgactcgcagcagaccttcacccgcgccttcaaaaaacagtttgcgcaaacgccggcgctgtaccgccgcgccgaagactggaacgcattcggcatctgcccgccgatccgtctgggggctttcaccctgccgcagccggaattcgtctcgctgccggacaagcgcctggtcggcctgacccaaagctactcctgtacgctggaacagatcaccaccgtgcgcaccgagctgcgctcgcagttctggcgccagttcctcggtgacgtcgaaaccctgccgccggtactgtacgggctgcaccactcgcggccgagccaggagaaggacgacgaacaggaagtgctgtacaccacggcgctggagccggatcaggtgcctgacaaggcgcaggaaggccagccgctggtgttgccgggcggtgagtttgcgatgttcagctacgaagggcccactgagggcctgcaagactttattctgacggtctacggcacctgcctgccggcgctccagctgacgcgccgcaaagggcacgacatcgaacgcttctacccgaaaggcgagcgccgtccgcatcaggcacctatcgagatcaagtgcgactacctgatcccgattcggcgttaa

SEQ ID NO: 424592 - DNA, 480 bp, Serratia marcescens
atgaaaaaaggctggatatttttattcggtttggtttgcgcaaccgttggcagcgcgcaggcggagcaggtgggctccgttgataccgtgtttaaattgttggggccggaccacaaaatcgtggtggaagcgttcgacgatccggatgttaaaaatgtaacttgttatatcagccgcgccaaaaccggcggcatcaaaggcggcctggggctggcggaagacaccgccgacgcggccatttcctgccagcaggtggggcctatcgagctgagcgacaagatcaaaaacggcaagtcggaaggtgaggtggtattccagaaacgcacttcgctggtgttcaagaagctgcaggtggtgcgcttctacgacgccaagcgcaattcgctgatttacctgagctactccgacaaggtgatcgacggttcgccgaagaacgcgctgagcgcggtgccgatcatgccgtgggctgagacgaaataa

SEQ ID NO: 424593 - DNA, 717 bp, Serratia marcescens
atgcagaccccgcacattctgattgtcgaagacgagttagtcactcgtaacaccctgaagagcattttcgaggcggaaggctacattgttcatgaagccaatgatggtgcagagatgcacaatatcctgtctgaaaatgatatcaatctggtcatcatggacatcaacctgccaggcaaaaacggcctgctgttggcgcgcgaactgcgtgaacaggccagcgtcgccttgatgttcctgaccggtcgcgataacgaagtggacaaaatcctcggcctggaaatcggcgccgacgattacatcaccaagccgttcaacccgcgtgagctgaccatccgcgcgcgcaacctgctgtcgcgcaccatgaacctgggcagcctcggcgaagagcgccgcctggtcgagagctacaagttcaacggttgggagctggacatcaacagccgttcgctgatcagcccggccggcgaacagtataagctgccgcgcagcgaattccgcgccatgctgcacttctgcgaaaacccgggcaagatccagtcccgcggcgaactgctgaagaaaatgaccggccgcgagctgaagccgcatgaccgcaccgtggacgtcaccatccgtcgcattcgcaaacacttcgaatcgacgccggacacgccggaaatcatcgccaccattcacggcgaaggctaccgcttctgcggcgatctggaagagtaa

SEQ ID NO: 424594 - DNA, 687 bp, Serratia marcescens
atgcagcttcatattgttttagtggctccggcgcggccggaaaatgtcggcgcggcggcgcgcgcgatgaaaaccatgggcttcacgtcgttgcgcatcgtcgacagcgaggcgcacctgcagccggcggcgcgctgggtggcgcacggagccggcgagatcctcgacggcgtgcaaacgttcgccacgctggaactggcgctggcggacgtggatttcaccgtcgccaccaccgcccgcagccgcgcgcgttttcactattactgcacgccgcccgagctgctggaacagctgagcgagcgcaagcagtgggtcggccaggccgcgctggtgttcggccgcgaagattccggcctgaccaacgaagagctggcgctggcggatttgctgaccggcgtgccgatgcaggcggactatccgtcgcttaacctgggccaggcggtgatggtttactgctaccagctggcgagcctgatgggcgtcagcacgccgcaggaaacggtggcgccggaagggcagctcaaggcgctgcgccgccgcgccgatgccttgttgaacgcattggatgtcggcgatgatcaaaaattgcgcgactggctgcaccagcggctcggcgcgctgcaacagcgagatacggcgatgttgcatacgctgctgcacgacatcgaaaaaaaactcgccaagtga

SEQ ID NO: 424595 - DNA, 2460 bp, Serratia marcescens
atgcgagtgctgaaatttggcggaacctcggtggcgaatgcagaacgttttctgcgcgttgccgacatcatggagagtaatgcgcgtcagggacaggtagccacggtcttgtccgcccccgcaaagatcaccaaccatctggtggcgatgatcgacaaaacggtggcgggccaggacattctgccgaatatcagcgacgccgagcggatctttgccgatctgctgagcggcctggcgcaggcgctgccgggctttgaatacgatcgcttgaaaagcgtggtcgatcaggagttcgcgcagctcaaacaggtgctgcacggcgtttcgctgctggggcagtgcccggatagcgtaaacgcggcgatcatctgccgcggcgaaaagctctccatcgccatcatggaaggggtgttccgcgccaagggctacccggtcacggtgatcaacccggtggagaaactgctggcacagggccactacctggagtccaccgtggacatcgccgagtccacgctgcgcatcgccgcggcggcgatcccggctgaccacatcgtgctgatggctggtttcaccgccggtaacgacaagggcgagctggtggtgctgggccgtaacggctccgactattccgccgccgtgctggccgcctgcctgcgcgccgactgctgcgagatctggaccgacgtcgacggcgtgtatacctgcgatccgcgcaccgtaccggacgccaggctgctgaagtcgatgtcgtatcaggaggcgatggaactctcttatttcggcgccaaagtgctgcaccctcgcaccatcacgccgattgcccagttccaaatcccttgcctgattaaaaacacctccaacccgcaggcccccggcacgctgatcggcaaagacagcaccgatgacgcgatgccggtgaaaggcatcaccaacttgaacaacatggcgatgatcaacgtctccggcccgggcatgaaaggcatggtcggcatggccgcgcgggtgttcgccgtgatgtcgcgcgccggcatttcggtggtgctgatcacccaatcctcttccgaatacagcatcagcttctgcgtgccgcagggcgaactgctgcgcgcgcgccgcgcgctggaggaggagttctatctggagttgaaagacggcgtgctggatccgctggacgtgatggaacgcctggcgatcatctcggtagtcggcgacggcatgcgcaccctgcgcggcatctccgcgcgcttcttctccgcgctggcgcgcgccaacatcaatatcgtcgccatcgcccagggctcttccgagcgttcaatctcggtggtggtcagcaatgaatccgccaccaccggcgtgcgcgtcagtcaccagatgctgttcaacaccgatcaggtgatcgaagtgttcgttatcggcgtcggcggcgtcggcggagcgctgatcgaacagatttaccgccagcagccgtggctgaagcaaaagcatatcgacctgcgggtgtgcggcatcgccaactcgcgcgtgatgctgaccaacgtgcacggcattgcgctggacagctggcgcgacgaactggccggcgcgcaggagccgttcaatctcggccgcctgatccggctggtgaaggagtatcacctgctgaatccggtgatcgtcgactgcacttccagccaggcggtggccgatcagtatgtggacttcctggcggacggtttccacgtggtgacgccgaacaaaaaggccaacacctcgtcgatgaactattatcagcaactgcgcgcggccgccgccggttcgcaccgcaagtttctctacgacaccaacgtcggcgccggtttgccggtgattgagaacctgcaaaacctactgaacgccggcgatgagctggtacgcttctccggcatcctgtccggctcgctgtcctttatcttcggcaagctggacgaagggctgtcgctgtcggcggcgaccctgcaggcccgagctaacggctataccgagccggatccgcgcgacgatctgtccggtatggacgtggcgcgcaagctgctgatcctggcgcgcgaggccggttacaagctggagctgagcgatatcgaggtcgagtcggtgctgccgccgtccttcgacgcgtcgggcgacgtggatcagttcctggcgcgcctgccggagctggataaagagttcgcgcgcaacgtggccaacgccgccgagcaaggcaaggtgctgcgctatgtcggcctgatcgacgaaggccgctgcaaggtgcgcatcgaggcggtggacggcaacgatccgttgtataaagtgaaaaatggtgagaacgcgctggccttctacagccgctactatcagccgctgccgctggtgctgcgcggctacggcgccggtaacgatgtgaccgcagcgggcgtgttcgccgatctgctgcgcacactgtcatggaagttgggagtttaa

SEQ ID NO: 424596 - DNA, 930 bp, Serratia marcescens
atggttaaggtgtatgcaccggcctcgatcggtaatgtcagcgtcggtttcgatgtgctgggcgcggcggtttcgccgatcgacggcacgctgctgggcgactgcgtcagcgtagaagccgccgagacgttcagtttgcagaatgccgggcgcttcgtcagcaagctgccggccgagccgaaagagaacatcgtttatcaatgctgggagcgcttctgccaagagatcggccgcgaagtgccggtggcgatgcggttggaaaagaacatgccgatcggatcggggctgggctccagcgcctgttcggtggtggccgggctgatggcgatgaacgaattctgcgatcgcccgctggataagacgacgctgctcggcctgatgggcgagctggaaggccgcatttccggcagcgtgcattacgacaacgtggcgccttgctaccttggcggcctgcagctgatgctggaagaagaaggcatcatcagccaggaggtgccgtgcttcgacgattggctgtgggtcatggcctatccgggcatcaaggtctccaccgccgaagcgcgcgccattttacccgcgcaataccgtcgtcaggattgcatcagccacggtcgctatctggccggctttatccatgcctgccacacccgtcagccgcagctggccgccaaattgatgcaggacgtgatcgccgaaccgtaccgcacccggctgctgccgggcttcgccgaagcgcgcaaggcggcgcaggacatcggcgcgctggcctgcggcatctccggctccggcccgacgctgttcgccgtctgcaacgacggcgccaccgcgcagcgcatggccgcctggctgcaacaacactatctgcaaaacgacgaaggttttgttcatatttgccgtctggataccgcaggcgctcgactactgggataa

SEQ ID NO: 424597 - DNA, 1290 bp, Serratia marcescens
atgaaactgtacaaccttaaggatcacaacgagcaggtcagcttcgcgcaggcgatcaaacaaggcctgggcaagcagcaggggctgttcttcccgctggagctgccggagttcgaactgaccgagatcgaccaactgctggagcaggactttgtcacccgcagcagccgtattctgtcggcctttatcggcgaagaggtaccggaagcggcgctgaagaaacgcgtgcaggccgcttttgagttcccggcgccggtggcgaaagtgaccgaagatgtctcctgcctggagctgttccacggcccgacgctggcgttcaaagacttcggcggccgctttatggcgcagatgctggcggaagtggccggcgatcagccggtgaccattttgaccgccacctccggcgacaccggcgccgccgtggcgcacgccttctacggcctgaaaaacgtccgggtggtgatcctctatccgcagggcaaaatcagtccgctgcaggagaagctgttctgtactctgggcggcaacattcacaccgtagcgatcgacggcgacttcgatgcttgccaggcgctggtgaagcaggcgttcgacgatcgggaattgaaggacgcgctgcacctgaactcggccaactcgatcaacatcagccgcttgctggcgcagatctgctactacttcgaagcggtggcgcagctgccgcaggaagcgcgcaatcagctggtgatttcggtgccgagcggcaacttcggcgatctgaccgccgggctgctggccaagtcgctgggcctgccggtgaagcgctttattgccgccaccaacgccaacgacaccgtgccgcgcttcctgaccagcggccagtggcagccgcacgccacggtcgcgacgctgtccaacgccatggacgtcagccagccgaacaactggccgcgcgtggaagagctgttccgtcgtaaggtctggcagctgaaagagctgggccacgcggcggtcagcgatgagaccaccaaggaaacgatgcgtgaactggccgagctgggttatatctccgaaccgcacgcggccattgcctatcgcgcgctgcgcgatcggctgcaggaaggggagttcggtctgttcctcggcaccgcgcacccggccaagtttaaagagagcgtagaagcgatcctcggccaggagctgccgttgccgaaagcgctggcgctgcgggccgatctgccgctgctgtcgcacacactgccggccggctttgccgagctgcgcaagttcctgatggcgctgccggcctga

SEQ ID NO: 424598 - DNA, 777 bp, Serratia marcescens
atgctcgttattatttcccctgcaaaaactctcgattacgacagcccgctggcgacagaacgcttcacgcagcccgaaatgctggacaagtcgaaacagctgatcaaaatttgccgcgagctgacaccggcgcaaatcgccagcctgatgagcatcagcgacaagctggccgggctgaacgccgcgcgctttagcgagtggcagccgaaatttaccccagacaatgcccgtcaggcgctgctggcgttcaagggcgacgtttacaccggcctgcaggcgcaggatttcagcgaagccgatttcgacttcgcccagcagcatctgcgcatgctgtccggcctgtatggcgtgctgcgcccgctcgatctgatgatgccgtaccggctggagatgggcatcaggctggaaaacccgaaaggcaaagacctgtacagcttctggggcgataaaatcacccaaaaactcaacgaagcgctggagcagcagggcgacgacgtggtggtcaacctggcgtccgacgagtatttcaaggcggtgaagccggccaaactgcacggcgcgctgatcaaaccggtgttcctcgacgagaagaacggcaagtacaaggtcatcagcttctacgccaagaaagcgcgcgggttgatgagccgctttatcatcaaaaatcgcctgacgcgcagcgagcagctggtggacttcaacctggaaggctacgccttcgacgaagccgcctcgcagggcaatgaactggtgttcaaacgcccggagcaggcataa

SEQ ID NO: 424599 - DNA, 1437 bp, Serratia marcescens
ttgacggacctgatgaattttataaacaacattttgtgggggtcggtgctgatttatctgctgctcggcaccggcatctacttcacgttgcgcacccgctttatccagctccgccacttcagccacatgttctcggtgttgaaaaacagcaataagagcgacagcgccggcatctcctctttccaggcgctgtgcaccacgctggcggcgcgcgtcggcaccggcaacctgaccggcgtcgccatcgccctgaccgccggcggccccggcgccatcttctggatgtgggtggtggcgtttatcggcatggccacctcatttgtggaaagctcgctggcgcagctctacaaaaccaaagacgataacggcaactaccgcggcggcccggcctactacatggaaaagggcctcggcatgcgctggatgggcgtgctgttctcgatcttcctgatcatcgctttcggcctggtgttcaacgccgtgcaggccaactccatcgcgcaggcctccgccgtcgccttccatttgcagccgctgcacgtcggcatcggcctggtgctgctgagcggcgtggtgatcttcggcggcatccgctccatcgccaaagtggccgagctggtggtgccgctgatggccggcgcctacctgttgctggccctctgggtgattggccataacatcgaacacatgccggcgatcctgacgctgatcttcaaaagcgccttcggcctgcaggaagccgcggccggcgccgtcggttacggcatctcccaggcgatgacccagggcgtgcagcgcggcctgttctccaacgaagccggcatgggctcggcgcccaacgcggcggcgtccgcttcaccttatccgccgcatccggcctcacagggctatgtgcaaatgctcggggtgtttatcgataccatcgtcatctgcagcgccaccgcggcgatcatcctctcctccggcattctcgatcagccgaccgacagcatcagcggcatcgatctgacccagcgcgcgctgtcgaccgccgtcggcagctggggggcgccgttcgtcgccatcgccattttcttcttcgccttcacctcgatcatcgccaactacgcctatgccgagagcaacctggtgttcctcgagcacaaccatccgggcggcctgctgattttccgctgcgtggcgttgggcatggtgatgttcggcgcgctggcggagctgccgctggtgtggaaaatggcggatacctccatggcgctgatggccatcaccaacctgacggccatcctgttgctgtcgcgggtggcgcttaagctggccgacgactaccatcgccaacgccgtctgggcaagctgccgaccttcgacgccaaccgttatccggagctgaagtcgcagctggagccgggcgtgtgggacgaccaaaagccgccgcgctga

SEQ ID NO: 424600 - DNA, 954 bp, Serratia marcescens
atgaccgacaaattaacttccctgcgccagctgaccacggtggttgcagatacgggtgatatcgcggcaatgaagctgtatcaaccgcaggacgccacaaccaacccttcgctgatcctcaatgcagcccaaattcctgaataccgtaaactgattgacgaagccatcgcctgggcgcgcggccagagcagcgatcgcgagcagcaaatcgccgacgccgccgacaagctggcggtcaacatcggtctggaaatcctcaaactggttccgggccgcatctcaaccgaagtggatgcacgtctgtcttacgacaccgatgccagcgtggccaaggccaagcgcctgatcaagctgtacaacgaagccggcatcagcaacgatcgcattctgatcaaactggcctcgacctggcagggcatccgcgcggcggagcagctggagaaagaaggcatcaactgtaacctgacgctgctgttctccttcgctcaggctcgcgcctgtgccgaagccggcgtttacctgatctcgccgttcgtcggccgtatcctcgactggtacaaagccaacggcgacaagaaagagttcgccccgcatgaagatccgggcgtgatctccgtgaccgagatttaccagtactacaaacagcacggttacaacaccgtggtgatgggcgccagcttccgtaacgtcggcgaaatcatcgaactggccggctgcgaccgtctgaccatcgcccctgcgctgctgaaagagctggcggagagcgaaggcgcgctggagcgcaaactgtcttacaccggtgaagtgaaggcgcgtcctgccgcactgaccgaacctgagttctactggcagcacaaccaggatccgatggcggttgagaaactcaccgacggcatccgcaagttcgccgtagaccagggcaaactggaaaaaatgatcgccgacctgctgtaa

SEQ ID NO: 424601 - DNA, 588 bp, Serratia marcescens
atggatattttacgtattggtttggtttccgtttccgaccgcgcttccggcggcgtttatcaggataaaggcattccggcgctggaggaatggctgagcggcgcgctggcgacgccgttcaagctggaaacccggctgatccccgatgagcagacgcaaattgaacagacgctgtgcgagctggtggacgaaatgggttgccatctggtgctgaccaccggcggcaccgggccggcgcgccgcgacgtcacccccgacgccacgctggcgatcgccgatcgcgtgatgcccggcttcggcgagcaaatgcgtcagatcagcctacactatgtgccaacggcaattctttctcgccaggtgggggcgatccgcaagcaggcgctgatcatcaacctgcccggccagccgaagtcgatcaaggaaacgctggaaggggtaaaagatgagcagggcaatgcggtggtgcacggcatcttcgccagcgtgccttattgcattcaactgctcgacgggccttacgtcgaaacgcacgccgcggtggtagcagcatttcggccaaagagcgcgcgtcgcgagataaacctctaa

SEQ ID NO: 424602 - DNA, 1308 bp, Serratia marcescens
atgcctcacgacaataatcgccggctgaaccggcaagactacaaaacgctgacgttggccgcgttgggcggcgcgctggagttttacgacttcatcatcttcgtgttcttcgccgccgtggtcggcgatctgttcttcccggcggacatgccggaatggctgcggctggtgcaaaccttcggcatcttcgccgccggctatctggcccgtccgctgggcggtatcgtgatggcgcactttggcgatctggtcggccgcaaaaagatgtttaccctgagcattctgctgatggcgttgccgacgctggcgatgggcctgctgccgacctacgccagcatcggcatcgctgcgccgctgctgctgttgttgatgcgcgtgctgcagggggcggcgatcggcggtgaggtgccgggcgcctgggtcttcgtcgctgaacacgtgccgcgccggcgcatcggcttcgcctgcggcacgctgaccgctgggctgacggtgggcatcctgctgggctcggtggtggcgacggtgatcaacaccacgctcagcccgcagagcattgccggcggcggctggcgcattcctttcctgttgggcggtatgttcggcctggtggcgatgtacctgcgccgctggctgcaggaaacgccgatcttcatcgagatgcaggcgcgtaaagcgctggccgaagagctgccgctgaagtcggtggtgctcaaccacaaacgggaggtggcggtatcgatgctgctgacctggctgctctccgccggcatcgtggtggtgatcctgatgaccccgacctatctgcaaaagcagttcggcatcgcgccggccttgacgctgcaggccaacagcatcgccaccatcatgctgatcgccggctgcatcgtcgccggtttgtcggccgatcgcttcggcgccagcaaaacgctggtggtcggcagcgtgctgctggccggctgcagttggctgttctatcaaacggtgggcgtgcgcccggaaatgctgttcgcctgctatgccctggtggggttcagcgtaggcgtggtgggggccgtgccgtacgtgatggtgcgggctttcccggcggaagtgcggtttaccggtatctcgttctcatataacgtctcgtacgctatttttggcggtctaacccctatttttgtgacgctgatcatgaaattaaccccgttagcacccgcttactacgtgttgacgctgtcgctcatcgggctgctgctcggcgtctacctgcatcgcgacctgaacagcgaagctggggagcggcgagccgattcctacagctaa

SEQ ID NO: 424603 - DNA, 600 bp, Serratia marcescens
atgcacaccaacaagttggcgaatcccggccctctcggcctgatgggcttcgggatgaccaccgtcttgctgaacctgcacaacgcgggctttttcccactgaactccgccatcatcagcatggggattttcttcggtggcctggcccagatcctggccggtctgctggaatacaagaagggcaacaccttcggcatgaccgccttcaccgcctacggcagtttctggctgagcctggtcggcctgctgctgctgccgcgtctgggcctggctgaggccaccgaggcgcacgtgctgggcatctacctggcgctgtggggcatcttcaccctgttcatgttcttcggcaccctgggcgccaaccgcgtactgcagttcgtgttcgccagcctcacgctgctgttcgccctgctggccgtcggcaacatcaccggcaaccacgcgctgctgaccttcgccggttatgaaggcatcatctgcggcgccagcgccatttacctggcgatggccgaagtgctcaacgagcaatacggccgcaccgtgctgccgattggcgaaccggccccggcccgcgtcgcgacctcaccggtcaccgcataa

SEQ ID NO: 424604 - DNA, 1914 bp, Serratia marcescens
atgggcaaaattattggtatcgacctgggtactaccaactcttgcgtagcaattatggatggtgccaaggcacgcgtgctggaaaacgccgagggcgaccgcaccactccttctattatcgcatatacccaggacggtgaaactctggttggccagccggctaagcgtcaggcagtgaccaaccctgaaaacaccctgttcgccatcaagcgcctgatcggccgccgcttccaggatgaagaagcgcagcgcgacaaagcgatcatgccgtacaaaatcgtcgaagccgacaacggcgacgcctggctggaagtgaaaggtcagaaaatggctccgccgcagatctctgcggaagtgctgaaaaaaatgaagaaaacggcggaagattacctgggcgaaccggtaactgaagcggttatcaccgtaccggcttacttcaacgacgcccagcgtcaggcgaccaaagacgccggccgcatcgcgggtctggaagtaaaacgcatcatcaacgaaccgaccgctgcggccctggcctacggcctggacaaagaagtcggcaaccgcaccatcgcggtttatgacctgggcggcggtactttcgatatctccatcatcgaaatcgacgacgttgacggcgaaaaaaccttcgaagtgctggcgaccaacggtgacacccacctgggtggcgaagacttcgacagccgtctgatcaactacctggtggaagagttcaagaaagatcagggtatcgatctgcgcaacgatccgctggcgatgcaacgcctgaaagaagccgctgagaaagcgaagatcgaactgtcttccgctcagcagaccgacgttaacctgccgtatatcactgcagacgcgaccggtccaaaacacatgaacatcaaagtgactcgcgccaaactcgagtcgctggttgaagatctggttgcgcgctctatcgagccgctgaaagtggcgctgaaagacgcaggcctgtcggtttccgacattcaggacgtgatcctggtgggcggccagacccgtatgccaatggtgcagaagaaagtcgcagacttcttcggcaaagaaccgcgtaaagacgtgaacccggacgaagcggttgccgtgggcgcggcggtacagggcggcgtgttggccggtgatgtgaaggacgttctgctgctggacgtgaccccgctgtcgctgggtatcgaaaccatgggcagcgtgatgacgccgctgatcaccaaaaacaccacgatcccgaccaagcacagccaggtgttctctaccgctgaagacaaccagtctgcggtaaccatccacgtgctgcagggtgagcgtaagcgcgccagcgataacaaatctctgggccagttcaacctggacggcatccaggcggcaccgcgcggcatggcgcagatcgaagtgacctttgatatcgatgccgacggcatcctgcacgtgtccgccaaagacaagaacaccggccgtgagcagaagatcaccatcaaggcatcttctggcctgaacgaagacgaaatccagaaaatggtgcgcgatgccgagctgaacgctgaagctgaccgcaagttcgaagagctggtgcagacgcgtaaccaggcggatcacctgatccacggcacgcgcaagcagctggaagaagcgggcgacaaactgccggcggaagacaaaacggcgatcgaagcggcgctgaaagatctggaagcggcggtgaaaggcgaagacaaagccgagatcgaagcgaagactcaggctctggtgcaggtttccggcaaactgctggaaatggctcaggcgcagcaggctcagcagggtgctgacgccggcgcggacaacgcggcgcagaaagacgacgacgtggttgacgctgagttcgaagaagttaaagacaaaaaataa

SEQ ID NO: 424605 - DNA, 1125 bp, Serratia marcescens
atggcgaagaaagactattacgagattctcgacgtcagcaagacggcggatgaacgtgagatcaaaaaggcgtacaaacgcctggcgatgaaataccatcctgaccgcaaccaggaacaagacgccgaaatcaagtttaaagaagttaaagaagcttacgaagtcctgaccgacgaccagaaacgcgcggcctacgaccagtatgggcacgcggcctttgaacagggcggcatgggcggcggcggctttggcggcggtgccgacttcagcgatatctttggcgacgtgtttggtgacatcttcggcggaggtcgccgtcagcgcgccagccgcggttccgatctgcgctataacatggagctgaccctcgaggaagcggtacgtggcgtcaccaaagagatccgcatcccgacgctggaagagtgcgacgtctgccacggcagcggcgccaagccgggcagctcgccggtgacctgcccaacctgtcacggccagggccaggtgcagatgcgccagggcttcttcaccgtgcagcaggcgtgtccgcactgccatggccgcggtcagatcatcaaagatccatgcaacaagtgccacggccacggccgggtagagaaatccaaaacgctgtcggtgaaaattccggccggcgtcgataccggcgaccgcatccgcctggcgggtgaaggcgaagccggcgagcacggcgcaccggcgggcgatctgtacgttcaggtgcaggtgaaggcgcacccgatcttcgagcgtgaaggcaataacctgtactgtgaagtgccgatcaacttcgccatggcggcgctgggcggcgagattgaagtgccgacgctggacggccgggtgaaactgaaggtgccttcggagacccaaaccggcaagctgttccgcatgcgcggcaagggtgtgaaatcggtgcgtggcggcagccagggcgacctgctgtgccgcgtggtggtggaaaccccggtcaatctgaacgacaagcagaagcagctgctgcgtgagctggaagagagcctgggtggcccgtccggtgataagaacagcccgcgttcgaagagcttcttcgacggggtgaaaaagttctttgacgatctgactcgctaa

SEQ ID NO: 424606 - DNA, 1167 bp, Serratia marcescens
gtgaccaatatcattcgtcaatttttacgtcaggaagctgcgggcggcatcattctgatcgcggcggcaatcgtcgccctgatcatggccaacaccccggcgcaggggatctatcaggcattccttaacctgccggtgatggtgaagattgcttcgctggagatcgccaagccgctgctgctgtggatcaacgatggcctgatggccatcttcttcctggtggtggggctggaggtcaagcgcgagttgatgcaaggctcgctgtccgggcgcgacaaggcggtgtttccggcgatcgccgcgctggggggcatgctggcgccggcgctgatttacctgctgttcaacggcgcggatgaagtcacccgccagggctgggcgatcccggccgcgaccgatatcgccttcgcgctgggcgtaatggcgctgctgggcaaccgggtgccgaccagcctgaaagtgttcctgctggcgttggcgatcatcgatgacctgggcgtgattatcatcatcgcgctgttctacacccacgaagtgtcgatggtggcgctgggcgtggcggcggcggcgacggtgctattggcggtaatgaactggcgtggcgtgggtaaaacctcgctgtatatgatggtcggcctggtgttgtgggtagcgatcctcaagtccggggtgcatgcgacgctggccggggtgatcgtcggctttatgatcccgctgaacgtgaagaaggggccgtcgccgtcggaaacgctggaacatgagctgcacccctgggttgcgtttatgatcctgccgctgttcgctttcgccaacgccggggtttctttgcagggcgtatcgctggaaggattgacgtcgctgctgccggttgggattgcggccggcctgtttatcggtaagccgctggggattttcctcttcagcctgctggcggtgaaaatgggcatcgcccgtttgcctgaaggcatcggcttcaaacaggtgtttgccgtttcggtgctctgcggcattggtttcaccatgtcgatttttatcgcctcgctggcgttcggcgatgcggatgcggcgctcagcacctattcccgcctggggatcttgttgggctccaccgctgcggcggtggtagggtatggattgctgcgtctggcgttgccgcgcgtacgttaa

SEQ ID NO: 424607 - DNA, 900 bp, Serratia marcescens
gtgaggatgtcgcatatcaactttaatcacctttactatttctggcaggtctgcaaggccggttccgtggtcggtgccgccgaagcgttgtttctgacgccgcagaccatcaccggccagatcaaagcgctggaagaacggttggacggcaagctgttcaaacgccaggggcgcgggttggtgccttcggagctggggcaactggtgtttcgttatgccgacaagatgtttatgctcagccaggaaatgctggatatcgtcaactaccgcaaagagtcgaatctgctgttcgacgtcggcgtggccgatgcgttgtcgaagcgcctggtcagccaggtattggaaacggcggtggtggtggacaacgaacagatccacctgcgttgctttgaatcgacgcacgagatgctgctggagcagctcagccagcacaagctggatatgatcctgtcggattgtccggtggactccagccagcaggaagggctgttctcgctgaagctgggcgagtgcggcatcagcctcttctgccgccagccggcgccggagctgccgttcccggcttgtctggagcagcgcaaactgctgatccccggccgccgctcgatgctggggcgcaagctgctcaactggttcaatacgcagggcattcaggtggagatcctgggcgagttcgacgatgcggcgctgatgaaggccttcggcatgtatcacaatgcgattttcgtggcgccgacgttgtatgcgcaggatacctacaacgatgacaacgtggtggagattgggcgcatcgacagcgtgcaggaggagtattacatcatcttcgccgagcgcatgatccagcatccggcggtgcagcgcgtgtgcaacaaagatttttctgcgctgttttcctgctag

SEQ ID NO: 424608 - DNA, 150 bp, Serratia marcescens
atgacgcgctgctttgtttttgtggatcaggcctttagctgcctgacggtccaccaggggctgcattaccaggaatgcattttgtgctgcttctttgtcgccagctgcgatagctgcgtctaccttcttgatgaaggtacgcaccattga

SEQ ID NO: 424609 - DNA, 939 bp, Serratia marcescens
atggagctaattcgcggcattcacaatatccgggcgcgccaccatggttgcgtgctcaccatcggcaactttgacggcgtgcatcgcggtcatcaggcgttgctggagcagttgaagcaacaagggcaacgcctcgggctgccggtgatggtcatgatctttgagccgcagccgctggagatgttcgccgcagacaaggcgccggcccgcttgacgcgcctgcgcgacaaggccaactacctggcgcaggcgggcgtcgattacctgctctgcgtcaagttcgatccgcgttttgccgccagcaccgcgcaggcgttcgtcgccgagctgctggtggaaaagctgggcgtcaaattcctgatggtgggggatgattttcgctttggcgccgggcgccagggcgattttccgctattgcagcaggccggaaaagagtacggcttcgaggtggtcagcaccccgaccttccgcgaaggcgatcggcgcatcagcagcaccgcgatccgcaccgcgctgagcgaggacgatctgccgctggcggagaccctgctgggtcacccgtacagcatctccgggcgcgtggtgcatggcgacgagctgggccgcaccatcggcttcccgacagccaacctgccgctcaagcgcctggtagcgccggtgaaaggggtgtatgcggtggaagtgtacggcctggggccgcagccgctgccgggcgtggccaatatcggtacgcgcccgaccgtcgccggcgtgcgccagcagctggaagtgcatctgctggatgtcacaatggatctttacgggcgccatattgaggtggtgctccgcgcaaaattgcgcaatgaacagcggtttgcttcgctcgatgccctgaagcagcaaatcgccaatgatgtggtgacggcccggaagttcttcgggctacagacaccggtttaa

SEQ ID NO: 424610 - DNA, 2817 bp, Serratia marcescens
atgagtgactacaagaataccctgaacttgccggaaacagggttcccgatgcgcggcgatctcgccaagcgcgaacctggcatgctgcaacgttggtatgaacaggatctgtacgggattattcgtactgccaaaaagggcaaaaaaaccttcattttgcatgacggccctccgtatgcgaacggcagcattcacattggtcactcggttaacaagattctcaaagacattatcatcaagtcgaaagggatggccggcttcgactcgccttatgtgccgggttgggactgccacggcctgccgatcgaactgaaggttgaacagctgtacggcaagccgggcgagaagctgacggcggccgagttccgccagaagtgccgcgagtacgcggccgaacaggttgaaggccagaaaaaggacttcatccgcctgggcgtgctgggcgactgggatcgtccgtacctgaccatggacttcaaaaccgaagccaacatcatccgcgcgctgggcaagatcatcagcaacggccacctgctgaaaggcgccaagccggttcactggtgcaccgactgcggatcgtcgctggcggaagcggaagtggagtattacgacaagacttcgccgtcgatcgacgtgactttccatgcggccgacgcggctgccgtggcggccaagttcggcgtaagcaacttcagcggcgccatctccctggttatctggaccaccaccccgtggaccctgccggccaaccgcgcgatctcgctgcacccggacttcacctatcagctggtgcaggttgacggccagtgcctgatcctggcggccgagctggtggaaagcgtgatgaaacgcgccggcatcaccgaatggacggtgctgggcagctgcaaaggcgccgatctggagctgctgcgcttcaaacacccgtttatgggcttcgacgtgccggccattatgggcgagcacgtgacgctggacgccggtaccggtgcggtgcataccgcaggtggccacggtccggatgacttcgtcatcagccaaaaatacggtctggagatcgccaatccggtagggccgaacggctgctacctgaccggtacccatccgctgctggacggcaagttcgtcttcaaggccaacgatctgatcgtcgacctgctgcgtgagaaaggcgcgctgctgcacgtcgagaagttcctgcacagctacccgtgctgctggcgccacaagacgccgatcatcttccgcgccacgccgcaatggttcatcagcatggatcagaaaggcctgcgtcagcagtcgctggaagagatcaaaggcgtgcagtggatcccggattggggccaggcgcgcatcgaaatgatggtggccaaccgcccggactggtgcatctcgcgtcagcgcacctggggcgtgccgatgtcgctgttcgtgcataaagaaaccgagcagctgcacccgcgcagcgttgagctgatggaagaagtggccaagcgcgtcgagcaagacggcattcaggcctggtgggatctggacgccgccgacatcctcggcgcggacgccgccgactacgtgaaagtgccggatacgctggacgtgtggttcgactccggttccacccacgcttcggtggtcgacgtgcgtcctgagttccacggccacagcgccgacatgtatctggaaggctccgaccaacaccgcggctggttcatgtcatcgctgatgatctccaccgcgatgaaaggcaaggcgccttataaagaagtgctgacccacggcttcaccgttgacggccagggccgcaagatgtccaagtcgatcggcaacaccgtcagcccgcaggacgtgatgaacaagctgggcggcgacattctgcgtctgtgggtggcgtcgaccgattacaccggcgagattgcggtgtccgacgagatcctcaagcgttccgccgactcttatcgccgcatccgcaacaccgcgcgcttcctgctggccaacctgaacgggttcgagccgagcaccgattgcgtcgcgccggaagacatggtggtgctggatcgctgggcggtcggccgtgcgctggcggcgcagcaggatatcgagcaggcttacgccaactacgatttccatgaagtggtgcagcgtctgatgcagttctgctcggtcgagatgggctccttctacctggatatcatcaaggatcgtcagtacaccgcgaagagcgacagcgtcgcccgccgcagctgccagaccgcgctgtatcacatcgtggaagcgctggtgcgctggatggcgccgatcatgtcgttcactgcggacgaaatctggggcttcatgccgggcaaacgcgcgcagtacgtgttcaccgaagagtggtacgacggcctgttcgggctggcggaaggcgagccgatgaacgacgctttctgggccgagctgctgaaagtgcgcggcgaagtgaacaaggtgctggagcaggcgcgtgccgacaaacgcctcggcggttcgctggaagcggcggtgacgctgtatgccgacagcgagctggcggcgcgcctgaacagcctgcaggatgagctgcgcttcgtgctgctgacctctgcggcaagcgttgcgccattggcggaggcgccggccgacgcgcaggcttccgagctgctgaaagggctgaagatcgccttcagcacggcaccgggtgagaagtgcccgcgctgctggcattacaccaccgatatcggcctggtggcggagcatgcagacatctgcggccgctgtgtaagcaacgtcgccggtgacggcgagaagcgtaactttgcctga

SEQ ID NO: 424611 - DNA, 510 bp, Serratia marcescens
atgagtaaatcaatttgttcgaccggcctgcgttggctgtgggttgtggtggcggtgctggcgctggatttcggcagcaagcagtggatcctcgctaactttacgctggggcagtcccagccgttgatcccgtcgttcaacctgttttacgcgcgcaactacggcgccgcgttcagcttcctcgccgatcacggcggctggcagcgctggttcttcgccggcatcgccatcgccatcgttgcggtgctgctggtgatgatgtaccgcagcaccgcgcagcagaagctgaacaacatcgcctacgcctttatcatcggcggggcgttgggcaatctgttcgatcgcctgtggcatggtttcgtagtcgatttcatcgacttctacgttggtgactggcactacccgaccttcaacctggcggacagctttatctgcgtgggcgcggcgatgatcgtgctggaaggtttcctgtcgccggcgaacaaaagcgcaaagagtaaaggtgagtaa

SEQ ID NO: 424612 - DNA, 471 bp, Serratia marcescens
atgacggctcaggttatcagtgacagcgcggtgctggttcactttacgctgaaactggaagacggttcgaccgccgaatccacccgcagcagcggcaagccggcgctgttccgcctgggtgacggcagcctgtcggcaccgctggaagcgcagctgctcggcctgcgcgcgggcgacaaatgcgcctttaccctgcagccggaagcggcgttcggcgcggagaacccggatctggttcagttcttctcgcgccgcgacttcgcggaaaccggcgtgccggacgtgggcaccatcatgctgtttaccgccatcgacggcagtgaaatgccgggcgtggtgcgcgcggtggcagaagattcgatcaccgtcgatttcaaccatccgctggcgggccatccggtgaccttcgatatcgaagtgctggagatcgatccgcagcaggaggagatgcatgcaaatattgctggctaa

SEQ ID NO: 424613 - DNA, 954 bp, Serratia marcescens
atgcaaatattgctggctaacccgcgcggcttctgcgccggggttgatcgtgcgatcagcatcgtggaacgcgcgctggagctgtatggcgcgccgatctacgtgcggcatgaagtggtgcacaaccgctacgtggtcgacagcctgcgtgagcgcggcgcggtgtttatcgaagagatcgcggaagtgccggacggctctatcctgatcttctcggcgcacggcgtttctcaggcggtgcgtgccgaagccaaggcgcgcgatctgaccatgctgttcgacgccacttgcccgctggtgaccaaggtgcatatggaagtagcgcgcgccagccgccgcggcaccgaagcgatcctgatcggccacgccgggcacccggaggtggaaggcaccatgggccagtacagcaacccgcagggtggcatgtacctggtcgaatcgccggaagacgtgtggaagctgcaggtgaaagacgaaaacaacctgtgcttcatgacgcagaccacgctgtcggtggatgatacctcggacgtgatcgacgccttgcgtcagcgtttcccgaaaattatcgggccacgtaaggatgatatctgctacgccaccaccaaccgtcaggaagcggtgcgcaacctggccggcgatgcggacgtggtgctggtggtggggtcgaagaactcctccaactccaaccgtctggcggaactggcgcagcgcgtcggcaaaccggcttatctgatcgactcggcggcggatattcaggaaagctggctgagcgaagcgcgcaatatcggcgttaccgccggcgcctcggcaccggacgtgctggtgcaggaggtgatctctcgcctgaaagcgctgggtggcctggacgtgcatgaaatcagcgggcgtgaagagaacatcgtgtttgaagtgcctaaagagctgcgcgtggacgttcgtcagatcgactga

SEQ ID NO: 424614 - DNA, 927 bp, Serratia marcescens
atgagcaatattttaaaacgcatggccattttctcaaaagtggtcgattgcggcgcattcagcatggcggcaaaagaattgggcatgacgacttccgccgtcagccagcatattcgccagttggaagaacatctgggcattcaattactgctgcgctcgacgcgctcattgagtctgaccgaagccggattgtgcttttatgaagattgcctgctgatgatccacgccgccgaacgtggccaacaacggatcgccgcactgcgcggcgaactggtcggtgagctgcgcgtcgccacctccaccgaattcgccactcactatctggtgccggcgctgcaaagttttctcgacgaacatccccgtctcacgctgcggctggaaattcacgatgagaagatagatctcatcacgcagcgcatcgatctggcgatacgcggcggcgtgctggccgactccagctacgtttccacgcggctggcgcgctgccgcgaagtgctgtgcgcctcgccggcctacctggcgcatcacggcgtgccggattcgccacaggcgctgacgcaccaccaatgggtcacctttacgccgctcggcaacccgcagtttgtccgcctgatccatcgcaacggcggtgaacaccgcatgcgtatgaccgggcgcttgttcaccaacagcggtatggcgatgaaggagttggcgctgaccggcaagggtatcattcgcaatttcttcgccaacgttgaacgtgaattgcgcagcggcgagctgattgaaatattgcccgattggcggttaccggaaattaattgctatgccattatgccgcgcagggagatccagccattaaaagtcagacgattgcttgaacatatgaaactctatttgcaggagaagggattaagccccgtagaacatattcggcaggaataa

SEQ ID NO: 424615 - DNA, 966 bp, Serratia marcescens
gtggacagcgctcagaaagaagaaatatcgttaaaaatcctacgtgaattattgcaataccgccgccgcttccccggcgacgatacctcgattgccgaagaagaacggcgggtcactcaggtgcaattgccgcgcattcgggcattcattgaaaacgagcaacgtatcgaattcgtgctgccggcctttcccaccaagtcgcccaacaccaacaaggtgatcggcgcggtgccggacatggcggagcggctgtcgctgatcttcctcaactcgctgtgccagcgcattcaactctattacccgccgggggcgcatatcgttatctgctccgacggccacgtgttcggcgatctgatccgcgtcagcgatgaagcgatcaaccactatcagcgtgagattgaaagcctgctgcatgaagtgggcgcgacgcacctgagcgtgttcaacctcggcgacgtcaaaggcctggcggaacataccgatgattacgatctgctgcgccggctgttggtggagggctatgccgaatcggaagaggcgatcaagcaacagctgatgcaggacgaacagggcctcttgctgtaccgcgccatcacgcgcttcctgtatgaagacagccagctgccgggctacagcggttccaacgccgcgctgcagaaagacgccaaacaacgtgcctgcggcgtgatccagcgcagctgggcctggggcaacctgctggcgcagcatttcccggcggcgatccgcctgtcgattcacccgcagccggccgacagcctgaaaatgggcatccacatgatgccgaccaaagacgactggctgacgccgtggcacggcgtggcggccaacgtgaacggccagttcgtgctgatgaagcgtaaagacgcgcagagcctggacggcgaactggtggagatccgcggcacgccgagccattacctgatcgaacaaccgcagatggcctga

SEQ ID NO: 424616 - DNA, 864 bp, Serratia marcescens
atgaacaaccaaccgcttaattgccatattcaaccgaataccccgtttggcgcgatcctgacgccgcagcatccggggcaaaagatcggcgagctgccggtggcggcgctgcgggcgctggcgcaggaacaccacttgctggtgctgcgcggattcgactcgggtttcagcgaggcggaagttctgactcgctacgctgagcagtggggcgagatcatgatgtggccgttcggcgcggtgctggacgtgaaggagcatccggacgccaaggatcatatcttcgacagcagctacgtcccgctgcactgggatggcatgtataagccgaccatccccgagttccagctgttccactgcgtggcggcgccgtcgccggacgaaggcggatgcaccaccttcgtcgacaccacgcggctgttggccaatgcggacgaagcgctgctggatcagtggctgtcgatctcgatcacctaccgcatcaagcaagtggtgcattacggcggcgaagtctgttcgccgctggtggtgcagcacccgaacggcaggggcttaatcatgcgctacaatgaaccgccgacggaaggaaaaaaattcctcaatcaacatgcgctggaataccacggcgtgccggaacaccagcaggaacagttccaccacactctgcagcagcacctgtacgatccgcgtcactattatgcccaccaatggcaacagggcgacgtggtggtggcggacaacttctcgctgctgcatggccgtgagggctttaccgcccgttccgcgcgtcatttgcagcgcgtgcatattcagagcaacccggtgtgtgccaatctggcgctgaagccggccaacgcagaagcgtaa

SEQ ID NO: 424617 - DNA, 1260 bp, Serratia marcescens
atggcggcggtcgccactccggggcacgtctacccgatgttagccatcgctcgccacctgattgcccaagggcatcaggtgcgggtgatgaccggcgcgctgtttcgcgaacgcgccgaggcggcgggcgcgagcttcgtgccgttcgacgcgcaggtggatttcgattaccgccacctggaagagcacttccccgagcgcgccgcgctgccgccgggcaatgcgcagatggcgctggcgctgaaggatttcttcgccgcgccgatcccgttgctggatcggcagctgcgtgcggccatcgccgccgaaaagaccgatctgctgatggtggagaactgcttctacggcgtgctgccgctgctgcagtccgctgagcggccgccggtcttcggtatcggcgttacgccgctgtcgtattcttcgcgcgacgctattttttatggcccgcgtatcccgccggcgctgctgccgcaggcgttgacccgtgagcaactggtggatgaggaaacgcgcgtgctgatcgatgacgtgcagcagagcttcgatgcggcgctgctgcaggcgggcgggcgggcgctggatcgcccgttcaccgacgcgctgatcggcggctgcgagcgtttcctgcagctggctaccacggcgctggaatatgagcgtgacgatctgccgagcggcgtgcgattcgtcggcccgctgcgcagcggcggccagccggcggcggaagagacgctgtgggaggcggacgatcgccggccgctggtgatcgtgtctcagggcacgctggccaatgtcgatctgcatcagctgatcgtgccgacgctgcaagcgctggcgcatctgccggtgcgggtgctggccaccaccggcggacgggcgacggaagggctgatggacgcgttgccgggcaatgccagagtgcgggagtttatctccttcgaacgctggctgccggaggcggcgctgctgatcaccaacggcggctacggctcgatcaactatgcgctggacagcggcgtgccgctgatcgtcgccggcaccggcgaggacaagctggaggcggccgcgcgcgtggtggccgccggctgcggcatcagcctgcacaccagcacgccaagcgccgaacagatcctggcggcggcgacgcgcattctgcagcagccgatctatcggcaacgtgcggcgctggtgcgtgaggactatgcccgccacgacgcgctgacggcgatcgccaacgaagtggccgccattaccgcctga

SEQ ID NO: 424618 - DNA, 822 bp, Serratia marcescens
atgagtgatacacaaatccgcattgcgattgcgggcgccggcggccggatgggccgtcagttgatccaggcggtgcagcaggcggaaggcgtggtattgggggcggcgctgtcgcgcccgggttccagcctgatcggcgtcgacgccggtgagctggcgggcattggcgcgctgggcgtcaaggtgagcgacagtctggagaaggtggcgaacgagttcgatattttgatcgacttcacccgcccggaaagcacccggggctacctggatttttgcgtggcgcaccacaaggcgatggtgattggcactaccggcttcgatgacgccggcaagcaggcgatccgcgatgcggcgcagcatatcggcatcgtgttcgccgccaacttcagcgtcggcgtcaacctggtactgaaactgctggagaaggccgcgcaggtgatgggcgactataccgatatcgaaatcgttgaggcgcaccaccgccacaaagtggatgcgccgtcgggcacggcgttggccatgggcgaagcgatcgccggcgcgctggggcgcgatctgaaaagctgcgcggtctatgcgcgcgaaggccataccggcgagcgcgatccgaaaagcatcggctttgccaccattcgcgccggcgacatcgtcggcgagcacaccgcgatgttcgccgacatcggtgaacgggtggaaattacccataaggcctctagccgtatgacttttgccagcggcgcggtgcgcgcggcttcctggttacataaccgtgataaaggtctgtttgatatgcgcgacgtgttgaatttggaccaattataa

SEQ ID NO: 424619 - DNA, 1149 bp, Serratia marcescens
ttgataaagtcagcgctattggttctggaagacggaacccaattccacggtcgggccatcggggcagagggaacggcagtgggggaagtggtcttcaatacgtcgatgaccggttatcaagaaatcctcactgatccttcctattcccgccagatcgttactcttacttatcctcatatcggcaatgtcggcaccaatgcttccgacgaagaatcctccgcagtacacgcccaaggcctcgtcattcgtgacctcccgctgatcgccagcaactaccgcaacgaagaaagcctgtccgactacctcaagcgtcacaacatcgtggcgatcgccgatatcgatacccgtaaattaacccgcctgctgcgcgagaagggcgcccagaacggctgcatcatcgccgccgactcgccggacgccgcgctggccctggccaaggcgcaaggtttcccggggttgaagggcatggatctggcgaaagaggtcaccacccaagaggcttacagctggcagcaaggcagctggacgcttgaaggcgacctgcccgaagccaaaaccgccgcggagttgccgttccacgtggtggcttacgactacggcgccaagcgcaacatcctgcgcatgctggtggatcgcggctgccgcctgaccgtggtgccggcgcagaccccggccgacgacgtgctgaaaatgaatccggacggcatcttcctgtccaacggcccgggcgacccggagccgtgcgactacgccatcgccgccatcaaacagttcctggaaaccgacatcccggtgttcggcatctgcctgggccaccagctgctggcgctggccagcggggcgaaaaccatgaagatgaagctcggccaccacggcggcaaccacccggtgaaggatctggacaacaacaccgtgatgatcaccgcgcagaaccacggcttcgccgtcgatgaaaacaacctgccggcgaacctgcgcgtcacgcacaaatcgctgttcgaccacacggtgcagggcattcaccgcaccgacaaggcggcgttcagcttccagggtcacccggaagccagcccaggcccgcacgatgccgcgccgctgttcgatcactttatcgaactgattgagacttaccgttctaacgccaaataa

SEQ ID NO: 424620 - DNA, 3225 bp, Serratia marcescens
atgccaaaacgtacagacataaaaagcatcctgatcctcggcgctggcccgatcgttatcggccaggcgtgtgagttcgactactcgggtgcccaggcgtgtaaagcgctgcgcgaagagggttaccgcgtcattctggtcaactccaacccggcgaccatcatgaccgacccggaaatggccgacgcgacctacatcgagccgatccactgggaagtggtgcgcaagatcatcgaaaaagagcgcccggatgcggtgctgccgaccatgggcggccagacggcgctgaactgcgcgctggagctggagcgtcagggcgtgctggccgagttcggcgtgaccatgatcggcgccaccgccgatgcgatcgacaaggccgaagaccgtcgccgtttcgacgtggcgatgaagaaaatcggtctggataccgcgcgttccggcattgcgcacaccatggaagaagcgctggcggtcgccgctgacgtcggcttcccgtgcatcatccgcccttcctttaccatgggcggcaccggcggcggcatcgcctacaaccgcgaagagttcgaagagatctgcgaacgtggcctggatctgtcgccgaccaacgagctgctgatcgatgaatcgctgatcggttggaaagagtacgagatggaggtagtgcgcgataagaacgacaactgcatcatcgtctgctccatcgaaaacttcgacgccatgggcatccacaccggcgactcgatcaccgtcgcaccggcgcagaccctgaccgacaaggaataccaaatcatgcgcaacgcctcgatggcggtgctgcgtgagatcggcgtggaaaccggcggctccaacgtgcagttctcggtcaacccgaaaaccggccgcctgatcgttatcgaaatgaacccgcgcgtgtcgcgctcttcggcgctggcgtcgaaagccaccggcttccctatcgccaagatcgccgccaagctggcggtgggttacaccctcgatgagctgatgaacgacatcaccggcggccgcaccccggcatcgttcgaaccgtccatcgactacgtcgtgaccaagatcccgcgcttcaacttcgagaagttcgccggcgccaacgaccgtctgaccacccagatgaaatcggtcggcgaagtgatggccatcggccgcacccagcaggagtcgctgcaaaaagcgctgcgcggcctggaagtgggcgccaccggcttcgacccgaaagtgagcctggacgatccggaagcgctgaccaaaatccgccgcgagctgaaagacgccggctctgaccgcatctggtacatcgccgacgccttccgcgccggtctgtcggttgacggcgtcttcaacctgaccaacgtcgaccgctggttcctggtgcagattgaagagctggtgcgcctggaagagcaggtggccgaagcgggcatcaacggcctgaacaaagcgttcctgcgcaccctgaagcgcaagggcttcgccgatgcgcgtctggccaagctggccggcgtcgccgagagcgaaattcgcaagctgcgccacagccacggcctgcatccggtgtacaagcgcgtggatacctgcgcggcggaattcgccaccgacaccgcctacatgtactccacctatgaagaagagtgcgagtccaacccgaccaacgaccggccgaaagtgatggtgctgggcggcgggccgaaccgtatcggccagggcatcgagttcgactactgctgcgtgcacgcctcgctggcgctgcgcgaagacggctacgagaccatcatggtcaactgcaacccggaaaccgtctccaccgactacgacacctccgaccgtctgtatttcgagccggtaacgctggaagacgtgctggaaatcgtgcgcatcgagaagccgaagggcgtgatcgtgcagtacggcggccagaccccgctgaagctggcgcgtgagctggaagccgcgggcgtgccgatcatcggcaccagcccggacgccatcgaccgcgccgaagaccgcgagcgcttccagcaggcggttaaccgtctgggcctgaagcagccggccaacgccaccgtcaccgccatcgagcaggcggtggagaaggcggcgggcatcggctatccgctggtggtgcgcccttcctatgtgctgggcggccgagcgatggaaatcgtctatgacgaaatcgatctgcgccgttacttccagactgcggtcagcgtgtccaacgatgcgccggtattgctggaccgcttcctggacgacgcggtggaagtggacgtcgacgccatctgcgacggcgagcgcgtgctgattggcggcatcatggagcacatcgagcaggcgggcgtgcactccggcgactccgcgtgttcgctgccggcatacaccctgagccaggaaattcaggacgtgatgcgtcgccaggtggaaaaactggcgttcgagctgcaggtgcgcggcctgatgaacgtgcagttcgcggtgaaagacaacgaagtctacctgattgaagtgaacccgcgcgccgcgcgcaccgtgccgttcgtctccaaagcgaccggcgtgccgttggccaaggtggccgcgcgcgtgatggcgggcaaaacgctggttgagcagggcgtgaccgaagaaattatcccgccgtactactcggtgaaagaagtggtgctgccgttcaacaaattcccgggcgtcgacccgattctggggccggaaatgcgctctaccggggaagtgatgggcgtgggccgcacctttgcggaagccttctccaaagcgatgctgggcagcaactcgggcatgaagaaacagggccgcgcgctgctgtcggtgcgtgaaggcgacaaggctcgcgtggtcgatttggctgccagcctgctgaagcaaggcttcgagctggacgccacccacggcaccgcggtggtgctgggcgaagcgggcatcaacccgcgcctggtcaacaaggtgcatgaagggcgtccgcacattcaggatcgtatcaaaaacggcgagtacacctacatcgtcaacaccacggccggccgtcaggcgattgaggactccaagctgattcgccgcagcgccctgcagtacaaggtgcactacgacaccacgttgaacggcggcttcgccaccgcgatggcgctgaaagcggatccgaccgagcaggtgacgtcggtgcaggaaatgcacgcgcgcatcggcaagtaa

SEQ ID NO: 424621 - DNA, 558 bp, Serratia marcescens
atgattctgataatttacgctcacccgtatccccggcattcgcatgccaatcagcgcctgctgcaggcggtgagggatctccccgaggtagaggtgcgctcgctgtatgagctgtaccccgatttcaatatcgatatcaacgccgagcagcgggcgctggagcgcgccgacctggtagtgctgcagcatccgatgcagtggtacagcttcccgccgctgttgaagctgtggatcgacaaagtgctggagcacggctgggcctacggccacgacggcaacgcgctggtgggtaaagactgcctgtgggcggtgaccagcggcggcgacgagcaccacttcgagctgggcgactttcccaacttcgctgcgctggcgcagccgctgcaggccacggcgatctactgcggcatgaactggcaaccctattttgccgtacataatacttttacctgcaacgaaccggcgctgctcgccgccggcgaagcctaccggcagcggttggtcgactatctgatggaacatgccgaagcggaaactcgggaggccagccatggataa

SEQ ID NO: 424622 - DNA, 1854 bp, Serratia marcescens
atggataatcaccacatgatgatcgaggggctgatctacctcggctccgccgcgctgttcgtgccgatcgcggtgcgtctggggctgggctcggtgctcggctacctgatcgccggctgcatcattggcccctgggggctgaagctggtgtcggacgccgagtcgatcctgaccttcgccgagatcggcgtggtgctgatgctgtttatcatcggcctggagctggatcccaagcggctgtggacgctgcgcgcctcggtgttcggcggcggcagcattcagatggtgggctgcggcctggcgttgagcgccttctgttacttcctcggcctcaactggaaggtggcgctgctgatcggcctgacgctggccctctcatccaccgccattgccatgcaggcgatgagcgaacgcaatttgacgccgtcgccgatcggccgcagcgcgtttgcggtgctgctgttccaggatatcgcggcgatcccgctggtggcgatgatcccgctgctggccagcagcggcgccaccaccacgctgggcgctttcgtgctgtcggcggccaaggtggtgggcgcgttgacgatggtggtgctgctcggccgctacgtcacccgcccgctgctgcacttcgtcgcccgttcgggcatgcgcgaggtgttcagcgccgtggcgctgttcctggtgttcggcttcggcatcctgctggagatggccgggctgtcgatggcgatgggggcgttcctcgccggggtgctgctggcgagctcggaataccgccacgcgctggagagcgatattcagccgttcaaagggctgctgctggggctgttctttatcggcgtcggcatgtcgatcgacttcggcacgctgttccatcacccgctgctgatcgcctcgctgttgctgggctttatgctgatcaaggcagcgctgctgtggctgattgggccgctgctcggcgtgccgaagcgccagcgcggcctgtttgccattctgctggggcagggcagtgaattcgccttcgtgatcttcagcgccgcgcagctggccggcgtactgccggtcgaatgggccaagtcgctgacgctggcggtggcgctgtcgatggcggccacgccgctgctgttggtgatcgccgcgcagctggagaaaaatgcgccgaaagaggagcgcccggcggacgtcatcgacgacgaaaatgccagcgtgatcatcgccggcttcggccgtttcggccagatcgccggccgcttgctgctggccaacggcgtacacaccgtggtgctggatcacgatccggaccatatcgaaacgctgcgcaaattcgacaccaaggtgttctacggcgacgccacgcgcgccgatctgctggaggccgctggcgccgcccacgccaaggtgctgatcaacgccatcgatgacgtggaagacagcctggcgctaaccgagctggccaggcagcacttcccgcatctgaaggtggtggcacgggcgcgcgacgtcgatcactggtatcagctgcggcagctaggggtggaaaaaccggagcgcgaaaccttcgaaagctcgctgcgcgtcggccgtgaaacgctggagctgctggggctggacgcctatgaggcgcgcgagaaggcggacacgttccgccgctataacctgaagatgctggaagacacgctggagaattatcaggacaccgagttccgcatcgccagcctgcagcgggccaaggagatgctcagcgcggccatcgagcaggatcagaatcggctggcgcgggtgcagcagaccggctggcgcggtagtatcgacggcaaggcgccggaggacgaggtggtggaagccaaaggataa

SEQ ID NO: 424623 - DNA, 615 bp, Serratia marcescens
atgcttgaaacttcgctgttcgtcgccggcattgccgccctcggcatgctctcccccggcccggattttttcctggtgatcaaaaacgccgcccgctatccgcggctggccgccatgatgaccgccttcggcgtgatctgcggcgtcgccacccacatgtcctactgcgtcgccgggctggcggtggtgatcaccaccacgccgtggctgtttaacctgctgaaatacgccggggcggtctatctggtgtggatcggcatccaggcgctgctttcgcgcggcggcggcaagatgaacgtcagcaatctgccgcagcagcaggtcagcctgaagagcgcctttgcgcaaggctacctgtgcaacctgctgaacccgaaggccaccctgttcttcctggcggtgttcacccaggtgctgcagatcgattccggtctaggcgacaagctgtggtacgcggggattattctcggcctgtcggttatctggtggccgctgctggtgttcctgatccagagcgggccggtgcgccgcgggttggaaaagacccagaagatcgtcgacaagctgctgggcggcatgctgatcgccttgggcatcaaggtcgcgctgagctaa

SEQ ID NO: 424624 - DNA, 801 bp, Serratia marcescens
atgcagcagactaacgccacagaccggccggagccgcaccggcaacagcgtgaaattacccgcctgtgcattcaatgcgcgctgctgctgttgcagcacggcgccgagagcacggtggtggaacagctgtcgacccgcctggggctggcgctggggatggacagcgtggaaagctcgatctccgccaatgcggtggtgttgaccaccctcagccacggcgcctgcctgaccaccacccgcaagaacgtcgatcgcggcatcaatatgcaggtggtgaccgaagtgcagcatatcgtgatcctcgccgagcaccacctggcggatgcgcacgacgtggcgcgccgctttgacaggatccggccgctgcgttacccgcgctggctggtggtgctgatggtggggttgtcctgcgggtgtttcagcatgctcaacggcggcggcggcgatgctttcctggtgacctttatcgccagcggcgcggcgatgctggtgcgccaaatcctcaccgcccgccatatgaatccgctgatcaatttttgcctgacggcgtttgtcgctacgtcgatctccggactgctgctgcgcctgccggcgtttaaagacacctcgagcgtggcgatggccgccagcgtgctgttgctggtgccgggcttcccgctgatcaacgcggtggcagacatgttcaaggggcacgtcaataccgggctggcgcgttgggcgatggccagcctgctgacgctggcgacctgcatcggggtggtgatggcgatgtcgctgtgggatctgcgggggtggtcatga

SEQ ID NO: 424625 - DNA, 465 bp, Serratia marcescens
atgagtctgctgtgggccttgttgcaggagatgctgttggcggcggtgccggcgctgggcttcgccatggtgttcaacgtgccgctgcgcgcgctgcgctattgcgcgttgctcggagctatcgggcgcggctcgcgcatgctgatgatgcatggcggcatgaacatcgagtgggcctcgctgctggcggcgatcctgatcggtatcatcggcatctactggtcgcgctggctactggcgcacccgaaggtgttcaccgtggcggcggtgatcccgatgttccccggcatttccgcctataccgcgatgataacggtggtggagatctcgcatctgggctacagcgaagccctgatggagaccatgatcaccaacttcctcaaggccagttttatcgttggcgcattgtcgatcggcctgtcgttgccgggcctgtggctgtaccgcaaacgccccagcgtgtga

SEQ ID NO: 424626 - DNA, 483 bp, Serratia marcescens
atgattatcagcctgatcgctgccttggcggcggatcgcgttattggcatggaaaacgccatgccgtggcacctgccggcggaccttgcgtggtttaaacgcaacacgttgaataagccggttattatgggccgcaagaccttcgagtccatcggccgcccgctgccgggccgccacaatatcgttttgagcagccgcccgggcaatgccgccggggtgacctgggtgacctcgctggatgaagcgctggccgccgcgggcgaggtggaagaagtgatggtgatcggcggtgggcgcatctatacccagctgctgccgcgcgccgatcgcctgtacctgacgcacatcgacgccgaagtcggcggcgatacccacttcccggattacgagccggacgagtgggaaaccacgttcagcgaattccacgacgccgacgatctgaactcgcacagctactgcttcgaaatcctgcagcgccgctga

SEQ ID NO: 424627 - DNA, 1890 bp, Serratia marcescens
atgaccaagcaaattgagcaattagacgccgaccgcctgatcgatcccactcgccgcaaactgctgctcggcagcgccggcgccgtcggcctggccggttttctcggcggcggcatctggtcggtctccagtgaggcgttggccgaggatctgccgccgaacaagctgttgggttttcagggcatcgccgcgtctaccgccgatgaggtgaccatcgcgccgggctaccgcgccgaggtgctgatctcctggggcgagccgctggtagacggcgcgccggccttcgatccgcagggcaacaacagcgccgccgatcaggaaaaacagttcggcgacaataacgacggcatgagcttcttcccgatcgatgacaatcacggcgtgatggccatcaataacgaatacgttaacgagcagtacctgttcgcccacggcggcgccaaggccaccagcctggaagaggtgcgcaaatcgcaggcggcgcacggcgtctccatcgtggcggtaaagcgcgtcggcgacggccagcgctgggaggtggagcgcccgtcgcgctataaccgccgcatcaccgccaataccgaaatgcagttcagcggcccggccgccgggcacccgctgctgcagaccacccccgatccgagcgggcgcaaggtgctgggcactttcggcaactgcgccaacggcaagacgccgtggggcacctacctgacctgcgaagaaaacttcgatacctacttcggcactcatcaggctgattacaaaaccacgccggaacagaaacgctacacgctgaaggccagcgaaccggagcgcaactggccggactatgacgagcgcttcgacgtggcgaagaaccccaacgaattcaaccgccacggctggatcgtcgagattgacccgctgaatccgacctcgacgcccatcaagcacaccgcgctgggccgcttcaagcacgagaacgcggcggtgaccgtggccaaagatggccgtttggtggtgtacatgggtgacgatgaacgcggcgaacatatctataagtacgtttccaaaggcgtggtcgacgccgccaatccggccaacaatcgcacgctgctggacgaagggacgctgtacgtggcgcagttcgacggcgatgaggccggcacgccgctgaagggcaaagggcgctggattgcgctcgagttcggcaagaacggcctgacgccggagaacggtttccgcgacgaggctgaagtgctgatcttcgcccgcaaggcggcgcagcaggtcggcgccaccaaaatggatcgcccggagtggatcgcggtgaacccgcatgacggccgcgcgtactgcacgttgaccaacaacagcaagcgcggcgaggaagggatgccgctgaacgccgccaacccgcggccgaacaatatctatggccagatcattcgctgggacgagggcggcgacgccaccgccggcaccttcgcctgggacatctatgcgctgtgcggcaacccgatcgcccacccggaaggcgtcaaccgcggcacgccgaacatcacgtcggaaaataccttcaacagcccggatgggctgggcttcgatcgcgccggccgcctgtggatcctcaccgacggcaagtacagcaacaagggcgattacgccgggcagggcaacaaccagatgctggtgggcgatccgatcagcggcgaaattcgccgtttcatggtggggccgaagtcctgcgaactgactggcatcaccttcaccccggactacaagacgatgttcgtcaacgtgcagcatccgggagaagagggcgattcgcacttcccaaacaacagcccgcgcccgcgttcatcggtgttgatgatcacgcgtgaagatggcggggtgattggggcgtaa

SEQ ID NO: 424628 - DNA, 852 bp, Serratia marcescens
atgtcgacataccttatcggcgacgttcacggctgtttcgatgaactgaagtcgctgctggctcaggttgcgttcgatcccgagcgcgatcaactgtggctgaccggcgatctggtggcgcgcggccccgcctcgctggacgtgctgcgcttcgtgcgctcgctcggcccggcggtgcgcatggtgctgggcaaccacgatctgcacctgctggcggtttacgccggcatcagccgcaacaaacccaaagatcgcatcaccccgctgctggaggcgccggacgccgacgagctgatcaactggctgcgccgccaaccggtgctgcaggtggacgatgagcaaaagctggtgatggcgcacgccggcatcactccgcagtgggatatcgacaccgcgaaaatgtgcgcgcgcgaagtggaagcggtattaagcagcgacagctacccgctgttcctcgacgccatgtacggcgatatgccgaacaactggacgccggagctgagcggcctggcgcgcctgcgtttcagcaccaatgcgctgacgcgcatgcgttattgcttccccaacggccagctcgacatgatctgcaaagatgcgccgggcaccgcacccgcgccgctgaaaccgtggttcgagctgccgcgcctggtggatccggaatacaccatcgtcttcggccactgggcctcgctggaaggcaagggcacgccggaaggcgtgatcgggctggacacaggctgctgctggggtggcgatctgacgatgctacgctgggaagaccgccgttacttcacgcagcccgctaatcgcggcgaagcgcccgaccacgccggcaggctggccgcgttctga

SEQ ID NO: 424629 - DNA, 378 bp, Serratia marcescens
atgattgattcgccccgcgtgtgtattcaggttcagagcatctatgtggaatcacagtcgatccctgaagaagagcgttacgtcttcgcctataccatcaccatccgcaatctggggcggaccgacgtgcaactgctgggccgttactggctgatcaccaacagcaacggccgccaaaccgaagttcagggcgaaggcgtgatcggcgaacagcccgtcattccgcccggcggagagtttcagtacaccagcggcgccattctggaaacgccgctgggcaccatggaaggccattacgaaatggttgaccaccagggtcagccgttccgcaccgctattcccgtgtttcgcttagccattccaacgctgatccattaa

SEQ ID NO: 424630 - DNA, 819 bp, Serratia marcescens
atgaataacagagtccaccaagggcactttgcccgcaaacgctttggacaaaactttttaaccgatcagtttgtcatcgatagcattgtctccgccattcacccgcagccgggcgaagcggtggtcgagatcggccccggcctcggcgccttgaccgagcctgtcggcgcgcgcatggaccgcatgacggtgatcgaactggaccgcgatctggccacccggctggaaaaccacccgcggctgaaagacaagctgaccatccaccagcaggacgccatgacggtgaatttcgccgaactggccgaggaagctggccaaccgctgcgcgtatttggtaacctgccgtacaatatttcgacgccgctgatgttccaccttttcagctatactcaggcaatccgcgacatgcactttatgttgcaaaaagaggtggtcaaccgtctggtggccggcccgaacagcaaggcctacgggcgtttgaccgtgatggcgcagtactactgcaacgtcattccggtgctggaagtgccgccgaccgcgttcgcgccgccgccgaaggtcgattccgccgtggtgcgtctggtgccgcacagcgtgctgccgaatccggtgggcgacgtgcgcatgctgagccgcatcaccacgcaggcgttcaaccagcggcggaaaaccatccgcaacagcctgggcgacctgttcacgccggagcagctgacggagctgggcgtcgatccttcgctcagagcagaaaatatttctgtggcgcagtactgcaagctggcgaactggctgtcagccaatccggcgccgcagcaataa

SEQ ID NO: 424631 - DNA, 993 bp, Serratia marcescens
atgcacagcaataaacgcgtcgtcattacccccggcgaacccgccggggtagggccggatttggtagcagcgctggcgcaacaggattggcctgttgagctggtggtgtgcgccgatccggccctgctgcttgaacgcgccaagcgtttgggcctgccgctgacgctgcgcgactaccagccgcagcaaccggccgaagcgcaacgcgccggcacgctgaccgtgctgccggtgccgctcgctcacccggtcaccgccggggagctgaacgtcggcaacagcgcctacgtggtggaaaccctggcgcgcgcctgcgacggctgcctcaacggcgaattcgccgcgctgatcaccggcccggtgaacaagggcgtgatcaacgacgccggcgtgccgtttatcggccataccgaattctttgccgatcgcagccgctgcgatcgcgtggtgatgatgctcgcgaccgaagagctgcgcgtggcgctggcgaccacccacctgccgctgctggcggtgccgggcgccatcacgcaacagagcctgttcgaagtcatccgcatcctcgaccacgatctgaaaaccaaatttggcatcgcccggccgcacatttacgtctgcggcctgaacccccacgccggggaaggcggccatatggggcacgaagagatagacaccatcatcccggcgctcgacgcgctgcgcgctgagggcatccatcttgtcggcccgctgccggcggacaccctgttccagcccaaatatctgcaagatgccgatgcggtgctggcgatgtatcacgatcaggggctgccggtgctaaaataccaagggttcggccgcgcggtgaatatcaccctcggtttgcctttcatacgcacctcggtcgaccacggtaccgctctggaactggccggcaccggcaccgccgatgtcggcagtttccaaacggccctgaatctcgccattaaaatgataattaattgtaatgaataa

SEQ ID NO: 424632 - DNA, 1302 bp, Serratia marcescens
atgaagaactggagaacgcttattctcggattggtggtttgcgccaatgccgcgttcgcagcaccccaagaagtggataaagtcgccgccgtcgtggataacggcgtggtactcgaaagcgacgtcaacggtctgttgcagtcagtgaagctcaacgcccagcaggccggccagcaattgccggacgacaagacgctgcgccatcagatcatcgaacgcctgatcatggataacatccagctgcagatggccaagaaaatgggcatcaccgtgtccgacgccgatctggacaaggcgatcgccaacatcgccgcgcaaaacaagatgagcgtcgatcagctgcgcagccgcctgtcgtacgaagggttgaactacaacacctaccgttcgcagatccgcaaagagatgctgatctccgaagtgcgtaacaacgaagtgcgccgtcgcgtcaccatcctgccgcaggaagtggacgcgctggcgaaacaggtgggcgcgcagaacggcagcgacaccgaaatgaacatcagccacatcctgctcccgctgccggagaatccgtcgcagcagcaggtcgacaaagccgaagagctggccaaacgcctggtgggtgagatcaacagcggcgccgacttcggcaagctggcgatcacctactccgccgattctcaggcgctgaaaggcggcaacatgggctggggcaagctgcaagagatcccgaccctgttcgcggaacgtctggtgagcgccaagaaaggcgacgtcgtcggcccaatccgttccggcgtcggcttccacatcctgaaagtgaacgacatccgcggcgcgagccagtcggtgtcggttaccgaagtgcacgcccgtcacatcctgctgaaaccttcggtggtgctgaccgacgatcaggcgcgcgccaagctgcaatccgtggcggaagcgatcaagagcggccgcgccaagtttgccgacgaagccaaacagctgtcgcaggatccgggttctgccatgcagggcggcgatctgggctgggcttccccggacatctacgatccggccttccgcgatgcgttactgaagctgagcaagggtgaaatcagcgcgccggtccactcttccttcggctggcacctgattcagctgctggacactcgtcaggtggataagaccgacgccgcgcagaaagatcgcgcttaccgcatgctgttcaaccgtaaattcgccgaagaagcgcagacctggatgcaggaacagcgcgcccaggcttacgtgaagatcctcgatggcagcgatgcacagcaataa

SEQ ID NO: 424633 - DNA, 2265 bp, Serratia marcescens
atgcttggcgttcccgtttacgacaaacctttggtcagcggcgatccgaacagcctgccggtcaccatcaatgccgatgactcgcgcgccgactatccgaaaagcgccctgttcagcggcaacgtgcatatcgagcagggcaacagcaccctgaccgccaaagaagtcgagctgaaccagacgcaaaaccctggccaggcggagccggtgcgcacggttaccgccaccggcgacgtgcactacagcgacaatcagatcaaactgaaaggcccgaaggcctggtcgaacctgaacaccaaagataccgacgtctatgaaggcgactaccaaatggtaggccgtcaggggcgtggcgacgccgacaagatgaaaatgcgcggcgccaaccgttacaccattctggaaaacggcacctttacctcctgtctgccgggcgacgacagctggagcgtggtcggctccgaagtaatccacgatcgcgaagagcaggtggcggaagtgtggaacgcccgcttccgcatcggcggcgtgccggtgttctacagcccgtacctgcaattgccggtcggcgacaagcgccgttccggcttcctgatcccgaacgccaagtacggcagcaacaacggcttcgagttcatgttgccgtactactggaacatcgcgccgaactacgacgccaccatcacaccgcactatatgtccaaacgcggcctgcagtggcagaccgagttccgctatctggtgcagccgggcctcggcctgatggagttcgactggctgccggacgacaaggaatacggtaaagataatgacgacagcaaacgctggctgttctactggaaccacaacggcgttatggatcaggtgtggcgtttcaacgtcgactacaccaaggtcagcgattacaaatacttcaccgatctggactccaagtacggctccactaccgacggctacgccacgcagaaattcagcctcggctacgccaacgagaactggaacgccacgctgagctccaaacagttccagattttcgacaataccgatcgtacctggtcgcagacctacaaagtacagccgcagctggatctgaactactacaagaacgacctcggcccgttcgatttccatatttacggccaggcggccaagttcaccagcgtcaacccgtacagcccggacgccacccgtctgcatatggagccgacgctcaacctgccgctgaccaacggctgggccagcctgaacaccgaagccaaggtgatggcgacccactaccagcaggatattcctgacggtttcgccgccaactaccagagccgcaaaggcgccgttgcaccggagcttgatgattcggtcaaccgcgtattgccgcagttcaaggtcgacggcaagctggtgttcgaacgcccgatgatctgggccgaaggcgccacccagacgctggagccgcgcgtacagtacctgtacgtgccctaccgcgaccagagcaacatctacacctacgacaccacgctgctgcagaccgactactccggcctgttccgcgaccgcacctacagcggcctggatcgcatcgcttcgcagaaccgcgtctccaccggtttgaccacccgcatttatgatgacgcgctggttgaacgttttaacgcttccgtgggtcaaatctactacttcagccgttcgcgcaccggcgatcaggtaaccgggtacgacaacaacgacgataccggcagcgtggcctgggccggcgatacctattggaaaatcgacgatcgttggggcctgcgcggcggcctgcagtacgacacccgcctgaacagcgtctcgctgggcaacggcgtggtggaataccgccaggatgccgagcgcgtggtgcagttgaactaccgttacgccacgccggaatacatccagacggcgttgaacaccaaaacggttccggccttccaggacggcatatcgcaggtgggcatcaccggcagctggccgatcgccgatcgttgggcggtggtcggggcgtattactacgacacccgcgccaaacaatccgccgatcagctggtggggctgaagtacaacacctgctgctgggcagtgaccctgggctatgagcgcaagatcaccgactggaacaacagcaacagcgtttacgacaacagagtttcgttcaacgtcgaactgcgcggcctgagcagcgatcatagtctcggctccgcagaaatgctgcgctccggcattctgccgtatcagcgcgcattctga

SEQ ID NO: 424634 - DNA, 822 bp, Serratia marcescens
atgcagtattggggaaaactgctcggcgtcatcgtcgccatttggtctggtgcgggattctggggtgtagttctggggctgattatcggtcatatgatcgatacggcgcgcagcaataagcgcagccggggtttcttcaccgaccagcaaacgcggcaaacgctgtttttccgcaccacttttcaggtgatgggccacctgaccaaatccaaaggacgcgttaccgaggcagatatccagatcgccagcctgttcatggatcgcctgcagctgcacggcgaagcgcgcaccgcggcgcagcaggcgttccgcgaggggaaacagagccagtttccgctgcgtgagacgctgcagcagttccgcagcatctgttttggccgcttcgatttgattcggatgtttctggaaattcagattcaggcggcgttcgccgacggctcgctgcacccgaatgaacgccaggtgctgtatgtcatcgccgaagagctgggcatttcgcatgcgcagttcgatcagtttctcagcatgatggagggcgggcgtcagttcggcggcggtcagcagggcgggtattcgcagggcggctatcagcaggctcagcgcggcccgacgctcgacgatgcgtgcaaggtgctcggcgtgcgcagcagcgacgatgccgccaccatcaaacgcgcctaccgcaaattgatgagcgaacaccatccggataagctggtggcgaagggcttgccgccgcagatgatggaaatggccaagcagaaagcgcaggaaattcaggcggcgtacgacctgatcaaacgcgagaaaggcttcaaataa

SEQ ID NO: 424635 - DNA, 651 bp, Serratia marcescens
atggaaccctacaatcccccgcaggacccgctgcacatcctgtatcaggatgaacacatcatggtggtcaacaagcccagcggcttgctgtcggtgcccggccgcgcgccggaaaacaaagacagcctgatgacccgcattcaggccgatcatccggccgccgaatcggtgcaccggctggatatggccaccagcggggtgatcgtggtggcgctcaacaaggccgccgagcgcgagctgaagcgtcagttccgcgaacgcgaaccgaagaaatcctatatcgcccgcgtttgggggcatatggagcatgacgaagggttggtggacttgccgctgatctgcgactggccgaaccggccgctgcagaaggtgtgttttgacaccggcaaagcggcgcaaacggaatatcaggtgctgtcgcgcgacgccgacggcagcacgcgcgtaaagctgacgccgatcaccggccgctcgcaccagctgcgggtgcacatgctggcgctggggcatccgatcctcggcgacggtttctacgccccgccggaggccaaggcgatggcgccgcggctgcagctgcatgcgcaagagctgcgtatcacccaccccgccttccagacgccgatgcactttcgcgccgaaccggatttctga

SEQ ID NO: 424636 - DNA, 2907 bp, Serratia marcescens
atgccttttactcttggtcaacgctggatcagcgacacggaaagcgaattaggactgggcaccgtcgtggcgctggacgcgcgcatgattaccctgcttttccccgccaccggtgaaaaccgcctctatgccagaaacgattcgccgatcacccgcgtgatgttcaacccgggcgataccgtcagcagccacgaaggatggcagctgcaggtggaagaggtgaaagaggaaaacggtctgttgacctatatcggcacccgccaggacacccaggagagcggcgtggcgatgcgcgaagtcctactggacagcaagctgaccttcagcaagccgcaggatcgcctgttcgccggccaaattgaccgcatggaccgtttcgcgctgcgttttcgcgcgcgcaagtaccagagcgagcagtatcgcctgccgttcgccggcctgcgcggcatgcgcgccagcctgatcccgcaccagctgcacatcgcccatgaagtcggccagcgccatgcgccgcgcgtgctgctggcggacgaagtcggcctcggcaaaaccatcgaagccggcatgatcatccaccagcagctgctggcgggccgcgccgagcgcgtgctgatcgtggtgccggaaacgttgcagcaccagtggctggtggagatgatgcgccgcttcaacctctacttctcgctgttcgacgacagccgctatgccgaagccaagctcgacagcagcaacccgttcgaaaccgaacagctggtgatctgctcgctggacttcgtgcgccgcaacaagcagcgcctggaagagctggcggacgcccagtgggatctgctggtggtcgacgaagcgcaccacctggcttggagcgaagaagcgccgagccgcgaatatcaggtgatcgagcagttggccgagtatatccccggcgtgctgctgctgaccgccaccccggaacagctgggccaacagagccacttcgcgcgcctgcgcctgctcgatccaaaccgtttccacgactacggcgagttcgtcgccgagcagcagaaataccgcccggtggccgacgccgtcaccctgctgctgagcggtaaacgcctggccgacgacaaattgaatctgctgggcgagctgatcgacgagcaggacatcgaaccgctgctcaaagccgccaacagcgaaggcgacaacgccgagcaggcgcgccaggagctggtttccatgctgatggatcgccacggcaccagccgcgtgctgttccgcaacacccgtaacggcgtgaagggcttcccgcaccgcaacctgcaccagatcaagttgccgttgccgacccagtatcagactgcgatcaaagtgtccggcatcatgggcgccaagaagtccgtcgaagcgcgcgcgcgcgacatgctgtacccggagcagatctaccaggaattcgagggcgaaaacgccacctggtggaacttcgacccgcgcgtcgagtggctgctggactacctgctggccaaccgcaacgaaaaagtgctggtgatctgcgccaaggccgacaccgcgctgcagctggagcaggtgctgcgcgagcgtgaagcgatccgcgccgcggtgttccacgaagggctgtcgattatcgagcgcgaccgcgccgccgcctacttcgcctccgaagaggaaggcgcgcaggtgctgctgtgttccgagatcggctccgaaggccgcaacttccagttcgccagccagctggtgatgttcgatctgccgttcaacccggacctgctggagcagcgtatcggccgtctggaccgtatcggccagatgcacgatatccaaatcatggtgccttacctggagcacaccgcgcaggcggtgctgggtcgctggttccacgaggggctggacgccttcgaacacacctgcccgaccggccgcaccatctacgacagctgctacgagcagttgatcggttatctggccgcgccgaccgaacaggaaggctttgacgaattcatccacgcctgccgccagcagcacgatcagttgaaagcgcagctggaacagggccgcgaccgcctgctggagatgcactccaacggcggcgacaaagcccaggcgctggccgccgccatcgccgagcaggataacgacgtcaatctggtgggcttcgcgctcaacctgttcgacatcgtcggcatcaaccaggaagaccgcagcgacaacctgatcgtgctgacgccgtccgaccatatgctggtgccggacttcccgggcctgccgcaggacggctgcaccgtcaccttcgatcgcgatcgggcgctgtcgcgcgaagacgcgcagttcgtcagctgggagcacccgatcatccgcaacggcctggatctgatcctgtccggcgataccggcagctgcgcggtgtccctgttgaaaaacaaagcgttgccggtcggcaccctgttggttgagctggtgtacgtggtggaggctcaggcgccgaagcacctgcagctgacccgcttcctgccgccgacgccgatccgcatgctgatggatcgcaagggcaccaacctggcggcgcaggtcgagttcgaaagcttcaaccgccaactgaacgcggtcaaccgccacacctccagcaagctggtcaacgccgtgcagcaagacgtgcacgccatgctgcagcaggcggaaagcctggtggaagtgcaggcgcgcacgcttatcgaacaggcgaagcaagaggcggacgacaagctgagcgccgagctggcgcgtctggaagcgctgaaggcggtcaacccgaacatccgcgacgacgaagtcgaagcgctggagttcaaccgccgtcaggtgctggccaacctcaatgaagccggctggcgtctcgacgccatacgtctggtggtggtcacccaccagtaa

SEQ ID NO: 424637 - DNA, 2367 bp, Serratia marcescens
atgacagcactgcaacagggtttcctgctcactcgccactggcgcgacacgcccgccggcaccgaggtcgaattttggctggcgaccgacgcgggcccgcgtcagctgcgcttgccgccgcaaacctcggtggcgtttatccccgccgaacaaaagccgcgcgcggaactgctgctgcgcgaagagcggcaggtggaactgaaaccgctgacactgacggattttcatcaccgcccgatgctggggctgtactgtcgccagcaccgtcagctcatcaagctggaaaaactgctgcgggaaggcggcgttacggtctacgaggccgacattcgcccgcccgaacgctacctgatggagcgcttcatcaccgcgccggtgtggttcaacggccaggccaacggcggagggccgttgctcaatggccagatgaagccggcgccggactaccgcccgacgctcaggctggtgtcgctggatatcgaaaccaccgcccacggcgagctttactccatcgcgctggaaggctgcggccagcggcaggtctacatgctggggccggccaacggcggcgatgcgccgctggatttcgatctggaatactgcgccagccgcccccagctgctggaacgactcaacgcgtggctggagcgccacgatcccgacgccatcatcggttggaacctggtgcagttcgatctgcgggtgctgcaaaaacacgccgaacgctaccaaatcccgctgcggctggggcgcggcggcaacctgctggagtggcgcgagcacggcttcaagcagaaccactttttcgccgccgccgccggccgcctgatcatcgacggcatcgaagcgctgaagtccgccacctggaactttccctccttcagcctggagtacgtttcgcaggcactgctgggcgaaggcaaggcgatcgacaacccttatcaacgcatggcggagatcgaccggcgtttcgccgaagacaagccggcgctggcccgctacaacctgaaggactgcgagctggtgacgcgcatcttcgccaaggccgatctgctcaacttcctgctggaacgcgccaccgtcaccgggctggcggccgatcgcagcggcggatcggtggcggccttcagccacctttatatgccacgcatgcaccgcctgggctttgtcgcccccaacctcggcgaacagccggaggaacacagccccggcggcttcgtgatggactcccggcccggcctgtacgattcggtgctggtgctggactataaaagcctgtacccgtcgatcatccgcaccttcctgatcgatccggtcgggctggtggaaggcatgcgccacccaaacgacgccgattcggtgcctggctttcgcaacgcccgcttctcgcgcagcaaacactgcctgccggcgatcgtcgagcagatctggcaggggcgcgaggccgccaagcgccaacacaacaagcccctgtcgcaggcgctgaagatcatcatgaacgcgctgtacggcgtgctgggatcgagcggctgccgcttcttcgatccgcggctggcgtcgtcgatcaccctgcgcggccacgagatcatgcgtcaaacccgcgagctgatcgaagccgaaggttatcaggtgatttacggcgataccgactccaccttcgtgtggctgaaacagccgcatgacgagctgcaggcggcgcagatcggccgggcgctggtgcagcgggtcaacgcctggtggcagcagcatctgcagcagcagttcgggctggagaacgcgctggagctggagttcgaaacccactattcccgcttccttatgccgaccattcgcggcgccgaacagggcagcaagaagcgctacgccggcctgatcgcacgcggcggcggcgaggaagagatggtgtacaaaggcctggaaacggtgcgcaccgactggacgccgctggcgcagcagttccagcagcagctctatcagcgcatcttcaaacggcagccctaccaggactatgtgcgcgactacgtcggcaaaaccctgaacggcgacttcgacgatcagctggtgtaccgcaagcgcctgcgcaggaaactcgacgactatcagcgcaacgtgccgccgcacgcccgcgccgcgcgcatcgccgacgactacaaccgcagccaggggcggccgctgcagtatcagaacggcggctggatcagctacgtgatgaccgtcgccgggccggaaccgctggaaacgcgccattcgcccatcgactatcagcattacctcgaacgccagctgcaaccggtggcagacgctatactccctttcttgcacgacgatttcaccacgctggtcaccgggcagatggggctgttttga

SEQ ID NO: 424638 - DNA, 771 bp, Serratia marcescens
atggaagcctatttacaagatttgatcacccagtcgctggctttcaccctgatggtcgtcctgctggtcgcttttctcgagtcgctggcgctggtggggctgctgctgcccggcacggtgatgatggccagcatcggcgcgctgatcggcagcggcaaggtggacttctactacgcctgggcggcagggatcgtcggctgcctgctcggcgactggatctcttatttcgtcggccgcgccttcaaggggcccttgcaccgctggtcgttcctgaagaagaacaaagcgctgctcgacaaaaccgaacacgccttgcaccagcacagcatggcgaccattctgatcggccgcttcgttggcccgacgcgcccgctggtgccgatggtggccggcatgctcgatctgccgccgtacaagtttgtcttgccgaacatcatcggttgcctgacctggccgccggtctatttcttccccggtatcctggcgggcgtggcgatcgacattcccgccggcgccaacagcgcgatgttcaagtggctgctgctcgccgcggcgctcacgatctggctggcggtgtggctgagctggcgctggtggcgtgaggataagcgcagcgccgatcggctgagccgttggctgacgccgctgcggctgcgcgtggtttgcggattgagctggctggcggcgctggcggtcggttatctgctgagccagcagccgctgatgccggtgtatcggcacctgctgtggcaggtgctgtccgggcaatga

SEQ ID NO: 424639 - DNA, 294 bp, Serratia marcescens
atgctgcaaccacaagataaaccccaggtgatcctggagctggccgtgcgcaaccatcccggcgtcatgtcgcacgtttgtgggctgttcgctcgccgcgcgttcaacgtcgaaggcattctgtgtctgccgctgaaggacggccagcagagccgcatttggctattggtcgccgacgatcagcggctggagcaaatgatcagccaggtggaaaagctggaagacgtgctgcaggtgaagcgccacagcgaagacgtgcgggtatttgaacagctggaagcgttcttccagtaa

SEQ ID NO: 424640 - DNA, 1695 bp, Serratia marcescens
atggcaacttcgggcacgcctcaaccgggcaccagcttcaccggcgcacaattgatcgttcatctgctggagcggcagggtatcaccaccgtcgccggcatccccggcggcgccgcgctgccgctgtatgacgcgctgagccaaagcacccgtattcaccacgtgctggcgcgccacgaacagggcgcgggctttatggcgcagggcatggcgcgcgccaacggcaaagcggcggtgtgcatcgcctccagcgggccgggcgccaccaacctggtcaccgccatcgccgatgccaagctcgactccattccgctggtgtgcatcaccggtcaggtgccctcctcgatgatcggcaccgacgccttccaggaggtggacacctacggcatttccatcccgatcaccaagcacaaccatctggtgcgcgatatccgcgagctgccgcaggtgatcggcgacgcgttccgcatcgccgaatccggccgcccaggcccggtctggatcgatgtgccgaaagacgtacaaaccgccaccatcaccctggaagagctgccgccgatcgccgtgccggacgccgccccaaccttcgatccggcgctggttgcgcaggccgccgcgatgatcaaccaggcgaaacgcccgatcctctacctgggcggcggcatcatctgcgccgaggctcaccggcaggcgctggaactggccgagcgcgccggtctgcccaccaccatgacgctgatggcgctgggggcgatgccggtggaacacccgctgtcgctgggcatgttgggcatgcacgcggcgcgcagcaccaacttcattctgcaggaggccgatctgctgatcgtgctgggcgcgcgcttcgacgatcgggcaatcggcaaaaccgagcagttctgccctaacgccgccatcattcacgtggatatcgatcgcgccgagctgggcaaggtcaaacaggccaacgtggcgatccatgccgacgtcggccaggtactgcaacagctgctgccgcagatcgacacgcagccgcgcagcgcgtggctgagcaccgtcaacgacctgaagcgcgagttcccgttcaacatgccgaacgccgacgatccgctgagccattacggcctggtgctggccgccgcgcgctgcgtggacgacagcgccattatcaccaccgacgtgggccagcatcagatgtgggtggcgcaggcctatccgctgagccggccgcgccagtggctgacgtcgggcggcctgggcaccatgggcttcggtctgccggcggcgatcggcgcggcgctggcggagcccgagcgtaaagtgctgtgcttctccggcgacggcagcctgatgatgaacattcaggaaatggccaccgccgtcgaacacgatctggacgtgaaaatcattttgatgaacaaccaggcgctggggctggtgcaccagcagcaaaccctgttctaccagcagcgcatcttcgccgccgcctatccgaagcgcaccgacttcctgaagatcgccgccggattcgggctggatacctgcgatttgaacgccgcggaagatccgcaggcggcgctggccgaagcgatccaacgcccggggccctgcctgatccacgcgctgatcgatatcaacgaaaaagtgttcccgatggtgccgccgggcgccgccaacatcgacatgattggagaataa

SEQ ID NO: 424641 - DNA, 705 bp, Serratia marcescens
atgctgacgcttgaaaaactgacctatctgtatgaacacctgccgatgcgctttgatctgcgcatccagccgggcgagcgcgtcgcggtgctcggccccagcggcgccggtaaaagcaccctgctgagcctgatcgccggttttctgccggcggccagcggccggctgctgctgaacggcgaagaccacaccgccacaccgccggccaaacggccggtgtcgatgctgtttcaggagaacaacctgttcgcgcacctgacggtagcgcagaacatcgggctggggttggatcccggtctgcgcttgactgaacagcagcgccaacagcgggcgcatatcgctcgtcaggtcggcctggaagagcacctggagcgcctgccgtcgcagctttccggcggccagcgtcagcgcgccgcgctggcgcgctgtttgattcgccaacggccgatcctgttgctcgacgagcccttctcggcgctcgatccggcgctgcgcaacgagatgctgcagctgctgcagacggtgtgcgaacagcgcaacctgacgctgctgatggtgtcgcacaacctcgacgacgccgcgcgcatcgccccgcgcacgctgctggtggtcgatggccgcatctattacgacggcccgacgcaggcgctgctggacggcagcgcgcccgaagcgcgcgtgctgggcatttcgggtaaagcgtga

SEQ ID NO: 424642 - DNA, 1608 bp, Serratia marcescens
atggcaaaccgccgtcagccgctgatcccccgctggctctggccggggctgctggccgccggcgtgatcctgctggtcgccgcgctggcgatgggctcgctgtggcgtcacgcgccggacagcgactggcgcggcctgtggcaggacagctacctgtggcacgtggtgcgcttcaccttttggcaggcgctgctgtcggcgctgatttcggtgctgcccgccgttctgctggcacgcgcgctctatcgccgccgtttccccggccgtcagctgctgctgcggctgtgcgccatgacgctggtgctgccggtgctggtggcggtgttcggcctgctcagcgtctatgggcgccaaggctggctggcgacgctgtgcggctggctgggcatcgaatatggcttctcgccctacggtctgcagggcattctactggcgcacctgttctttaacctgccgctggccacccgcctgttgctgcaggcgctggagaacattccggtggagcagcgccagctggccgcccagctgggcatgaatggctggcagcagttccgcttcgtcgaatggccggcgctgcgccgccagatcctgccgagcggcgcgttgatcttcatgctgtgcttcgccagcttcgccaccgtgctgtcgctgggcggcgggccgcaggccaccaccatcgaactggcgatctaccaggcgctgagttacgactacgatctgggtcgcgccgccatgctggcgctgatccagttaagctgttgtctggggctggtgttgctcagccagcggctgagccaggcgctgccggtgggccatacccacgcccagcgctggcgcaacccggaagacagcctgtggcggcgcgtcggcgattttctgctgatcgccgccgcgctgttgctgttattgccgcctctgctggcggtaatcgccgacggcgccaatcaggctatcgtcagcgtgctgcgccagccggtgctgtggcaggcgctgttcacgtcgctgcgcatcgccctcggcgccgggctgctgtgcgtgacgctcacgatgatgctgctgtggagcagccgcgagctgaagctgcggcagcatctgcacggcggccagtcgctggagctgagcggcatggtgatcctggcgatgccgggtatcgtgctggccaccggcttcttcctgctgctgagcgatacgatcgggctgccgcagtcaccctatgcgctggtgatcctcaccaatgcgctgatggcggagccctatgcgctgaaggtgttggagaacccgatgcgcgacctcgccgaacgttacaacccactgtgcctgtcgctggatatccacggctggcaacggctgcggctgatcgaactgcgcgcgttgcgtcgcccgctggcgcaggcgctggccttcgccagcgtgctgtcgatcggcgatttcggcgtggtcgccttgtttggcaacgagcatttccgtaccctgcctttttacctgtatcagcagattggcgcctaccgcagcaacgacggggcggtgaccgcgctgctgttgctgctgttgtgtttcctgctgtttaccctgatcgaacgcttaccggggcgccatgctgacgcttga

SEQ ID NO: 424643 - DNA, 987 bp, Serratia marcescens
gtggtcaaaacatatctgccctgcttattgctgctgtgcgccgcgccggtgttcgccaagccgacgctgacggtttacacctacgattccttcgccgccgactggggccccggcccggcggtgaaaaaagccttcgaagccgagtgcgactgtgaactgaagttcgtcgcgctggaagacggcgtctcgctgctgaaccgcctgcgcatggaaggcaagaacagcgccgccgacgtggtgctggggttggacaacaacctgctgcaggcggcgcagcaaaccggcctgttcgcgccgagcggcgtcgacaccgccaaactgacggtgccgggcggctggcaggacgcgaccttcgtgccttacgactacgggtacttcgccttcgtctacaacaaagaaaaactgaataacccgccaaaaagcctgcaggagctggtcagcagcgatcgcaactggaaagtgatctacgaagatccacgcaccagcacgccgggcctcggcctgctgctgtggatgcagaaagtgtatggcgacaaggcgccggccgcctggcagcagctggcgaagaagaccgtcaccgtcactaaaggctggagcgaagcctacggcctgttcctgaagggcgaaggcgatctggtgctcagctacaccacctctcccgcctatcacctgatcgaagagaaaaaagatctctacgccgccgccacgttcagcgaaggccactacctgcaggtggaagtggcgggcaagctgaaggccgccaaacagcctgagctggcggagcgcttcatgcagttcatggtgacgccggcgttccagaacaccatcccgaccggcaactggatgtacccggtgatcaacaccccactgcccgtcggctttgagcagatgagcgtgccgcagaccgcgctgcaatacagcgccgaagaggtggccaaacaacgcggcggttggatccgggcatggcaaaccgccgtcagccgctga

SEQ ID NO: 424644 - DNA, 1662 bp, Serratia marcescens
atgtccacgtcccgattgcagcagcagttcatccgtctgtggcagcgctgccacggtgaaaccaccgacaccacgctgcaggatctggcggaggtgctgagctgctcgcggcgccacgtgcgctccctgctgagcgccatgcagcgagagggctggctcacctggcaggcggagtcggggcgcggcaaacgttcgcggctaaccttccactacaccggcctggcgctgcagcaacagcgggccgaggagctgttggaacaggaccgcatcgatcagttggtgcagctggtgggcgacaaaaacgtggtgcgccagatgctgctgtcgcagctgggccgcagcttccgccaggggaaacatatcctgcgggtgctctactaccggcagctgtacaacctgctgcccggctcggcgctgcggcgttcggaaacccatttggcgcgccagatcttcaacggcctgacgcgcataaatgaggaaaacggggaactcgagtccgatctgtcccaccattggcaggcgctgacgccgctgcactggcggttttacctgcgcccggcgatccattttcatcacggccgcgagctggagatggcggacgtcatcacttccctctcgcgtctgacctcgcaaccgctgttctcgcatatcgagagcgtcacctcgccgacgccgttcgtgatcgacgtgcagctgcgcagccccgaccactggctgccctggctgctgggcagcgtgcaggccatgatcctgccgcgcgaatggcgcgaactgcctgatttcgcccgccatccggtcggcaccggcccctaccgcatggtgcgcaaccatcccagccagatgaagatccacgccttcgacgactatttcggctaccgggcgctgatcgacgaggtgaacatctgggtgctgccggagttttccgaagagctggtgcactccggcgtgcagctgcagggcgatgaaaccggcaacagcgagctggaaagccggctggaagagggctgctatttcctgctgttcgatcagcgctccccgctggccgccgatcccgccattcgcagttggctgtgcgaattgatcaaccccatttcgctgctgagccacgccgggccgctctaccagcgctattggtcgccggcgtacggcctgctgccgcgctggcaccacaaccgcacgctggcgcagcagcccaagcccgcgggcctgaccgaactgacgatgacccacttcaatgagcattcggagtttcacgccattcgccaggcgatcgaaccgctgctggcgcagcacggcatccgcctgattgtgcaaagcgtggattacgccacctggcaccagggcgacgcgcgcagcgatctgtggctcggcagcgccaacttctacctgccgctggagttttcgctgttcgccacgctgtacgaactgccgctggtgcagcactgcatgaacgaagatctggcgcaggacgcggcgctgtggcgcgccaaccgcttgccgctggccgagttctgccagcgtctggtcagcaaccaccagctgcatccgctgttccaccactggctgcagttgcacggccagcgcagcatgcgcggcgtgcggatgaacaccctcggctggttcgacttcaagtccgcctggtttgccccgccggaggcataa

SEQ ID NO: 424645 - DNA, 177 bp, Serratia marcescens
atgatgaaagctttcttatccagacagttctaccagcgctatttcagcgcggtgcgccgccagcgcgcagactggctgagcgtggtgcccgagcaggcgcggctggcgatgctggcgcacctgacgcaatgggacatcaaagagatgaccgataagcagtatcgcgagcacctgtag

SEQ ID NO: 424646 - DNA, 1197 bp, Serratia marcescens
atgcaacgcctgagccggttgtcacagcgcatcaatcccatctttgccgcattcctgctgattgcttttctttccggcatcgccggcgcgttgctgacgccgacgctcagcctgtttctgaccaccgaggtcaaggtgcggccgctgtgggtcgggctgttttacaccgccaacgcggtggccggcatcgtcgtcagttttctgctggccaaacgctccgatacccgcggcgatcggcgcaggctgatcctgctgtgctgcctgatggcggtcggcaactgtctgctgtttgcctttaaccgcgactacctgacgctgatcaccgccggggtgctgatgtccgccgttgccaacaccgccatgccgcagattttcgcgctggcgcgggaatacgccgacagcgaggcgcgtgaagtggtgatgttcagctcggtgatgcgcgcccagctatcgctggcgtgggtgattggcccgccgctgtcgtttgcgctggcgctcagctacgggttcaccgtgatgttcctgatcgccgccgccaccttcgcggtctgcgtgctgctggtaggattcatgctgccttcggtgccgcgcgcggcggatggcgaagggttgcgggaaggcgcttccgcgccgattgcgcccgccagcgcctggcgcaatcgcgatgtgcggctgctgttcatcgcctcgatgctgatgtggacctgcaataccttgtacatcatcgatatgccgctgtatatcaccgccgatctcggcctgccggaggggctggccggggtgctgatgggcaccgccgccgggttggagatcccggcgatgctgttggccggttattacgtccaacgcttcggcaaacgcaacatgatgctgctggcggtggcggcgggcgtgctgttttatctcgggctgacggtgctggagagcaagccggccctgatcgcgctgcagttgctcaacgcggtgtttatcggcatcgtcgccggtatcggcatgctctattttcaggatttgatgccgggccggccgggcgccgccaccacgctgttcaccaacagcatctctaccggggtgatcctggccggggtgctgcagggcgcgctggtggagaatttcggtcatggctcggtgtattggatggcggcgctgttggcgctggcggcgctcgggatgagcgccaaagtgcgtgaagtgtga

SEQ ID NO: 424647 - DNA, 1473 bp, Serratia marcescens
atggataaactcacaccgctcaaaccgcttccttccctgtgcgcccttgccgccacgctgattatctggttcctcattcccgtgccggagggcgtcgcgcctaatgcctggcagctgctggcgctgtttatcggtaccatcatcgccatcatcggcaaggcgatgccgatcggcgcagtctcggtgatcgccatcgccctggtggcggtgaccggcgtcaccaatcccggcaagccgggcgccgcgctggacgacgcgctcagcggcttttccaacccgctgatctggctgatcggcttttcgatcatgatctccctcagcctgaataaaaccgggctgggcgcgcgcatcggctattactttatttcgctgttcggcaaaaaaacgctgggcatcgcctatgcgctgacgctggcggaaaccacgctggcgccggtgacgccgagcaacaccgcgcgcggcggcggcatcattcacccgatcatgaagtcgatcgccgacagcttcggctccaaacccgagctcaatacctccggcaagatcggccgctacctgtcgctggtgaactacaacatcaacccggtcacttcggcgatgtttatcaccgctaccgcacctaacccgctgattgtcagcctgatcgccaaaggcacacacggcagcttcgagctatcctggtcgatgtgggcagtcgccgctctggtgccggggctgtgctcgctgatcgtgatgccgctggtcatctatctgctgtatccgccggaggtgagaagtaccccggacgcgccgcgcttcgcgcgcgaaaaactgcaggcgctggggccggtaacgctgccggagaaaatcaccctcggggtgttcgcgctgttgctggtgctgtgggccggcattccggcgatgatcttcggtccggcgctggcggtcaatcccaccaccgcggcgctgatcggcctggcggtgctgctggccaccggggtgctgagctgggaggatgtgctcaagcataaaggtgcctgggacaccgtggtgtggttctcggcgctggtgatgatggccagcttccttggcaaactggggctgatcggctggctgtcgcaaaccgtgggcaacggcatcgaccatatgggcatgagctgggggggcggcacgatcttgctgaccctcatctatttgtattcgcactatttcttcgccagcaccaccgcgcacgtgacggcgatgttcgccgctttcttcgccgccggcatcgcgctcggcgcgccaccggcgctgctgggcctgatcctggcgttctcttcctcgctgatgatgtcgctgacgcattacggcaccggcaccgcgccgatcgtcttcggctccggctacgtgacgctgggggaatggtggaaagcgggatgggtgatgagcgtggttaacttgctgatctggatagtgatcggcggagcatggtggaagctgctgggctactggtga

SEQ ID NO: 424648 - DNA, 603 bp, Serratia marcescens
gtggctaaatttactcaacataccggcttagtggtgcctttggatgcggccaacgtcgacaccgacgccattattcccaagcagtttttacagaaggtcacccgcaccggcttcggccagcacctgttcaacgactggcgtttcctcgacgacgccggccagcagccgaacccggaattcgtgctgaacaaaccgcgctataaaggcgccagcatcctgttggcgcgcgagaacttcggctgcggctcctcacgcgaacacgcgccctgggcgctgaccgattacggattcaaagtggtgatcgcgccgagcttcgccgatatcttttacggcaactcgttcaacaaccagctgttgccggtgacgctgagcgaacagcaggtggatgagctgttcaagctggtggacgccaacgagggaacggagttcgtggtggatctggagaaccagacggtcaacgccggcggcaaaagctatccgttcgaaatcgacagcttccgccgccactgcatgatcaacgggctggacagcatcggcctgacgctgcagcacgaagcggacatctcccgctacgaagcgcagcagccggcgtttttgaattaa

SEQ ID NO: 424649 - DNA, 1401 bp, Serratia marcescens
atggccaagaccttataccagaagctgtacgacgcccacgtggtgcacgaagcgccgaacgaaacgccgttgctgtatatcgaccgtcacctggtgcacgaagtcacttcgccgcaggcgttcgacggcctgcgcgccatgggccgcaaggtgcgccagcccggcaaaaccttcgccaccatggatcacaacgtgtcgacccagaccaaagacatcaacgccagcggcgagatggcgcgcatccagatgcaggagctgatcaagaactgcgcggaattcggcgtttcgctgtatgacctgaaccacccgttccagggcatcgtgcacgtgatcgggcctgagcaaggcatgacgctgccgggcatgaccatcgtctgcggcgactcgcacaccgccacccacggcgctttcggctcgctggcgttcggcatcggcacctccgaagtggaacacgtgctggcgacccagaccctgaagcagggccgcgccaagaccatgaagattgaggtcaccggcgacgccgccgagggcattaccgccaaagacatcgtgctggcggtgatcggcaaaaccggcagcgccggcggcaccggccacgtggtggagttctgcggcaaggcgatcgaagcgttgagcatggaaggccgcatgaccctgtgcaacatggcgatcgaaatgggcgccaaagccgggttggtcgcgccggacgacaccaccttcgcctacctgaaggggcgtcagttcgcgccaaccggcgaaaactgggagcaggcggtcgcctattggcgcacgctgaagtccgatgccgaagcccaattcgataccgtggtgacgctgcgcgccgaagagatcgcgccgcaggtcacctggggcaccaaccccggccaggtgatcgccgtcaatcaggcgatcccggcgccggaatcgttcagcgatccggtcgagcgcgcctccgcggaaaaagccttggcctacatggacttgaaaccgggcatcaaattgaccgacgtgccgatcgacaaagtgttcatcggctcctgcaccaactcgcgtatcgaagatctgcgcgcggcggcggcgatcgccaaggggcgcaaggtcgccagcggcgtgcaggccatcgtggtgccgggctccggcccggtgaaggcccaggcggaagccgaagggttggacaaaatctttatcgaagccggtttcgaatggcgtttgccgggctgctcgatgtgtctggcgatgaacaacgaccgcctgaatccgggcgagcgctgcgcgtccaccagcaaccgtaacttcgaagggcgtcagggccgcggtgggcgcacccacctggtcagcccggcgatggccgccgcggccgccgttgccggtcacttcgccgacatccgtgatattcactaa

SEQ ID NO: 424650 - DNA, 1092 bp, Serratia marcescens
atgacgaagacttatcacattgccgtcttgcccggagacggcatcggcccggaagtaatggctcaggcgcgcaaagtgttggacgcggtgcgtcaacgctttgacattcgcatcaccactgccgaatacgacgtcggcggcatcgccatcgatcgccacggcagcccgctgccgccggcgaccgtcgccggctgcgagcaggccgacgccatcctgttcggttcggtaggcggcccgaaatgggaacacctgccgccggccgagcagccggaacgcggcgcgctgttgccgctgcgcaagcacttcaaactgttcagcaacctgcgcccggcacgcctgtatcaagggctggaggcattctgcccgctgcgcgccgacatcgccgcccgcggcttcgacattctgtgcgtgcgcgaactgaccggcggcatctacttcggccagccgaagggccgcgaaggccagggcatgcaggagcgcgctttcgataccgaggtgtatcaccgtttcgagattgaacgcatcgcgcgcatcgccttcgaatccgcccgcaagcgccgccacaaggtgacgtcgatcgacaaggccaacgtgctgcaaagctccatcctgtggcgtgaagtggtcaatcaggtcgccaaggattacccggacgtgtcgctgtcgcacatgtatatcgacaacgctaccatgcagctgatcaaggatccgtcccagttcgacgtgctgctgtgctccaacctgttcggcgacattctgtccgacgagtgcgcgatgatcaccggctcgatgggcatgttgccgtccgccagcctgaacgagcaaggcttcggcctgtacgaaccggcgggcggttccgcgccggatattgccggcaaaggcattgccaacccgattgcgcagatcctgtccgccaccctgctgctgcgttacagcctgggcgccgatgaagcggccgacgccgtggagcgcgccatcaaccaggcgttggaacagggctaccgcaccgccgatctggccggtgacggcaaagccgtcagcaccgatgaaatgggcgacatcatcgctcgctttgtagctcagggggcataa

SEQ ID NO: 424651 - DNA, 1575 bp, Serratia marcescens
atgagccaacaagtcattattttcgataccacgctgcgtgatggcgaacaggcgttgcaggccagcctgagcgtaaaagagaagattcagattgcgctggcgctggaaagaatgggcgtcgacgtgatggaggtcggcttcccggtctcttcgccgggcgacttcgagtcggtgcaaaccatcgcgcgccagatcaagaacagccgcgtctgcggcctggcccgctgtgtggacaaagacatcgacgtggccgccgaagcgttgcgcgtcgccgaagcgttccgcatccacgtattcctggccacctcaaccctgcacatcgaatcgaaactgaaacgctcgttcgacgaagtgttggagatggcggtgcgctcggtcaaacgcgcccgcaactacactgacgacgtagagttctcctgtgaagacgccggccgcacgccgatcgacaatctgtgccgcgtggtcgaagccgccatcaacgccggcgccaccaccatcaatattccggacaccgtcggttacaccacgccgaaccagttcggcggcatcatcaccaccttgtatgaccgcgtgccaaacatcgacaaagccatcatttccgtgcactgccacgacgatttgggcatggcggtcggcaactccatcgccgcggttcaggccggcgcccgtcaggtggaaggcaccctgaacggcatcggtgagcgcgccggcaactgttcgctggaagaggtgatcatggcgattaaggtgcgccaggacatcatgaacgtgcacaccaacatcaatcatcaggaaatcttccgcaccagccagatcgtcagccagctgtgcaacatgccgatcccggccaacaaggcgatcgtcggctccaacgccttcgcccactcctccggcattcaccaggacggcgtgctgaagaaccgcgaaaactacgaaatcatgaccccgcagtcgatcggcctgaaggatgtgcagttgaacctgacctcccgctccggccgcgcggcggtgaaacaccgcatggaagagatgggctaccaggagcaggactacaacctggataccctgtacgccgccttcctgaagctggccgacaaaaagggccaggtgttcgactatgacctggaggcgctggccttcatcaataaacagcaggaagagccggagcacttcagcttgggctacttcagcgtgcagtccggcagcagcatcatggctaccgcctcggtgaaactgatctgcggcggcgaagagaaagccgaggccgccaccggcaatggcccggtcgatgcggtttatcaggcaatcaaccgcatcaccgactacccgatcgagctggtgaaataccagctgaccgccaagggccatggccgcgacgcgctgggccaggtggatatcgtggtctcttacaacggccgccgcttccacggcgtaggtctggcgaccgacatcgtcgaatcttccgccaaggcgatggtgcacgtgttgaacaatatttggcgctcacagcaggtagaaaaagaaaagcagcgcctgcagcaaaacaaacatcaaaataatcaggaaacggtgtga

SEQ ID NO: 424652 - DNA, 948 bp, Serratia marcescens
atggctgaatatgattccgaaatcactatggtcaaagagccggcggacattcatttgcgcagcgtcgatcttaatttgctgacggtgtttgacgccgtgatgcaaatgcaaaatattacgcgagccgctaattcgctagggatgtcgcagccggcggtgagcaacgcggtagcgcgcctgaaggtgatgttcaacgacgaactgttcgtgcgctgcgggcgcgggatccagcccaccatgcgggccaggcagctgtttggcccggtgcggcaagcgttgcagctggtgcagaatgaattgccgggcgccgagttcgagccgctgaccagcacgcgagcgttttccttgtcgctgtgcagtccgctcgacttgcgcctgggcgccgggataatcaatcacgtcaaacagatcgcgccgcagcttaatctgcaaataaagtcatacatcaacaataatatcgaacatcaattgcgttatcaggacgtcgagtttgtcatcggctacagccgtttcgaatcggcagagtttcgcagtttggcgatgttcgacgacgaattagtgctggcggccgcgcaggcgcacccgagaatgggcgaggaggcgacgccggagcaaatgctggccgaacagcacgcggcggtatccctggaaagttttggatcgttcagtaagcctttttatttagaggaaccgatgctgcgcgccgtgacgcagcagtgcacggatctctacagcgtgttgaatatggtgtcgcaaacggagatggtggcgattgcacccgcctggctggtgagacaacagacggaggcgttgaaaataaaggcggttcctttgtgcgccaatcacaataaagcaacctgctatctttcttggcatgaatcctccgagcgggataaagggcaccagtggatgaaatccgtcctgattgaggcgggtaacccaaagtaa

SEQ ID NO: 424653 - DNA, 1809 bp, Serratia marcescens
atgatcactaatctgctgcaataccatctgatccatcgtatacagcatcaaatcacccaccgagccgatcgcacagcttttcgccaatggtcgcccaacggcgagttgcaactgacctggggagcggccgccgcccgcatcgatcgcatcgccgccgggctgctggggctgggcgtcgaagtgcaagaacgcatcggtattttcgccaataacacgatggcctggtcgttgaccgatctcgcgatcctgcacctgcgtggcgtcagcgtgccgctctattccaccaatacgccggcgcaggcggcgtttgtcaccaacgacgccgacatccgcatactgttcgtcggtgagcaggcgcagcttgacgccgccatcgcgctgcgcggcgtctgcccacagctgcggcacattatcgtcttcgacgagggggccgatctgcgcggctgcgagatcgcacagcatctgagcgccttcgagcgcgctgccgatccggcggcttttgccgctcaatgtcggcagcgtattgaagagtgcgacctgcaggatctcttcaccctgatttatacctcgggtactaccggcgagccgaaaggggtgatgctggactaccgcaacctggcggcgcagctctacctgcatgatgaaaggctgacggtcggcgaagaggatgtgtcgctcagcttcctgccgctgtcgcacgtgttcgagcgggcctggagcttctttgtgatgcattccggcgcgcagaacgtcttcctgccgaataccgactgggtgcgggaagcgatggggcaggtccgcccgacgctgatgtgtgcggtgccgcgtttctacgagaagattttcagtgcggtgcatgaaaaagtggcgcgcgccccttggctgcgccgtgcgttgttccactgggcgatcgtctgcggcgagcgcaagttcctgcaggagcgcgccggcaaaccgttgggcaaagtgttcgacttcacccaccgctgggccgataagctggtgttgagcaagctgcgcggtatcctcggcggccgggtgcgctttttgccggcggcgggcgccaagctggacgacaatgtgatcctgtttttccaggcgatgggcgtcaacatcaagtacggttacggcatgaccgaaacctgtgcgaccgtctcctgctgggaagaggggcatttccgcttcggatctatcggcaaaccgctgccggaggtcgaggtgcgcattggcgaggaaaatgaaatccaggtgcgcgggccgatcgtgatgcgcggctatttcaacaaaccgttggaaaccgccgcgacctttaccgaggacggctggctgaaaaccggcgacgccggggcgatcgatgaagagggcaacctgttcatcaccgaacgcctgaaggatttgatgaaaacctccggcggcaaatatatcgcgccgcagatgctggaaggcacgctggcgcaggatcgctttatcgagcaggtggcgatcatcgccgatgcgcgtaaattcgtttccgcgctgatcgtgccgtgctttgagtcgctggaagagtacgcgaagtcagtgaacctgaaataccaggatcgcctggaactgctgcgcaacggcgaaatcctcgagatgttcgaaaagcgcgtgcgcgagatgcaaaaggagctggcgcgcttcgaacaggtgaagaagttcacgctgctgccggcggccttttcgatggagctgggggagttgacgccaacgctgaagctgcgccgcaaagtgatcctgcagcgctatcagcgtgaaatcgactcgatgtaccaggaacaggcctga

SEQ ID NO: 424654 - DNA, 1719 bp, Serratia marcescens
atggagatgttgtcaggagccgagatggtcgtccgatcgttgatcgatcagggcgttaagcatgtattcggctaccccggcggggcggtgctcgatatctacgacgccctgcatacggttggagggatcgatcatattctggtgcgccacgagcagggggcggtgcacatggccgatggctacgcgcgcgccaccggtgaagtgggcgtggtgctggtgacctccggccccggcgccaccaacgccattaccggtatcgccaccgcctatatggactcgatcccgatggtggtgctgtcggggcaggtgcccagctcgctgatcggctacgacgccttccaggagtgcgatatggtggggatttctcgcccggtggtgaagcacagcttcctggtaaaacgcaccgaagacatcccggcggtgttgaagaaggcgttctacctggcttccagcggccgccccggcccggtggtgatcgatctgccgaaagatatcgtcggcccggcggtgcggatgccttatgcctacccgcaggacgtgagcatgcgttcttataacccgacggtgcagggccaccgcgggcagatcaaacgcgcgttacaaaccattctggcggccaaaaagccggtgatgtacgtcggcggcggcgcgatcaacgccggttgcgaggccgaactgttggcgttggcggagcagctgaacctgccggtgaccagcagcctgatgggattgggcgctttcccaggcacccatcgccagagcgtcggcatgctcggcatgcacggcacctatgaagccaacaaaaccatgcaccatgccgacgtgatcttcgccgtcggcgtgcgtttcgacgatcgcaccaccaataacctcgctaaatactgcccggacgccaccgtgctgcacatcgatatcgatccgacttcgatctccaaaacggtggacgccgatattccgatcgtcggcgatgccaggcaggtgttggttcagatgctggagctgctggcgcaggacgagaaagcgcaggatcacgacgcgctgcgcgattggtggcagtcaatcgagcagtggcgtgcccgcgactgcctgggttacgacaagcacagcggcaccatcaagccgcaggcggtgatcgaaaccctgcatcgcctgaccaaaggcgacgcctatgtcacctcggacgtgggccagcaccagatgttcgccgcgctctattatccattcgacaaaccgcgccgctggatcaactccggcggcctcggcaccatgggcttcggtttgccggcggcattgggcgtcaagctggcgctgccggaggaaaccgtggtgtgcgtgaccggcgacggcagcattcagatgaacattcaggagctgtccaccgcgctgcaatataacctgccggtggtggtggtgaacctcaacaaccgctatctgggcatggtgaagcagtggcaggacatgatttattccggccgtcactcgcagtcctacatggattctctgccggacttcgtcaagttggccgaggcttacggccatgtcggtatcgccatccgcacgccggatgagctggaaagcaagctggcgcaggcgctggcggaaaaagagcggctggtgttcgtcgacgtgaccgtcgatgaaaccgaacatgtttacccgatgcagatccgcggtggaagcatggacgaaatgtggcttagcaaaacggagaggacctga

SEQ ID NO: 424655 - DNA, 492 bp, Serratia marcescens
atgcgccgtattttatctgtcttgctggaaaacgaatccggcgctttgtcgcgcgtggtcgggctgttttcccagcgcggttataacatcgagagcctgacggtggcaccgaccgacgatccgacgctgtcgcgcatgactatccagaccgtcggcgacgagaaagtgctggagcagattgagaaacagctgcacaagctggtggacgtgctgcgcgtcagcgagctggtgcagggcgctcacgtcgagcgcgagatcatgctggtgaagctgcaggccagcggctacggccgtgaagaggtgaagcgctgcgccgacattttccgcggccagatcgtggatgtgacggcgacgctgtacacggtacagctggccggcaccagcgacaagctcgacgccttcctgagcgcagtgcgtgaagtggcggagatcgtggaagtggcccgttccggcgtggttggcgtgtcgcgcggcgacaaaatcatgcgctga

SEQ ID NO: 424656 - DNA, 1005 bp, Serratia marcescens
gtgaaactggatgaaatcgcgcgtctcgcgggcgtttcgcgcacgacggccagttacgtcatcaacggcaaggcgaagcagtatcgtgtcagcgataaaaccgtcgagaaagtgatggccgtggtcagggagcataactatcacccgaatgccgtcgcggcggggctgcgcgccgggcgtacccgttctatcggtctggtgatcccggatctggaaaataccagctatacccgcatcgccaactacctggaacgccaggcgcgccagcgtggttaccaattgctgatcgcctgttccgaagatcagccggacaacgaaatgcgctgtatcgagcacctgctgcagcgccaggtggacgccatcatcgtctccaccgccttgccgccggagcatcctttctatcaacgctgggccaacgatccgctgccgatcatcgcgctggaccgcgcgctggatcgcgagcatttcatcagcgtcgtcggggccgatcaggaagacgcctttgcgctggcgcaggagctgcgcaccttcccggctgaatcggtgctgtatctgggcgccttgccggagctttcggtgagcttcctgcgtgagcagggcttccgtcaggcctggcaagaggatccccgccacgtcgattatctgtacgccaacagctatgaacgcgaagccgccggcgcgctgtttgccgaatggctgaaaacgcacccgatgccgcaagcgctgttcaccacctcgttctcgctgttgcagggcgtgatggacgtgacgctgaagcaacgtggccgtttgccgaccgatctggcgattgccaccttcggcgaccatgaactgttggatttcctcgagtgtccggtgctcgcggtggcgcagcgccatcgtgacgtagccgaacgcgtgctggagctggtgttggccagcctggacgaaccgcgtaaacccaaaccgggtttgacgcgtatccgccgcaatctattccgccgcggcagcctgagccgcaaatag

SEQ ID NO: 424657 - DNA, 441 bp, Serratia marcescens
atgctttcgcccgccgctcactggcgtagcgccgctgccgatacgttcgcactggtggtgtactgctttatcgccggcatggcgatagaagtgttgatctccggcatgagcttccagcaatccctctcttcgcgcctgctgtcgatcccggtcaacatcctgatcgcctggccttacggtcgctatcgcgatctgtttatccgcacggcgcgccgctgtccacgcggccagttcgtgctgcgcaacctcgccgacctgctggcctacgtcagcttccaatcgccggtttatgccgccattctgtggagcgtaggcgccgacggccaacaaatgctggcggcggtcaccagcaatgcgctggtctccatggcgatgggcgtggtgtatggctatttcctggaatattgccggcggctgttccgagtggcgggctacgtctaa

SEQ ID NO: 424658 - DNA, 441 bp, Serratia marcescens
atggtcaacctcgacagcaaagggcggcttgccgtacctacccgatatcgggaattgctcaacgaggaatcgcaaggccaaatggtctgtaccattgacctccatcagccctgcctgctgctttatcctttgcccgaatgggaaattattgaacaaaaattatcacgtctgtcgagcatgaatcccgccgagcgccgcgttcagcgcctgctgctggggcatgccagtgagtgtcagatggatagtgccggtcgtttgctgctcgccaatacgctgcggcaacacgccgggctcacgaaagaagtgatgctggtcgggcagttcaacaagtttgaactgtgggatgaacagacctggtatcaacaagtcaaggatgatattgacgctgaacagtcgactcaggaaccgttgtctgagcggctacaggacttgtcgctataa

SEQ ID NO: 424659 - DNA, 942 bp, Serratia marcescens
atgttggaaaactataaacacaccaccgtcctgctggacgaagccgtcaacggcctcaacatccgcagcaacggcatatatatcgacggtacttttggtcgcggtggccattctcgtctgattctgtcccagctggggccggaagggcgcttgctggcgattgaccgtgaccctcaggcgattgcagccgccaaatctattgaagatcctcgttttaccatcgtacacggcccattctccgagttgtcgcactacgtgcgggaacgtgaattggtgggcaagatcgacggcgttctgctcgatctgggcgtttcttcgccgcagcttgacgacgcagagcgcgggttctcctttatgcgcgacggtccgctggacatgcgcatggatccttccaccggcctgtccgccgcagagtggctgatgaaggccgaagcggacgacatcgcctgggtgctgaaaacctttggcgaagagcgtttcgccaagcgcatcgcacgcgccatcgtggaaagaaaccgcgtggagccgatgacgcgcaccaaagagttggcggatctgattgccgatgccagcccgttccgtgaaaagcacaagcatccggcgacgcgcagcttccaggcgattcgtatctatatcaacagcgagctggaagagatcgagcgtgcgctcgacggcgcgctggaagtgctggccccacagggccgtttgtcgatcatcagcttccactcgctggaagaccgcatcgtcaaacgctttatgcgtcaccatagccgcggcgcccaggtgccggcgggcattccgttgaccgaagagcaactgcgcagcatgggcgggcgaacgctgaaagcgctgggcaaaatgatgccttcggaagcggaagtggcggacaacccgcgtgcgcgcagctcggtgctgcgtattgctgagaggatgcccgcgtga

SEQ ID NO: 424660 - DNA, 321 bp, Serratia marcescens
gtgatcggcaacgaacgtcacggcctggtcggggtgattggcggcgatctgctgcgcaatgccaagatccccctgattttactgattgcgtcactggtctccgcggttttcgtggtgaccaccgcgcaccgcacccgcctgctgaccgccgagcgcgaacagctggtgctggagcgcgatgcgctggatatcgagtggcgcaacctgattttagaagagaacgccctcggcgatcacagccgggttgaacgtatcgcgacagaaaaactgcagatgcaacacgttgatccatcgcaggaaaatatcatcgttaaacaatga

SEQ ID NO: 424661 - DNA, 1764 bp, Serratia marcescens
atgaaagcagcgcgccccggtaagttgagacgccaggaagatcaggccagctttgtcagctggcgttttgcgttgctgtgcggctgcattttgctggcgatggtcggcctgatgctgcgcgtcgcgtacctgcaggtcatcaaccccgatcgtctggtgaaagaaggcgacatgcgttcgctacgcgtgcaggaagtaccgaccgcgcgcggcatgatcagcgatcgcgccggccggccgttggcggtcagcgtgccggtcaatgcggtgtgggcggatccgaaagagctgaacgagcgcggcggcatcacgctggacagccgttggaaagcgctttccgatgcgctgaacatcccgctggaccaactctccaaccgcatcaacgccaacccgaaagggcgcttcgtttatctggcgcgccaggtgaacccggcgatcggcgactacatccacaagctcaagctgccggggatctacctgcggcaggagtcgcgccggtactacccggcggggcaggtgacgtcgcacatcatcggcgtgaccaacatcgacggacaaggcattgaaggcgtcgagaagagcttcgaccgctggctgaccgggcaaccgggcgagagaacggtgcgtaaggaccgcttcggccgggtcatcgaagatatttcctccgtagacagccaggcggcgcacaacctggtgctgagcgtcgatgaacgcctgcaggcgctggtgtatcgcgagctgaacaacgcggtggcgttcaacaaggccgagtcgggcactgcggtgctgatcgacgtgaacaccggcgaagtgctggcgatggccaacagcccgtcttacaacccgaacaacatggccggtacgccgaaagagaccatgcgtaaccgtgctatcaccgatatttttgaacccggttcaaccgtgaagccgatggtggtgatgaccgcgctgcaaaacggcgtggtgagagaaaacagcgtgctgaacaccatcccgtaccgcattcagggccacgagatcaaagacgtggcgcggtactcggagctgtcattgaccgggatcttgcagaagtcgagtaacgtcggtgtttcaaagctggcgttagcgatgccgtcctcagcgttagtagatacttactctcgttttgggctgggaaaagcgaccaatttggggctggtcggagaaagcagtggcatatacccaaaaaaacaacggtggtctgacatagagagggccaccttctctttcggctacgggctgatggtaactccgttacagttggcgcgagtctatgcaacgatcggcagcctgggcgtatatcgcccattgtcgatcaccaaggttgaccctccggtcgccggcgagcgcgttttccctgaacctctggtgcgcaccgtggtgcacatgatggaaagcgtggccctgccgggcggcggcggcgtgaaagccgccatcaagggataccgtatcgccatcaaaaccggtaccgcgaaaaaagtgggcccggacggcaaatacgtcaaccgatacatcgcttataccgccggcgtcgcgccggcaagtaacccccgttttgccctggtggtcgtcatcaatgacccgcagggtgggaaatactatggtggcgcaatctccgcgccggtgttcggcgccatcatgggcggcgtattgcgcaccatgaacgtcgagcctgacgcgttgcctaccggtgacaaaagcgaattagtgattaacaagaaagagggttcaggtggcagatcgtaa

SEQ ID NO: 424662 - DNA, 1488 bp, Serratia marcescens
gtggcagatcgtaatttgcgcgacttactcgccccgtgggtgccgacggcacccgggcgcgcgctgcgggaaatgacattagacagccgtgtggcggctgccggggatctgtttgtcgccgttgtcggccatcaaacggatggacgccgctatattccgcaggccatcgcgcagggcgtcgccgccgtgatcgccgaagctgacggtcaggccgaagacggcgccgtcgttgaaatgcacggcgtgccggtgatctacctgagccaactgaaccagcgcctttccgcgctggccgggcgtttttaccaccagccgggcgagcgtctgcgtctggtcggcgtgaccggcaccaacggcaaaaccaccactacgcagctgctggcgcagtggagccaactgctgggcgaaaccagcgcggtgatgggcaccgtcggcaacggcctgctgggccaggtgtgcccgaccgagaataccaccggttctgcggtggatgttcaacacgtattaaacgagctggcggaacagggcgcgaccttcgccgccatggaagtttcttcgcacggtctggtgcaacaccgggtggcggcgctgccgttcgccgcggcggtcttcaccaacctgagccgcgatcacctggattaccacggtgatatggccaattacgaggcggccaaatggtcgctgttcgccgcccacagcgtggggcaggcgatcatcaacgccgacgatgaagtcggtcagcgctggctgagcaagctgccggatgcggtggcggtgacgatgcagggcaacctgcagccgggcggccacggccgctggctgaaaaccacggcggtcgactatcacgacaacggcgccaccgttcgcttcagctccagctggggcgacggcgagatcgaaagccgcctgatgggcgcgttcaacgtcagcaacctgctgttggccttggcgacgctgctgtcgctgggctatccgctggaggcgctggtggaaaccggcagccgtctgcagccggtctgcggccgcatggaagtgtttaacgcgcccggcaaaccgacggtagtggtggattacgcccacacgccggatgcgctggagaaagcgctggaagccgcgcgcctgcactgccaggggcagctgtggtgcgtgttcggctgcggcggcgatcgcgacaagggcaagcgtccgctgatgggcggcatcgccgaacagttcgccgatcgcgtggtgatcaccgatgacaacccgcgtaccgaagagccgcgcgcgattatcaacgacatcctgaccggattgctggacgccgggcaggcgctggtgatccatggccgcgccgaagcggtaaccagcgccatcatgcaggcgcaggaacaggacgtggtgttggtagcgggcaaaggccacgaagattaccaattggtaggcaaccgccgcctggattactccgaccgcacgacggtcgcccgactgctgggggtgctggcatga

SEQ ID NO: 424663 - DNA, 1362 bp, Serratia marcescens
atgatccctgtctctcttcagacactggctgaggtattgagcgctgagctgattggcgccgattgccaaattgtcgaggtgacgacagacacccgcaaggtgaccgccggttgcctgtttgtggcgctgaaaggcgagcgtttcgacgctcacgacttcgcggcggatgccgtagccgcaggcgccggggcgctgctggtcagtaagcgcttattggtggacgtgccgcagctggtggtgcaagacacccgtctggcgctggggcagcttggcgcctgggtgcgtcagcaggtgccggcgcgcgtggtggcgctgaccggctcctcgggcaagacatcggtgaaagaaatgaccgccgccattctgcgcgaatgcggcgaagtgctgtataccgccggcaacttcaataacgacatcggcgtgccgctgacgttgctgcgtctggaaccgcagcatgattttgccgtgattgagctgggcgctaaccacattggcgaaattgcttacaccaccgcattgacgcgaccgcagaccgctttggtgaacaacctggcggcggctcacctggaaggctttggctcgctggccggcgtcgcccaggcgaaaggtgaaatctttaccggcctgccggccgacggcgtggcgatcatcaacgccgataacaacgactggccgcactggcagagcatgctgggcggcaaaaccgtctggcgcttctcgccgcaggccgccgcaggcgtggacttcttcgcggacgacgtgcgggtaaacggcgcgggcacgcagttcacgctgcacagcccgttcggcaccgccgagatcgcgctgccgctgccggggcgccacaacgtggccaatgcgctggcggcgacggcgctggcgatgtcggtgggcgccaccctcgaagcggtgcgtcaggggctgaaacagctgcaggcggtgccggggcgcctgttcccggtggcgctggccgaaggcaagctgctgctggacgacagctataacgccaacgtcgggtcgatgaccgcggcggcgcaggtgctggcagagatgccgggctaccgcgtgatggtggtcggcgatatggccgagctgggtgcggaagcggaagagtgtcaccgtcaggtgggcgaagccgcccgtctggccggggtcgacaaagtgatcagcgtcggcggtttgagccgcgtgctgagcgaagcctccggcaacggcgaacattatcaggacaagactgcagtgatcgcgcgcgtggcggaattactgtcggaacatgcggtcattaccgtgttaatcaaaggttcacgtagtgccgcaatggagcaggtagtacgcgcgttacaggagaaagcaccatgttag

SEQ ID NO: 424664 - DNA, 1083 bp, Serratia marcescens
atgttagtttggctggccgagcatttggtcaagtattactcaggcttcaacgtcttttcttatctgacgttccgagccattgtcagcctgctgaccgcgctgttcctgtcgctgtggatgggcccgcgggtgatcaagcgcctgcaagaaatgtccttcggccaggtggtgcgtaacgacggccccgagtcgcacttcagcaagcgcggcacgccgaccatgggcggcatcatgatcctgacctccatcaccatttcggtgctgatgtgggcttacccgtccaacccgtatgtctggtgcgtgctgttcgtgctggtggggtacggcatcgtcggtttcgtcgacgactaccgcaaggtggtgcgtaaggacaccaaagggctgatcgcccgctggaagtatttctggcagtcggtgattgcgctgattgtcgcattcgccatgtacgccgtaggaaaagacacgccagccaccgagctggttgtgccgttctttaaggacgtgatgccgcagctgggcctgctgtatatcctgctggcctatttcgtcatcgtcggcaccagcaacgcggtcaacctgaccgatggcctggacggcctggcgatcatgccgacggtattcgtggcggccggcttcgcgctggtggcctgggcgaccggtaacatgaacttcgccaactacctgcatattccgtatctgcgtcatgccggtgagctggtgatcgtgtgtaccgccatcgtcggcgccggcctcgggttcctgtggttcaacacttacccggcccaggtgtttatgggcgacgtcggttcgttggcgctgggcggcgcgctgggcaccatcgcggtgctgctgcgtcaggagttcttgctggtgatcatgggcggcgtgttcgtggtggagacgctgtcggtgatcctgcaggtgggatcgttcaagctgcgcgggcaacgcattttccgcatggcgccgattcaccaccactatgaattgaaaggctggccggagccgcgcgttatcgtgcgcttctggatcatttcgctgatgctggtgctgattggcctggcaacgctgaaggtgcgttaa

SEQ ID NO: 424665 - DNA, 1320 bp, Serratia marcescens
atggcagactatcagggtagaaaagtcgtcatcatcgggttgggcctcaccggcctgtcctgtgtcgatttcttcatggcgcgcggcgtgacgccgcgcgtgatggatacccgtatcgcgccgccagggttggacaaactgcctgaaagcgtggagcgccatctgggcgatctgaatcaggactggctgctggcggcggatctgatcgtcgccagtccgggcgtcgcgctggcgaccccggcattgagcgccgcggcggacgccggcgtggaaatcgtcggtgacgtcgaactgttctgccgtgaagcgcaggcgccgatcgtggcgatcaccggctccaacggtaaaagcaccgtcaccaccctggtgggcgagatggcgaaagccgccggttgggcggtgggcgtgggcggcaatatcggcctgccggcgctgagcctgctgcgccaggaatgccagctttacgtgctggagttgtccagcttccagttggaaacgacgtatagcctgcgagcggcggcggcgaccatcctgaacgtgaccgaagatcatatggatcgctatccgttcggcctgcagcagtatcgcggcgccaagctgcgcgtgtatgaaaacgccgcggtgtgcgtggtgaacgccgacgatgcgctgaccatgccggtgcgcggcgccgacgcgcgctgcgtcagcttcggcgccgacgtgggcgactatcacctgaaccgtcagcagggggaaacctggctgcgggtgcgcggtgagaaggtgctgaatacccgcgagatgaagctgaccggccgccacaattacaccaacgccctggcggcgctggcgttggcggatgcggtcaatattccgcgcgcgtccagcctgaaggcgctgaccaccttcaccggcctggcgcaccgcttccagctggcttgggagaacaacggcgtgcgttggatcaacgattccaaagccaccaacgtcggcagcaccgaagcggcgctgaacggcctgcaggtagacggcacgctgcatctgctgctgggcggcgacggcaagtccgccgatttctcgccgctggcgcgctatctgcagggcgacaacgtgcgtctgtactgctttggccgcgatggcgcccagctggcacagctgcggccggaggtggcgacgctgaccgagaccatggagcaggcgatgcgcaccatcgccggccgcgtacagcccggcgacatggtattgctgtcgccggcctgcgccagtctcgatcagttccgtaattttgaagtgcgcggcgatgagttcgcccgcctggcgcaggagcttggcggatga

SEQ ID NO: 424666 - DNA, 1203 bp, Serratia marcescens
atgaaactacgcttgccgaacttcgggctgacagaacggatgaaagactgggtgaccggcgcgcgcgacaacgatgcggtcaacatggtgctgtacgatcgcaccctgctgtggctgaccttcgggttggcgatcatcggcttcgtgatggtgacctcggcgtcgatgccgatcggccaacgcctggcggacgatccgttcctgttcgccaaacgtgacgcgctgtacctcggcctggcgttcggtctgtcgctggtgacgctgcgtatcccgatggaagtttggcagcgttacagcaacgtgatgctgctgatgtcgatagtgatgctgctgatcgtgctggtggtggggagctcggtaaacggggcctcgcgctggatcgcgctcggcccgctgcgtattcagccggcggagctgtccaagctgtcgctgttctgctacctggcgagctatctggtgcgcaaggtggaagaggtgcgcagcaacttctggggcttctgcaagccgatgggcgtgatggtggtgctggcggtgctgctgctggcgcagccggacctcggtaccgtggtggtgctgttcatcaccacgctggcgatgctgttcctggccggcgcgaaaatgtggcagttcctggcgatcatcggctccggcgtgttcgccgtggtgctgctgatcatcgcggaaccgtaccgtatgcgccgcgtgacctcgttctggaacccgtgggccgatccgttcggcagcggctaccagctgacccagtcgctgatggcgtttggccgcggcgagttctgggggcaggggctcggcaactcggtgcagaaactcgagtatttgccggaagcgcacaccgacttcatcttctccattttgggtgaagaactgggctatatcggtgtggttttagccctgttaatggtattcttcgtcgcttttcgcgcgatgtccatcgggcgccgcgcgctggagatcgaccaacgcttctccggcttcctggcctgcgcgatcggcgtatggttcagcttccaggcgctggttaacgtcggcgccgcggcgggcatgctgccgaccaaaggtctgacgctgccgctgatcagttacggcggttcaagtttgctgattatgtcgacggccatcgtgctgttgctgcgaattgattatgaaacgcgcctgaccaaggctcaggcgtttgtgaagaggtaa

SEQ ID NO: 424667 - DNA, 1065 bp, Serratia marcescens
atgagcgggaaacctaagcgtttaatggtgatggcaggcggtaccggcgggcacgtgttcccggggctggcggtcgcgcatcatctgatggcgcagggctggcaggtgcgctggctcggaaccgcagaccgaatggaagccgatctggtgccgaagcacgggatcgagattgattttatccgcatctccggcctgcgcggcaaaggcttgaaggcccagctgactgcgccgctgcggatctggcaggcggtgcgccaggcgaaagccatcatgcgcagctatcagccggatgtggtgctggggatgggcggttacgtttccggccccggcggcctggcggcctggcagtgcggcatcccggtggtgctgcacgagcagaacggcatcgccggcttgaccaaccgctggctggcgcgcatcgccgccaaagtgatgcaggccttccccggcgcgttcccgaacgccgaggtggtgggcaacccggtgcgcaccgacgtgttggcgctgccgctgccggcggagcggttgcaagggcgcgaaggcccgatccgcgtgctggtgattggcggaagtcagggcgcgcgcgtgctgaatcagacagttcctgaagtcgcggcgcgtttgggcgatagaattacgctctggcatcaggttggcaagggcgcgctggaaacggtgctgcgcgactacgaaagggtagggcagacgcagcacaaggtgaccgagttcatcgacgacatggccgccgcctacgcctgggccgacgtggtggtctgccgctccggcgcgttgaccgtcagcgaaatcgcggcggcggggctgccggcgatcttcgtgccgttcatgcataaggatcgtcagcagtactggaacgcgcgcccgctggaagaagccggcgcggcgaagattatcgaacagccgcagttcaacgccgatgtggtggccgaactgctggcgagctgggatcgcaagacgctgctggccatggccgagaaagcgcgcgcggtcgccattccggacgccaccgagcgcgtggcggcggagctggtgcggctcgccaagtaa

SEQ ID NO: 424668 - DNA, 1476 bp, Serratia marcescens
atgaatacacaacaactggcgaaactacgtactatcgtgcccgagatgcgtcgcgtccggcacattcactttgtcggcatcggtggtgccggcatgggtggtatcgccgaagtgttggcaaacgaagggtatcagatcagcggctccgacctggcgccgaatccggtcacccaacagttgagcgcgctcggggcgacgatttacttcaatcaccgtccggaaaacgtgctggatgcgagcgtggtggtggtgtctaccgccatctccgccgacaacccggagatcgtcgccgcccgtgaagcgcgcatcccggtgatccgccgcgcagagatgctggcggagctgatgcgttttcgccacggcatcgctatcgccggcacgcacggcaaaaccaccaccacggcgatggtctcgagcatttacgccgaagcccgcctggacccgacctttgtcaacggcgggctggtgaaggcggcgggcacccacgcgcgtctggggtccagccgttatctgatcgcggaagcggatgagagcgatgcgtcgttcctgcatctgcagccgatggtggccgtggtcaccaacatcgaagccgaccacatggacacctaccagggcgacttcgagaacctgaagcagacgtttatcaatttcttgcacaacttgccgttctacggccgcgcggtgatgtgcatcgacgatccggtagtgcgcgagctgttgccgcgcgtgggtcgccacatcaccacctatggcttcagtgaagatgccgatgtgcgcatcgaagactaccggcagattgggccgcaggggcactttaccctgagccgtcaggacaagccgttgctgacggtgacgctgaacgcgccgggccgccacaatgcgttgaacgccgcagcggcggtagcggtagcgaccgaagaaggcatcgacgacgaagatatcctgcgcgcgctggcgggcttccagggcaccgggcgccgcttcgatttcctcggcgagttcccgctggagccggtcaacggcaaagcgggcagcgcgatgctggtggacgactacggccaccatccgaccgaagtggacgccacgctgaaagcggcgcgcgccggctggccggacaagcgtctggtgatgatcttccagccgcaccgttatacgcgcacccgcgatctgtacgacgatttcgccaacgtgctgtcgcaggtggatgtgctgctgatgctcgacgtgtacgccgccggcgaagcgccgatcccgggcgcggacagccgttcgctgtgccgcaccatccgcagccgcggcaagctggatccgatcctggtttccgatgccgataccgtgccggaaaccctggcgcagctgctgcaggatgaggacctggtgctggtgcaaggcgccggcaacgtgggcaaaatcgcccgtaaactggccgagctgaagctgcagccgccgaagaaagaggaggagcaccatggctga

SEQ ID NO: 424669 - DNA, 921 bp, Serratia marcescens
atggctgataaagttgcagttctgctgggcggcacctccgctgaacgtgacgtttccctgcaatccggcgccgcggtgctggccgggttgcgcgaagccggtatcgatgcgcacggcgtcgatacccgcgatttcccggtgacccagctgaaagagcaggggttcaccaaagtgtttatcgcgctgcatggccgcggcggcgaggacggcaccctgcaggggctgctggagttcctcgagctgccttataccggcagcggcgtgatggcctcggcgctgaccatggacaaatggcgcaccaagatggtgtggcagtcgatgggcttgccggtggcgccttacgtggcgctgaatcgccagctgtatctcggcgctgaaaaagcggcgctgctggcgcgcgtggcggatctcggcctgccgctgatcgtcaagccgagccgagaaggctccagcgtcggcatgagcaaggtcaccgagagcgccgcgttggaagccgcgctggaagaggccttccgtcatgacgacgatgtgctggtggagaagtggctgagcggcccggaatacaccgtagcgatgctgggcgaccaggtgctgccgtcgatccgcatccagccggccggcgtgttttacgactaccaggccaagtacatttcggatgacacgcagtacttctgcccgagcggtttgagcgccgagcaggaagccgagatggcggcgttggcgctgcgcgcctatcgcggcctggactgcagcggctggggccgcgtcgacgtgatgcaagacagcgatggcagcttctatctgcttgaggtgaacacctctccgggcatgaccagtcatagcctggtgccgatggcggcgcgccagtttggattaagcttctcgcagttggtggcgagaattttggagttggccgactga

SEQ ID NO: 424670 - DNA, 852 bp, Serratia marcescens
atgtcgcaagctgccctgaatgcgcgcgatcgcgaggtcgataacggcccgcgccgcagcaatggaacccagttggcgggaatgattttcctgctgatggtgttgggaacggtcgtgtggagcggttgggcggtgcttggctggatgaaagacgccagtcgcctgccgctctcaaggctggtggtgaccggcgaacgccactacaccaccaacgatgatattcgtcaggcgatcctggcgctgggcgcgcccggcacctttatgacgcaggatgtggacgtcatccagcagcagatcgaacgtctgccgtggatcaagcaggccagcgtgcgcaaacaatggccggatgagctgaagatccatctggtggagtacgtcccggtggcgcgctggaacgatttgcacatggtggacgccgaaggcaaagcgttcagcgtgccggcggagcgggcgggcaagcagaagctgccgctgctctacgggccggaagggagcgagcaggatgtgctggaaggctatcgggcgatgagcgcttcgttggcggccagcaaatatacgctgaaaatggcggcgatgaccgcgcgccattcctggcagctggcgctggacaacgatgtccggcttgagctggggcgcgatgaccgcaatgggcgtttgcagcggtttatcgagctttacccggtattgcagcagcagggccaggcggagagcaagcgtgtcagctatgtcgatctgcgctacgagtccggcgcttcggtagggtgggctccggtgttggtcgatccgcaggcgcttggcggtcagcaaaacagtaatcagcaacagaatcaggcacaggcaaaacaacaatga

SEQ ID NO: 424671 - DNA, 1257 bp, Serratia marcescens
atgatcaagtcgacggacagaaaactggtagttggactggagatcggtactgcaaaagtctccgcgttggtaggggaagttctgcccgatggcatggtcaacattatcggggtgggcagctgcccgtctcgcggtatggataagggtggcgtaaacgacctggagtcggtggtgaagtgcgtacagcgcgccatcgatcaggccgagctgatggcggactgccagatctcctcggtgtatctggcgctgtcgggcaaacacatcagctgccagaacgaaatcggcatggtgccgatctcggaagaggaagtgacgcaggacgacgtggagaacgtggtgcacaccgccaaatcggtgcgcgtgcgcgacgaacaccgcattctgcacgtgattcctcaggaatacgccatcgattatcaggaaggcatcaaaaacccggttgggctgtccggcgtgcgcatgcaggccaaggtgcatctgattacctgccataacgatatggcgaagaacatcgtcaaggccgtggaacgttgcggcctgaaagttgaccaacttattttcgccggtctggccgcgagctacgcggtgctgaccgaagatgaacgcgaactcggcgtttgcgtggtggatatcggcggcggcaccatggatatggcggtgtacaccggcggtgcgctgcgccacaccaaagtgatcccttatgccgggaacgtggtcaccagcgatatcgcctacgccttcggcacgccgccgaccgacgcggaagcgattaaagttcgacacggctgtgcgcttgggtcgattgttagcaaggatgagaatgtagaggtgcctagcgtcgggggacgtcctccgcgcagtctgcaaagacagacgctggctgaagtcattgagccacgctacaccgaactgttgaatctggttaacgatgaaattttgcaattgcaggagcaactgcgtcagcaaggggtgaagcatcatctggcggcaggtatcgtgctgaccggtggcgccgcccagattgatggcctggcagcctgtgcgcaacgggtgttccacactcaggtacgcatcggccaacccttgaacatcacgggtctgacggattatgcgcaggagccttactactcgacggcggtaggtctgctgcactatggaaaagagtctcacctgagcggtgagacggaagtagaaaaacgcgcctcggtgggcaattggtttaaacgcatcaatagctggctgagaaaagagttttaa

SEQ ID NO: 424672 - DNA, 1155 bp, Serratia marcescens
atgtttgaaccaatggaactaaccaatgacgcggtgattaaagtcatcggcgtcggcggcggcggtggcaacgccgttgaacacatggtgcgcgagcgcatcgaaggtgttgaattcttcgctgtgaacacggacgcccaggcgctccgcaaaacggcggttggccaaaccatccagatcggtagcggtattaccaaaggtctgggtgcgggcgcgaacccggaagtgggtcgcaattcagcggaagaagaccgcgaagccctgcgcgcagcgctggacggcgcagacatggtcttcatcgcggccggcatgggcggcggtaccggtaccggtgcggcgccagtggtggctgaagtggctaaagatttgggtattctgaccgtggccgtggtgaccaagcctttcaacttcgaaggcaagaagcgcatggcattcgcggagcagggtatcgctgagctgtccaaacacgtggactcgctgatcaccatcccgaacgacaaattgctgaaagttctggggcgcggcatctctctgctggacgcgttcggcgcggccaacgacgtgctgaaaggcgcggtgcagggtatcgccgagctgatcacccgtccgggcctgatgaacgtcgacttcgccgacgtgcgcaccgtgatgtccgaaatgggctacgcgatgatgggttccggcgtggcttgcggtgaagaccgtgccgaagaagctgccgaaatggcgatctccagcccactgctggaagacatcgacctgtccggcgcgcgcggcgtgctggtcaacattaccgctggcttcgacctgcgtctggatgagttcgaaaccgtgggtaacaccatccgtgcgttcgcttccgacaacgcgaccgtggttatcggtacctcgctggatccggaaatgaacgacgaactgcgcgttaccgtggttgcaaccggtatcggtatggacaagcgtcctgaaatcaccctggtgaccaataaacaggccagccagccggtgatggatcaccgttatcagcagcacggcatgtcgcctctgccgcaggaagtgaaacctgccgccaaggtggtcaacgaccaagctgcgcaaccgaataaagagcccgactatcttgatattccagccttcctgcgtaaacaggcagactaa

SEQ ID NO: 424673 - DNA, 918 bp, Serratia marcescens
atgatcaaacaaaggacattaaaacgtattgttcaggcgactggcgtcggtttgcataccggcaagaaagtcacgctgacaatgcgcccagcgccggctaataccggggtcatctatcgtcgcactgacttgaatccaccggttgattttccggctgatgcaaaatccgtgcgtgataccatgctctgtacttgcctggtgaatgagcatgacgtgcgtatttcgaccgttgagcacctcaacgccgcgctggctgggttgggcatcgacaacatcgttatcgaagtcgacgccgctgaaatcccaatcatggacggcagcgccagtccgttcgtgttcttgctgctggatgccggcatcgaagagctgaactcggcgaagaaattcctgcgtctgaaagagaccgtgcgtgttgaagatggcgacaaatgggccgagctgtccccgcataacgggttccgcctggacttcaccatcgacttcaatcacccggctatcgacgccagctctcagcgctatcgtcttgatttctcggctgagtcgttcgtgcgtcaaatcagccgcgcgcgcaccttcgggttcatgcgcgacatcgaatacctgcagtcccgcggcctggccctgggcggcagcttcgactgcgccatcgtggtggatgactaccgcgtgctgaacgaagacggcctgcgtttcgaagacgaattcgtacgtcacaaaatgctggacgccatcggcgacctgttcatgtgcggccacaacatcattggcgcgtttaccgcgtacaagtctggccacgcgttgaacaacaaactgctgcaggccgtgctggccaagcaggaagcgtgggaatacgtgaccttccaggacgaagccgaaatgccattggcattcaaggcaccgtctaccgtattggcgtaa

SEQ ID NO: 424674 - DNA, 516 bp, Serratia marcescens
atgcgcgatagccgtccacaattattagatgtcctgttcgacgacgcgtctgccggcagcaaagggccgctgcataacgtccagcaacgcgcggtggcgctgctcaagcttaaccgtgcagtgaagggcctgttgcccgctcccctgcatccctggtgccgcgtcgcgaatttccgacagggtattttagtgctcgaaacggcaaatgccagttggatgatgcgcttgcgctacgaacaacccgctttgctgtctgcactacgagcgcaaattctaccatcattgtcgtcgatcgacatcaggattaatccggccttgatggcgaaaggcagccaccaggtgcaaaacgcagagaaagcgccggaaaaaccggtgccgatgcggcatttgagtctggaaagtgcggaagaactgagaggattggcgagccgtagcccggaaaaactgcgcaagatattggaacggctggctgcattggccggagagggtaccaacacaaccagtcgtgataagtaa

SEQ ID NO: 424675 - DNA, 462 bp, Serratia marcescens
atggttgcggccacgcttggcgcgtcttccagtttgtccggcgcccccgatcaggccgcactgccgaatacgtcgtccagccttaaccggcaaaatgcggccaatggcaccttcaacagcctggccctgctgcaggacgcgcaccgccgtcctaccttcagcgtagattattggcagcaacatgcgctgcgcaccgtcattcgtcacctctctttcgcgctggcgccgcaggcggtttatgcgcgggtgcaggagagcgaagccgaagcggaaccccctttgcaggtggcgcaactggcgctgctgtccaccctcaacgcgttgctgacgcacgagccgaagccgccgaccatcattcgccacacccaccttgaggtgctgccaacgctggcacggcaccagaccggcctgtgggtggcgcaggtacagggcattcgcgccgggcctgccgcgctcgtctga

SEQ ID NO: 424676 - DNA, 2730 bp, Serratia marcescens
atgacagagatatcaaacatcatgttagtgaaattattaaccaaagtttttggcagccgtaacgatcgtaccctgcgccgcatgcgcaaagtggttgagcagatcaaccgcatggaaccggacatggaaaaactgtccgatgatgagctgaaagcgaaaaccaacgaattccgcgcgcgcctggagaagggcgaatcgctggaaagcctgatcccggaagccttcgccgtagtgcgtgaggcgagtaaacgcgtgttcggcatgcgtcacttcgacgtgcagctgctgggcggcatggtgctgaatgaccgctgcatcgccgagatgcgcaccggtgaaggtaaaaccctgaccgcgacgctgccggcctacctgaacgccctgagcggccgcggcgtgcacgtcgtgaccgtcaacgactatctggcgcagcgtgacgccgaaaacaaccgtccgctgttcgagttcctcggcctgagcatcggtatcaacctgccgggcatgccggcgccggccaagcgtgaagcttacgccgccgacatcacctacggcaccaacaacgaatacggcttcgactacctgcgcgacaacatggcgttcagcccggaagagcgcgtgcagcgcaaactgcactatgcgctggtggatgaggtggactccatcctgatcgatgaagcgcgtacgccgctgatcatctccggcccggccgaagacagctccgagatgtacatcaaggtcaacaagctgatccctaaactgatccgccaggaaaaagaagactccgacaccttcaagggtgaagggcacttctcggtggatgagaaggcgcgccaggttcacctgaccgaacgcggcctgatcctgatcgaagagatgctggtggaagccggcatcatggatgagggcgagtcgctgtactcgccgaccaacatcatgctgatgcaccacgttaccgccgcgctgcgcgcccacgtgctgttcacccgcgacgttgactacatcgtgaaagatggcgaagtgatcatcgtcgacgaacacaccggccgtaccatgcaggggcgccgttggtccgacggcctgcaccaggcggtggaagccaaagaaggcgtggagatccagaacgagaaccagacgctggcatcgatcaccttccagaactacttccgcctgtacgagaagctggcggggatgaccggtaccgccgataccgaagccttcgaattcagctcgatctacaagctggacaccatcgtggtgccaaccaaccgtccgatgatccgtaaggacatgccggatctggtgtacatgaccgagaaagagaagatcggcgccatcatcgaagacatccgcgagcgtaccgccaaaggccagccggtgctggtgggtaccatctcgatcgagaaatccgaagtggtttcccgcgaactgaccaaagcgggcatcgaccacaaggtgctgaacgccaagttccacgccatggaagcggatatcgtcgcccaggccggccagagcggcgcggtgaccatcgccaccaacatggcgggccgtggtaccgatatcgtgctgggcggcagctggcaggccgaagtggcgctgctggaagcgccgaccgaagagcagattgaagccatcaaagccgcctggaaagaacgccacgacgcggtgctggcggcgggcggcctgcatatcatcggcaccgagcgccatgaatcgcgccgtatcgataaccagctgcgcggtcgttccggtcgtcagggcgatgccggttcatcccgcttctacctgtcgatggaagatgccctgatgcgtatcttcgcttcggatcgcgtgtccggcatgatgcgtaaactgggtatgaaagaaggcgaagcgattgagcacccgtgggtgaccaaggcgatcgccaacgcccagcgcaaggtagagagccgcaacttcgacatccgtaagcagctgctggaatacgacgacgtcgctaacgatcagcgccgcgccatctacagccagcgtaacgaattgctggacgtgtccgacgtgagcgaaaccatcgccagcatccgcgaggacgtgttcaagagcaccatcgacaactacatcacgccgcagtcgctggaagaagagtgggacattcaggggttggaagagcgcctgaagaacgacttcgatctggagatgccgatcgcacaatggctggacaaagagccggagctgcacgaagagacgctgcgcgaacgcattctggagaacgccaaagagcaataccagcgtaaggaagacgtggtcggcagcgaaatgatgcgcaacttcgagaagggcgtgatgctgcagacgctggattccctgtggaaagagcacctggcggcgatggactacctgcgtcagggtatccacctgcgcggttatgcgcaaaaggatccgaagcaggagtacaagcgcgaatccttcaacatgttcgccaccatgctggaatcgctgaaatatgaagtgatcagcgtgctgagcaaggttcaggtgcggatgccggaagaggtggaagcgctggaacagcagcgccgtgaagaggccgagcgcctggcgcagcaccaacagttgagccaccacgacgagaacgcgctggtgaccgaagatccgaacgcgccggcgaccgccgagcgtaaagtgggccgcaacgatccatgcccatgcggctccggcaagaaatacaagcagtgccacggccgcctgcagtaa

SEQ ID NO: 424677 - DNA, 405 bp, Serratia marcescens
atgaaacatctgaatatcgccgtgggcatcatccgcaatgcgcaacgggagatctttattacccgccgcgccgccgacgcgcacatggccgggttctgggagtttcccggcggcaagatcgaacagggtgaaacgccggaacaggcgctgagccgcgagctgcgggaagagaccggtatcgaagccgaacgcgccgagctgctggaggtagtggagcatcgcttcagcgatcgcatcgtgacgctgaatttttatctggtggaggcctgggcaggcgagccgttcggccgtgaagggcaaccgatgcgctgggtaaaacaggcggatctgcgtgaagacgaattcccggaagccaacgtcggcatcatccgactgctggtggcgcaggcgaacgccgcgcaatga

SEQ ID NO: 424678 - DNA, 192 bp, Serratia marcescens
atgacgaccgtagtaaaatgcccaacctgtggcaccggcgtggtttggggtgaagtcagcccgttccggccgttttgcagcaagcgctgccagctgatcgatctcggcgagtgggccgatgaagagaagcgcattccgagcaacagcgatctgtcggaaagcgaagactggagtgaaatggacgatcgctga

SEQ ID NO: 424679 - DNA, 753 bp, Serratia marcescens
atgagtgatgtttccccaaccgttctctttgaacacccgctgaacgaaaaaatgcgtacctggctacgcatcgaatttctgctgcaacagctgcacggccaacgcgccctgagtgaaaccgccatcgccctcaccttctttcgcaccgtctccgacttgctggacgtgctggagcgcggcgaagtgcgcaccgaactgctcaaagagctggagcgccagcagcagaaactgttggcctgggccgatgtgccgggcgtggatatggcgctgatcgaccagctgcgcggccagttgaagtcgcgcgcatcggcgctgatggcggcgccgcgcctcggccaggcgttgcgcgaagaccggctgatcggcctggtgcgccagcggctgaacattcccggcggctgctgcagcttcgatctgccgaccctgcacatgtggatgcacgcgccgcagcaggatcgcgatgccgacgtcgccgcctggctgcagtcgctggatccgctgaaccaggcgctgatcatggtgctggatctgatccgccaatccgggccgttccgcaatcaaatcagcctgaacggctttttccaggataatgccgaaggggcggatctgctgcgcctgcgcctccatctggcgccacagctttatccgcagatttccggccacaagacgcgttatgccattcgtttcctgccgctggacagcgaaaatggcgtggtgcctgaacgcctgacgttcgaactggcctgttgttga

SEQ ID NO: 424680 - DNA, 615 bp, Serratia marcescens
atggcctacattgttgcgttgaccgggggcataggcagcggcaagacgaccgtcgcgaacgcctttgcgcgccacggcgcaacccttgtcgatgccgacgtgatcgcccgtcaggtcgtcgagccgggcacccctgccttggccgcgatcgccgaacgatttggtaatgaaatgttgctgccggacggcgcgttgaaccgcgctgcgctgcgtcagcgcatctttagccatcccgatgacaaaacctggctgaaccagctgctgcatccgctgatacaccgtgaaacccagcgccaactagcgcaggccgccagcccgtacgcgctgtgggtggtgccgctgctggtggaaaacggcctgcaggatcgcgccgatcgggtgctggtgatcgacgtcgatgccgaaacccagctggctcgcactatcgcgcgcgacggcgtcagccgtgagcaggcgcaaagcattctcgccgcccaggccacgcgccggcagcgcctcgccgtggcggatgacattattgacaacagcggcaccgctcaggggatagagccacaggtcgccgcactgcatcgtcgctaccttgaactggcggcaacagcgccccaacaggattaa

SEQ ID NO: 424681 - DNA, 1044 bp, Serratia marcescens
atgcgtattgaagaagatttgaagttgggctttaaagacgtgttgatccgccctaagcgctccacgctgaaaagccgttccgaggttgaactagaacgtcagtttaccttcaagcattcaggttgcagctggtccggcgtgccgattatcgccgccaacatggacacggtgggcaccttccgcatggccgaggccctggcttctttcgacgttctcaccgccgtacacaaacattacagcgtcgagcaatgggctgacttcgtgcagcgcatgccggaatcggtgctgcgccacgtgatggtgtccaccggcacctccgaagccgacttcgccaaaatgcagcagatcctggccctgtctccggcgctgaaattcatctgcatcgacgtggccaacggctactctgaacacttcgtcgccttcctgcagaaagcgcgcgaagcctgcccgaatcacgtgatctgcgccggcaacgtagtgaccggcgagatggtggaagagcttatcctctccggcgccgacatcgttaaggttggcatcggcccgggctcagtctgtactacccgcgtgaagaccggcgtgggctacccgcagctgtcggcggtgatcgaatgcgccgatgcggcccacgggctgggcggccaaatcgtcagcgacggcggctgctcggtgccgggcgacgtcgctaaagccttcggcggcggcgctgacttcgtgatgttgggcggcatgctggccggccacgacgagtgtgaaggcaccgtggtggaagagaacggcgaaaagttcatgctgttctacggcatgagctccgagtcggcgatgaagcgccacgtcggcggcgtggcggagtatcgcgcggccgaaggcaaaaccgtcaagctgccgctgcgcggcgaggtggagtttaccgtgcgcgatatcctcggcggcctgcgctctgcttgcacctacgttggcgctgagcgcctgaaagagctgaccaagcgcaccacctttatccgcgtggcggagcaggaaaaccgcgtattcggcagcaaataa

SEQ ID NO: 424682 - DNA, 1200 bp, Serratia marcescens
atgaaagcgcgccggctgtttctttggcaggctttcgacgcccagggcgccctgcgccgcggcgaactgatgagcgatgaaaaacggcaggtgagccggttactgattgagcaaggtatgcaaccctggcggatcgggcacggcaaacgcgtcacgcccggccagtggcgcggagaacctttgatccacttcacccgccaactcgccaccctgctgcaggccgggttgccgctggtcaatacgctgcagcttctggcggcagagcacccttcggcggcctggcgttgcctgttgcgccagttggcagaacaggtgcgcgaagggcagccgctctccgaaacccttgccgcgcagccaggcgtttttccacttatctatcgccaactgatcgccatcggcgagctaaccggcaatctcgatcgcagctgcctgcagctggcgcaacagcaggaagcccagctgctgctgcgccgcaaagtgaccaaagcgctgcgctatcccctcttcatctgtgcggtggcgctgctggtcagcgtgctgatgctggtgatggtgctgccggaattcgccaaggtttatcagtcgttcgatgcgccgctgccttggtttacccaagggttattggggttgtccgcgctgctgatcgccgttggcccctatttggcgctgctgctcggcgcgttgctgttcggctattgccgctggctgcatccgcgcccgccgtggcgccgacgtgagcaggccgccttgctgcgcctgccgctgatcgcccggctggtgagcggcggcgcgctgagccaaacgtttcgtattctgaccatgacccaacgcgcggggctgacgctggtggaaggcttgaacgcggcggcgctggcggccgaccatctgctgtaccggcaggcgctggagcaggtgcagcggcagctcgccgaaggcgaggcgtttcatcacgccctcgccctgcaaccgctgtttccgccgctgtgccggcagctggtgcgggtgggcgaagaatcgggctcgctggacgtcttgctggataaattggcgcagtggtatgaacggcagacgcacgagctggccgatacgctggcgcaaacgctggagccgctgctgatgctagtggtgggcgggattgtcggcgctttggtgatcgccatgtacctgcctatctttcaactgggcagcgtgctgggataa

SEQ ID NO: 424683 - DNA, 1443 bp, Serratia marcescens
atgaacgcgcaaatcagcgaagaagttcacgccctgtgccgacgctatcaggcgctggcgctgaacgaagatccaaccaccctgacgatcgcgctcaacgaagaagcgccgcaggggctgctggcggcgctgcgtttcgccaccggcaagcgcatccatctggagcaatggccggcggccaggctggagcaggcgctgaaccaacgccaggaaccgctaccggcgccgctggcggccgaagaagacagcgccgacatcgcctaccccgacgacggcgacgcgccggtggtgcagttcatcaaccagacgctgcgcctggccattcagcgtcgcgcctcggacgtccacttcgagccctttcggcagcattttcgcattcgcctgcgcatcgacggcgtgctgcaaaccctcgcctcgccgtcaccccagctgaccgcacgcctcatcgcccggctgaagatcctcggccagctggatatcgccgagcgccgtcagcctcaggacgggcagctcagcctgacgctggacggcgcgcgctatgccatgcgtatcgccactctgccgacgctgcacggcgaaaaggtggtgctgcgcgttcagcagggcgaacagcaggagctgccgctggatcaactgggcatgagccgagcggatttggcgcgctacgcggcggcgctggcctgcccgcaaggtttgatcctggtgaccggcccgaccggcagcggcaagacggtaacgctgtacagcggcctgcgtcagttgaacgatgcgcaaagcaacctgtgcagcgtcgaggatcctgtcgagatcccgctgttcggcgtcaatcaaacccagatcaacgccaaaaccgagctgagcttcgcccgggtgctgcgcgccctgctgcgccaggatccggatgtcatcatgatcggcgagatccgcgatgcggaaaccgccgagatcgcggttaaggccgcgcaaaccggccacctggtgctgtcgacgctgcataccaactccaccggcgaaaccctgacgcgcctgatgcacatgggtatccccggttacctgctcgccggctgcctgaagctggtcatcgcgcagcggctggtgcgcaggctgtgtcgccactgccgctacccgcacagccagccgacgcattttcctgcctcggtctggccggagccgctgctcgcctggcgcgccgacggctgcgagcattgcttcggcggctactatgggcgcatcggcgtgtatgagctgttggccattacgccggaaatacaggcggcgttgctggcgaacgccgcgcccagccggctggcggatgtcgcccgcgagcaggggcagctttccctgctgcaggcgggcctggcgctggccagcgaaggcgcgacctcgctggaagagctgtaccgcgtgatcgacgtcgtccagctcggcgtaaccgcgccatga

SEQ ID NO: 424684 - DNA, 438 bp, Serratia marcescens
atggaaacgcaacgcggctttaccctgatagaactgatggtggtgatcgccatcatcgccatcctcagcgccatcggcattcccgcctaccagcgctatatccagaaagcggcgatgaccgacatgctgcaaaccatgtcgccgtacaaactggcggtcgagctgtgcgtgctggacgaaggcgcccccaccggctgtgaagccggcagcaaaggcattcccaccggcggtacgtcgcgttacgtcagcggggtgaaagtcgtcaaaggcgtgatcaccctgaccggcacccaaacgctgcaggggctggcggtggcattaacccccaaagcgaacgccgatgggctgacccgctggagccggctgtgcagcagcgaaaacgcaacgctggttgaagtgtgccaggaagtcttccgcttcgacaacgcggcggagtaa

SEQ ID NO: 424685 - DNA, 891 bp, Serratia marcescens
atgccgacacgccgctacagtgccgacagtcgccgcaccgagcttcttgaacgaattgaaagtgatattccctatgccgtcgcccaggcgctgcgcgaagacctggggggtgaagtcgacgccgggcgcgatattaccgcgcaactgttaccggcggacaagcaggccgaagccaccgtcatcacccgcgaagccggcgtattctgtggccgccgctggctgaatgaggtctttattcagctgggcaatcaggtgcaggtggagtggctggtggcggacggcgaccgtctgacgccaaaccaaccgctctgccggctgcgcggccccgcgcgggtgatgctgaccggcgagcgcaccgcgctgaacttcgtgcagacgctctccggcgtggcgaccgaggtcagccgctatgtggctctgctggaaggcacccggactcgcctgctcgatacccgcaagaccctgcccggcctgcgcaccgcgctgaaatacgccgtgctgtgcgggggcggcagcaaccaccggctgggcctgtccgacgccttcctgatcaaggaaaaccacatcatcgcctccggctctatcaagaacgcggtggaaaaagccttctggctgcacgccgacgtgccggtggaagtggaagtcgaatcgctcgatgaactgcagcaggcgctggacgccggcgccgacatcatcatgctggacaacttcagcgtcgagatgatgcgccaggcggtcgcacaaacccagggccgcgcccagctggaagtatccggcaacgtcaccagtgagacgctgcgcaccttcgccgagaccggcgtggattacatttcggtcggcgcgctgaccaagcatgtgaccgcgctcgatctgtcgatgcgcttcaaatga

SEQ ID NO: 424686 - DNA, 597 bp, Serratia marcescens
atgcagttggaaaatggctggattatcggggtgacgcgagtggtctcgccgcactgcgatcggcgcccggatgacgagccgccgtcgctgctggtcatccacaacatcagcctgccgcccggcgagttcggcggcccctatatcgaccagctgtttaccggcacgctcgatcccgcgcagcacccctattttgccgagatccatcagctgcgggtgtcggcgcactgcctgatccgccgcgacggggagatcgtgcagtacgtgcccttcgaccagcgcgcctggcacgcgggcgtttccctgtatcaggggcgcgaccggtgcaacgatttctccatcggcatcgagctggaaggcaccgatcagttaccctacaccgaggcgcaataccgcgcgctgcaggcggtcaccgcgctgctggcggaacattatccgccgctggcggccaatatcgccgggcattgcgatatcgcccccggccgcaagaccgatcccgggccggcgttcgattgggatcgctatctggcatctctggaacaacgcggcgcgcccgccgacgctatgcttgagacaagaaaaagggagaggaatcgctaa

SEQ ID NO: 424687 - DNA, 855 bp, Serratia marcescens
atgacgctgtttacgctgttgctggttttggcctgggagcgcctgtttaagctgggagaacactggcagctggatcaccgtctcgaagtggtgtttcagcggctgcatcgggtttcgctggcgcagacgctggcgatgaccgccgcctggatggtggtcgtctggggcgttctgtggctgtcgcacgggttgttcttcggcgtggtgacgctgctgctgtggatcgtcatcgatctgctgtgcgtcggcgccggcatcaagcgcaaacactaccgcgcctacctgaaagcggcgcggcagggcgatacccacgccagcgatcagatggcggaagagctggcgttgatccacggtttgccggtggactgcagcgaagagctgcgcctgcgcgagctgcaaaacgcgctgctgtggatcaacttccgttattacctggcgccgctgttctggttcgtggtctttgggccttacgggccgatcgcgctggcggggtatgccttcctgcgcgcctatcaaacctggctggcgcgccacaatactccgctggagcgttcgcaatcgggcatcgatcacctgctgaactggctggactggatcccggtgcgcttggccggggtggcctatgcgctgttcggccacggcgagcgggcgctgccggcctggttcgcctcgctgggggatcggcattcatcgtcgtatcaggtgctgacgcggctggcgcagttctcgctggcgcgcgatccgcatatggatccggtgcaaacgccgcgggcggcggtgacgctggcgcgcaaggtgacaatgatcatcgtggtggtggtggcgctgttgaccatttacggcacgctgctttaa

SEQ ID NO: 424688 - DNA, 1290 bp, Serratia marcescens
atgagcctacacagcaagtccgaaagtctgtacgcccaggcgcaacagttgatccccggcggggtgaactctccggtgcgtgcattcaccggcgtgggcggtgtgccgctgtttatcgagcgggcagacggggcttatctgttcgatgccgacggcaaggcctatatcgactatgtcggttcctgggggccgatggtgctggggcataaccacccggcgatccgcgacgcggtgatcgaagcggcgcagcgcggcctgagcttcggcgcgccgaccgagatggaagtcaaaatggcgcagctggtcaccgagctggtgccgacgatggatatggtgcgcatggtgaactcgggcaccgaagccaccatgagcgccatccgcctggcgcgcggctacaccaaccgcgacaaaatcatcaagttcgaaggctgctaccacggccacgccgactgcctgctggtgaaagccggttccggtgcgctgaccctcggccagccgaactcaccgggcgtgccggcagatttcgccaagcacaccctgacctgcacctataacgacctggattcggtgcgggccgccttcgagcagtacccgtccgagatcgcctgtatcatcgtcgagccggtcgccggcaacatgaactgcgtgccgccgctgccggaattcctgccgggcctgcgcgcgctgtgcgacaagtacggcgcgctcttaatcatcgatgaagtgatgaccggcttccgcgtggcgctggccggcgcacagtcctattacggcgtcgagccggatctgacctgcctcggcaaaattatcggcggcggcatgccggtgggcgccttcggcggccgccgcgacgtgatggacgcgctggcgccgaccggcccggtctaccaggcgggcaccctgtccggcaacccgatcgccatggcggcgggctatgcctgcctgaccgaagtgtcgcaggtgggcgtgcaccagacgctgaccgaactgaccgagatgctggccgctggcctgctgcacgcggcgcaggaagagaatatcccgctggtggtcaacaacgtcggcggcatgttcggcctgttcttcaccgacgcgccggcggtcacctgctaccaggacgtgatgcagtgcgacgtggaacgcttcaagctcttcttccatctgatgctggaagaaggggtgtatctggcgccgtccgccttcgaagcgggcttcatgtccgtggcgcacagcaaggaagacattcagcgcaccatcgacgccgcgcgtcgctgctttgccaagctgtaa

SEQ ID NO: 424689 - DNA, 1440 bp, Serratia marcescens
atgacggaatcacaatcacagccagtcgggacgttgagcccgcgtcttagccgcagcgatgcggtgcgtcagtttattcgccgcgataaaacgccggtggcgatcctggtgatggccgcgctggtggggacgctggccggtttgctcggcgtggccttcgataaggcggtggagtgggtgcagcagcagcggctggcttcgctggcgcaggtcgccgactcctggatcctggtgtggccgctggcgtttatcctgtctgccgcgctggcggcgctgggctattacctggtgcggcgctttgcccctgaggcgggcggctcgggcattccggagatcgaaggcgcgctggaggagctgcggccggtgcgctggtggcgcgtgatcccggtgaaattcatcggcggcatgggcacgctgggggcgggcatggtgctggggcgcgaagggcccacggtgcaaatgggtggcaacgtcgggcgcatggtattggacgtgctgcgcattcgcggcgccgaggcgcgtcatacgctgctggcgaccggagccgccgcggggctgtctgccgccttcaatgcgccgctggccggcatcttgttcatcatcgaagagatgcggccgcagttccgctacaacctgatctcgattaaagcggtgtttatcggcgtgatcatgtcgagcgtggtgttccagctgtttaacggccagggctcggtgatcgcggtcgataaactttcttcggcgcccattaataccctgtggctctatctggtgctgggggcgatattcggcgcggtgggcgtgggattcaacgcgctgatcttccgcactcaggatatgtttgcgcgcctgcacggcggcagaatgcgcaatgtcttgctgatgggcgggctgctcggcggcgtgtgcggcattctggggctgatccagccggaggcggcgggcggcggctttgggctgatcccgatcgccgcggcgggcaattacagcgtcggcatgttgatgttcatctttattacccgcatcttcactacgctgctgtgcttcggctccggcgcgccgggcggcatcttcgcgcctatgctggcgctgggcacgctgttcggcaccgccttcgggctggcgggggcgcatctgttcccgcagtacggcatcgaggcgggcaccttcgccatcgccggcatgggggcgctgttcgccgccacggtgcgcgccccgctgaccggcatcgtgctggtgctggaaatgaccgacaactaccaactcattttaccgatgatcatcacctgcctcggcgccacggtggtggcgcagctgctcggcggcaagccgctgtattcgtcgatcctggcccgcacgctgcaaaggcaggaggcgcagctggcgcgggaagcggcggagaaaacaggtaaggaaaatacaacaaatgcggtgaatacttga

SEQ ID NO: 424690 - DNA, 345 bp, Serratia marcescens
atgagtgatcaaacggcactgcccctgcaatttaccgaggcagcagcaaacaaggttaagttcctgattgctgacgaagaaaacccgaaccttaagctgcgggtttacattaccggcggcggctgcagcggattccagtacggcttcacttttgacgacaaggtcaacgatggcgatatgaccatcgagaagcagggcgtggcgctggtggtcgatccgatgagcctgcagtatctggtcggcggttcggtggactacaccgaagggctggaagggtcgcgcttcgtggtgaccaacccgaatgccaaaaccacctgcggttgcggttcgtcgttcagcatctga

SEQ ID NO: 424691 - DNA, 246 bp, Serratia marcescens
atggctattcccgcaatgatgaaaaaaatcctgcttgcctgctgtggcgccctgctgagtggcgccgcgcatgccgatgccgtcagcggccggatcggcgttactctgaccattgaaccgcaatgcgccgtgcgcctcgaggccgccgccccacgggccgaatgcagccattcggcggcgcagccgaacattacccgccaaccggcgctggagaacggggcggaagtgatcctcgtggaatggtag

SEQ ID NO: 424692 - DNA, 615 bp, Serratia marcescens
atgctggtgttctggttggatattctcggtacggcggtgttcgccatctccggcgtactgctggccggcaagttgcgcatggatccgttcggcgtgctggtattgggcgtggtcaccgcggtcggcggcggcaccatccgcgacatggcgctggccaacggcccggtgttctgggtcaaggatcccaccgatctggtggtggcgatgatcacctgcgtcttgacgctgctgctggtgcgccagccgcgccgtctgccgcagtgggtgctgccggtgctggacgccgtcggactggcggtgttcgtcggcatcggcgtcaacaaggccttcgcagccggcaccggcccgctggtggcaatctgcatgggggtgatcaccggcgtcggcggcggcattatccgcgacgtgctggcgcgcgagatcccgatgatcctgcgcaccgaaatttacgccaccgcctgcatcatcggcggcatcgtgcacgccacggcgttttacaccttcagcatgccgctgcaacaggccatgatgctgggcatgatcatcaccctggccattcggttggcggccatccgctggcacctcaaattgcccgcctttattctcgaacgctga

SEQ ID NO: 424693 - DNA, 786 bp, Serratia marcescens
atgctctgtttgttggcgctctggctggccatgccggccggcgccgcccagcgggtgatcagcctggcgcccaacgccaccgaactcgcctatgccgccggcatgggcgatgtgctggtggcggcgagcgcctattccgattatccgccgcaggccgccaggctggagcaggtggcctcctggcagggcatcaatctggaacgggtgctggcgctcaagccagacctgatcctcgcctggcgcggcggcaatccgcagcgcgtgctggatcagctcgccgcgttcggcatcccaattttctatgcggacgccgacaatctcgaagggatcgccggcttgctggataagctggcgcaatacagcccgcacccggagcaggcgcatcaggcggcggaaggccttcgccgccagttcgccgctctcaaacaacagtacgccgctaactcgccacggcgcgtgctgctgcagttcggcacccagccgctgttcaccagcgccggcgccacattgcaaagccaggtgctggcgctgtgcggcgggcagaacgtcttcgccgacagccgcaccccttggccgcaaatcagccgcgagcaggtgctggcgcgtcggccgcaggccatcgtcatcaccggcggcgcgaaagaagccgccaatgtgaaagccttctgggcgccgcagctgcaggtgccggtgatcgcgctgaacgaagactggttcaaccgcggcgggccgcgcatcctgttggcggcgcagcagctgtgccgccagctggcggagatccgctga

SEQ ID NO: 424694 - DNA, 702 bp, Serratia marcescens
atgaaagtaggcatcatcggcgcaatggagcaggaagtcaccctgctgcgcgatcaaatcgaaaaccgtcaaaccatccagcgcgcgggctgcgaaatctacaccggccagatcggcggcgttgaggtggccctgctgaaatccggcatcggcaaagtttctgcggccatgggcaccaccctgctgctggaacactgcagcccggatctggtgatcaacaccggttccgccggcggcctggccagcaccctgcgcgtgggcgatatcgtggtgtcggaagaagtgcgctaccacgacgccgacgtcaccgccttcggctacgagccgggccagatggccggctgcccggcggcgttcgtcgccgacgacgcgctgatcgcgctggcggaaggctgcatcaaacagctggatctgcacgcggtgcgcggcctgatctgcagcggtgacgccttcatcaacggcgccgagccgctggcgcgcattcgcgccaccttcccgcgcgtcgccgccgtggaaatggaagccgcggcgatcgcccacgtctgccatctgttcggcacgccgttcgtggtggtgcgcgccatttccgacgtcgccgacagcgagtcgcacatgagctttgacgagttcctggtggtagcggccaaacagtccacgctgatggtcaatgccatgctgcaaaccctggccaagcgcggttga

SEQ ID NO: 424695 - DNA, 1518 bp, Serratia marcescens
atgtccgggatcgacttcaagcaaaaaatcagcttccaacggcctttcagcaaaccgatcgaggccgaggaagagtacgacatcgtgcggcagttcgagagcgatcgcgggcgcatcgtcaactcggccgccattcgccgtctgcagcaaaaaacccaggtgtttccgctggagcgcaacgcggcggtgcgcagccgcctgacgcactcgatggaggtgcagcaggtcgggcgccacatcgccaaagagatcctcaaccgtttcaaacaggcggggagaattgatgagctcggcctgacccggctgctcgatccgtttgaaagcatcgtggaaatggcctgtctgatgcacgacatcggcaacccgccgttcggtcacttcggcgagtcggcgatcaacgactggttcgcccaacggctcgatcccgccagctgcggcagcgagccgggcagccacgatcgctgccaggtggcgacgctgcgcctgcatgaaggggagagcgacctgaaccggctgcgcagccggatccgtcaggatctcagccacttcgagggcaacgcccaggcgatccgcatggtgtacagcctgctgaagctcaacctgacctacgcgcaggtcggctgcattttgaaatacacccgcccggcctactgggcgagcgacatccccgccagccacagctatctgatgaaaaagcccggctactatctggcggaagaggccttcgtcgatcggctgcggcgcgagctgcacatgggcgagttcgatcgtttcccgctgacctatatcatggaggccgccgacgatatctcgtactgcgtggccgatctggaagacgcggtggagaagagcattttcaccgtcgagcagctgtatcagcacctgattcaggagtggggcgaggtggcgccgggcgatctgttcgacaagaccgtcgccagcgcgtttcgcaagatcgatcgcggcggcgcgcggcgcagcgcggaagatcagttcttcatgtatctgcgggtgtttaccgtggcgcggctggtgccgcatgcggcgcagcgctttatcgacaatctggacgcggtctatcagggcagtttcaatcaggcgctgctggaggattccagcccggcgtaccggctgctgaaaatatttaaaaatgtggcgttcaagcacgtgttcaaccacccggaggtcgagcagctcgagctgcaaggctaccgggtgatcagcggcctgctggacatttacagcccgctgctggcgatgtcgctggcggacttcagccagctggtgcgcgaggacagccaccgcgcttacccgatcgaaacgcgcctgttccataagctgtccaccaagcatcggctggcgtatgcggaggcggtagaggggctgcagcatttatcgccggagcagcaagccattcgggaatattatttccgcgcccgtttattgcaggactatatcagcggaatgaccgacctttacgcctatgatgaatatcgtcgattgatggcggcggaataa

SEQ ID NO: 424696 - DNA, 1440 bp, Serratia marcescens
atgaaaaaaaccgcattagttctgagcgcattggcattcagtatcggtatggcgatgggcccggtcacggccagcgccgctgaaaccgcctcttccaacacccaacagctgccgagcctggcgccgatgctggaaaaggtgatgccttccgtggtgagcattaacgttgagggcagcaccacggtcaatacgccgcgcatgccgcagcagttccaacagttcttcggcgaagattcgccgttctgccaggatggttcgccattccagggctcgccgatgtgtcagggcggcgaacagccagggccggatggccagccgcagggcacgcagcagaaattccaggcgctgggcgccggggtggtcatcgatgccgccaagggctatgtggtgaccaataaccacgtggtggacaacgccaacaagatccaggtgcagctgagtgacggccgccgtttcgacgccaaggtgatcggcaaggatccgcgttccgatatcgcgttgatccagctgaaagacttcaagaatctgacggcgatcaagatggcggattccgatcagctgcgcgtcggcgattacaccgtggcgatcggcaacccgtacgggctgggtgaaaccgccacttcgggcatcgtatccgccctggggcgcagcggcctgaacatcgaaaactatgaaaacttcatccagaccgatgcggcgatcaaccgcggtaactccggcggcgcgctggttaacctgaacggcgagctgatcggcatcaacaccgcgatcctggcgccggacggcggcaacatcggtatcggcttcgccattccgagcaacatggtgaaaaacctgacggcgcaaatggtcgaatatggccaggtgaaacgcggcgagctgggcatcatgggcaccgagctgaactctgagctggccaaggcgatgaaggtcgacgcgcagcgcggggccttcgtcagccaggtgatgccgaagtcttccgccgcgaaggcgggcatcaaggccggcgacgtgatcgtcaccatgaacggcaaggccatctccagcttcgcctcgttccgggcggagatcggcacgctgccggtcggcagcaagatgtcgctgggcattattcgcgacggcaaaccggtgacgattgacgtcacgctggagcaaagcgcgcagactcaggtggcctcgggcaatatctacaccggcatcgaaggcgccgagctgagcaacacccaggtcggcaatgtgaagggcgtcaaggtggacagcgtgaaagccggcagcgccgcggcgcgtatcggcctgaaaaagggcgatgtgatcctgggggtgaaccagcagccgatccagaacctgggcgagctgcgtaaaatcctcgacagcaagccgtcggtgctggcgttgaatatccagcgcggcgagagccagctgtacctgctggcgcagtga

SEQ ID NO: 424697 - DNA, 2727 bp, Serratia marcescens
atgaccaaatacagcctgcgtgcgcgcatgatgatcctgattctggccccgaccttgctgattggtttgctgctcagcaccttcttcgtggtgcaccgctataacgagctgcaggagcaactggtcgacgccggcgccagcatcatcgagccgctggcggtggccagcgagtacggcatgacgttccgcagccgcgaatcggtcaggcagttggtcagtctgttgcaccgccgccattcggacatcgtgcgttcgatcaccgtgttcgatgcgcagaacaatttgttcgtcacctccaattatcaccacaacttcgctcagctgcagctgccgaaaggcgtgccgttgcctaccgagctgatgctcacccgacgcggcgattcgctgatcctgcgcacgccgatcctgtcggaaagccagtatccggatgaaaccgccgacggcggcagccaccccgacaacaacctgggctatgtggcgatcgagctggatctgcagtcggtgcggctgcagcaatataaagaggtgttcgtctccaccctgctgctgttgctgtgcatgtgcatcgccatcctgttcgcttaccggctgatgcgcgacgtgaccggcccgatccgcaatatggtgaataccgtcgaccgtatccgccgcggccagctcgacagccgcgtggagggctacatgctcggcgagctgcacatgctgaagaacggcatcaactcgatggcgatgtcgctcaccgcctatcacgaagagatgcagcagaacatcgatcaggccacctccgacctgcgtgaaacgctggagcaaatggaaattcagaacgtcgagctggatctggcgaaaaaacgcgcgcaggaagcggcgcgcatcaagtccgaattcctggccaacatgtcgcacgagctgcgcaccccgctcaacggcgtaatcggcttcacccgccagatgctgaaaaccgatttgagcgcgacccagaccgactatttgcagaccatcgaacgctcggccaacaacctgctgaccatcatcaacgacgtgctggacttctccaagctggaggccggcaagctggtgctggagcatattccgttcgccctgcgtgaaacgctggacgaagtggtggtgctgctggcgcccagcgcccacgataaggggctggagctgacgctggatgtgcacaacgacgtgccggagcaggtgatcggcgactcgctgcgcctgcagcaaatcatcaccaacctgctgggcaacgccatcaagttcaccgaaaccggcaatatcgatattcgcgtcgagctgcgcaaacagctggatcgccgggtggaagtggaagtgcagatccacgacaccggcatcggcatctccgaacgccagcagtcgcagctgttccaggcgtttcgtcaggcggacgccagcatctcccgccgccacggcggcaccgggctggggctggtgatcacgcaaaaactggtgaaagagatggggggcgatatctgcttccacagccagttgaaccgcggctcgaccttctggttccacatcacgctggatctgaacgagggcatgctgtcgctggcgccgagcctgccggatctgaacggcaaaacgctggcctatatcgagtccaacccgacggcggcgcaggcgacgctcaacatgctcagcgtcacgcagctggtgatcacccactcgccgacgctggcccagctgccgccaggccactatgacttcctgctggccggcgtgcccatcccgttccgcgccaatatggcgcagcacgaggacaaattgctggcctcgctgaagctggccgatcgggtgattctggcgctgccgtgccaggcgcagatcgacgccgagctgctcaagcaacaaggcgcgctcggctgcctgatcaagccgatcaccagcacccggttgttcccgctgctcaggatggagacaccgacacgcctcaccgcgccgcctgagcgtaaacgcctgccgctgacggtgatggcggttgacgacaacccggccaacctgaagctgatcggcacgctgctgggggaacaggtagaaaaaaccctgctgtgcgagagcggcgaggaagcgctggcgctggcgcgcgacaacgtgctggatctgatcctgatggacattcagatgccgaagatggacggcattcacgccagcgagctgatccgccaactgccgcatcacaactccacgccgatcgtcgccgttaccgcccatgccgccagcggcgagcgcgagcacctgctgcaggccgggatggacgactatctggccaagccgatcgacgagaaaatgctgacccgcgtgctgtcgcgctaccacagcggcgacgtggaaaacgccgtcgccgacgacgcgccgctgtcgctcgactggccgctggcgctgcgtcaggcggccaataaaccggatctggcgcgcgatctgctgcaaatgctgctcgatttcctgccgcaggtgcgcgagcgggtgcaagcgctgctcgacggccagcatgacgacgagatcctcgatctggtccataagctgcacggcagctgcagctacagcggcgtgccgcgcctcaagcagctgtgtttctacctcgagcggcagctgcgccagggcgtcaccaacgacgagctggagccggagtggctggagctgttggatgagattgaactggtgatccacgcggcgcgcgcgcatctgacgcaaccggcctga

SEQ ID NO: 424698 - DNA, 1350 bp, Serratia marcescens
atggcgcaattctactctcccaaacgccgcgtgacgacccggcagagctcacaaatcttcaccgtgacggtgagcgatctcgaccctttcggccagggcgtggcgcgccacgacggcaaagcggtgttcgtgccgggcgtattgccgggcgagcaggcggaaatccagctgaccgaagataagcgccagttcgccaaaggcaagctcaagcgcctgctgagccgcagcccacagcgggtggcgccgcgctgcccgcatttcggcgtgtgcggcggctgccagcagcagcatgcggatgaggcgctgcaacagcagagcaaggcggcggcgctggtgcgcatgatcgcccgcgaaaccggggtgaccccgcagcaggagccggtgatcgccggcccggaatacggctatcgccgtcgcgcccgcctgagcctggcgtggcagcccaagccgcagcgcctgatgatgggctttcgacaggcggcctccagcgagctggtggcggtggagcactgcccggtgctgcggccggagttggaacggctgctggcgccggtgcgcgcctgcctgagcgggctgcaggcggtacggcgtctggggcatgtagagctggtgctggcggataacggcccgctgctggtgctgcgccatctcgacgcgctgaaagaggcggatcggcaggcgctgttggcgtttggcgagcgggaaaacctcgccgtttacctggcgccggacagcgatcgcgtggaaaaactgtgcggtgacacgccgtattatcaggttgacgggctacgcttagacttcagcccgcgcgactttattcaggtcaatgacgccgtaaaccaacaaatggtggcgcaggcccttgaatggctcgacattcaacccaatgatcgggtgctggacctgttctgcggcatgggcaattttaccctgccgctggcgcgccgcgccgctgcggtggtgggcatcgaaggtgttgccacgctggtagcgaatgggcaatataatgcacataagaataagctgaataatgcatcgttcttccacgagaatctggaggacgacgttgcgcggcaaccttgggcagcacaagggtttgataaggtgatgctggatcccgcccgcgccggtgcggccggggtgatgtcacacattgtaaaactggcgccggcgcgggtggtgtatgtttcctgtaaccccaccacgctggctcgcgacagcaaagtgctgttgagcgccggttatcgtcttgcgcgcgtgcggatgttggatatgtttccgcacacggggcatcttgaatcaatggcgctgtttatcaacgagcgcgcgccagaggtcgctgcaaagtag

SEQ ID NO: 424699 - DNA, 2232 bp, Serratia marcescens
atggttgcggtaagaagtgcacatctgaatacggcgggtgagttcgctctcgatgagtggatagccggcttggggctacctaacccgcagtcatgtgagcgattggccgcaacctggcgttattgtgagcagcagacccagaatcaccccgacgcctcgctgctgctgtggcgtggtctggagatggtggaaatcctctcgacgctgagcatggacaacgacagcatgcgcgccgcgctgctgttcccgctggtggacgccgacatcgtgcaggaagagaccctgaccgaagcgttcggcaagggtattgtcgcgctggtgcacggcgtgcgcgacatggacgccatccgccaactgaaagccacccaaaacgactcgatggcctccgaacaggtcgacaacgtgcgccgcatgctgttggcgatggtggaggatttccgctgcgtggtcatcaagctggcggagcgcatcgcccacctgcgcgaggtgaaagacgcgccggaagacgagcgcgtgctggcggcgaaagagtgttccaacatctacgccccgctggccaaccggctcggcatcggccagctgaagtgggaactggaagatttctgcttccgctacctgcatccggaagaatacaagcgcatcgccaagctgttgcatgagcgccgcatcgatcgcgaacagttcatcgacgactttgtcgccgggctgcgcgccgaaatggccagcgaaggcattcgggtggagatctacggccggccgaaacacatctacagcatctggcgcaagatgcagaaaaagcacctggcgttcgacgaactgttcgacgtgcgcgcggtgcgcatcgtggcggagcgtctgcaggattgctatgcggcgttgggcatcgtgcatacccacttccgccatctgccggacgagttcgacgactacgtcgccaacccgaaacccaacggctaccagtcgatccacaccgtggtgctggggccgcgcggcaaaaccgtcgagattcagatccgcacccggcaaatgcatgaagacgccgagctgggcgtggccgcgcactggaagtacaaagagggcgcgggcgtgaccgtgcgctccggctacgaagaacgcatcgcctggctgcgcaagctcatcgcctggcaggaagagatggcggactccggcgagatgctcgacgaagtgcgcagccaggtgttcgacgatcgggtgtatgtgtttacgccgaaaggcgacgtggtggatctgccggccggctccacgccgctcgatttcgcctaccacattcacagcgacgtcggccaccgctgcatcggcgccaagatcggcggccgcattgtgccgtttacctatcagctgaagatgggcgatcagattgagatcatcacccagaaacagccgaacccgagccgcgactggctgaacccgaacctggggtatgtcaccaccagccgcgggcgctcgaagatccacaactggttccgcaagcaggatcgcgacaagaacattctcgccggccgtcagatgctggacaacgaattggaacacctcggcatcagcctgaaagaggccgagaagctgctgatcccgcgctacaacatgaactcgctggacgaggtgttggcggcgatcggcggcggggacattcgcctgaaccagatggtgaattacctgcagggcaagttcaacaagccgagcgccgaagagcaggatcgcgaggcgctgcgccagctggtgcagcagaaagcgccgccgccggcccgcaacaaggacaacggccgagtggtggtggagggcgtgggcaacctgatgcaccacatcgcccgctgctgccagccgatcccgggcgacgacatcgtcggctttatcacccaggggcgcggtatttcgatccaccgggcggactgcgatcagctggtcgatctgcaatcgcacgcgccggagcgcatcgtcgacgcggtatggggcgaaagctactccagcggttattcgctggtggtgcgcgtgatggccaacgatcgcagcgggctgctgcgcgacattaccaccattctggccaacgaaaaggtcaacgtactgggcgtcgccagccgcagcgacaccaagaagcagttggccaccatcgacatggatatcgaaatctacaaccagcaggtgctgagccgggtgctggcgaagctgaaccagctgccggacgtgatagacgccaagcgtctgcacggcaactaa

SEQ ID NO: 424700 - DNA, 795 bp, Serratia marcescens
atgacccaatcgactccgctgcagcgtctgctgaacatcatgaaaacgctgcgcgacccgcagatcggctgctcgtgggaccgcaagcaaaccttcgccaccattgcgccttatacgttggaagagacttacgaagtgctggacgccatcgagcggcaggactacgccgatttgcgcgacgagctgggcgacttgctgtttcaggtggtgttttacgcccagatggggcaggagcaggggctgttcgattttgatgaggtgtgcaccgccatcagcgacaagctggagcgccgtcacccgcacatcttcggcgatgccgagggcggagacagcgaagccgtggcggcgcgctgggagcagttgaaggccggtgagcgcgctgaaaaagcgctgcactcggtgctggacgatattccgcaggcgctgccggcgttgatgaaagcgcacaagatccaaaaacgctgcgcctcggtcggcttcgactggaataccctgggcccggtgctggacaaagtgtacgaagagatcgacgaagtgatgcacgaagcccgccaggcggtggtcgacgagagcaagttggaagaggagatcggcgatctgctgttcgccacggtgaacctctcgcgccatttaggccacaaggcggagaacgcgctccaggcggcgaaccgcaagttcgagcgccgcttccgccaggtggaagagattgtacagcaaagcgggctgcggcttgaagacgccacgctggagcagatggaagaggcctggcagcaggtgaaacgtcaggaaagctga

SEQ ID NO: 424701 - DNA, 1638 bp, Serratia marcescens
atgacaactaattatatttttgtgaccggcggggtcgtatcctctctgggtaaaggcattgccgcagcctctctggcggctattcttgaagcccgtggcctcaacgttaccatcatgaaactggacccgtacatcaacgtggatccgggcaccatgagcccgattcagcatggggaagttttcgtcaccgaagacggcgcagaaaccgatctggatttgggtcactacgagcgcttcatccgcaccaaaatgtcgcgtcgcaacaacttcaccaccggccgcatctactccgacgtgctgcgtaaagaacgccgcggcgactatctgggtgcgaccgtgcaggtcattccgcacatcaccaacgcgatcaaagagcgcatcatcgaaggtggcgaaggccacgatgtggtgctggtggaaatcggcggcaccgtcggcgatatcgaatcgctgccgttcctcgaagctatccgtcagatggcggtggaagtgggccgcgagcacactctgtatatgcacctgacgctggtgccgtacatggcggcggccggcgaagtgaaaaccaagccgacccagcattccgtaaaagagctgctttccatcggtattcagcctgatgtgctgatttgccgttccgatcgcgcagttcctgctaacgaacgcgctaaaatcgcgcttttctgcaacgtgccggaaaaagcggttatctctctgaaagacgttgattctatttataaaatcccaggcctattgaaatctcaggggctggacgattatatttgtaaacgattcagcttgaacgcaccggaagccaacctggccgaatgggaacaggtgatctacgaagaagccaatccgggcggcgaagtgaccatcggcatggtcggcaaatacgttgagctgccggacgcctacaagtcggtgatcgaagcgctgaagcacggcgggctgaaaaaccgtctgaccgtgaacatcaagctgatcgactcgcaggacgtggaaacccgcggcgtggaagtgctgaaagggctggacgcgatcctgatcccgggcggcttcggttaccgcggcgtggaaggcaaagtgatgaccgcacgctatgcgcgcgagaacaacattccttacctgggcatttgcctgggcatgcaggtggcgctgatggagttcgctcgcaacgtggcgggcatggaaaacgccaactccaccgagtttatgccagactgtaagtacccggtggtggcgttgatcaccgaatggcgcgacgaagacggcaacgtcgaagtgcgcagcgaagaaagcgatttgggcggcacgatgcgcgtaggtggccaacagtgcaacctgatcgacaacagcctggtgcgtcagctgtatggcgaaccgaccattgtcgagcgtcaccgtcaccgttacgaagttaacaacatgctgttgaagcagatcgaagccgcagggctgcgtgtcgccggtcgttccgccgacaacaagctggtcgagatcattgaactgccgaatcacccgtggtttgtagcctgtcagttccacccggaatttacgtctacgccgcgtgatgggcatccgctgttcgccggcttcgtgaaagccgcaggcgagcatcagaagcgccaggtgaaataa

SEQ ID NO: 424702 - DNA, 1296 bp, Serratia marcescens
atgtccaaaatcgttaaagtcatcggtcgtgaaatcatcgactcccgcggtaacccgactgttgaagccgaagttcatctggaaggcggtttcgtcggcttggctgctgcgccgtcaggtgcttctaccggttcccgcgaagcgttggaactgcgtgacggtgacaagtctcgtttcctgggtaaaggcgtactgaaagccgttgctgcagtaaacggtccgattgctcaggcagtactgggtaaagatgccaaagaccaggcgaacatcgacaagatcatgatcgagctggacggcaccgaaaacaaatccaacttcggcgccaacgccattctggcggtttccctggcagcagcgaaagcggctgcagcctctaaaggtatgccgctgtacgagcacatcgctgaactgaacggcaccccaggcaaattctccatgccactgccgatgatgaacatcatcaacggcggcgagcacgctgacaacaacgtcgacattcaggaattcatgattcagccggttggcgcgaaaaccctgaaagaagcggtgcgcatcggttctgaagtgttccaccacctggcgaaagttctgaaagccaaaggcatgaacaccgccgtgggcgacgaaggcggctacgcgccaaacctgggttccaacgccgaagcgctggcggttattgctgaagcggtaaaagcggcgggctacgagctgggcaaagacgtcactctggcgatggactgcgcggcttccgaattctacaaagacggtaaatacgtgctggccggcgaaggcaacaaagccttcacttccgaagagttcactcacttcctggaagatctgaccaaacagtacccaatcgtgtctatcgaagacggcctggatgaatccgactgggcgggcttcgcttaccagaccaaagttctgggcgacaaaatccagctggtgggcgacgatctgtttgttaccaacaccaagatcctgaaagaaggcatcgagaaaggcatcgctaactccatcctgatcaaattcaaccagatcggttctctgaccgaaactctggcggctatcaagatggcgaaagacgccggctacaccgcggtgatctctcaccgttccggtgaaaccgaagacgcgaccatcgccgacctggcggtagggactgcggctggccagatcaaaaccggttccatgagccgttctgaccgcgttgccaagtacaaccaactgatccgtatcgaagaagcgctgggtgaccgtgcgccattcaacggcctgaaagaagttaaaggccagtaa

SEQ ID NO: 424703 - DNA, 1395 bp, Serratia marcescens
atgcgtaacgaaacgacacaactcagacgcggactaaacgcgcggcacatccgtttcatggctctcggatcggcgatcggcaccggcctgttctacggctccgccggcgccatccagctggccggcccggccgtgctgctggcctacctggtgggcggcgcggcggtgttcatggtgatgcgcgcgctgggtgaaatggcggtgcaccagccggtttccggctcgttcggccactacgccagccactatctcggcccgctggccgggttcctcaccggttggacctacaccttcgaaatggtgatcgtcgctttggcggacgtcaccgccttcggcatctatatggggctgtggttcccggacgtcgcccagtgggtctgggtgctcagcatcattctgtttatcggcgcgctcaatttgtgcagcgtcaaggtgttcggcgagctggaattctggctgtcgctggtcaaggtcgccgccatcgtggcgatgatcgtcggcggcgcggcggtgatgctgttcggcttcggccaagcccagcacgccaccggtatcaacaatctgtggcagcacggcggctttatgcctaacggcatcggcggcgtggtcgcgtcattggcggtggtgatgttcgccttcggcggcatcgagatcatcggcattaccgccagcgaggcgaaagatcccgccaaagtgctgccgaaagcgatcaacgccgtgccggtgcgcatcctgctgttttacgtgctgacgctgacggtgctgatggcgatctacccgtggaacagcatcggccagaacggcagcccgttcgttgagatcttcagcaacctcggcatcagctccgccgccaacgtgctgaacgtggtggtgatcaccgccgccatctcggccatcaacagcgacatcttcggcgccggccgcatgatgtacggcatggcgcaggacggccaggcgccgcgcagcttcaccaaactgaccgccagcggcgtgccgtggatgacggtgctggtgatgtcggtcgccctgctgctggcggtggtgctcaactacctgatcccggagaaggtcttcatgatcatcgcctcgatcgcaaccttcgccaccgtctgggtgtggctgatgatcctgctgtcgcagatcgtcatgcgccgcacgctgtcgccggaagaaactcgtcagttgagcttcccggtgccgtggtggccggtggcgccggcattggcgaccgcctttatggcattcgtcatcggcctgctcggctacttcgaagagagccgcatcgcgctgtacgtcgggctggtgtggatcgctttactcaccgtggcttactggctgtgggtgcgcaagaaaggcgggggttcgccggtgaccgcggcaacgcagcagatgtaa

SEQ ID NO: 424704 - DNA, 1536 bp, Serratia marcescens
atgaaagctctgactattcgcccaggcaaactgacgctggcccagctacgcgacgtctatcaacacccggtgacgctgacgctggacgacaacgcctacgcgccaatccagcagagcgtggcctgcgtggaacgcatcgttgaagaaaaccgcaccacttacggcatcaacaccggatttggcctgctggcttcgacacgcatcgcccgcgacgatctggaaaacctgcagcgttcgatcgtgctgtcacacgccgccggcgtgggcgagccgaccgacgacaacctggtgcgcctgatcatggtgctgaagatcaacagcctgtcgcgcggcttctccggcattcgtctggaagtcattcaggcgctgatcgcgctggtcaacgccgaagtttatccacatattccgctgaaaggctcggtcggcgcctctggcgacctggcgccgctggcgcacatgagcctggtgctactgggcgaaggccaggcgcgccatcagggccaatggctgccggcgaccgaagcgctggccaaagccggcctgaaaccgctgaccctggcggcgaaagagggactggcgctgctgaacggcacccaggtctccgctgccttcgcgctgcgcggcctgttcgatgccgaagatctgttcgccgccgcgaccgtggcgggcagcctgacggtggaagcggcgctgggctctcgcagcccgttcgatgcgcgcatccacgaggtgcgcggccagcgcggccagatcgacgccgccctcgcctatcgccacctgctcggcgcgcgcagcgaagtctccgactcgcaccgcaactgcgaaaaagtgcaggatccttactccctgcgctgccagccacaggtaatgggcgcctgcctgacgcagatccgccaggccgccgaggtgctggaaattgaagccaacgccgtctccgataacccgctggtgttcgccgaacagggcgacgtgctgtccggcggcaacttccacgccgaaccggtagcgatggccgccgataacctggcgctggcgtttgccgaaatcggttcgctgtccgaacgccgcatctcgctgatgatggacaagcacatgtcgcaactgccaccgttcctggtggaaaacggcggcgtgaactccggcttcatgatcgcccaggtgaccgccgcggcgctggccagcgaaaacaaagcgctggcgcacccgtcgagcgttgacagcattccgacctccgccaaccaggaagaccacgtttccatggcgccggccgccggtcgccgcctgtggagcatggcggacaacgtgcgcggcattctggcggtcgaatggctggccgcctgccagggcctggatttccgcaacggcctgaagacctcggaaggtctggagcaggcgcgccgtctgctgcgcgagcatgtcagtttctacgacaaggaccgtttcttcgcccccgacattgaagccgccagccaactcttggcggccggtcacctgacatcgctgctgcctgcggcgctgctgcctagccaggcataa

SEQ ID NO: 424705 - DNA, 1692 bp, Serratia marcescens
gtgactacaaataacaaagttcgcaatgtcgatgtacgcgcgccacgcggcacacaattaaacgcaaaaagctggctgaccgaagcgccgttacgcatgctgatgaacaacctcgatcctgaagttgcggagaacccacacgagctggtggtgtacggcggcatcggccgcgccgcgcgcgactgggattgctacgacaagatcgtcgaaaccctgaaaacgctggaagaagacgaaaccctgctggtgcagtccggcaagccggtcggcgtcttcaaaacccacagcaacgccccgcgcgtgctgatcgccaactccaacctggtgccacactgggcgacctgggaacacttcaacgaactggacgccaaaggcctggccatgtatggccagatgaccgccggcagctggatctacatcggcagccagggcatcgttcagggcacctatgagaccttcgtcgaagcgggccgccagcattacgacggcagcctgcagggccgctgggtactgactgccggcctgggcggcatgggcggcgcgcagccgctggccgcgacgctggcaggcgcctgctcgctgaacatcgagtgtcagcagagccgcatcgatttccgcctgaaaacccgctacgtcgatgagcaggccaacgatctggacgacgcgctggcccgcatcaaaaaatacacctcagaaggcaaagccatctccatcgccctgtgcggcaacgcggcggaaattctgcctgagctggttcgccgcggcgtgcgcccggacatggtcaccgatcagaccagcgcccacgatccgctgaacggctacctgccgaagggttggagctgggaagagtatcgccagcgcgcccagaccgagccggctaaagtagtcgccgccgccaaacagtcgatggccgatcacgtcaaagccatgctggcgttccagcagatgggcgtgccgaccttcgactacggcaacaacatccgccagatggcgaaagaaaccggcgtcgacaacgccttcgacttcccgggcttcgtgccggcctacatccgtccgctgttctgccgcggcatcggaccattccgctgggcggcgctgtccggcgatccgcaggacatctacaaaaccgacgccatggtgaaagagctgatcccggatgacgaacacctgcaccgctggctggacatggcgcgcgagcgcatcagcttccagggcctgccggcgcgcatctgctgggttggcctcggccagcgcgccaagctgggcctggcgttcaacgaaatggtgcgccgcggcgaactgtccgccccgatcgtcatcggccgcgaccacctggattccggctccgtttccagcccgaaccgtgaaaccgaagcgatgaaagacggttccgatgcggtttccgactggccgttgctgaacgccctgctgaacaccgccagcggcgccacctgggtttccctgcaccacggcggcggcgtcggcatgggcttctcccaacactccggcatggtgatcgtctgcgacggcaccgacgaggccgccgagcgcatcgcccgcgtcctgcacaatgacccggctaccggggtcatgcgtcacgccgacgccggttacgatatcgctatcgactgcgcccgtgagcaaggcctgaacctgccgatggttgccgcgacccaaggagaaaaagcatga

SEQ ID NO: 424706 - DNA, 1341 bp, Serratia marcescens
atgactcattccaccagcgagttgaacattcagcaggccatcgacgacagcaaattttcgctgtttcactggaccctgatcattctcggattcctgatcctcgccatcgacggtttcgataccgccgccatgggctatatcgccccctcggtcgctaaagactggggcatcgtcaaacaggatctggggccggtgctgagcgccgcgctgctggggctgtcgctcggcgcgctgatcgccgggccaatctccgaccgcatcggccgcaaacgcgtgctggtgttttcctgcctgttcttcggcctgtcgagcctggccactgcctacgccggctcgctcaatagcctgacgctgtggcgtttcctcactggcctcgggctgggagcggcgatgcccaacgccatcacgctgatctccgaatacgcgccgcagcgctgccgttcgctggcgatcaacaccatgtactgcggttttccgctgggcgcggccggcggcggcgccatttcatcgtggctgatcccgagctacggctggcacagcgtgctgctgctcggcgccattgcgccgctggcgttgacggttttgctgatcctgctgctgccggaatcggtcaaatacatggtcaaccgcgggcaggatgcggcgaagatcaagcgcatcgcacagcgcttcgtcagccagagcctcgacggcgtcactcgtttttacctgtacgaagagaagctgacgcagaccaaaaccagcgtaggcctgctgttcagccgcccttacctgctcggcacgctgatgctgtggctgacctactttatggggctggtgatctactacgtgttgctgagctggatgccgatcctgatgcaggggctgggttaccagctggagcaatcggcgatgctcacctcgctgttcaccttcggcggcacgcttggcatcctggtggccggctggctgatggatcgctggaacgcgcataaggtggtctcgagcggctttgtcgccactgccctgctgatcgtggcgatggcgaccgaggacaaacacatcgtgctgctgggcgccttcatcttcctgatgggcgtcaccatgaacggcgcgcagtccgggctgcaaacgctggcggccaccttctaccccacccacagccgcgccaccggcatcgcctggatgcagggcatcggccgcttcggcggcgtcgccggcaccatgatgggcgcccaactgctggcgatgcagtgggaggtgcagagcatcctgatgttcctgtgcgtgccggcgctgatcgccgccatcgccacggtatgcaaaatgagccgcaaaccgacgctgcaaccggcggcctga

SEQ ID NO: 424707 - DNA, 672 bp, Serratia marcescens
atgcagtacccgatcaatgagatgttccaaaccttgcagggcgaaggctttttcaccggcgtgccggccatttttatccgcttgcagggctgcccggtagggtgcagttggtgcgataccaaacatacctgggaaaaggaagccaatcgggaagtcgacctgcaacggatcctggtcaaaacagaagagagcgacgcctggggcaacgccagcgccgagcagctgttggcggtgatgcgccaacaaggttacaccgcgcgccatgtggtgatcaccggcggcgaaccctgcatctacgatctggcgccgctgaccgagctgttcgaacagcatggttatggctgccagattgagaccagcggcacccacgaggtgcgctgttccgccaacacctgggtgacggtttcgccgaaggtgaatatgcgcggcggcatgaaggtgctggatcaggcgctgcggcgcgccgacgaggtgaagcatccggtggcgcgcgagcgcgacatcgaggcgctggacgcgctgctggcgacgctgcaggacgacaaggcgcgcattattgcgctgcagccgatcagccagaaagaagaggcgacccgcctgtgcatcgaaacctgcatcgcgcgcaactggcggctgtcgatgcagacccacaagtatctgaacatcgcctaa

SEQ ID NO: 424708 - DNA, 360 bp, Serratia marcescens
atggcaaccacgctgtttaaagattttcagtttgaagccgcacaccgcttgccgcacgtgccggagggccataaatgcggccgtctgcatgggcattcgtttatggtgcgtctggaagtgaccggtgaagtggatccccacaccggttgggtgatggatttcgccgagctcaaggctgtgttttccccgatctgggagcggctggatcaccattatctgaacgatattccaggattggaaaatcccaccagcgaagtgctcgccgcctggatttggcagcagctcaagccccagttgccggaactgactgcggtgatggtgaaagagacctgtactgcgggatgcgtatataaaggttaa

SEQ ID NO: 424709 - DNA, 1803 bp, Serratia marcescens
atgacgactcaggctcctccaacatctttgctcccgctgacgcccgaacagctggcgcgcttgcaggcgacgatcggcgactattcgccgacgcagctggcgtggctgtccggctatttttggggcatggtcaatcaacagcccggagccgtggccattgcgcctgtcgcccctgcggctgccgccggcatcaccatcatttccgcttcgcagaccggcaatgcgcgccgcctggcggagcagctgcgcgacgatctgctggccgccaatctgagcgccacgctgatcagcgccggcgactacaagttcaagcagatagctcaagagcgcctgctggtgatcgtcgcctctacgcagggggaaggcgagccggcggaagaagcggtggcgctgcataaattcctgttctcgaagaaggcgccgaagctgaatgacaccgcttttgcggtgttcgggctgggcgacacctcttatgagaatttctgccagtctggtaaggatttcgacggcaagctggccgagctgggggccgagcgcctggtggagcgcgtggacgccgacgtggagtaccaggaactggccgtcgcctggcgtaaacaggtggtgtcggtgctgaaggcgcgcgcgccggcggaaagcgccgcaccgggcgtgttggccagcggcgcggtcgatctgatcgacagcagcccgtacagcaaggaacaaccgcttaccgcccagctggcggtcaatcagaaaattaccggccgcgcgtcggataaagacgtgcgtcatatcgaaatcgatctgggcgactccggcctgcgctatcagccgggcgatgcgctcggcgtatggttcgacaacgatccggcgctggtggacgaactggtgcagctgttgtggctgaaaggcgacgagccggtcgaggtggaagggcaaaccctgccgctggcgcaggcgctgcgcagccatttcgagctgacgcagaacaccacgccgatcgtcgataaatacgccgcgctgtcgcgcgacgaaacgctgatcggcctgctggcggataaagccgcgctgcagcagtacgcgcacaacacgccgatcgtcgacatggtgcgtcaggcgccggcggatctgagcgccgaacagctggtcggcctgctgcgcccgctgacgccgcgtctgtactccatcgcctcttcgcaggcggagaacgaaagcgaagtccacatcaccgtgggcgtggtgcgttacgacatcgacgggcgcgcccgcagcggcggcgcctccggcttcctggcggatcgcctggaggaagacggcgacgtgcgggtgtttatcgaacacaacgacaacttccgcctgccggccaacccggaaacgccggtgatcatgatcggcccgggcaccggcatcgcgccgttccgcgcctttatgcagcagcgcgacgccgacggcgccggcggcaaaaactggctgttcttcggcaacccgcacttcaccgaagatttcctgtatcaggtcgaatggcagcgctacgtgaaagacggcctgctgacccgcatcgatctggcctggtcccgcgaccagcaacataaaatatacgtacaagacaaactgcgcgaacagggcgcggaagtgtggcgctggattcaggaaggcgcgcacatttacgtctgcggcgatgccaatcgcatggcgaaagacgtggaaaacacattactggaactggtggccgagcacggtggcatggataccgagcaggcggatgaatttttaagtgagctgcgccttgagcgccgttatcagcgagatgtttactga

SEQ ID NO: 424710 - DNA, 1716 bp, Serratia marcescens
atgagtgataaacaccccgggcctttggtagtcgaaggcaaactggccgatgcggagcgcatgaagaaggagagcaacttcctgcgcggcaccatcgccgaagatttgaacgacggcctgaccggcggcttcaacggcgacaacttcctgctgatccgttttcacggcatgtatcagcaggatgaccgcgatattcgcgccgaacgcgccgagcagaagctggagccgcgccacgccatgatgctgcgctgccgcctgccgggcggcatcatcagcccgcagcagtggctgggcatcgacaagttcgcgcaggagagcacgctgtacggcagcattcgcatcaccaaccgccagacgttccagtttcacggcattctgaaaggcaacgtcaaaccggtgcaccagctgctgaaccgtctggggctggacgcgttggcgaccgccaacgacgtcaaccgcaacgtgctgtgcacctccaacccggtggagtccgagctgcatcaggaagcctacgagtgggcgaagaagatctccgaacacctgctgccgcgcacccgcgcctacgctgaggtgtggctggatcaggagaaggtggccaccaccgacgaagagccgattctggggccgacctacctaccgcgcaaattcaaaaccacggtggtgattccgccgcagaacgacgtcgatctgcacgccaacgacatgaacttcgtggcgatcgccgaaaacggcaagctggtaggctttaacctgctggtgggcggcgggctgtccatcgaacacggcaacaagaagacctacgcgcgccaggccagcgaattcggctacattccgctcgagcatacgctggcggtggcggaagcggtggtgaccacgcagcgcgactggggcaaccgcaccgatcgcaagaacgccaaaaccaaatacacgctggagcgcgtcggggtggacgttttccgcgccgaagtggaaaagcgcgccggcatcaccttcgcgccgatccggccgtatgaattcaccggccgcggcgatcgcatcggttgggtgaagggcatcgacgatcaatggcacctgacgctgtttatcgagaacggccgcctgctggactatccggggcgcccgctgaagaccggcatggcggagatcgccaagatccataaaggcgacttccgtctgacggcgaaccaaaacgtgatcatcgccggcgtgccggaaagcgagaaggcgaagatcgaagccctggcgcgcgatcatggcctgatcgacgacgagatcagcgagcaacgcaagaactcgatggcctgcgtatcgttcccgacctgcccgttggcgatggcggaggccgagcgcttcctgccgcagttcgtcaccaaggtggaagggatcatgcatcggcacggggtgggcgacgagcatatcgtgctgcgcatcaccggctgcccgaacggctgcggccgcgcgctgctggcggagctggggctggtgggcaaggcggtcggccgctataacctgcatttgggcggcaaccgcgaaggcacgcgcattccgcgcatgtaccgcgagaacatcagcgaagacgagatcctgagcgagatcgacctgctggtggggcgctgggcgaaggagcgcaacgccggcgaaggcttcggcgacttcaccatccgcgcgggcatcgtcaaaccggtgctggatccggcgcgagatttctgggagtga

SEQ ID NO: 424711 - DNA, 735 bp, Serratia marcescens
atggctgaattcgatctggcggcgctgaacgcgttgcccaaatccgggcaggcgctggcattggcggtggtcaacggccaactggagaccctcagcgccgaacagcgcgttgcatgggcgctggagcatctgcccggcgagttcgtactctcgtccagtttcggcattcaggcggcggtatgcctgcacctggtgacgcgcatccggccggatatcccggtgatcctgaccgacaccggttacctgttcccggaaacctaccgctttatcgatcaactgaccgaccagctgaagctgaatctgcaggtgttccgcgccgaacagtctcccgcctggcaagaggcgcgctacggcaaactgtgggagcagggcgtggaagggattgagaagtacaaccagatcaacaaggtcgagccgatgaaccgcgcgctggagacgctgggggcgcagagctggttcgccggcctgcggcgcgagcagtccggcagccgcgcaaatctgccggtgctggcggtgcagcgcggggtgttcaagatcctgccgatcatcgactgggacaaccgcaagatttaccagtacctgaccgaacatgggctgagctatcacccgctgtgggagcagggctacctgtcggtaggcgatacccacaccacccagaagtgggagccgggcatgagcgaggaagagacgcgtttcttcggcctgaagcgcgagtgcggtctacacgaaggctaa

SEQ ID NO: 424712 - DNA, 1071 bp, Serratia marcescens
atgttttcccgtttttacctgaagaccagcctgctggccctcgcactcggcggcgtcttcagcgtttgtgccgcacagcccgcaaaagacgcgccaatgggccgtttcgccgccgaacagacccgccacatcgccacttacttccccggccgcatggcgggcagcccggccgaattgctcaccgccgactacctgaagcagcagttcagcaagatgggttatcaaagcgatattcgcagcgtcaacacgcgctatctctacaccagcaaagacggcaagaagaattggaacaacgtcaccgccagctcggtgatcgccgcccgcaacggcgacagcccgaaacaaatagtgattgtcgcccacttcgacacctacacgccgcagagcgacgaagacctggataacaacctcggcggcctgacgctgcagggcgtcgacgacaacgcctccggcatcggcgtgatgctggaactggcggagcgcctgaaaagcatccccaccgcctacggcctgcgcttcgtcgccaccagtgccgaagagatcggctcgctgggcgcacaaaactacctgcaacgcatgagcgcggaagagaaaagcaacaccgtgctggtgatcaacctcgacagcctgatcaccggcgatcgtctgtacttcaacgccgggcgcaacacgccgccgcaaatggcgaaacgctcccgcgatcgcgcgctggatatcgcccaccgctacggcatcgccgccgccagcaatccgggcagcgcccagcatccgaagggcaccggctgctgctccgatcaagaggtattcgacgccgcaggcatcccggtgctgtcagtggaggccaccaactggtcgctgggcgacaaggacggctaccagcagcgcgccgtcagcccgcacttcccgcagggcatcacctggcaccgcccgcagtatgacaacctgcagtacctggatcgctacctgccagggcggatcgacaaacgcagccgcgaaagcgtgcagatcctgctgccgctgatcaaagagctggcgcaggcgcacccgccgaaagcacagaagaaaaagtag

SEQ ID NO: 424713 - DNA, 1431 bp, Serratia marcescens
gtggactatctaccaatatttgccgacctgaaacaacgtccggtgctggtcgttggcggcggtgacgtggctgcgcgcaaagtcgatctgcttcagcgcgccggggctgaaatacggatagttgcgcagtcgctctcaccggaactggaacaacaacgtcagcaagggcaactgctctggctggggaaaacctttgacccgcaacagctggacgaggtgtttctggcgatcgccgccacggacgacaacgcgctgaatgccgcggtgttcgccgaggcggataaacgccgggtgttggccaacgtggtggacgatcagccgcgctgttcgttcatcttcccgtcgatcatcgatcgctcgccgctggtggtggcggtgtcgtccagcggccaggctccggtgctggcgcggttgctgcgcgaaaagctggaggcgttgctgcccgccagtttggggcagatggcgcaggtggcgggccgctggcgcggccaggccaaacagcggctggcctcgatcggcgaacgtcgtcgtttctgggagaaagccttcggcggccgtttcgccacgctggtggccaacggccagacggcgcaggcggagcggcagctggagcaggatttgcaaagcttcgctgcaggcgatgaaggcgcgcagggcgagatagccctggtgggcgccgggccaggcgacgtggggctgttgaccctgcgcgggctgcaggtgatgcagcaggcggacgtggtgctgtatgaccacctggtcagcggcgagatcctcgatctggtgcgccgcgacgccgagcgcatctgcgtgggcaagcgcgccggcgcgcactcagtgatccaggaagagaccaaccggctgctggtggagctggcgcagcagggcaaacgcgtggtgcgcctgaagggcggggatccgttcatctttggccgcggcggcgaagagctgcaggtggccgccgccgccggcattccgtttcaggtggtgccgggcgtcacggccgccgcgggggcgaccgcctacgccggcattccgctgacgcaccgcgaccacgcgcagagcgtgacctttatcaccggccactgccgccccgacggcgatggcctggactgggccgatctggcccgggcgcggcagacgctggctatctacatgggcaccatgaaggcggcggacatcagccaacgcctgatcgcccacggccgcgctgccgatacgccggtggcggtgatcagccgcggcacgcgcgccgatcagcaggtgcagatcggcacgctggatcaactggaacatctggcccaacgggcgccgctgccggcgctgctggtgattggcgaagtggtggaactgcaccatcaaatcgcctggttcgggcatcaatcgcagacggaaggggccgcgcgcccggccgtcgtgaatttggcatag

SEQ ID NO: 424714 - DNA, 909 bp, Serratia marcescens
atggacgaaaaacgactcactcatttgcggcaattggaggcggagagtatccatatcatccgtgaagtcgccgctgaattcgccaacccggtgatgctgtattccatcggtaaagactcttccgtgatgctgcatctggcgcgcaaggcgttcttccccggtacgttgccgttcccgctgctgcacgtcgataccggctggaagttccgcgaaatgtacgaattccgcgatcgcaccgcgaaggagtacggcttcgagctgctggtgcataaaaacccggaaggggtggcgatgggcatcaacccgttcgtgcacggcagcgccaagcataccgacatcatgaagaccgagggcctgaagcaggcgttgaacaagtatggtttcgacgccgccttcggcggtgcgcggcgcgacgaggagaaatcgcgcgccaaagagcgcatctattcgttccgcgatcgcttccaccgctgggatccgaaaaaccagcggccggagctgtggcacaactacaacggccagatcaacaaaggggagagcatccgcgtcttcccgctgtcgaactggaccgagctggatatctggcagtacatcttcctggaaaagatcgacatcgtgccgctgtacctggcgaaacctcgcccggtggtggagcgcgacggcatgctgatgatggtggacgacgatcgcatcgatctgcagccgggtgaagtgatcagccagcgcatggtgcgtttccgcactctggggtgctggccgctgaccggcgcggtggactcgcaggcgcaaaccctgccggagatcatcgaagagatgctggtctccaccaccagtgaacgccaggggcggatgatcgatcgcgatcagtccggctcgatggagctgaaaaagcgtcaagggtatttctaa

SEQ ID NO: 424715 - DNA, 1428 bp, Serratia marcescens
atgaacaacgcaatcgcacaacaaatagccgaccagggcggcgtcgaatcctatctgcacgcgcagcagcacaagagcctgctgcgctttctgacctgcggcagcgtcgatgacggcaaaagcaccctgattggccgcctgctgcacgatacccgccagatctacgaggatcagctgtcgacgctgcacagcgacagcaaacgcatcggcacccagggcgagaagctcgatctggcgctgctggtggacggcctgcaagccgagcgcgagcagggcatcaccatcgacgtggcctatcgctatttctcgaccgaaaaacgcaaatttatcatcgccgataccccggggcatgagcagtacacccgcaacatggccaccggtgcctccacctgcgatctggcgatcctgttgatcgacgcgcgcaaaggggtattggaccagactcgccgccacagctttatcgcgaccctgctgggcattcgccacctagtggtggcggtgaacaagatggatctggtggactaccaggaagcggtgttcgagcagttcaaacaggattacctgaccttcgcccagcagctgccaggcgatctggacatcaaattcgtaccgttgtcggcgctggacggcgacaacgtggcgagcgaaagcgcccatatgccgtggtacagcggcccgacgctgctggaagtgctggagagcgtggacgtggtcagcgagcgagaaaaccagccgctgcgcttcccggtgcagtacgtcaaccgcccgaacctcgattttcgcggctatgccggcacgctgtccgccggcgtggtgcgggtggggcaacgggtcaaggtgctgccttccggcgtggagtccagcgtggcgcgcatcgtgaccttcgacggcgatctgcaagaggcggtgccgggcgaggcgattacgctggtgctgaaggatgaggtggacatcagccgcggcgatctgctggtcgacgccggcgaaagcctgcaggcggcgcagagcgcgctggtggacgtggtatggatggccgagcagccgctggtgccgggccagagctacgacatcaagatcgccggtaaaaagacccgcgcccgcgtggagagtatccgccatcaggtggagatcaatacgctggcgcaacactcggccgacacgttgccgcttaacggcatcggcctggtggagctgaccttcgacgagccgttgatgctggacagctatcagagcaatcacgacaccggcgggctgatctttatcgatcgcatgagcaacgtcacggtgggtgccggtctggtacgcgaaacgctgcaggccgcatcggcggcgcgcggcgagttcagcactttcgagctggagttgaatgcgctggtgcgcaagcacttcccgcactggggcgcacgcgatctgctcggtggccgataa

SEQ ID NO: 424716 - DNA, 690 bp, Serratia marcescens
atgcgctggtgcgcaagcacttcccgcactggggcgcacgcgatctgctcggtggccgataaggtggccgctgaactgagggcgaccgggccggacgatgagaacgtggtttggcatccgcacgcggtgacgcgcgcggatcgcgaagcgcgcaacggccaccgcggcgcggtgctgtggtttaccgggctgtccggctcgggcaaatccaccgtcgccggcgcgctggagcaggcgctgcacgggctcggcgtcagcacctatctgttggacggcgataacgtgcgccacggcctgtgccgcgatctcggcttctcggacgaagatcggcgcgagaacatccgccgggtgggggaagtggccaaactgatggtggatgctgggctggtggtgctgaccgcgttcatttcgccgcaccgcgccgagcggcagatggtgcgcgaaatgctcggcgacgatcgctttatcgaagtgttcgtcgacacgccgttggcgatctgcgaggcgcgcgatccgaagggattgtataaaaaagcgcgcgccggcgagctgcgcaatttcaccggcatcgacgcggtttacgaggcgccgcagcagccggaaatccacctcgatggccaacaattggtaacaaatttgattgcgcaattgttagacgtgttgcgtggtcaggctattatcaaaccctga

SEQ ID NO: 424717 - DNA, 327 bp, Serratia marcescens
atgcaaaatgtcacgcctatcttgatcgactccaagcagtcaaaacaggagagagaggagccttcttattctttcctgggcggcgtcagcggctttgttttctactggctggcgttcgcgttgccgttcctggtttacggttccaacacgctgtttttcctgctctatacctggccgttcttcctggcgctgatgccgctgtcggtgctgatcggcatcaccctcagcatgctgttgcgcggtcgtctgatcctgacgctgctgctgaccggcaccatcgtgctgtgcctgttctggctggtgttcagcttcctgaccgggtggtga

SEQ ID NO: 424718 - DNA, 723 bp, Serratia marcescens
gtgattcgcgtacataacctgcaaaaacagttcggcgagagccacgtgctgcgcggcatttcctgccggatcgccgccaacgaagtggtgtgcgtcatcggcccttccggttcgggtaaaagcaccttcctgcgctgcatcaacgcgctggaaacgctctccggcggcgaaatcgaggtcaacggcttcgccgtccacgatcaaaaaaccgacctgaacaagatgcgtgaaagcgtgggtatggtgttccagcgcttcaacctgttcccgcacatgacggtgttggaaaacatcatcatggcgccggtgagcgtgaagaaacggccgcgcgccgaagccatcgcgcaagccgaacagctgctgcacaaggtcgggctgctcgacaagatagacgcctaccccaacagcctctccggcggccagcagcagcgggtggccatcgcccgcgcgctggcgatggagccgaagatcatgctgtttgacgaacccacctccgcgctcgatccggagctggtgggtgaagtgttggcggtgatgaagtccctggcccacgagggcatgaccatggtggtggtaacgcatgaaatgggctttgcccgcgaggtggccgatcgggtgctgtttatcgatcaggggatcattcaggaggaaggtgcgccgcagcagatcttcagccatccggccaatccgcgcacacaggcgtttctgagcaaagttttgtaa

SEQ ID NO: 424719 - DNA, 765 bp, Serratia marcescens
ttgaacttccgctgggagatcatccaggaatacgcgccgctgtttatggaaggcgcctggatgaccatcaaatgcaccattatctgcgtactgctcggcaccacctggggattgatcctcgggctgggccgtttggcgcaagcgccgcacggcatctggaaacccatcctgcattacggcgttcagtggccggtgcgcatttacatcagcgcctttcgcggcacgccgctgttcgtgcagatcatggtggtgcacttcgcgctggtgccgctgttcatcaacccgcgcgacggcctgctggtcaccagcggcctgatgagcgtcgatttcgcccgcgcgctgcgcgccgactacggtgcctttctctcctgcgtagtggcgatcacgctcaacgccggcgcctatgtgtcggagatcttccgcgccgggatccagtcgattgatcgcggccagatggaggcctcgcgctcgctgggcatgagctacggcaagaccatgcgccaggtgatcctgccgcaggccttccgccgcatgctgccgccgctgggcaacaacgccatcgctatcgtcaaggattcgtcgctggcctccgccatcggcctggcggatctggcctatgccgcccgtaccgtctccggcgcctacgccacctattgggagccctacctgaccatttcgctggtctattgggtcatcaccttcctgctctcgctgctggtgcaacacatggaaaagaggttcggtaaaagtgattcgcgtacataa

SEQ ID NO: 424720 - DNA, 771 bp, Serratia marcescens
atgttaaaacgtttagttctgatcggcgcctgcctggccgccaccttctccaccgccgcgttggcggctgaatctacctacgtcgtcggttccggcggcacctatcggccgttcgaatttgaaaacagccaaaaacagctggaaggtttcgacatcgacatcatcaaagcggtggccaaggccgaaggcttccaaatcaagctgatcaatacgccgtgggaagggatcttcgccaccttgaattccggcgatcgcgacatcatcatttccggcatcaccatcaccgacaaacgcaagcaaatggttgatttctctgcgccttatttcccggccgagcaggctatcgtggtgccgcaggactcgacggtagactccatcgccgcgctgaaagcgctgaaggtcggcgtggtgaactccagcaccggcgacatcgtggtgtccgacgtgctgggcaaaaacagcaccgccatcaagcgcttcgacaataccccgctgatgctgcaggagctgtatgaagacggcatcggcgcggcggtcggcgacgtcggcgtggccaagttctatatcaaaacccaccctgaaaaagccttcaagctggtgcccgacgccaagttcgagcgccagtatttcggcatcgccgtcgccaaaggcaacgacgcactgcgtaacaagatcaacgccggcctgaagaagatcgtcgccgacggcacctacgccaagatttaccaaacctggttcgacagcaacgtaccgacgctgccggcggaataa

SEQ ID NO: 424721 - DNA, 357 bp, Serratia marcescens
ttgtgggatgattggtcggtttttcagggggcggagatgggaaaacttacgctgctattgctggcattgctcggttggttacagtattcactgtggctgggcaaaaatggtattcacgattacgtgcgggtcaatgaagacgttgcggtccagcagggcaacaacgccaagttgaaagcgcgtaacgatcagctgtttgccgaaatcgacgatttgaacggcggacaggaagcgatcgaagagcgtgcgcgtaatgagctgggcatgatcaagcccggtgagactttctatcgtctggttcctgaccaatccagacgcaacgcggcgtcttcctcgcaaaacaacgcacaaaaataa

SEQ ID NO: 424722 - DNA, 708 bp, Serratia marcescens
atgaatcactccgcaggcacctttccctcggtgattgccgtcctgcccgctgccggtatcggcagccgcatgcaggcggaatgcccgaagcaatatttaactatcggccggcatagcatcgttgaacacgccatccatgccctgttgcgccacccgcgtatcgagcgggtgatcgtggcgatcggccccgaagatcgccagttcgaacagttgccgatcgcccaggatccgcgggtgatcgtcaccgagggcggcaagcagcgcgcggattcggtgatggccgggctgaatctggcgggcgatgcggactgggtgctggtgcacgacgccgcgcgcccctgcctgcacgccgacgatctcgagcgcctgctggcgattaccgcacacagtaaggtcggcggcattctcgccgcgccggtgcgcgacaccatgaaacgcgccgaacccggccgcgaaaccatcgcccataccgtcgatcggcaggatctgtggcacgcgctgacgccgcagctgtttccgctgccgttgctcaagcagtgcctgcagcgcgcgctggatgaaggcgcgaacgtcaccgacgaagcctcggcgctggagcattgcggttaccatccgctgctgatcgccggccgggcggacaacattaaagtaacgcggccggaggatttggcgctggcggcgttctatttgactcagttggacaattaa

SEQ ID NO: 424723 - DNA, 474 bp, Serratia marcescens
atgcgtatcggtcacggttttgacgtacataaattcggcggcgaaggcccgttggtgatcggcggtgttcgcatcccttacgacaaaggtttgctggcccactccgacggtgacgtcgcgctgcacgccgcgaccgatgccctgctgggcgcggcggcgctgggcgatatcggcaagctgttccccgataccgatccggcgttcaaaggcgccgacagccgcgaactgctgcgcgaagcctggaaacgcattcgcgccaaagggtatcgcctcggtaacctcgatatcaccattatcgcccaggcgccgaaaatggcgccgcacatcccgcagatgcgcgttttcctggcggaagatctgcagtgccatatggatgacgtcaacgtgaaggccaccaccaccgagcagctcggcttcaccgggcgcggtgagggcatcgcctgcgaagcggttgccttgctgatcaaggaataa

SEQ ID NO: 424724 - DNA, 1047 bp, Serratia marcescens
atggatatggcgaatctgacctggctgcatggccggccgcagagcaccggggtgttgaaagccaatccggaagatttcgtggtggtggaagatctgggttttgcaccggacggtgaaggcgagcacgtgctggtgaacatccgcaaaaacggctgcaatacccagttcgtggccgactatttggcgcgcttcgccggtattcacgcccgttccgtcagctatgccggcttgaaggatcgccacgcggtgaccgaacagtggttctgcctgcatatgccgggcaaggacacgccggatttctcccggtttgcgctggaaggctgcgaggtgctctcgtatgcccgccacctgcgtaaaatgcgcatcggcaacctgaagggcaaccactttacgctggtgctgcgccagatttcagatcgtcaggacgttgagcgccgtctgcaggccatcgccgcgcagggcgtgccgaactacttcggcagccagcgtttcggccgtggcggcaacaacctggtgatggcgcgccgctgggcgaatgatgaaattcgcgtcaaagagcgcagcaagcgcagtttttacctctctgccagccgcagcgcgctgtttaatctggtcgcgagcaggcgcctggcggacggcctgcagcgcaccgtgctggaaggtgacgccctgcagctgagcggccgcggcagctggtttgtcgccaaagccgatgagctggagacgttgcaacagcgcttggatgccggtgagctggttgtcaccgcgacgttgccgggcgacggcgagccgggcaccgccggcagcgcgttggcatttgaacaacaatgcttggcggagcagccggaattgcttacgcttttaaagcgcgagcgtgtcgaccccgctcgtcgggccctgctgctgcagccgcaaaatatgcggtggagctggtgggatgacgttaccgtggaactgcgcttctggctgccggcaggcagcttcgccaccagcgtggttcgcgagatcatgcagcaggatgacagcgatgcggatattgctgagtaa

SEQ ID NO: 424725 - DNA, 762 bp, Serratia marcescens
atgcggatattgctgagtaacgatgacggcgtcagcgctccgggcattcaggtgctggcggcggcgctgcgggaattcgccgaagtgcaggttgtggcgccggatcgtaaccgcagcggctcttccaatgccttaacgctggagtcgccgctgcgcacgcagacgctggccaacggggatattgcggtgctgcaggggacgccgaccgactgcgtttaccttggcgtcaacgccttgatgcgtccggcgccggatatcgtggtctccggcatcaacgccgggccgaatttaggcgacgacgtcatctattccggcaccgtcgcggcggcgatggagggccgacacctggggctgccggcgttggcggtgtcgctgaacggccaccggcactacgcgaccgccgccgtcattacctgccgcatcctgcgcgcgctgcagcgcgaaccgttgcgaaccggaaaaatcctgaatatcaacgtaccggatctgccgctggcggagattaaaggcctgcgcgtgacccgctgcggcagccgccatccagccgacaaggtcttctgccagcaggatccgcgcggacaaaatatctactggatcgggccgcctggtgataaatttgatgccgggccggataccgactttgcggcggtggaacaaggctatgtggcgataacgccgctgcaggtggatttaaccgcctacgcggcgcaagaagtcgtgaaaacatggttaaccaaagcagaggttagcggggaatggtga

SEQ ID NO: 424726 - DNA, 627 bp, Serratia marcescens
atggtgaacaagcgcatgcaaacattgctgacgcagctgcggcagcaggggatccgggacgaaaagctgctgcgggcgatcgaggcggtgccgcgcgagcgttttgtcgacgaagcgctggatcataaggcctacgaaaacaccgcattgccgatcggctccggccagaccatttcccagccttatatggtggcgcggatgaccgaactgctgaatctgacgcccacctcgcgggtgctggagatcggcaccggttccggctatcagaccgccatcctggcgcatctggtgcaacacgtttgttccgtcgaacgcatcaaggggttgcagtggcaggccaagcgccgcctgaagcagctcgatctccacaatgtttccacccgccacggcgatggctggcagggctgggcgtcgcgcggcccgttcgatgcgatcatcgtcactgccgcgccgccggagatcccgcaggcgctggtggaacagttggacgacggcggtattctggtgttgccggtgggggagcaggctcaaactctcaaacgcattcagcgtcatggcaacgagttcgttgtcgatgcggtagaagcggtgcgctttgtgccactggtgaaaggcgaattggcctag

SEQ ID NO: 424727 - DNA, 999 bp, Serratia marcescens
atgattacgttacgccgggttgcggtgtgtacgatggtaagtttgtggttggcgggttgtacgaacaatgcctcaacgtcggcccctatcagcagcgtgggtggcggcggcgccgttccatccggcaataataatggcggggcgcagcaggccagtccagagggccgcattgtttataaccgcagttataacgccattcctaaagggagttacagcggcggcgacacctatacggtcaagcgcggcgacacgctgttttatattgcctggatcaccggcaacgatttccgcgacctggcgcagcgcaacaatattcccgagccatacagcctgaatgttggccaaaccattcagcttggtaatggttccgccaacggcggcggcggtatgttggcgacgactgacgcgacccaaggcggcgttccgaagccaccttccacctcccagatccagacggcaacggttgattctcaatcaactaacgcgtattctgaaaactcgggtaaacagaatgtaggtaagatgttacctgcagcaggggccgcagcggttgggaccgcggctgcgcctgttaccgcgccggaagccgctccaccagtgagcagcaccgtcagcaacagcgctccggtcagtacctggagatggccgactgacggtaaggttattgataacttttcctcatcagaaggtgggaataagggtgtcgatatcgccggttcccgtgggcagccgatcttcgctaccgccgatggccgcgtagtgtatgcaggcaacgctttacggggttacggtaatctaatcatcatcaaacataatgatgattacctgagcgcctacgctcataacgacacaatgctggtccgggaacaacaagaagtgaaggcgggtcaaaaaatagccaccatgggtagcaccggtaccagttcagtacgtttgcattttgaaattcgttacaaggggaaatccgtaaacccgctgcgttatcttccgcagcgatag

SEQ ID NO: 424728 - DNA, 999 bp, Serratia marcescens
atgagccaaaatacgctgaaagttaacgagttacatgatgatgcggatttcgacgagaatggagctgaggccgagtcgtttgatgaaaaagcgctggtagaagaagagaccagcgagaacgatttagcggaagaagagctgttgtctcaaggcgttacgcaacgcgtattggatgcgacgcagctctatctgggtgagatcggttattcacctctgctgaccgcagaggaagaagtctattttgcgcggcgtgctctgcgcggtgacgtgccgtcccgccgccgcatgattgaaagcaacctgcggctggtggtgaaaatcgcccgccgctacagcaaccgcggtctggcactgctggatctgatcgaagagggtaacctcggtctgattcgcgcagtggaaaaattcgacccggaacgcggtttccgcttctccacttacgcaacctggtggatccgtcagacgattgaacgggcgatcatgaaccaaacccgtaccattcgtttgcctatccatatcgtcaaagaactgaatgtctatctgcgcaccgcgcgcgagctttcccacaagctggatcatgaaccgagcgctgaagagattgccgagcaactcgacaagccggtggatgacgtcagccgcatgctgcgtctgaatgagcgcatcacctcggtggatacgccgctgggcggggattcggagaaagcgctgctggacattctggccgacgagaaggacaacgggcccgaagacaccacgcaagacgacgatatgaagcaaagcatcgtcaaatggctgttcgaactgaacgccaaacagcgtgaagtgttggcgcgtcgtttcggcctgctgggctatgaagcggcgacgctggaagacgtaggccgggagattggcctgacgcgcgagcgcgtccgtcagattcaggttgaaggtctgcgccgtctgcgtgagattctgcagatgcagggcctgagcattgaggcgctgttccgcgaataa

SEQ ID NO: 424729 - DNA, 2556 bp, Serratia marcescens
atgaatagcaccgataaactcgattcgcatacgccgatgatgcagcagtacctgcgcctcaaggcccagcatcctgaaatcctgctgttttaccgcatgggcgacttctacgagctgttttacgacgacgccaagcgcgcttcccagctgctggatatctcgctgaccaaacgcggcgcctcggcgggtgaaccgatcccgatggccggcgtgccgcaccacgcggtagagaactacctggccaagctggtgcagctcggcgagtccgtcgccatctgcgagcagatcggcgatccggccaccagtaaagggccggtcgagcgcaaagtggtgcgtatcgtcacgcccggcaccatcaccgacgaagcgctgctgcaagagcgccaggacaacctgctggcggcgatctggcaggacgcgcgcggcttcggctacgccacgctggacgtgagctccggccgctttcgcgtcgccgagccgcaggatctggaaaccatggccgccgagctgcagcgcaccaatccggccgagctgctctacccggaaaccttcgaacaaatggcgctgatcgaacagcgccacggcctgcgccgccgcccgctgtgggaattcgagcttgagaccgcgcgtcagcagctcaacctgcagttcggcacccgcgatttgaccggtttcggcgtcgaacaggcgcaccaggcgctgcgcgccgccggctgcctgctgcagtacgtcaaagatactcagcgcacttcgctgccgcacattcgcggcatcaccatggagcgccagcaggacggcatcatcatggacgccgccacccgccgcaacctggaactgacgcagagcctgtccggcggcagcgacaacacgctggcggcgatcctcgatcgcacggtcacgccgatgggcagccgcatgctgaaacgctggctgcacatgccgacccgcgatatcaaggttctcaccgcccgccaacaggcgatcggcgcattgcaggagctgttcaccgatctgcagccttcactgcgtcaggtgggcgatcaggagcgaattttggcgcgtctggcgctgcgcaccgcccggccgcgcgatctggcgcgcatgcgccatgctttccagcaactgcccgacattcgcgcgctgctgcaagatgtggataccccgcacgtgcagcagctgctgtctcaggtgggccagttcgacgagctgcgcgagctgctggagcgcgcggtcattgaatccccgccggtgctggtgcgcgacggcggcgtgatcgcccccggttacaacagcgagctggacgagtggcgcgcactggccgacggcgccagcgattacctcgatcggctggagatccgcgagcgtgaaaagctggggctggatacgctcaaggtcggcttcaacggcgtacacggctactacattcaggtcagccgcggccaaagccacctggtgccgatccactatgtgcgccgtcagacgctgaaaaacgccgagcgctacatcatcccggaattgaaagagtacgaagacaaagtgctcacctccaagggcaaggcgctggcgatcgagaaaagcctgtacgacgagctgttcgatctgctgctgccgcacctggcggagctgcagcaaagcgccgccgcactggccgagctggacgtgctggccaacctggccgagcgcgccgataccctgaactacgcttgcccgaccatgagcgagcagccggggatccgcattaccgaaggccgtcacccggtggtggagcaggtgctgagcgagccgtttatctccaacccgctcaccctgtcgccacagcgccgtatgctgatcattaccggcccgaacatgggcggtaaaagcacttatatgcggcaaacggcgctgatcgtgctgatggcgcacatcggcagttacgtgccggccaccaaggccaccatcggcccggtggatcgcatcttcacccgcgtcggcgcggcggacgatctggcttccggccgctccaccttcatggtggaaatgaccgaaaccgccaacatcctgcacaacgccaccgagcatagcctggtgttgatggatgaaatcggccgcggcacctccacctacgacggcctgtcgctggcctgggcctgcgccgagaacctggccaaccgcatcaaggcgatgacgctgttcgccacccactacttcgagctgacgaccctgccggagaaaatggaaggcgtggtcaacgtgcatctggacgcgctcgaacatggcgataccatcgccttcatgcacagcgtgcaggacggtgccgccagcaaaagctatggcctggcggtcgccgcattggccggcgtaccgcgcgacgtcatcaagcgcgcccgccagaaactgcgcgagctggagtctatctccagccacaccgcctcgggcagcgtcgatgccacccagatgacgctgctgcaggaagaaacctcgccggcggttgaagccctggaggggcttgatccggattccctgtcgccgcgccaggcgctggaatggatctaccggctgaaaaatatggtgtag

SEQ ID NO: 424730 - DNA, 618 bp, Serratia marcescens
atgagccgataccatgtttccagcagcgaaggtcaatatgagaaagaatccggcgagcaagttctagccaataagctgggcatcaccgatagcgacgaactcgacggcgccgagttggtgttgctggagcagctctaccgttccgttttcgaacagcactttccattaggaagaatcaccgtcgagatgcttaagggatggcatcaccgctggttaggcaatatttatgcgtgggctggacaagcaagagccgtcaatatcagcaaaggaggcttcatgtttgccccttcgacgcgattgcccaaactactggacgatttcgaagtgaaatacctggcaagttacacaccttgctcagacatgagcgaagaacagctgatagaagcgatcgcgataatccatgttgaactgatactcatacacccttttagagaagggaatggccgtttgtcacggctgttggccgatgtgatggcggttcagggtgggcataaaccgttggattatcaaagctgggaacaaaacagagcccaatatatctcgtctattcactcgggtatgaacatgaactacgagccgatgaaacactgggtcaaccaagcactaagaaagtattag

SEQ ID NO: 424731 - DNA, 993 bp, Serratia marcescens
atggcatacgctgtgaccgcgcgagcggcgttattcaccctcgctactgcactcaccctcagcacgccggcgcaggccgccgtcgatgcacactgtacggaaagcagtatgacgctgccgcccggcgcgctttaccccaacggcatcgcccgcgcggcggacggcacgctgtatgtcggcctgatcaccagcggcaacgtgctgcgcaaacggccgggtaaagcgtgggaaacctttttccccggcgctgacacggtgttcgcctcaaacgcgctgcggctggacgaacggcgcgggctgctgtggggcaattcgccggacttcctctccggcggcaaaacgcgcgccaaccgcatctacgcgctgaacgtcgcggatggcacgctcaaccgcagcctggcgctgccggcgggagaaatgggcaacgatatcgtgctcggcgcagacggtacggtgtacgtgacggaaacccgcggcggcggcatcctgcgcctgcggccgggcgaagcggcattcagtacgctgtatcaggatccacgcttagcggcccctagcgggctgggcgccgccgggatcgtgctgctcgacgaccggctgctggctgtcgccaatttcggcaccggtaagctctacaccctcagctataacgattcaaagccgcagttgacggaaatgcagctgccgcgcctgattgaaaacccggacgggatggggttggcaccggacggcgcgctgatcgtgctggaaaacgggatccagagcggccaggggcggatcctgcggatcccgtctcccaaggcggcaggcatgcaccggattgaggtcttgcgcgaaggcatggaatcgccggtcaatctgactatcaccccacaaggctgcgccttcgtcagcgaatcgcgcattcgccaccgcctgctgcccggccatgaatccgaagtgcccgacagcttccgtctctatcaactgcccctgcccctcaccgccgcgcaataa

SEQ ID NO: 424732 - DNA, 972 bp, Serratia marcescens
atgaactacgttcggcttggcgacagcggcctgaaggtgtcccgcctctgcctgggcggcatgacctacggcgatccggcctggcgcccctgggtgctgaaggaggatgaagcgcgcccctttatccgcgaggcgctggaagcgggcatcaatttcttcgataccgccaacatttactccgacggagaaagcgaacgcattctcggccgcgcgctgaaggcgttcgcccgtcgagaagacgtggtgatcgccaccaaggcctactttccgatggacgcgcagccgaacagccgggggctgtcgcgcaagcacctgctgcacagcattgacgcctccttgcagcggttgggaacggattacctcgatctgttcgtgctgcaccgcttcgacaccgaaacgccgatcgaagaaactgccgacaccctcgatggcctggtgcgggcgggcaagatccgctatctcggcgcgtcttcactgcacgcctggcgcctgatgaaaatgctggcctttcaacgtcagcaccgcctggcgccgtttatttcgttgcaaagccaatacaacctggtgacgcgtgaagacgaagaggaactgatcccgctgtgcctggaggaaggtcttggcctgacgccctggtcgccgctggcccgcggcgtgctggccggctccggcagtggcggcacgctgcgcgccgccaccgacgagcaggctccccgttggtacggcggcagaaacgaggtcgaacgcaccgtcgctgcggtagcggaggtggcggccgcgcgcggcgttcccccggcgcaaatcgcgctggcctggctgttggccaaacccggcgtggcatcgccgctggtgggcatgtccaagccacaccatctgcaggatgcactggcggcgctagacctcaggctatcgccggaagacgtggccgcgctggaggcgccaatggcgcacgctgcccgccccgaacgttggtag

SEQ ID NO: 424733 - DNA, 801 bp, Serratia marcescens
atgattaatgctacagctccaactcatgaaacgccgcgccgtctggcggacaaagtcgtgctggtgagcggcggcggcacaggcatcggccgcgccgccgcgctggcctatgcccgcgaaggcgccaaagtggcgctggccggccgacgcgcggcggaaatcgaagccacggcgcgcgacatcgcgctggctggcggcgacgccctgcccatcgtggccgacgtctcccaggaagacgatatccgtaggttgctcgccacggtgaccgcccactacggccggctcgacgtcgccttcaacaacgccggcatcatcggcaacttcgctcccatcaccgaacagagcagcgaagattttgaccgggtgatcgccattaacctcagaggcgtctggctggcgatgaaatacgagattgaaaccttcctggctcagcgctcgggcggcgtgatcgttaacacttcctcctggctgacccacggcgcgctggccggttcatccagctactccgccagcaaaggcgcgctcgatgcgatgatccgcgcggtggcgctcgaatacagcggccagggcatccgtgtcaacaacatcaaccccggcatcatcgacacgccgatggcgcgcggcagcgtggccaacagcgcggcgttcgcgccctttatcgcccacacgcccgccggccgcctgggcgaatcggaagacatcggcgatgtggcgctgtggctggcgacggacgaagcccgcttcatcaccggccaaagcctgctggtggacggcggttacaccatcgccggcatgcgctga

SEQ ID NO: 424734 - DNA, 894 bp, Serratia marcescens
atgaagaaacccgaattgtccggcctggcggccttcgtggctatcgccagtgaacgcagcttccgccgcgccgccgcccgattgggcgtgacgccgccgacgctgacccacaccctgcgcgaactggaagcgcaggtgggcattcgcctgctgaaccgcaccacccgcaacgtttcgccgacggaggccggtgagcatctgttggcacagctggtgccggcctttaccgacatcgacgccgcgctggagagcctgaatgcgtttcgcgaagggccgcgcggcctggtgcgcatcaacgcgccgcgttcggcgatcgatctcgccatcgtgccgcatctggggcggttggccagcgaatatcccggcattacgctggaggtggtggcggacgaagggttcgccaacatcgtcgagcaaggctttgacgccggtattcggctcggcgaggatctgcacaacgatatgcgcgcggtgcgtctgacgccggatctgcgttttgccatcgtcgccacgccgggctattttcaacggcacggcgaaccgatgcacccgcaggatttgctgcagcaccgctgcatcggttggcgcaaggcctcttcgggcgagcgctacaagtgggcgtttcagcagggcgagcagcgatttaccgtggcggttaacagctcgctgatcgtggatgacgccaggctgctgctgcaggcggcgctggcgcacgtcggcatcgccttcgccatcgagcaggaggtggaagatcatcttgcgagcgggcggctgcggcgagtgttggccgactggtgcgcgccgtttcccggtttttacctctattaccccaaccgcaggaaccattccgtggcgctggccacggtgatcgagttgctgcgtctgcccacctaa

SEQ ID NO: 424735 - DNA, 318 bp, Serratia marcescens
atggaaaagaaaaaaatctatctgttttgttctgccggtatgtccacttccctgttggtttcaaaaatgaaggcgcaggccgagaaatacgaagtgccggtgatcatcgccgcctacccggaagcgctggctgcggagaaaggcgttgaagcggatctgatcctgctggggccgcagattgcctacaccttgccggaagtgcaaaaacagctgcccaacaaacccgttgaagtcatcgatccgctgctgtacggcaaggtcgatgggctgggcgtgctgaaggccgcggtggccgccatcaagaaagccaaccaataa

SEQ ID NO: 424736 - DNA, 1362 bp, Serratia marcescens
gtgaataccctcattgcctcgctcgagaaggttatcctgcctttcgccgtaaaaatcggcaagcagccccacgtcaacgccatcaagaacggctttatccgcctgatgccgctgaccttgaccggggcgatgttcgtgttgatcaacaacgtgttcctaagcttcggcgaaggatcgttcttctattcgctgggcgtgcgcctggatgcctccaccatcgagacgctcaatagcctgaagagcatcggcggcagcgtgtacaacggcacgctggggatcatgtccctgatgacgccgttctttatcagcatggcgttggccgaagagcgcaaggtcgatccgctcgcctcggcgctgctggcggtggcggcctttatgaccgtcacgccgttcaacgtcggcgaggcctatgcggtgggcgccaactggctgggcggcgccaacatcatttccggtatggtgatcgggctggtggtggccgagatgtttgctttcatcgtgcggcgcaactgggtgatcagcctgccggacagcgtgccggcttcggtgtcgcgctccttctcggcgctgatccccggtttcatcatcctctccatcatggggctggtggcgttcgcgctggcgcactggggcaccaacttccaccagatcatcatggacggcatttcggcaccgctggccaagatgggcagcgtggtgggctgggtgtacgtgctgttctcctcgctgctgtggttctttggggtgcacggctccatggcgctggcggcgctggacagcggcatcatgacgccgttcgcgctggaaaacgtggagctgtacaacaaatacggttcggtcgaagcggcggtggccgccgggaaagagttccacatgtgggcgaagccgttcgtcgactcctacatttacctcggcggcaccggctcgacgctgggcctgatcatcgccatcttcatcgcctcgcgccgcgaggattaccgccaggtcgccaagctggcgacgccgtccggcatttttcagatcaacgaaccgattctgttcggcctgccggtgatcatgaacccggtgatgttcattccgttcatcctggtgcagccggtgctgaccattatcacctcgctggcttattactccgggctgatcccgcctatcaccaacatcgcgccctggaccatgccggtcggcctgggggcgttcttcaacaccaacggcagcatcatggccatgttgttgagcctgtttaacctggcggtcgccaccgtgatttatctgccgttcgtggcgatctccaacaaggcgcagagccagatcgacgcggcgacggaaagcgaagaagacatcgccaaggcgctgaaattctaa

SEQ ID NO: 424737 - DNA, 1386 bp, Serratia marcescens
atggaatatcaatttgccgacgggttctggtgggggagcgccacctccgcgccgcagtctgaaggggcggccgcgcgcgacggcaagagccgcaacatcttcgactattggtacgagatcgcgcccgagcgctttcacgatcgggtggggccggccgaggcctcgaccttttacgaccatttccgcgccgatatcgggctgctcaaaacgctgggccacaataccttcagaacgtctatctcgtggtcgcggctgatcccggacggtgacggcgaggtgaacccgcaggcggtggcgttctataacgcgatgatcgacgagctgctggcgcagggcatcaccccgtttatcaatctctaccacttcgatatgccgctgtgcatgcagcagcgcggcggctgggaaagccgggcggtggtcgaagcctatgcgcgttacgccgatatctgcttcggcctgtttggcgatcgggtcacccactggttcaccttcaacgagccgatcgtgccggtggaggccggttacctgaatgacctgcattacccttgcgtggtggacttcaaacgggcggtcaccgtggcgtatcacagcgtactggcgcacgccatggcggtgcagcgtttcagagcgcgggagctgccggggagcatcggcatcattctgaatctgagcccgacctatccatgttccgacgcgccggaggatcggcaggccgcgcacgacgccgatctgctgctcaaccgcagtttcctcgatccggtcgccaaagggcgttatccggcggcgttgctgcagctgctggagcggcatgggctgatgccccactgcgagccgcaggatgcgccgctgattgaaggcggcgtggtggacatcctcggcgtcaactattaccaaccgcgcagggtgcaggcgaaagaggggcgtcgtgccgaggggccgatcgcatcgccggaggatttgttcagttactatgcaatgccgggccgcaaaatcaatccgcaccgcggctgggagatctacgaaaaggggctgtacgacatcctgatggatctgaaagagaactacggcaacctgccttgttatatttcggaaaacggcatgggcgttgagggcgaagaggcgtttatcggcgtcgatgggcgggtggaggacgattaccgcatcgactttattcgcgagcacctgaagtggctgcaccgcgcgctggcggaaggctcgcagtgcaaaggctatcatctgtggacctttatcgactgctggtcctggctgaacgcctacaagaatcgttatgggctggtgcggctggatcgggcggatcagcgccgcaccatcaagaaaagcggctactggtttgccgaggcggccagacgcaacggatttgactaa

SEQ ID NO: 424738 - DNA, 849 bp, Serratia marcescens
gtgtccgacaaccgaatttcgctgagtgccaacgacgtgaagctgattcgcgagcaggatttttttaactgcaaagattttcacctgtttatctacaacaaggtggaaagcgccaccgggctgcatcagcacgactattacgagttcaccatcgtgctgagcggcaaatgctatcaggagatcaacggcaagcgggtgctgctggagcgcggggatttcgtctttatccccatcggctcctaccaccagagcttttacgagttcggcgcgacgaaaatcttcaacgtggcggtcagcaaagcgttctttgaagagcactatttgcagcagctgccgcgctgcttcgtcgcctcgcaggcctacagcctgagaaacgagtttttggcctatatcgaatcggtggtgagttcgccgcagtttcgcgaggacgacttcgccgaatttctcgaaacgctgaccttctatgtgatcagccgtattcgtcaccacaaagaagaaaacgacggcggcgatgatatcccgcagtggctgaagaacaccctggccggcatgcatgacaaggcgatgttcggcgaaagggcgttggctaacatggtggcgctgtcggggaaaacccaggaatatctgacccgggcgatgcggcgttactaccacaagacgccgatgcaggtgatcaatgagatccgcatcaacttcgccaagacgcagctggaggtcaccaactattcggtttccgatatcgctttcgattccggctatggcgatgtcagcctgttcattaaaaacttcaagcggctcaccgatgtgaccccaggcaactaccgaaaaaagtgctacggccctctttag

SEQ ID NO: 424739 - DNA, 762 bp, Serratia marcescens
atggaaaaactactgatcgtgaatgccgatgacttcggcctgagcaagggacaaaactacggtgttatcgaggcgtatcagcatggcgtcgtttcctctaccacggcgatggtgaacggcggcggcgcacagcacgcggcggcgctcagccggcaatatccggggttaccgatcgggctgcatttcgttttgacccatggcaggccgctgggcgccatgccttcgctggtcaacgagcatggcgaattgggtaaatggctgtggcgccgcgccgaggccggcgagctgcagctggacgagatccaggaggagctgcagcgccagttcacacggtttgtgacgctgttcggcaggccgccgacgcacatcgacagccaccaccatgtacatatgcagccgcagatttacccgctggtggaggcgtttgcgcaggcgcagggtctgccgctgcgcctcgatcgtgaagaggcgaaacggcgcgatattgcgttgcagacgccctgcagcaccgacgcgtttgacgcgggattctacggcgaaacgatttccgaagccttgttcctgcagcggttggcgcgcgctgacgagctgggcgccgagtcattggaaatgatgtgccacccggcgttcctcgacgcgacgatcctgcagagcaaatactgccacccgcgcctcgtcgagctggatgtgttgaccgcgccgacgctgaaagcggcgatcgccgaacgcggttttctgctgggctctttcctggatctgtag

SEQ ID NO: 424740 - DNA, 1380 bp, Serratia marcescens
gtgaaaaaaacgttgggcgtattcttgccgttgtacaccaccaccctgctgctgctgttgggctcgggcctgctcaccacctacgtctcgctgcggctggcctccatccacgtcagcagcgcgctgatcggcgccatcatcgccgccaactacatcgggttggtgatcggcggcaaggtcggccactttctcatcgcccgcgtcgggcatatccgcgcctacgtagcctgcgccggcatcattaccgccgcggtgctggggcacggcctgacggcattcattcccgcctgggttgcgctgcgcctggtgatagggctgtgcatgatgtgtcagttcatggtgctggaaagctggctgaacgaccaggcggaatccaaccagcgcggcatggtgttcggtttctatatggcggcgacctatctcggcatgtcgctgggccagatcgtgctgatgctgcaaagcaatctgggcatcgccacgctgctggtgatcgcactgtgcttcgcgctctgcctggtgccgatcgctctcaccacccgcaccaatgcgcgccacatgtcgccggcgccgatggaactgcgttactttgtcggcgccattcccaaggtgctggccaccacgctggtgatcggcatggtggtaggttcgttttacggcctggcgccggtctacgccagcctgcaatccttaaccacgcagcaaaccggcctgttcatggcgctggccatcttcgccgggctggtggcgcaattcccgctcagttggctgtcagatcgctataaccgccccttgctgatgcgcctcaacgccatttttctgatcgtggcggcgctgccgctggcgctgctgccgcacatcgatttcccgctgctgctggcggtggggttcgtcgtcagcatgctgcagtttacgctctacccgctggtggtggcattggccaacgatctgatcgagccggagcgccgcgtctcgctggccgcctgcctgctgatggcgttcggcgtcggcgccagcatcgggccgctggcggtcggcgcgctgatcgagccgcttggcggcaatatcctgtacgccttcttcgccctgtgcggcgtgctgctggcggccctcagccgcacggcgaaagcggaggaaccgcagctggcgcaggacgcgccggtgccgcacattccgctgccggacagcctcgccagctcgccgctgtcgccggcgctcaatccgacctttgatgagcagatcattcacgacaccatgccgccgccggaagcggcgcccgatgtcgacgagccgcagcctgaagaacaggaaacggagcacttgcctcagggcgccgatccgcaagaggacaccggcttgaaaaaggcgcacgccatgctgtaa

SEQ ID NO: 424741 - DNA, 489 bp, Serratia marcescens
atgagtgaaaaccaactgcgccggctcagcgtgctggcgggggaaaaactgaaggctcagggccgctggatcacctgcgcggaatcctgcaccggcggcggcatcgccaaggccattaccgatatcgcggggagctccgcctatttcgatcgcggtttcgtcacctacagcaatgcggcgaagcacgacctgctgggggtgagcgaagccacgttggcggcgcacggcgcggtcagcgaagaggtggtgcgcgagatggcgataggggcgctgcgtgcggcgcgggccgatctggcgctctcggtaagcggcatcgccggcccggacggcggcagcgcggaaaagccggtcggcaccgtgtggttcggcttcgccggcagcgatggccgggggctgtcgcgcaagatgcaattcgagggcgatcgcgatgcggtgcggctgcaggcgacgattttcgcgctgcaaaccgccatcgacgaatttttgtaa

SEQ ID NO: 424742 - DNA, 1065 bp, Serratia marcescens
atggctattgatgagaacaagcaaaaggcgttagctgcggcactgggccagattgagaaacagttcggcaaaggctccatcatgcgcctgggtgaagaccgctccatggacgtggaaacgatctccaccggctcactgtcactcgatatcgctctgggcgccggcggcctgccgatgggccgcatcgtcgaaatctacggcccggaatcctccggtaaaaccaccctgacgctgcaggtgatcgccgctgcgcagcgagaaggcaaaacctgtgcgttcatcgacgccgagcacgcgctggatcctatctatgcgaaaaagctgggcgtcgatatcgacaacctgctgtgctcccagccggacaccggcgagcaggcgctggaaatctgtgatgcgctgacccgctccggcgcggttgacgtcatcatcgtcgactccgtggcggcgctgacgccgaaggcggaaatcgaaggtgaaatcggcgattcgcacatgggtctggcggcacgcatgatgagccaggcgatgcgtaagctggccggcaacttgaaaaacgccaataccctgctgatcttcattaaccagatccgtatgaaaattggtgtgatgttcggcaacccggaaaccacgaccggcggtaacgccctgaagttctacgcttcggtgcgtctggatatccgccgcatcggcgccattaaagagggtgacgaagtggtgggcagcgaaacccgcgtgaaagtggtgaagaacaaaatcgctgcgccgttcaaacaggctgaattccaaatcatgtacggcgaaggcatcaacagccgtggtgagctggtcgatctgggcgtgaagcacaagatgatcgaaaaagccggcgcctggtacagctataacggcgagaagatcggtcagggcaaggcgaatgcctgtaacttcctgaaagaaaacccggctatcgccgccgagctggataagaagctgcgcgatttgctgctgcacagcggcggtgagctggtggccgcttccggtgacgacttcgaagacgacgcagcggaaaccagcgagcagttctaa

SEQ ID NO: 424743 - DNA, 513 bp, Serratia marcescens
atgaatgacttgctaagccgcgccatgcgcctgctgtcgcaacgcgatcatagtgaagctgaactgcgccgcaaacttgcggcgcagccgtttgtggcgaaagcccgttttggcagcaaggggccacatgcgccggcatcaccgccggtggttgaagagccggtggatcctgcgctgatcgagcaggttatcgcctactgttaccagcataactggctggacgataagcgtttcgctcacagctacatcggcagccgcagccgtaaaggttacggtgcgcagcgcatccgcagcgaactgatgcaaaagggcgtcgacaaagcgctggtgcaggacgcgctggcggaatgcgatatcgactggtgcgaacaggcaaaacaggtggcgcagcgaaaatttggcgatgcgttgccaaccgactggaaagagaaagccaaagtgcagcgttatctgctctatcgcggcttcttccaggaagaaattcagtcaatttaccgtgattttgcgcaatga

SEQ ID NO: 424744 - DNA, 2628 bp, Serratia marcescens
atgagcaagagcaccgctgagatccgtcaagcgtttctcgatttctttcatagtaaggggcatcaggttgtagcgagcagctccctggtgcctaacaatgatccgacattgctgtttaccaatgccggcatgaaccaatttaaggatgttttcctggggctcgacaaacgcgcctattcccgcgccaccacctcgcagcgctgcgtgcgcgcaggcggcaagcataacgacctggaaaacgtcggttataccgcgcgtcaccacaccttctttgaaatgctgggcaacttcagcttcggcgattacttcaagcacgacgcgatcggctacgcatgggaactgctgaccggtgaaaactggttcaacctgccgaaagagcgactgtgggtcaccgtgtatgaaaccgatgacgaagcgttcgacatctggcagaagcaaatcggcgtaccggccgagcgcattatccgcatcggcgacaacaagggcgcgcctttcgcttccgacaacttctggcagatgggcgacactggcccatgcggcccgtgcaccgagattttctacgatcacggcgatcacatctggggcggccctccaggcagcccggaagaagacggcgaccgctacatcgagatctggaacatcgttttcatgcagttcaaccgtcagtccgacggcaccatgctgccgctgccgaaaccttctgtggataccggtatgggtctggagcgcattgcggcggtgttgcagcatgtgaactccaactatgaaatcgatctgttccgtaccctgatcgccgccgtggcgaaagtgaccggcgcaaccgatctggacaacaaatccctgcgcgttatcgccgaccacattcgttcctgcgccttcctggtgtcggacggcgtgatcccgtctaacgaaaaccgtggctatgtgctgcgccgcatcattcgtcgcgcgatccgccatggcaacatgctgggcgcgaaagacaccttcttctacaaactggtggcgccgttgatcgaagtgatgggcccggcggcagacgaactgaaacgccagcaatcgctggtggagcaggtgctgaaaaccgaagaagagcagtttgcccgcacgctggagcgtggtctggcgctgttggacgaagagttggccaagctgcagggcgataccctggacggcgaaaccgctttccgtctgtacgatacctacggtttcccgatcgatctgaccgctgacgtctgccgcgagcgcggtttgaaagtcgacgaagcgggctttgaagacgcgatggaagcacagcgccgccgtgcgcgcgaatccagcggctttggcgccgactataacagcctgatccgcgtggatggcagcagccagttcagcggttacgatcacgacgagcagcaggcgacggtcattgcgctgttccgcgacggccagccggtcgatcagatcaacgccggcgaagaggcggtggtggtgctggatgagacgccgttctatggcgaatccggcggccaggtcggcgataaaggcgtgctgaaagccgccggcgctgagtttacggtcaacgatacccagaaatacggtcaggctatcggccatcagggcaaactggcgcagggttcgctgaagctgaacgatcgcgtggacgcgcagatcgacgctgagcgccgtaacagcattcgtctgaaccactccgcaactcacctgctgcacgccgcgctgcgccaaacgttgggcgaccacgtcgcgcagaaaggctcgctggttaacgacaaatacctgcgtttcgacttctcgcacttcgaagcgatgaagccggagcaaatccgcgcggtggaagatctggtgaaccagcaggtgcgtcgtaacctgccggtgcagaccgagctgatggccttggaagatgccaaagagaagggcgcgatggcgctgttcggcgagaagtacgatgacaacgtgcgcgtgctgaccatgggcgacttctccaccgagctgtgcggcggcacccacgccagccgcaccggcgatatcggcctgttccgcattctgagcgagtcgggcaccgcggcgggcatccgccgtattgaagcggtgaccggcgctggcgctatcgctacgctgcatcagcaaagcgatttgttgcaagacgttgctcagttggtcaaaggcgacagtaacaccctgaccgataaagtgcgctcggtgctcgatcgcacgcgcgcgctggaaaaagaactgcagcagttgaaagatcagcaggcggcgcaggagagcgcttcgttgtccagccaggcaaaagtggttaacggcgtgaagctgttggtcagccagttggataatgtcgaagccaaaatgctgcgcaccatggtagatgacctgaaaaatcaattgggttcggccatcatcgtgttggcaacgacggctgatgacaaagtcagtctggttgctggtgtgaccaaggatctgactgaccgcgtgaaagccggcgagttgatcggcaacgtggcgcagcaggtcggcggcaagggcggtggtcgcccggatatggcgatggcgggggggacggatatcaacgccctgccagcggcgttaaacagcgtagaagcctgggtggcctcgaagctgtga

SEQ ID NO: 424745 - DNA, 186 bp, Serratia marcescens
atgttaattctgactcgtcgagttggtgaaaccctcatgattggcgatgaggttacggttactgtgctaggggtaaaaggcaaccaggtgcgtattggtgtgaacgcccccaaagaggtttcggttcaccgtgaagaaatctatcagcgcattcaggcagagaagtctcagcagacgacttactga

SEQ ID NO: 424746 - DNA, 567 bp, Serratia marcescens
atgtacgaccgctatcagggtcttattttcgacatggacggcacgattctggacaccgagccaacgcaccgtaaagcgtggcgggaagtgctgtcccgttatggcatgacgtttgatgaagcggccatggtggcgctgagcggttcgccgacctggcgcatcgcgcaggcgattatcgccagccatcaggccgatctcgatcctcatcacctggccgcggagaaaacccgcgcggtggaagcgatgctgctggacagcgtgcgtccattgccgctgatcgaggtggtgaagtcctatcatggccgccgtccgatggcggtcggcaccggcagcgagcaccgcatggcggaaatgctgctgcgtcatctcggcctgttcaactgcttcgacgcgatcgtcggtgcggacgacgtgcagcgccacaaaccggagccggacaccttcctgcgctgcgccgaactgatcggcgtgcggccggaaaaatgcgtggtgtttgaagacgctgatttcggcattcaggcggcgaaaagcgccggtatggcggtggtagacgtccgtacgctgtga

SEQ ID NO: 424747 - DNA, 429 bp, Serratia marcescens
gtgagtagtacgctagccgtaatatcgttatttggcagtagcttcctcagtgcgacgctgctgccgggaaattcagaaatcgttctggtcgccttgctgacccagagtcgcgtctcgccggagttgctggtgctggccgcgaccctgggcaacacgctgggtggcttgaccaatgtcattatcgggcgcctgttaccggcgttgaaaccacagcgggggctggcaacggcgctcgggtggctgcaacgcttcggcccggctgcgctgttgctcagctgggtgccggtggtgggcgatttgttgtgcgtgttggcaggttggctgcgcatgccctggggctctgtcgcgctgtttctgtgtatcggaaaggcgctgcgttacatcgttttggctatgataacggtacagggcatcgcctggtggcagtaa

SEQ ID NO: 424748 - DNA, 1563 bp, Serratia marcescens
ttgatcccggacgtatcacaggcgctttcttggttggaagcccatccccaggcattaaaaggcattcgtcgcggcatcgagcgtgaaacgctgcgggtcacgccgaacggcaccttggcgaccaccgggcatccggaaaagctgggcgcggcattgacgcaccactggatcaccacggatttcgccgaagcgctgttagagttcattacgccggttgatgacaatatcgatcacctgctgacgttcctgcgcgatattcatcgctacgtggcgcgcaatatcggcgatgagcgcatgtggccgctcagcatgccgtgctttatcgaagccgagcaggatatcgagctggcgcagttcggctcgtcgaacatcggccgcatgaagacgctgtaccgcgaagggttgaagaatcgctacggcgcgctgatgcagaccatttccggcgtgcactacaacttctcgctgccgctggagttttggcaggcctgggccggcgtgcaggacgcagaaagcggtaaagagcagatctcggcgggctatttccgcctgatccgcaactattatcgtttcggctgggtgatcccgtatctgttcggcgcatcgccggccatttgttcttcgttcctcaaggggcgcgagaccaatttgccgttcgagcgcaccgagcaggggatgtgctacctgccgtacgccacttcgctgcgcctgagcgacctgggttataccaacaagtcgcagagcaatctgggcatcacctttaacgatctgcacagctatgtggccggtctgaagcgggcgatcgcgacgccttccgaagagttcgccaagctgggcgtgaaagagggtgaccgttacctgcagctgaacagcaacgtgctgcaaatcgagaacgagctgtatgcgccgatccggccgaagcgcgtgacccaaagcggcgagacgccgtcggacgcgctgctgcgcggtggtatcgaatacatcgaagtgcgttcgctggacatcaacccgttctcgccgatcggcgtggatgcggtgcaggcgcgtttcctggatctgttcctggtgtggtgcgcgctggccgatgcgccggagatgagcagcgatgaactgctgtgcacgcgcaagaactggaaccgggtgatcctggagggccgcaagccgggccagaccatcggcatcggctgtggcgccagccatgaaccgctcgaaaaagtgggcaaggcgttgttcgccgatctgcgtcgggtagcggaagtgttggacggcgaagccggcgatcgccaataccagcaggtgtgcgatgagctggtcgccgcgttcgacgaccctgaactgaccttctccgcacgcatcctgaaagcgatgcaagtggaaggcaccgggcgcgtcggcctgcaattggcggagcaatatcgcaagatgctgctggaagagccgttggaaatcctgaacgaggccgagctggataaagagcgggaagcctcgtggcaacgccaacgcgacatagaagccaatgatacgctaagctttgaagcgttcctgaagcaaaacggcggaagctga

SEQ ID NO: 424749 - DNA, 516 bp, Serratia marcescens
atgccattgctggatagctttaccgtcgatcatacccgtatggcagccccggctgtccgcgttgcgaaaaccatgaagacgcctcacggcgataccatcacggtgtttgatctgcgcttttgccgcccgaacctggaagtgatgcccgaacgcggcattcacacgctggagcacctgttcgccggctttatgcgtgaccacctgaacggccagggcgtggagattatcgacatctccccgatgggctgtcgtaccggtttctacatgagcctgatcggcgtgccggaagagcagcgcgtagccgatgcgtggaaagcggcgatggccgacgtgctgaaagtgaccgaccagcgcaaaatccctgagctgaacgaataccagtgcggcacttaccatatgcactcgctggaagaagcgcaggagatcgccaagcacatcctggataacgacgtggtggtgaaccacaacgacgagctggcgctgccgaaagagaagctgcaggaactgcatatctag

SEQ ID NO: 424750 - DNA, 1290 bp, Serratia marcescens
ttggagcatgtgtcgacggggaccctcatcattatcctggtgatcatgatcgtggtctccgcttacttctccgcctccgaaaccggcatgatgacgctcaaccgttatcgcctgcgtcacctgtccaaacagggcaatcgctcggcgcgccgtgtggagaagctgctgcaaaaaccggatcggctgatcggcctggtgctgatcggcaacaacctggtcaacatcctcgcctcggcgctggcgaccatcgtcggcatgcggctgtatggcgacctcggcgtggcgatcgccaccggcatactgaccttcgccgtgctgctgttcgccgaagtgctgccgaaaaccttcgccgcgctctacccggaacgcatcgccttccccagcagctttctgctggcgccgctgcaaaaagtgatgttcccgctggtctggctgctcaacggcattaccagtatgacgctgcgcctgttcggcattcgcaccaacgtgcgcatcagcgatgccgtcagcaaggatgagctgcgcaccatcgtgcgcgaatcccagtcgcaaatctcccggcgcaatcaggacatgctgatctcggtgctggatctggaaaaggtgacggttaacgacatcatggtgccgcgcaccgagattgtcggcatcgacgtcaacgacgactggaagtcgatcatgcgccagttgacccactcgccgcacggacgcatcgtgctgtaccgcagttcgctggacgacgccatcggcatgctgcgcgtgcgcgaagcctaccgcctgatgaccgagaaaaaagagttcaacaaagagaacctgctgcgcgccgccgacgagatttacttcgtgccggaaggcacgccgctcaacgtgcagctggtgaagttccagcgcaacaaagagaaggtcggcatcgtggtcgatgagtacggcgacattcagggcctggtcacggtggaggatatcctcgaggagatcgtcggcgacttcaccacctcgatgtcacccacgctggcggaagaggtcacgccgcagagcgacggctcggtcttgatcgacggcaccgccaacgtgcgcgagctgaacaaggccttcaactggaccttgccggccaacgaggcgcgcaccgtcaacggcatgctgctcgaagagctggaagagatccccgaaatcggcacccggttgcgtatcggccattacgatatcgacattctcgacgtgcagggcaacatgataaaacaggtgcgggtcacgccgatcacctcgctgcagtccagcgtcggccatcactga

SEQ ID NO: 424751 - DNA, 765 bp, Serratia marcescens
atggcctacctgctcagccttggactgatcattcccagcttgttgcggaagaacagcgcataccgtcggcttgccctcgtctcggcggtggtggcgctgatttgccacgccatcgcgctgcagcagcgcatcttcgacgtcagcgccgggcagaatcttagcctgctgaacattggctcgatcgtcagcctgatcatctgttcggtcatgaccttcgtcgcctcgcgcgaccgcggctggttcctgttgccgatcgtctacagcttcgcgatgatcaatctggccttcgccagcttcatgcccggcgagttcatcactcacctggagtccagcccggaattgatggtgcatatcggcctggcgctgttctcttacgccaccctgatcatcgccgcgctctacgccttgcagcttgcctggctcgactaccttctgaaaaacaagaagttgacctttagcgccgacatgccgccgctgatgagcatcgagcgtaagatgttccatatcacccagatcggcgtggtgctgctgacgctcactctgtgcaccggcctgctgtacatggataacctgttcagcaaagaaaacgtgcataaagcggtgctgtcgatcatggcctggttcgtgtatatcgtgctgttgtggggccattaccatgaaggctggcgcggccgccgcgtcgtctggttcagcttcgccggcgccttcctgctgacgctcgcctacttcggcagccgtctgattcagcaagtgatggtgcgctaa

SEQ ID NO: 424752 - DNA, 1362 bp, Serratia marcescens
atgtttgaaaatttaaccgatcgattgtcgcgcacgttgcgcaatatcagcggccgcgggcggctgaccgaagagaatatcaaggaaaccctgcgtgaagtgcgtatggcgttgctggaagcggacgtcgcgctgccggtggtgcgcgacttcatcaaccgcgtcaaagagagcgcggtcggccatgaagtcaacaagagcctgacgccggggcaggagttcgtcaagatcgtcaagggcgagctgatcgccgcgatgggcgaagtcaataccgagctgaatctggcggcccagccgccggcggtggtgctgatggcgggcctgcagggtgccggtaaaaccaccagcgtcggtaagctcggcaagttcctgaaagaaaaacagaagaagaaagtgttggtggtttccgcggacgtttatcgcccggcggcgatcaaacagctggaaacgctggcggaaggcgtcggcatcgatttcttcccgtctgacgtcaaagaaaaaccgatcgacatcgtcaatcgcgcgctgcaacaggccaagctgaaattctacgacgtactgatcgtcgataccgccggccgcttgcacgttgacgaagcgatgatggacgagatcaagcaggtgcacgcggcgatcaagccggtggaaaccctgttcgtggtcgacgccatgaccggccaggacgccgccaataccgccaaggcgtttaacgaagcgctgccgctgaccggcgtggtgctgaccaaggtcgacggcgacgcgcgcggcggtgccgcgctgtccatccgtcatatcaccggcaagccgatcaaattcctcggcgtgggcgagaagaccgaagcgctggagccgttctacccggatcgcgtggcatcgcgcatcctgggcatgggcgacgtgctgtcgctgatcgaagatatcgaaagcaaggtcgaccgcgagcaggcggagaagttggccaacaagctgaagaagggtgacggtttcgatctgaccgacttcctggagcagctcaagcagatgcgcaacatgggcggcatggccaacatgctgagcaagctgccgggcgccggccagctgccggacaacgtcaagtcgcagatggacgataaagtgctggtgcgcatggaggcgatcatcaactcgatgacgctgaaagagcgcgccaaaccggaaatcatcaagggctcgcgcaagcgccgcatcgcgatgggggccggcatgcaggtgcaggacgtcaaccgcttgctgaagcagttcgacgaaatgcagcgtatgatgaagaagatgaagaaaggcggtatggcgaagatgatgcgcggcatgaaaggtatgatgccgccgggcttcccaggccgctga

SEQ ID NO: 424753 - DNA, 249 bp, Serratia marcescens
atggtaacaattcgtttggcacgtggcggcgctaaaaagcgtccgttctatcaagtagtagtgaccgacagccgcaacgctcgtgatggtcgtttcatcgagcgcgtaggcttcttcaacccgatcgcttccggtcaggctgaagcactgcgtctggacctggaccgcatcgagcactgggttggtctgggtgcaaccgtttctgatcgcgttcacgcgctgatcaaagacgctaagaaagcagcttaa

SEQ ID NO: 424754 - DNA, 549 bp, Serratia marcescens
atgagcaagcaactcaaaccggtagcgcctaagcagccgattgtactcggtaaaatggggtccgcttacggcattcgtggttggctcagagtgttttcatccaccgagaacgccgaaagcatttttgactatcagccgtggtttatccagcaggcgggtcagtggcagcatatcgagttggaagactggaagcgccacagtcaggatctgatcatcaaggtcaaaggcattgacgatcgggacgcggcgaatctgctgactaatcgcgagattatggtggattctgagcaacttcctccgctggagggtgacgattactactggaaagacctgatgggctgccaggtagtcaccaccgccggctacgagctgggtaaagtcatcgatatgatggaaaccggctcgaacgatgtgatggttgtgaaagcgaacctgaaagatgcgttcggcatgaaggagcggttgattccgtttcttcatgggcaggttatcaagaaagtcgatctcactgcccgcgtgattgaggcagattgggatcctggtttttga

SEQ ID NO: 424755 - DNA, 768 bp, Serratia marcescens
gtgttcatcggtattgtaagcctgtttcctgagatgttccgcgctatcaccgattacggggtgactggccgggcagtaaaaaatggcctgctgagcgtgcagtgttggagtcctcgcgacttcacctacgaccggcatcgtaccgtggacgatcgcccttacggcggcggcccgggaatgctgatgatggtgcaacctttacgggaagccattcatgcggcgaaagcagcggcaggcgagggagcaaaggtgatttatctgtcacctcaggggcgcaagctggatcaaaccggcgtgtgcgaactggcggccaatcagaagatgattctggtgtgcggccgttacgaagggatagacgagcgcgtaatccaaaccgaaattgacgaagaatggtcaatcggcgattacgttctcagcggcggggaactgccggcgatgaccctgattgattcagtcgcccgtttcataccgggtgtgctgggccatcaggcctcagcggaggaagactccttcgccgatggattgctggactgcccgcactatacccgccccgaggtgttggaagggatggaagtaccgccggttctgctgtcgggcaaccatgccgagatacgtcgctggcgcttaaagcagtcgctgggccgaacctggcttagaagacctgaacttctagaaagcctagctctgactgacgagcaagcggtgttgctggctgagttccaacgggaacatcaggccaggcaacaggactatgaaggaaacgtctga

SEQ ID NO: 424756 - DNA, 357 bp, Serratia marcescens
atgagcaacattattaagcaacttgaacaagagcagatgaaacaagacgtacctgcattccgtccgggtgattccgtggaagtgaaggtatgggtcgttgaaggtagcaaaaaacgtctgcaggcattcgagggcgtggttatcgctatccgtaaccgcggtctgcactctgcattcactgttcgtaagatttccaacggcgaaggtgttgagcgcgtattccagactcactccccagtaatcgacagcattgctgtgaaacgtcgtggtgccgttcgtaaagctaaactgtactacctgcgtgagcgtactggtaaggctgctcgtatcaaagagcgtctgaaccgcgttggctaa

SEQ ID NO: 424757 - DNA, 228 bp, Serratia marcescens
atgatgcactgtccattatgcggtcacgtggcccacactcgctccagccgctatctgagcgagtcgaccaaagagcgttaccatcaatgccgcaacatcaattgcagctgcacgttcgccacgcacgagtccgtcgcgcgggtgatcgtcaaacctggcgatgacattgtcccggcgcagccgcacccgccggagagtcagcataaacaaagcgccgccgcgctgtaa

SEQ ID NO: 424758 - DNA, 516 bp, Serratia marcescens
atgagtgcaatcgttaagcgctgcagcgtcgccgccgttttggccatcgcggtgctgttaccgtcatttggcgagctgcaaacctcggaagccggtctcaggctgatcgccgatctcgaaggttgccgcctgtcgccttaccagtgcagcgccggggtgtggacgcagggcattgggcatactgccgacgtcatcccaggcaagacgatcgatgaacgcaaagccgctgtggatttggtcgacgatattcgccgcaccgaacgcggcatggccgcctgcctgccgcaaacgctcccacaagaaacctatgacgcggtgatcgccttcgccttcaacgtgggcatcagcgccgcctgccactccacgctggtcacactgctgcagcaacgccagtggcggcaggcttgcgatcagttgcctcgctggatttacgtaaacggaaagaaaaacaaagggctggaacagcgacgcgccacggaacgcgcactgtgcttgcaaggcattgcctcatcatga

SEQ ID NO: 424759 - DNA, 222 bp, Serratia marcescens
atggagaaaatcacctcattcatcacctacgccatggcgctgtttctcgcctggctcggcaagctctctccgcaggacattgcctttttagtcggtgcggcggtaggcatcggcacgtttctggtgaactggtactaccgacgtaaaagcctgcagatcttgaaggccattgagcgcaatgcggcatcacggaggaaaatttacgatgagtgcaatcgttaa

SEQ ID NO: 424760 - DNA, 765 bp, Serratia marcescens
atgctctcttctcgcgctcgtcgcgcttttccgctgtatatttgctgcttaacgactttcaccagtgtttcagctctcgccgacaatacgcttttcaccgcgatggacgatccggccaccgccaagaaaccgtttgaaggcaacgtgcaggcgggctacaacgcccagtcaggcaactcgcagagttccaccctgctggccaacaccaacatgacctggttcaacagcgacgcggcgtacagcctgtggggggcggccaacaacaccacctcctccaacgtgcgctcctccgaaaaataccaggccggtggccgtacgcgctataacctgaccgaccgcaactacctgttcggccaagccagctggctgagcgaccgtttcaacggttacgattcacgctccacgctgacgggcggctacggccgtcaactcctcaacgggccgctcagcgacctgcgggtggaattcggtcccggcgtgcgccatgacgaataccacggcggcggccgctcgaccaaagggctggcctacggtgcggccaactattcctatcagctgaccgacaacaccaagttcattcagggcgtttccgcgctggcgaacgaggaaaccacgctgaactcggaaagcgcgttgaacgtggcgatcaacgatcgcttctcactgcgcgtagcctacaccgtgacctacaacagcaaaccgccggcctcggcaccgaaaaacaccgacaccaccacctcggtcacgctggtctacggcctgtaa

SEQ ID NO: 424761 - DNA, 1077 bp, Serratia marcescens
atgcaaaaagacgcgctcaataacgtacacatcagtgcagaacaggttctcatcacgccgggggagctgaagaaccagttcccgcttagcgccgacgacgaaaatgaaatcgccaccgcgcgcaataccatcgccaacattttgcaggggcgcgatcatcgcctgttggtagtgtgcgggccttgttcgatccacgatccggatgcggcgcttgactacgcccgtcgtttgaaaaccctggcggctgacttgagcgatcagctgtatatcgttatgcgcgtctattttgaaaaacccagaacgactgtcggctggaaaggtttgatcaacgatccgtacatggacggttcgtttgacgttgaagcaggcttgcatatcgcgcgtcgcctgttgctggatctggtgggcatgggcctgccgttggctaccgaagcgttggatccgaacagtccgcagtacctgggggacttgttcagctggtcggcaatcggcgcgcgcaccaccgagtcgcagacccaccgcgaaatggcttccggcttgtcgatgccggtcggcttcaaaaacggcaccgacggcagtctgggcaccgccatcaacgccatgcgcgccgccgccatgccgcaccgttttgtcggcatcaaccaggcgggccaggtttgcctgctgcagacccagggcaatccggacgggcatgtgatcctgcgcggcggtaaaaccccgaactacagcgccgagcacgttgcggcctgtgaaaaacagatgctcgaggcgggactccatccgtccttgatgatagattgcagccatggcaactcgaataaagactatcgccgtcagccggcggtggccgagtccgtggtggagcagattaaggcgggcaaccgttcgatcaccggcatcatgctggagagccatctgcatgagggcaaccagtcttccgagcagccgcgtgcagacatgcgttacggtgtgtccgtcaccgacgcctgcatcaactgggaaagcacggaaacgctgctgcgtcatatgcatcaggaactcggcgctgcgctgacggcacgcacgggagaaaagtaa

SEQ ID NO: 424762 - DNA, 1122 bp, Serratia marcescens
atggtggcagaactgaccgcgttgcgcgatcaaattgacgaggtggacaaagcgctgctggatctgctggcgaaacgcctgcatctggtagcggaagtcggcgaggtgaaaagccgccacggtttaccggtttatgtgccggagcgcgaagcggcgatgctggcctcgcgccgtcaagaggcggaaaacctcggggtgccgccggatttgatcgaggatgtcttgcgccgcgtgatgcgcgaatcgtacgtcagcgagaacgataaaggctttaaaaccctgtgcccgcagctgcggccgatcgtcatcattggcggcaacggccagatgggccggctgttcaaccgtctgctgacgttgtcgggttatcaggtcagggtattggatcaggaagattggccgcaggcggaacagctgttggcagacgccggcatggtgatcgtcagcgtgccgatccatgtgaccgaacaggtgataagccgcctgccgccgttgcccgacgactgtattttggtggatttggcgtcggtgaagaaccgtccgctgcatgcgatgcttgcggtgcacagtggcccggtggtggggttgcacccgatgttcggcccggacgtgggcagcgtggcgaagcaggtcgtggtttactgcgacggccgccggccagaggcttaccagtggttgcttgaacagctacaggtgtggggggcgcggctgcaccgcatcagtgcggtcgaacacgatcagaacatggcgtttattcaggcgctgcggcactttgccaccttcgcctacgggttgcatctggcggaagagaacgtgcaactggagcagttgctggcgctctcttcgccgatctaccggctggagctggcgatggttggccgcctgtttgcgcaggacccgcagctgtacgccgacattatcatgtcgtcggaggaaaacgtggcgttgatcaaacgctactaccagcgcttcggcgaggcgatcaagctgttggagcacggcgacaaacaggcgtttatcgatagcttccgcaaggtggagcactggtttggcgattacgcccagcgcttcctggtggaaagccgcacgctgttacggcaggctaacgacagccggcagtaa

SEQ ID NO: 424763 - DNA, 1158 bp, Serratia marcescens
atgactgacaacccgttattggtgctgcgcgagcgcatcagcgcactggatttgaaactgttggccctgctggcggaacgccgtgaactggcgatcgaagtcggcaagaccaaactgcactctcaccgtccgatccgcgacaaagagcgcgagcgcgatctgctggatgcgctgatcgccgccgccaagccttacgacctggacggtttctacgtcacccgcctgttccaactgatcattgaagactccgtcctgacccagcaggcgctgctgcagcaccagctcaatcccgtcagccaacactccgcccgcatcgcctttctcggcccgaaaggctcttattcacatctggcggcgcgccaatacgccgcccgccatttcgatcggttgatcgaatgtggctgccagaagtttcaggatatcttcgcccaggtggaaaccggccaggcggactacgccattctgccgatcgagaacaccagctccggctcgattaatgaggtgtacgacctgctgcaacacaccagtctgtcgatcgtcggcgaactgaccaaccctatcaaccactgtgttctggtggccggcgacagcgatttgagccagattgaaaccgtctacagccacccgcagccgttccagcagtgcagccagttcctgaatcgattcccgcactggaaaatcgaatacactgaaagcacggccgccgcaatggagaaagtcgccaagttgaattcgccgaaggtggcggcgctgggcagcgaggccggcggcgcgctgtacgggctgcaagtgctggaacacaacctcgccaatcaacaacagaacattacccgctttatcgtcctggcgcgtaaagcgatcgacgtctccgaacaggtgccggccaaaaccacgctgatcatggcgaccggccagcaatccggcgcgctggtcgaagcgctgctggtattgcgcgacaacggcatcatcatgaccaaactggagtcacgcccgatcaacggcaatccgtgggaagagatgttttatattgatgtacaggccaacctgcgtggcgacgcaatgcaaaaagcgctgcgcgatctggcgcccatcacccgctcgctgaaggtgctgggctgttatccgagcgacaccgtggtgccggtcaacccatcctga

SEQ ID NO: 424764 - DNA, 342 bp, Serratia marcescens
atgacattgaacattaccagcaaacaaatggatatcactcccgcaatccgcaatcacgtcgaagaccgtctcaccaaactggaaaaatggcagacccagctgataaacccgcatatcgtcttatccaaagaaccgcaggggtttgtcgccgacgctaccattaccacgccgaacggcccgctggtcgccagcgccaaacatgatgacatgtataccgccgttaacgagctgatcgccaagctggagcgccagctgaacaaggtgcagcacaaaggcgaagcgcgccgctgcaatgccagcgtgaaagacatcgtgccggaagtgacgcaggaacaggaataa

SEQ ID NO: 424765 - DNA, 732 bp, Serratia marcescens
atgacgcgtatgaaatatctggtggcggcagccacgttgagcctggcgctggcaggttgctccacatccaaggatgcggttcccgacaacccaccttcggaaatctatgccaccgcgcagcaaaagctgcaggacggtaacttcaagggcgcgattacgcaactcgaagcgttagataaccgctatcctttcgggccgtattcccagcaggtccagctggatttgatttacgcctactataaggccgccgacttgccgatggcgcaggcatccatcgatcgcttcatgcgcctgaacccgacgcacccgaacatcgattacgtgatgtacatgcgcggtctgaccgacatggcgctcgatgacagcgcactgcagggcttcttcggggttgaccgttcggaccgcgatcctcagcacgctcgcgctgcgttccgcgacttcagccagttgattcagcaatacccgaacagccaatacgcgaccgacgccaacaagcgtttggtgtatctgaaagaccgcttggccaagtatgagctttcggtggcggaatactacactaaacgcggtgcttacgtcgcggtcgttaatcgcgccgagcagatgttgcgtgaattcccggataccaaagcgacgcacgacgtgttgccgctgatggaaaatgcctacaagcagctgcagctgaacggccaggctgacaaagtggccaaagtgatcgccgccaacccgcaataa

SEQ ID NO: 424766 - DNA, 978 bp, Serratia marcescens
atggcacaacaagtacaactcaccgcaacggtggccgaatctcaactcggacaacgtttagatcaggctttggccgaattgttccctgattattcacgatctcgcataaaagagtggatcctgggcgatcgggtgaaggtcaatggcaaaacgtcaaacaaaccgaaagagaaggtgctgggcggagagacggtcgccatcgatgcacagatagaagaagaggcgcgttgggagccgcaggatatcgcgttggatatcgtctatgaagacagcgacatcctggtgatcaacaagccgcgcgatttggtagtgcaccctggcgccggtaacccggacggcacggtgctcaatgcgctgctgcatcactacccggaaatcgccgacgtgccgcgtgccggcatcgtccaccgtctggataaagacaccactggcctgatggtggtggcgaaaaccgtgccggcgcaaacccggctggtggaagcgctgcaggcgcgtgaaatcacccgcgaatacgaagcggtggcgattggcaccatgaccgccggcggcacggtagaagagcccatagcgcgtcactccaccaagcgtacccacatggcggtgcacccgatgggtaaaccggcggtgacgcactaccgcatcatggaacacttccgcgcacacacccgtctgcgtctgcgcctggaaaccggccgtactcaccagatccgcgtgcacatggcttacatcagccatccgctggtgggcgatccgctgtacggcggccgtccacgtccgccgaagggggcttcggaagccttcatcaacacgctgcgcggttttgaccgccaggcgctgcacgccaccatgctgcgtttgtaccatccgatcagcggcatccagatggagtggcatgcgccgctgccgcaggacatggtcgatctgattaacgcgctgaaggcggataccgaagaattcaaagatcagatggactggtaa

SEQ ID NO: 424767 - DNA, 732 bp, Serratia marcescens
atgaactcgctcattcagcccgactggccgttgcctcccggcgttaaggcctgcagcaccacgcgcggcggcggcgtcagtctgccgccttatgactcgctgaacctcggcgcccacgtcggtgacgaggagcaagcggtgaagcgcaatcgggaacggttggttaccgtcgccggcttgccgcagatgccggtgtggctcgagcagatacatggcacccgtgtggtgacgttgacggggcaagcgcccgccgatctgcgggcggatgcggtttacagcaacgtgccagggcaggtgtgtgccgtgatgacggcggattgtctgccggtgctgttctgttcgcagcacggcgatgaagtggccgccgctcacgccggctggcgtgggttatgccatggcgtgctggagcaaaccgtggcggcgttcagcgccgcgccgagccagatcagcgcctggctggggccggcgatcggcccgcagcagtttgaggtcgggccggaggtgcgcgctgcctttatcgcggaagaagccgaagccgcggcggcgtttacgccgcacggcgataagtttttggctaatatctacttgctggctcgccaacgtttgttgcgggcaggcgtgcaggccatctacggcggcgaccgctgcacggttaacgaaaagagtcattttttctcctatcgccgcgatggaataaccggacgtctggcaagtttaatctggctgatataa

SEQ ID NO: 424768 - DNA, 2574 bp, Serratia marcescens
atgcgtctggatcgtcttaccaacaaattccagcttgccctcgccgatgcccagtcactagcccttgggcacgacaaccagtttattgaaccgcttcatctgatgagcgccctgctcaatcaggaagggggcacggttcgtccactattaacttccgcaggtatcgatgccgggcgcgtgcgcaccgagatcgaacaggcgctgtcccgtttaccgcaggtagaaggcaccggtggcgacgttcaaccgtcccacgagttggtgcgcgtcctgaacctgtgcgacaagctggcgcagaagcgcgcggacaaattcatttcttccgagctgtttgtgctggcggtgctggaagaccgcggctcgttgaccgacttgttgaaagcggccggcgcaacggccgacaaaatcagcaaagccattgaacagatgagaggcggtgacagcgtggaagaccaaggcgccgaagaccagcggcaagcattgaagaaatacacgatcgatctgactgaacgcgccgagcagggcaaacttgacccggtgatcggccgtgacgaagagatccgtcgcaccattcaggtgctgcaacgccgtaccaaaaacaacccggtgctgatcggcgaacctggcgtgggtaaaaccgccatcgtcgaaggcctggcgcagcgcatcatcaacggcgaagtgccggaagggctgaagcacaagcgcgtactgtccctcgatatgggcgccttgatcgccggcgccaaataccgcggcgagtttgaagagcgtctgaaaggcgtgctcaacgatctggccaagcaggaaggcagcgttatcctgtttatcgacgaactgcacaccatggtcggcgccggtaaggcggatggcgcgatggatgcgggcaacatgctcaagccggcgctggcgcgcggcgaactgcactgcgtcggtgccacaacgctggatgagtaccgccaatatatagagaaagacgcggcgctcgaacgtcgtttccagaaagtgtatgtggcggagccgagcgtggaagacaccatcgctatcctgcgcggcctgaaagagcgttacgaattgcaccaccacgtgcagatcaccgacccggccatcgtggcggcggcgacgctttctcaccgttatatcgccgatcgtcaattgccggacaaggctatcgacctgatcgacgaagcggcatccagcattcgcatgcagatggattccaagccggaatcgctcgacaggcttgaacgccgcatcattcagttgaagctggaacagcaggcgctgaataaagagtctgacgacgccagcaagaaacgcctggacatgctcagcgatgagctggggcagaaagagcgcgaatattcggagctggaagaagagtggaaagcggaaaaagcctcgctctccggcacccagaacatcaaggctgaactcgagcaggccaaaatcaccctggagcaggcgcgccgcgtcggcgatctggggcggatgtcggaactgcagtacggcaaaatccctgagctggagaaacagctcgccgccgccacgcaggccgaaggcaagagcatgaaactgctgcgcaatcgggtgaccgatgcggaaattgccgaagtgctggcgcgtgccaccggcatcccggtggccagaatgctggaaggcgaacgcgacaaactgctgcgcctggagcaagagctgcattcgcgggtgatcggccaggacgaagcggtcagcgcggtctctaatgctatccgccgcagccgcgccgggttgtccgatcctaaccggccgatcggttcgttcctgttcctcggcccgaccggggtggggaaaaccgagctctgcaaggcgctggcttcgttcctgttcgacagcgacgacgccatggtgcgtatcgacatgtccgagtttatggagaaacactccgtttcgcgtctggtcggcgcgcctccgggctatgttggttatgaagagggcggctatctgacggaagccgtgcgccgccggccttactcggtgattctgctggatgaagtcgagaaagcgcacccggacgtattcaacattctgctgcaggtgttggatgacggccgactgaccgatggccaaggccgtaccgtcgatttccgcaataccgtggtgatcatgacttccaacctgggctccgatctgatccaggagcacttcggtcagatgaactacgcgcagatgaaagagtcggtgatggagatggtgagccaccacttccgtcctgagttcatcaaccgtatcgacgaagtggtggtgttccatccgctgggcgagaaacacattgctgcaatcgccaaaattcagctgtcgcgtttgtacaaacgtttggaagagcgaggttacgaagtgaccatgaccgaaccggccctggctttgttgagcaaaaccggttacgaccctgtgtatggtgcgcgtccgttgaaacgcgcgattcagcaggagatcgagaacccgctggcgcagcaaatcctgtccggcaagctgattcccggcaagctggtgacgctggatgtggaaaacgaccatatcgttgcacgccaataa

SEQ ID NO: 424769 - DNA, 1005 bp, Serratia marcescens
gtgtcgaaagccaatcccaatgccactatcgtggatatcgcccgccgcgccagggtgaccaatatcaccgtttcccgcgccttcaataaacccgagctggtcaagccggaaacccgcgagcgcattcacgccatcgccaaagagctgaactatgtgcccaacgcgttcgcgcaggggctgaaaagcagcagcagccagattatcggcatcgtcaccagcagcatgtacaacccgttctattccggcctgatcaagaccgtgtcgcgcattgcgcgccagcagggctatcagattatgctgttcgacaccgacggcagcgaagaggcggaaatgcgcgccattcaggcgctgttcggctacaaggcgcgcggcatcctgctgtcggcggtacgcgacgacaaacgctaccgccccgcctatcttgagctggccgagatgtacggcgtgccgctgatcctgatcgaccgcgatctctacgatcagcagctgagcggcgtgttcctcgataaccgcgagatcggcgtgctggccgggcgctatctggcggagcagccggagcagaagctgctgatcatcggcggcccggcggattcggagatcaccttaacgcgcaccgccggcatcgtcgcggcgctgcagggcagcggccgtgagattcatatcatcaacggcgactatgatttcacctcgcaagagagcgaggtgcgcgcctatctggcgcagccggagaaccgcccggattacatcatcggcctgaacggtatcatcacgctgggcgccatcgccatctgccacgagatggggctctatcagcaggtgaagttcttctcgatagacgaaccgccgcgcgccggcgcttacggcctgcacattccgggggtgtatcacgatacgcaaaagctgggggagatcgccgcggagctgctgttcagcgccattcacagcccgcgcggcgagctgccggtgcgcagagagttcttcaccggctcgctgttgaatcgctga

SEQ ID NO: 424770 - DNA, 693 bp, Serratia marcescens
atgctgaacgaactcaagcggcaggtgctggccgccaacctcagcctgccggcatacgggctggtgacctttacctggggcaacgtctcggcgatcgaccgccaaagcgggctggtggtgatcaagccttcgggcatcgcctacgaggcgatgacgctagaggatctggtggtggtggatctggagggcaaggtgcgcgaagggcaccgtaaaccctcatccgacaccgccacccacctggcgctgtaccgcgccttcgccgatatcggcggcgtggtgcacacccacagccgcaacgccaccatctgggcgcaggccgggcagccgattccggcgctgggcaccacccacgccgactacttttacggcgacattccctgtacccggccgatgagcgaggcggagatcgccggcgactacgagggggaaaccggtaaggtgatcatcgagaccttcaatcaggcgggccgcgatccgcagcaggtgccgggggtgctggtctattcccacggcccgtttgcctggggcaaggacgcggcggatgcggtgcacaacgcggtggtgctggaagaggtggcgatcatggcgatggcgacgcgccagctggcgccggccatcgccccgatgcagccggagctattggacaaacatttcctgcgcaagcacggcaaacacgcctactacgggcaatag

SEQ ID NO: 424771 - DNA, 870 bp, Serratia marcescens
atgcaaacgactaacgccgcctgtctggggctgtatgaaaaagcgctgcccgccgatctgagttggccgcagcggctggccaccgccgccgagctgggctttgaatttgtggagatatctatcgacgagcagccggcgcgccagcagcggctggactgggatcgccgccagcggctggcgtttatccaggcgcggctcgacagcggggtgacggtgccgagcctgtgcctgtcggcgcaccggcgcgatccgttcggcagccatgacgccgccacccgagagcgggcgcgggtgctgatgagcaaggcgctggaactggcgacggatctcggcatccgcaacatccagctggcgggctacgacgtctattacgaacccgccgatcgccacagccgcgagcgttttatcgagggcatgcagtgggcgtcgacgcaggccgccagggcgcaggtgatgctgtcggtggaggtaatggacacgccgttcattaacagcatcagcaaatggcgcgatatcgcccgccacgtcaacagcccgtggttcacggtgtatcccgatctcggcaacctcagcgcctggggcaacgacgtcgccgccgagctggcgctgggcattggcagcatcaccgccgtgcacctcaaagacaccgtggcggtggggccgggcagcgccgggcagtttcgcgacgtgccgttcggcgagggctgcgtggatttcgcccacgccttttccgtgctcaacgcgctcggctatcgcggcccctacctgctggagatgtgggcgcgcgaagacgggcaggacaagcaacgcatcgcccaggccaaggcctggatcgaacaacagatgatcgagggaggcatcgcatgctga

SEQ ID NO: 424772 - DNA, 1488 bp, Serratia marcescens
atggcagtctttcttggcatagacgtcggcggcacggtgatcaaggccgggctgtaccgggcaagcggcgaagagctggcgatcgccgagcgcgacggcgcggcgattgccgcccagctgggcttcagcgaacgcaatatggacgcgctgtgggatgacgtttgcgcggcgatccgccagacgctgcacgcggcggggctggaggccgggcaggtgcgcggcgtcagcttttcggcgcacggcaaagggctgtacgccatcgatcgccacggcaagccggtcggcaacggcatcctctcttcggacaaccgcgcggcggccacggtggctgagctgcgccgcgccggcgtggacgcgcagacctacccgcgcagcctgcagccgctgtggcccagccacccggcgctgctgctgcgctggctgaagcagcggcaaccggcgcagtacgccgccgtcgatcgcatcctgatggcgcacgactacctgcgctttcgtctcaccggcgaggcgacggccgaggtgaccaacatctccggcagcaatctgtttaaccagcgcagcggcgcttacgatccggcgctgatggcggccttcggcatcgaagaggcgcaggagaaaaccgcgccagtgataggctcggcgcagctggccgggcgggtgacggccgcggcggcggcgcagtgcggcctgtgcgcaggcaccgcggtgtacggcggcctgttcgacgtggtgggcgcggcgctcagctccggcgtggccgacgatcgcacgctcagcgcggtggcgggcacatggtcgatcgccacctgcgtgaccgagcgcatcatgaccgccgattacccctacgcctgggggcgctactgcatcgacggccgctatttcgtgcacgaaggcagcccgacctcggccggcaacctggcctggttcctgcgccagttttgcgccgacgaccggcagcgctacgcccagttcaatgcctgggtggccgagcgccgcgaacagccgagcgggctgctgttcctgccttatctgtacggctccaacctcggcggcaacacgccgggcgggctgatcggcctgagcgcccaccacgagatggcggacgtggtgcaggcgatctaccagggcatcgtgttctcgcatctgatccatcaggagcgcatggtgcagctgaacccgcgcatcgagcgggtgcgcatgaccggcgggccgacgcagtccgaggtgtggatgcagatgtacgccgacgccggcaacctgccgctcgaggtggtggaaacccgccaaagcggctgccgcgccgccgccctgtgcgccgccgtcggcgccggggagtacgccgggttcgccgaagcgatcgccgccgcgccgcccaagctgcgctgttattatcccgcgaccgccgcccaccggcgcctgcgcgcccagcaggcgcgctatctggcggtcgctcaggctttgagtgaggtgactgatgcaaacgactaa

SEQ ID NO: 424773 - DNA, 990 bp, Serratia marcescens
atgatcggaattgaacaacccgccgtggcgcgccgcgccgccggccccagcctcggcaagcgctgggaaaaactgctgcatcacccggcggtcttgccgtttatcggcttcgtgatcctgttcgtgctgatgagcctgctgaacgacagcttcctcagcgtcaacaacctgaccaacgtggcgcgccaggtgtcgatcaacgccatcatcgcggtgggcatgacctgcgcgatcctgaccggcggcatcgatctctctgtggggccggtgatggcgctggccggttcggtcgccgccgggctgatgctggcggcggtgccgatcccgctggcgacggtggcggcgctggcggtcggcgcgctgttcggcctggccaacggcgcctgcatcgcctacctgcgcatgccgccgatcatcgtcaccctggcgtcgatgggcatcgcccgcggcctggcgctgctctataccggcggttacccgatctccggcctgcccgacgtcttctccttcttcggccgcggcacggtgctgggcatccaggtgccgatcctgatcatgctcggcgtgtatgtgctggcctggctgatgctcaaccagctgccgttcggccgctacgtctacgcgatgggcggcaacgaagaggcggcgcggctgagcggcatccgcgtgccgcgctacaagatgctggtgtacgtgatcagcggcctgaccgccgcgctggccgggctggtgctgacctcgcgcctgatgagcgggcagcccaacgccggcgaaggcttcgagctggacgccatcgccgcggtggtgctgggcggggcggcgatctccggcgggcgcggcgccatcgtcggcacgctggtgggggcgatgatgctcggggtgctcaacaacggcctcaatctgatgaacgtgtcgccatatatccagaacgtggtgaagggcggcatcatcctggccgccatctacctcagctccgtgcggcgcaaatag

SEQ ID NO: 424774 - DNA, 1443 bp, Serratia marcescens
gtgaaggcgctggacggcatcgatctggccattcaacgcggcgaagtgcacgccctgctgggcgaaaacggcgccggcaaatcgacgctggtgaaaatcatgtgcggcatctatcagccggacgagggcgatatttttatcgacggcgagcagcgccgctttaacaactatcgccaggctatcgaggccggggtcggcattatttttcaggaattctcgttgattccctacatgagcgccatcgacaacatcttcctcaaccgggagatcaggaaccgctggggcctgctggatcgccgggcgatgcggcgcaaggccgaggccattttcaagcggctgacggtggctatcgatctcgattgcccggtggagcagttgagcgtggcgcagcagcagttcgttgaaattgccaaggcgctgtcgctggaggcgcgggtgctggtgctggacgaaccgaccgccacgctgacgccgggcgaggccgagcacctgttcagcgtgatgaacgatctgcggctgctgggcgtcggcatggtgtttatctcgcaccacctggacgagatcttcaccatctgcgatcgcatcaccgtgctgcgcgacggcgcctacatcgaaacgctggccaccggcgacaccaacgtggaagagctggtgcggctgatggtcgggcgcaaaatcgagaacgccttcccggtgaaacagcacccggtcgataccgcgacggtgctgctggaggcggagatccagcgcgagaagcacggcgcgaccgaccgcttccacctgcacaagggcgagatcctcggcttcgccgggctggtgggctccgggcgcaccgagaccgtctcggcgctgatcggcgccagccgctgccaccgcaaacgcgtcagcctcggcggccaaccggcggcgctgcgctccccggcgcaggcgctggcgcagggtatcggcctgctgccggagagccgcaaaaccgagggcctggtgctgccgttttcggtggcgcagaacatcaccctcaatcggcaccaccggcgtggcaagatcttcgtcagcgcccgtaaggatcgcgacgtggtgcagcggctgatccgcgccgtgggggtgaaaaccccggacgccgagaccgccgtcagcaccctgagcggcggcaaccagcagaaggtggtgatcgcccgctggctcaacaacgactgcaacatcctgatcttcgacgaaccgacgcgcggcatcgacgtgggcgccaaggccgagatctaccagctgatgcagcaactgacccagcagggcatctccatcatcatgatttcctccgaactgccggagatcatcggtgtgtgcgaccgcgtgctggtgtttcgcggcggccacatcgtcgccgagctgaccggcgacgacatcgaatccaaccacattatgcttcacgcgaccgggagtgccttatga

SEQ ID NO: 424775 - DNA, 918 bp, Serratia marcescens
atgttttcattattcaaaaagaccctgccttttatcgtcgccggtggaatgttggcggccagccatggggcgctggccaagcaaatcactatcggtatgtcgttccaggaaatgaacaacgactacttcgtcaccatgaagcaggcgctggatcaggcggcggcggatatcggcgccaaggtgtacgtggccgatgcgcgccatgacgtcgccaaacagatcggcgacgtggaagacatgctgcagaagaaggtggatatcctgctgatcaatccgaccgattcggtgggggtgcagtcggcggtgatctccgcccacaaggccggcgcggtggtggtggcgatcgacgcgcaggcggaagggccgctggactcgttcgtcggctcggaaaactacgacgccggcttccaggcgggcgagtacctggcgaaagcgctgggcggcaaaggcaaggtggcgatccttgacggcatcccggtggtgccgatcctggagcgcgtgcgcggctttgaagcggcgatgaagaaataccccgacatcaagatcgtcaccaagcaaaacggcaagcaggagcgcgacacggcgctgaccgtgaccgaaaacatgctgcagtcggcgccggatctggcgggtatcttcagcgtcaacgacgtcggcgcgctcggcgccctggcggcgatcgaaagcaacggcgccaaggtcaagctggtgagcgtcgacggccagccggaagccatcaaagagatcctcaagccgaactcgccgtttatcgccacctcggcgcagttcccgcgcgaccagctgcgcatcgcgctcggcattgcgctggcacgctactggggcgccacggtgccgaaaaccgtgccggtcaaagtgaagctgatcgaccgcagcaatgcggccggctttagctggtaa

SEQ ID NO: 424776 - DNA, 1068 bp, Serratia marcescens
atgagccagttgccggaaaaaatgcgtgcggtcgtttgccacggcccgcaggactatcgtttcgaacaggtgcccacgccgttgccgaaggcgcacgagctggtgatcaaggtggaaggctgcggcatctgcgccggcgactgcaagtgcaagaacggcgcgcagatgttttggggggagaacccgtgggtcaaaccgccggtggtgccggggcacgagttctacggccgcatcgccgcgctgggcgagggcgcggaaggcaaataccagctcggcgagcgggtgatcgccgagcagatcgtgccgtgctgggagtgccgctactgcaaatccggcagttactggatgtgtgagacgcataacatttacggtttccaaaaagacgtggcggagggcggcatggcggagtacatgcgcttttccgagaacgccatcgtgcacaagatcccggaaagcctgagccatgaagacgcggtattgattgagccgatggcctgcgccattcacaccgtggcgcgcggcgacatccagctggacgacgtggtggtgctggccggcgccgggccgctcgggctgtgcatggtgcaggtggcgcgcctgaagacgccgaagaaactgatcgtgatcgacgccatcgacgagcggctggcgctggcgaaagaatttggcgccgacgtggtgatcaacccgctgaaggaagacgctgaccagatcgtcaaatcgctgaccggcggctacggctgcgacgtctacatcgaggccaccggcgcgccgatcggcgtcacccaggggctgcagatgatccgcaagctgggccgcttcgtggagttcagcgtgttcggcaaggaaaccaccgtcgattggtcgatcatcggcgatcgcaaagagctggacattcgcggcgcgcatctggcgccctacagctacgaaatcgccatcgatctgttcgagcgcgggctggtgacctccaatggcgtggtgacccacagctattcattgaacgactgggacgaagccttcgccctggcggactcgaccgactccatcaaggtgatcctggttccctga

SEQ ID NO: 424777 - DNA, 954 bp, Serratia marcescens
atgaaactgcaccaactgcaggcgctggtggccagcgccgacagcggcagcattcgcgcggcggcgcggcatctggggctgtcgcaggcggcggtgacccgcgcgctgcgcgaactggagcaggaacaggcgctgccgctgctgatccgcaccccgaccgggctgggctttactccctacggcaaaaccttgctggcgcacgcccggctggtgctgaaccagctggagcaggcgcaaggggaaatggcggcgctgcgcgggcgcacggcggatctggtcaaggcggcgttcaccccctggctgatgctgacggtgctgccgtcggcggtgatggcgtttcgcagcaagatgccggcggtgcggctggagctgtcggaaagcctgatggccaacgcccagtcgcagctgcgcgagggcacgatggatttcgccatcacgccgctgccggcgtcgtcggcgccgcaggagttccactgcgagccgctgctggagtatgaaacggcgtacatggtgcggcgcggccacccgctggcgcacagtacctcgctgcatcagctgctggaacaggattgggtgatgagctataccccggaaagtttcgatgcgctgttcgacgaggtgtttctccgccacggcgtgcgcctgccgcgccagcgcattatccaggcgcattcgttcggcatgctgcaggctctggtggagttcgccgaaatgtgtacctgctgtccgcagccgattgccgcgctgccgcagttcgcctctcgcctgcaaccgctggcgctgcgggaaagctgccggccggtgcagctgaatatcgtcacccggcgcaacagcattctgagcgccgccgcccatgcgtttatcgacacgctggtgcgcaccctgcgccagcaggcgcgatcgtcgcggccggaagatcgccagatctacgatcgcgtgcgcctgctgatttag

SEQ ID NO: 424778 - DNA, 1182 bp, Serratia marcescens
atgagcccttcactcgtactgcctgagatcgccgccgttcatgatgagatggtcgcgcttcgccgccacattcacgcccacccggagctgggatttaaggagttcgcgacgtcggatctggtggcgcagcgtctggaggagtggggttaccgcgtcacgcgcggcgtaggacaaaccggcgttgtcgccacattgcagcgcgggccgggaaaatcgctcggcatccgcgcagacatggacgccctgccgatcgccgaaacgaccggcttgccgcatgccagcacccatgccggggtgatgcacgcctgcggccacgacgggcataccgccatgctgctggcggcggcgcgctgtctggcgcggcagccgaacttcagcggcacgctgcacctgatctttcagccggcggaagaaggcggcggcggcgccagagtgatgattgaagacggcctgtttgagcgcttcccctgcgacgcggtgttcgccatgcacaacgtgcccggcttccccaccggccacctgggcttcgccagcggccccttgatgtgctcggccgatacggtgcacatcaccctgcacggccacggcggccacggcgcggtgccgcagagcaccgtcgatccggtggtggcctgcgcggccatcgtcatgagcctgcaaaccatcgtggcgcgcaatatcgatccgcaggaaacggcgatcgtcaccgtgggggcgatgcaggccggccaggccgccaacgtgatcccggcgaccgccaccctgacgctcagcgtgcgcgcgctgacggcggcggtgcgcgcacggctgggacagcgcatcaccgagctggtcacggcgcaggccgccagcttcggcgcccgcgcggagatcgactaccggcacggctacccggtactggtgaaccacccggcagaaaccgagctggcgcgcgcggtggcgctggactgggccggagagagccaggttatccccacgctgcggccgtttaccgccagcgaagatttcgcctttatgctggagaagtgcccaggcagctacatctcgatcggcaacggccccgcaacgccgggcaattccctgcacaaccccggctatgacttcaatgacgacaacctgtcggtaggcgccacctactgggtcaaattggtcgagcgctttttggctcgccccactgtttaa

SEQ ID NO: 424779 - DNA, 789 bp, Serratia marcescens
atgaaaaccatcaaagggctgttgttgctgctgccgctggccgcgagctttcccgcgctgagcggcgaattcagcggcaaggtgatcaagctgggcatcgatcccacctttccgccgctggaatataaaaacccgcagggcaagctgaccggcttcggcgtcgatatcgcccaggcgctgtgcgaccagatgcaggccaaatgcgtgtgggtggaaagcagctgggacggcatgatccccggcctgcaggcgaagaagttcgacgccatcgcctcgtcgatgaccatcacgccgcagcgccagcagcagatcgccttctccagcaaggtctccaacgccccggcacggctggtggcgcataagggcagcagcctgcagcctaccgccgcctcgctgaagggcaaatcggtcggcgtacagcaaggctccagccaggaggcctatgccaacgcgctgtggcgcccggccggcgttaacgtggtcgcctaccaaagccagcaggaggtgaacgaagatctggccaacggccggctggatgcgtcgctgctggccagcgtcagcgccagcgagttcttcaaaacgcccggcggcaaagatttcgcctttatcggcgccgaactgaacgacagcaaatacttcggcgtcggcgacggcatcggggtgcgcaaagaggataccgcgctgcttaacgccttcaacaccgcgctgcaggcgatccgcgccaacggcacttacaagaaaatcaacgacaagtatttcgacttcgacatgtacggtgcggagcagtaa

SEQ ID NO: 424780 - DNA, 318 bp, Serratia marcescens
atggataatgcaaataagccgagtttccaggacgtgctggagtttgtgcgtatgttccgccgcaaaaacaaactgcaacgcgagatcgtcgacaacgaaaagaaaattcgtgataaccagaagcgcgtgctgctgctcgacaacctgagtgagtacatcaagcccggcatgagcattgaagacattcagggcatcatcgccaacatgcgcagcgactacgaagatcgcgttgatgactacatcatcaaaaatgccgatctgtccaaagaacgccgcgagctgtccaaaaagctgaaagcgatgggcgaagtgaagtaa

SEQ ID NO: 424781 - DNA, 1068 bp, Serratia marcescens
gtgcgcctcgatcgaaaaatctcttcccttgaattgctgacctatcggcactatcgcatcgttcacggcgtgcgcattgggttggcgtttatcctgacctttctgctgatccgcttgctggcggtgcctgaaggcacctggccgctgatcaccctggtggtggtgatggggccgatctcattttggggtaacgtgctgcagcgggcgctgcaacgcattgccggcacggtgttcggcgccgcttccggcctgattgccctgtatctggaactctattcgctgccgctgatgctggcctggtgcggcgtggtgatgttcgtctgcggttacctgacgctcggcaagcggccgtatatggcgctgctggtggggatcacgctggcggtggtgtgcggcgcgggcgccggtgacatgcataccgcgctgtggcgcagcggcgacgtgatcttcggctcgctgctggcgctgctgttcaccagcatctacccacagcgcgcctatattctgtggcgcatgcaaatggcggactgcctgcaaaccgccgcccgcctctatggcgcctatttttcgccgaacgtcattgagcggccgcggctggagccgcagctcaaggatctgttgaatcaggtggtgaagctgcgcagcctgatcgtgcccgccagtaaggaaacccgcatccccaaagcggtgttcgaggcggtgcaaaccctcagccgcaatctggtatgcacgctggagctgatggccgacgcctactgggcctcgcgtgaaacgcacttcatcatgttgaacgcccgcacgctgcgcagcacccagctgctgacgctgagctcgctggaatcgctggcggtgctgatgcgcgaaggtccgcaggaacagcggcaggcggcggcggggcagttggcggagatcgccggcgagctgaaaacgctgatgcaggaggtcagcctcggccagcacggcgaagcgccgatttacggctatgtctggctcagcatggagctggcgcagcagttggaagagctgggggatctgctcctggtctgcaccgccgccgggcgcgaataa

SEQ ID NO: 424782 - DNA, 768 bp, Serratia marcescens
atgtacaagattgattacaatagctaccgatcggtcgccagcttcggccaccgcgtgcgttttctggtgctgcactacacggcgcaaaacttcgccgactcggtgaagtcgttgaccggaaaatcggtcagcgcacactatctggtgccggatccgaccgaagccacctatcaggccgccggcttcagcggcgtgcgcattttcaacctggtggatgagaacgagcgcgcctggcatgccggcgccagccagtggggcacccgcagcaatatcaacgacacctcgatcggcatcgagatcgtcaacctggcgagcggcgacggtggaaacatcaccttcccgccgttcaacccgcagcagatcgaggcggtcacccagctggcgcagaacatcctgcagcgttatccggacatctcgccggtgaacgtggtggcgcactccgacattgcgccgggccgcaagagcgatccgggcccgcagttcccgtggcagcagctgtatcaggccggcgtcggcgcctggtatgacgaagcgaccaagcagcagcgccagcaggaatactgccgccaggggctgccggcgcaggccgagctgctgaaactgttcgcccaatacggctacgatacctcggcggccaataccgcagaaggctatcgtcagctggtgcgcgcgttccagctgcacttccgccagcagaagtatgacggcgtgatggatgtcgaaaccgccgccgctctgcgcgcgctggtcgacaagtacgccgcctga

SEQ ID NO: 424783 - DNA, 747 bp, Serratia marcescens
atggaaactaaagaaatcaggcgcaacaatctgcgcgaattgatggcccgctacgcccggcaaggcgtcaaccagaatgagttcgccacgctggttgagtcttccgcgccgacgctgagccaaatcatcggggaaaaatcctcccgcaatcttggcgacaatctggccaggcggatcgaggcccggctgaatttgcccaagggctggttcgacgtgtttcacgaaaagcagctggtgcgcccgtttgacaacgtggcggcggagtccgacttccagcccgcccgtttgaaaccggtggtatgggaagataccgaacaagacaaggaagagtttgtggagatcccgctgctggatatcgatttttccgccggcgacggctgctacgaaatcgtcgatcgcgaggagttttcgctgatcttccgccgttactatctgcacaagatgggggtggcggtcaacgccgcgcgcattatccgcatttccggctccagcatggaaccgcgtctgcaggacggcgacgtggtcggcatcaacaccgacgacacgcgcatccgcgaaggcaagacctacgccatccgccacggcaatttgctgcgggtgaaggtgctgatcgagcagccggacggcggcgtcgtcatccgctccctcaaccgggaagagtaccaggacgagcatctcagctatcagcagcgcaaggagcaactggtggtgctcggccgcgtcttctggtcctcttcgtcctggtag

SEQ ID NO: 424784 - DNA, 1110 bp, Serratia marcescens
atgaaaacgctactgttgaccggcgctaccggctttttggggggtgcggttctcgagaaattattgattgaaaatcagtctgttaattatcttttgctggtgcgtgccgatgatgcgcaacaagggctggcccgtattcgcgcgaatatggaaaagtttaatgtcgacgcgagcctgctgtctaaaattacgatagaaaatatattgttgggcgacctttccgagccggccgactttttaactgacgcacgtattaacaaagtcacgcacgttattaactgcgcggccgttgcttcatttggtaataacccgctcatttggaaggtaaacgtagaaggcactctggcctttgccgaaagaatggcgcaggtgccgggattaaaacgtttcctgcacgttggtaccgccatgtcctgttcgccggagccgggttcgctggtggcggagagcggcgagtttgaggaagacgccgagcatctggtggaatacacccgttccaaatccaccatcgaacagctgatgcgccagcgctgcccgcaactgccgctgaccatcgctcgtccgtcgatcgtggtggggcacacccgcctgggctgccagccttccagcagcattttctgggtgttcggcatggcgttgatgctgcgcaaattcatgtgctcgctgcaggacaatatcgatgtgatcccggcggactactgcgcggatgcgctggtgatgctgatgaacagcgaaacgttggagaacgacgtttatcacatctccgccggtgaggagagcagcgtcagctttgccgaaatcgaccgcgccatggcggcggcgctggaaaaggcgccggtgggcgatgagtatgcgcaggtgacctatgacgcgctggtgaaaatgcgccgccagttgaaagacattttcggcccgtgcaacgagcggctgatgctcaaggcgatgcgcctgtacggatcgttcgccatgctcaacgtgcgtttcagcaacgaaaagatcctcaaactgggcatgccgaagccgccgcgctttaccgactatatcgccggctgcgtgcagtcgacccgcgggctgtctatccagcagcagatggtggtggacttcaaataa

SEQ ID NO: 424785 - DNA, 207 bp, Serratia marcescens
atgacctataaccaaaaaatctggttgggggttttgctgctgtgcgccctgttttggggggcggtgataagcggcgcctattcgctgtataaccgggcggatcgcttccaggctcaccacccggagagcgagctcgccgctcgccacagccagcccccttgcacgcaacccagctcacaggcatcaagcgccccccggaatgggtag

SEQ ID NO: 424786 - DNA, 189 bp, Serratia marcescens
atggctcgaaagctggatagcttaccgcaggcacaacgcgaaaaaatagaaaccgatttgctggccatcagcgtgatctacaatgagcgctacggcatcgcctcgacccaggcggaaacggaacgacagatccccgaccacctgctcccctactttcatcaacggctggattactatcgccgtgcgtaa

SEQ ID NO: 424787 - DNA, 1428 bp, Serratia marcescens
ttgagcagcaaggcaacggccacattttatattcacgattacgaaaccttcggcaaaagcccgtcgctggaccgcccggcgcagtttgccggcgtgcgcaccgatatggatttcaacattatcgaagagccgctggtcatctactgcgccccggccgacgactacctgccggaacccgaggcggtgatgatcaccggcatcacgccgcaggtggcgcgcgccaaaggcgttaacgaagccgaattcacccgccaaatccaccaggccttcagcgtggccggcacctgcattctcggttacaacaacatccgtttcgatgacgaagtgagccgcaatatcttctatcgcaacttctacgatccctatgcctacagctggcaaaacggcaactcgcgctgggatctgctggatgtgatgcgcgcctgctacgccctgcgcccggacggcatcgtctggccggaaaacgaagacggcttccccagcttccgcctggagcatctcacgcgcgccaacggcgtcgagcacacgcaggctcacgacgcaatgtcggacgtttacgccaccatcgccatggccaagctggtcaagcaggcgcagccgcggctgttcgatttcctgttgcagcaccgcaacaagcacaagctgaacgccctgatcgacgtcgccgaaatgacgccgctggtgcacgtctccggcatgtttggcgcggcgcgcggcaacaccagctgggtgtcgccgttggcctggcacccggacaacaaaaacgcggtgatcatgtgcgatctcgccggcgatatgacgccgctgctgacgctgagcgctgagcagctgcgtgaacggctgtacacccgccgcgacgacctggcgccggatcaggcgccggtgccgatcaagctggtgcacatcaacaaatgcccggtgctggcgccggccaaaaccctgctgccggagaacgccgagcggctgggcatcgatcgccaggcctgcctgcaaaacctgcagctgctgaaacagcacccggaagtgcgcgagaaagtggtggcgctgttcgccgaagccgagccgttcaaaggctccgacgacgtcgacgcccggctgtatgacggcttcttcagcgacgccgacaaggcggcgatgaggattatccagcagaccaagccgcagaacctgccggcgctggatctggccttcagcgacggccgcatgaaagagctgctgttccgcttccgcgcgcgcaactacccgaatacgctggacgatgccgaacagcgccgctggctgcagcaccgccaagaagcgctgagcgcggagcgcgtgcagagttacctgctgcagctcgaatcgctgtataacctgcacgaaggcgacaaagagaaaaccgccctgctgaaagcgctgttcgattacggcaaagagttggtggggtaa

SEQ ID NO: 424788 - DNA, 1368 bp, Serratia marcescens
atgtccgataacaccctcaacgccgctccggctcagcgcactcagctgcgtaaaaccctgactttggttccggtagtgatgatgggcctggcttatctgcagccaatgaccatcttcgataccttcggcatcgtatccggcctgaccgatggtcacgtcgcgaccgcgtacgccttcgctctgctggcgatcctgtttaccgccctgagctacggcaagctggtgaagaagttcccttccgccggttccgcctacacttacgcccagaaagccatcagcccacacgtcggctttatggtgggctggtcatcgctgctggactacctgttcatgccgatgatcaacattttgctggccaagatttacctggaagcgatcttcccgggcgttccgtcctggattttcgtggcggtgctggtcggcttgatgacgattttcaacctgcgcggcatcaagctggtggctaacctgaactccatcatcgtggtggtgcaggtggcgatcatgatcgtgttcctcggcctggtgatcaacggcgtttaccacggcgaaggcgccggtacgctggtcagcagtcgcccattctggtccgataacgcgcacgtggtgccgatgattaccggcgcgaccatcctgtgcttctcgttcctgggcttcgacggcatcagctcgctgtctgaagagaccaaagacgcggaaaaagtgatcccgaaagccatcttcctgacggcgctgatcggcggcatcatctttatcgtggtgtcttactttgtgcagctgtacttcccggacatctcgcgcttcaaggatcctgacgcgtcgcagcctgaaatcatgctgtacgtggcgggcaaattcttccagtcggtgatcctggtgttctcctgcgtgacggtattggcgtcaggcatggcggcgcacgcgggcgtttcgcgtctgatgtacgtgatgggccgcgacggcgtgttcccgactcgtttcttcggctatgtacatccgaagtggcgtacaccggcgctgaacgtgctgctggttggcgccatcgcgctgtccgccgtgtcgtttgacctggtgaccgcgaccgcgctgatcaacttcggtgcgctggtggccttcaccttcgtcaacctgtcggtgatctcgcagttctatattcgcgacaagatgaaccgcaccgtgaaagacacgttcaactacctgatcctgccggtgctgggcgcattgaccgtcggcgcgctgtggatcaacctggaagccagctcgatgacgctgggcctggtctgggcggccatcggtctgatctacctggccttcgtcacccgcagcttccgtctgccggtgccgcaagcgagcgaagacgccgcctaa

SEQ ID NO: 424789 - DNA, 1329 bp, Serratia marcescens
ttggaacgccatcccgccacgcagtatgtcgatatccttctcaccgatctcaatggttccttccgcggcaaacgcatacccgtctcagggttgaaaaaactggaaaaaggcagctacttccccgcgtcggtgttcgccatggacatcctcggcaacgtggtggaggagaccggccttgggcaagacctcggcgagccggaccgcatttgcctgccggtacccggctcgctgacgccgtcggccgccgatccgcagcatatcggccaggtgctgctgaccatgctggatgaagatggcactccctttgacgttgaaccccgcaatgtgttgaaccgcgtgtggcaggcgctgcgacagcgcggcttgttcccggtggcagcggtagagctggagttttatctcatcgatcggcagcgcgacgcggagggcgatctgcagccgccgtgcgcgcccggcacccaggagcgcaacacccaaagccaggtgtactccgtcgataacctgaaccatttcgccgaggtgctgaacgacattgacgcgctggcgaagctgcaggggctgccggcggacggcgcggtggcggaggcgtcgccggggcagttcgaggtcaacctgcgtcataccgacgatattttgctggcctgcgaccacgcgctggcgctgaaacggctggtgcggctggtggccgagaaccacgacatgcacgccacctttatggccaagccctacgaggatcatgccggcagcggcatgcacgtgcatgtcagcatgcaggacggcgcgggcaacaacctgttcgccgacgacgaaggcgaggattcgccactgctgaaacaggcgctggccgggatgatcaccctgatgccggcgtcgatggcgctgctggcgccgaacgtcaacgcctaccggcgtttccagcctgggatgtatgtgccgatccaggccgcctggggccacaacaaccgcaccgtggcgctgcgcattccctgcggcgaaccggagaaccatcgggtggagtatcgcgtggccggcgccgacgccaatccatatctggtgatggcggcgatcctggccggcatgctgtacgggctggacaacgcgctgccgctgcctgagccggtgaccggcaacgggctggagcaggaggggctgccgctgccgatccgccagagcgacgcgctgtacgagtttgagcatcagcacgcgctgacccactatctgggcgagcgtttcacccaggtttatcacgcctgcaagaccgacgaactgctgcagttcgagcggcgagtgacggaaaccgagattgactggatgttgaaaaatgcctga

SEQ ID NO: 424790 - DNA, 558 bp, Serratia marcescens
atgagcgaagccagcttggcaccgggcaaacgcctgtcgcagatccgtcagcaattgggtttgtcgcagcgccgggtcgccgaactgtccgggttaacccacagtgcgatcagcaccatcgaacaggacaaggtcagcccggccatcagcacgctgcaaaagctgctgaaggtgtatggcctgtcgctgtctgaattctttgccgaaccggaagccgtcgacgagccgcgcgtggtgatcgacgccgaggatctgattgagatcggcagccagggggtgtcgatgaagctggtgcacaacggcagcccgacgcgtaacctggcgatgatgctggaaacctaccagcccggcaccaccaccggtgaaaagatcaagcaccagggcgaagagatcggcaccctgctggagggcgagatcgtgctgaccatcaacggccagagctactgcctgaccgccggccagagttacgccatcaacaccggcattccgcacagcttcagcaatacctcggcgcgcatctgccgcatcgtcagcgcacacacccccaccaccttctga

SEQ ID NO: 424791 - DNA, 1512 bp, Serratia marcescens
atgtcaaccgcaacgccttcacgcctcgagatgcgcaatatctcgatcgccttcgccggcttcaatgcgctgcaggacgtggacttcacgctgcagggcggctcaatccacgcgctggtcggcgccaacggcgcgggcaagtcgacgcttatggcgatcctctccggcgcccacgatcattatcgcggcgagatcctgatcgacggccaggcggtggcgatccactccccgctgcaggcgcgccgccacggcattcacgtggtgcagcaagaggtcgacgtcgcgctgatccccacgctgtcggtggcggaaaacatcatgctggactggctgaacgaaccgggccactggctgaactgggcggaactgcaccgccgcgccgcgcagctgctgcagcaatgggcgctgccgctcaacccgcgcaggcggctggcggactgcacgctggcggaaaaacagcaggtgctgctggcgcgcgcgctgtcgcaccgctgccgttttctggtgctcgacgaaccgaccgccccgctcgaccgcgccgagagcgagcgcctgtttaacgtggtgcgccgcctgcaatccgaaggcatcggcatcgtatttatttcccaccgcatccacgaactgagcgacatttgcgatcggctgacggtgctgcgcgacggccgtcgcgtcagcgaagacgccatgcgcgggctgagcggcgaacagatcgtcgagaagatgctcggccatcggctggacgatattttcccgccgccgcgcccgccgcacgccgagcgaacgttgctgcaggtgcaaggcttgcgcgatcgccacaagctgcgcgacgtttcgctgcggctgcatgaaggcgaaattctcggcatcgccgggctggcgggagccggcaaaaccgagctgtgcaaagcgctgttcggcgccagcgccgtgcagcttgagcgcggcgaactgcgcgggcagccctgggcgccgcgcgcgccgcacctctcggtcgaacaaggattggcgctggtgccggaggaacgccgcaaagaaggcattttcatcgatgaggcgatcccgatgaacctgagcgtcagcgccgacgacagcttctcgcgctggagcctgttcagccggcgacaagagctgcgctgggcgcgcgagatcatgcaacgcctgaacattcgcgcctccggcccgcaacagcggctggcgcgcctgtccggcggcaatcaacaaaaagtggcgatcggcaaatggctgcgcggcgacgccgaggtgctgatcttcgatgaaccgaccaagggcgtggacatcaaggccaagcaggagctgtttggcctgatcgacggcctggcgcgcgccggcaagggcgtggtttacgcctccggcgagttcgccgaactggttggcctgtgcgatcgcatctgcgtgctgtgggacggccgcatcgtggcggagttgaacgccgccgacatcgacgaagaaaccttattgctctattccaccggaggaacccctgcgtga

SEQ ID NO: 424792 - DNA, 996 bp, Serratia marcescens
gtgagtaaagaattagccctgcggcctgcgctgccctggcgccaacagctgttcgatttcctctacaaatggggcatgctgctgaccgtggcggcgctgatcgccctgttcggcctggcgtcggacaacttcctcgatgccaacaacatcatcaatatcctgcgttcgatcgccatcgtgacggtgatcgccatcggcgtctctatctcgctgtcggtcggcggtttcgatctgtcggtcggctcgaccgcctcgctggccaacgcgctggtaatttcgctgttcgtctggcacgggttcggcaccaccggcgccatcgtggtgacgctgctgctgtgcacgctggtcggcctgttcaacgccctactgatcgtggtgttcagaattcccgatatgctggcgacgctggccagcctgttcgtgatccagggcgtggcgatgacctacagctacggcggatccatcacccaaaacatggtgctgccgaatggcgacatggcggaaggcctgattccggaggtgttttccgccctcggccaggtgccggtgatcgtgctgatcatgctggcggtcaccgtggcggtgcagctgttcctgtcgttgaccaagcatggccgccgcatgtatgccatcggcggcaaccccgaggcggcgcgcctttcgggcatccgcaccgtgcgttacagggttgccgcttatgtcatttcctcttggctggcggcgcttggcggcatcttgctggcgtcacgtatcggctcttcgcaggtcaacgccggcggcggctatctgatggacgcggtggcggcggcctatatcggcttctcgctggccggggccggcaaacctaatgcgctcggcactctgatcggcgcggtgatcctcggcgtgctgcaaaacgggctggtgatgctgtcggtgccctactacgccatggacattatcaaaggcctggtgctggcgctggcgctggccatcacctacatccaaaaacgctga

SEQ ID NO: 424793 - DNA, 1989 bp, Serratia marcescens
atggaaacgccacgttacagcaagctcgccgctctggtgatcgcctcactcagcgccaccgccgcgctggccgcgccgcaggacgacacccaggacaccatggtcgtcaccgcctccggcttccagcaaaaaattcaggactccgccgcttccatctcggtgatcccgcgccagcagatcgaagacaaggcctatcgcgacgtgaccgacgcgctgaaagacgtgccgggcgtggtgatcaccggcggcgccagcagcagtgacatcagcatccgcggcatgtcctccaagtacaccctgatcctggtggacggcaagcgcgtcgacacccgcggcacccgtccgaacagcgacaacgccggcatcgaacagggctggctgccgccgatggaagccatcgagcgcatcgaagtggtgcgcgggccgatgtcttcgctgtacggctccgacgccatgggcggcgtgatcaacgtcatcactcgcaagacctcccgcaccgagtggaaaggctcgctgcacggcgacgccaccattcaggaaaaccgcgattccggcgatctgttccagaccaacgcctacgcctccggcccgctggttgaagggctgctcggcctgcgggtcaacggcctgctgtcgcgccgcgcggaagataaaatcgtcaacggttacaacgaacagcgcatgcgcagcggcaccgcggtgttcaccctgacgccggacgagaaaaacgaattcgacttcgaaatcggccgttcgctgcaagatcgcaacagcacgccgggcaaatcggtggtggcggagcgctgcagcaaaggcaaatgctcgcctacgtcccgcagcgaaagcctgtatacgcgcaccaactactcgctgacccacaacggctattatgacttcggcaactccaccagctacgtgcagcgcgaagaaaccggtaacccgggccgtaacatgaaggcctacaacaccatcttcaacacccagaaccagttcgagctgggttcccacatgctgaacctcggcggccaataccgctatgaaaaactgggcgacggcggcaaccagcttgagtcggctcaaggtctcagcaagctgacgcgctggagctgggcattgttcgctgaagacgaatgggcgctgaccaacgacttcagcctgaccagcggcatccgcatggatcaggatgaaaacttcggcagccactggaccccgcgcatgtacggcgtctggcacctgaccgaacagtggacgctgaaaggcggcgtctccgccggttacaaatcgccggatctgcgccaatcctcccctaactgggggcaggtcaccggcggcggcgtgcgtaaaggcatcatcgtcggtaacccggatttgcagccagagaagagcctgagcgaagaaatcggcctgatgtgggatagcctgaaaggcgttaacgccggcgtgacggtcttcaacaccgactttaaagacaaaatcaccgaagtgcgccgctgcgaagacacgccggattgcaccatcggcggcacgtcctacgactttatcagcgatcgcgtcaacgtcgacaaagccaatatgcgcggcgtagaagccaccttcggctggcagatcaacaaagactggaagtggaacaccaactacacctacaccgcttccgaacagaagagcggcgagttccagggcaaggcgctcaaccagatgccgaagcacatgctgaacaccgtgctggactggcgcgccacgcaggacctcagcctgtggtcgcgcgttaacttccgcagccgcacctctgactacctgagccgcacctcgatggccaagagcacgccgtcctacaccttcgtcgatgcaggcctgagctaccaggcggcgaaaaacctgcagctgaccggcggggtctacaacatcctcgacaagaccgtggattacgaccactacaacaccacgctggacggccgccgttacaccgtcggcatgacctataacttctga

SEQ ID NO: 424794 - DNA, 948 bp, Serratia marcescens
atgagattacgccgctcccccctgatgatcgccctgctggcaacgatggcgctggcgggttgccacagcaaaaccgacgcgccggtggctccggccaccgtcaacgtccagcacctgaacggcagcaccgaggtgaaaaagcacccgcagcgcatcgtggtgctggattacgcctcgctggaaacgctgcagctgttgggcgtcgagccgctggcgctgcccggcaaccgcaagaacttgccggatagcctgaagcgctatcaggacgacaaatacctcaatgccggcaccctgttcgagccggatatggccgtgctgcgcgccgccaagccggatctgatcctgatcgccggccgggcgtccaaagcctatgacgagctgaacgcgctggcgccgacgctgaacatgtccgtcgatccgcaggatcagctgggcagcctgaaacagcgcacgctgcagctgggcgagctgttcgataagcagcaacaggcacaggcggcggtcgataagctggatgcgcagatcgcggcggtcaaaccgcaggccgctcaggccgggcgcgggctggtggtgctgttctccggcggcaagatcagcgcctacgcccccaagagccgtttcagcttcgtctatgacgccctcggcttcgcgtctgcgctgcagtccgacgaaaaagacgtgcgcggcaacaagctgacgcctgagcaggtggccaaactgaatccggactggctgttcgtcatcgacagagacgccgcgaccgggcggccgaacgcggtggcgccgcagaagatcctcaccggcaccgcgctgaagaaaaccacggcggtgaaaaaaggccaggtggtttacctgccggcggccgaggtgtatctgtccggcggcatcgtcaccgcccagcacgtcgtcgaacgcgtgagcgaggcgctgaaccacgcagcacgataa

SEQ ID NO: 424795 - DNA, 789 bp, Serratia marcescens
atgagccagggcctgcgaatagaacacttctcggcgggctacccgaagcgccaggtgatcgacgatctctcggtgccgatgctgccgcgcgggcaaatcaccgtgctgctggggccgaacggcagcggcaaatcgacgctgctgcgctcgctggccgggctgaacccggcgcagggcaagctgtggctggacgacggcgatctgatgcagatgccgttcgcccgtcgggcggagaaagtggtgtatttgccgcagtcgctgcccgccggggtgcatctgcacgtgctggagtcgatcatcgtggcgcagcgcgcctcgggcggccgcagcaacgccggcagcgaagcggaagtgatggctttgctggagcagttgggcatcgcccacctggcgctgagctatctcgatcagctgtccggcggccagaaacagctggtggggttggcgcagtcgctgatccgtcagccctcgctgctgctgctggatgaaccgctgagcgcgctcgatctcaactatcaattccacgtgatggatttggtgcgccgcgaaacccgcaagcgcaacatcgtgacggtggtggtggtgcacgacatcaacatcgcgctgcgccacggcgaccacgtgctgatgctgcaggatggcgatctgatcgccgacggcgcgccggatcaggtgattacgccgcagagcctggcgcgagtctacggcgtgcgcgggcgtatcgagcgctgttcgcagggcacgccgcaggtgctgatagacggtctggtgaaccagccgacgatttaa

SEQ ID NO: 424796 - DNA, 1083 bp, Serratia marcescens
atgagcgtatccaccgatcccatgactgacgccaaggggaaacccaacgccggcgtgatggggcgttatcagcatattcttcgccatcgcctgttgatgatgggcgtattggcactggcgatcctgggctcgctgctgctggatttcaccatggggccgtccgggctgtcgctgtcgtccttatggcaaacgctgcttgaccccgcggcggccgatgccggcacgcgggtgatcgtctgggacatccgcttgccttacgcgctgatggcggtggtggtggggtttgcgctcggcctggccggggcggaaatgcagaccatcctgaataacccgctggccagcccctttaccctcggtgtgtcttccgccgcggcctttggtgccgcgctggcgatcgtgctcggcatcggcattccgggcattcccgatcagtggttcatctccgccaacgcctttatcttcgcgctgttcgccgcgctgatgctcgacggcatcacgcgctggacgcgggtcgccacctccggcgtggtgctgttcggcatcgcgctggtgtttaccttcaacgcgctggtgtcgatgatgcagttcatcgccagcgaggacacgctgcaggggctggtgttctggaccatgggcagcctggcgcgcgcctcgtgggacaagctgggcattctgttcggcgtgttcgccgtgctgctgccgctgtcgatgatgagctcgtggaaactgaccgcgctgcgcctgggtgaagaccgggcggtgagcttcggcatcgacgtgcgccgtctgcggctgaccacgctgctgcgcatcagcatcctttcggcgctggcggtggcgttcgtcgggccgatcggctttatcggcctggtggcgccgcacatcgcccgcatgatcttcggcgaagatcaccgtttctatctgccggccagcgcgctgattggcgcgctggtgctgtcgatggcctcggtggcgtcgaaaaatctggtgcccggggtgatcattccggtgggcatcgtcacgtcgctggtcggggtgccgttcttcctgagcattattctgcgccaccgggggaacgtatga

SEQ ID NO: 424797 - DNA, 1101 bp, Serratia marcescens
atgagaagtccatctccggcggtaacgcccaaacgcccggcgctgctgaactggctgttgcacagcccgctgcacgccgatgacgagccgtttaaacgccagctgcggctcacgctgacgccctctcctctcactccctggctgaatgccgtggggccggcggcgctgttggtggggtacgcctggctgaaccagcggctggtcggtatcgttctgctgctgctgttactgctgctgaccgccgggcgcgcctggctggcacagaggcgccaacccgcctggccggacgccatgctggtgacggtgttgctgtggatgctgctggtcggcgccagcgccgcgctggcgatgctgtcgggccgctttgtgctgatcctgttcgccggtctgacgatcaccgctctggcctgctggctgatgcagcgccatgccgccgcgccgcgtttcgcgctgcttgaggtgatcgcgctgacgctgccctacctgctggcggcgccgctgtcgcgcgtgcaaaacctgttcgtcctggcggatctcacgccgctgtggctggtgctggcccatggcatgatcgcgcgctaccaccgccagcgggtacagcacgtcacgctggcgtgggagaagcagcaggcgtcccaccgcgatcgcctgaccggcttcctcaaccgcgcgggcggcgaggcggtgatgcgcaacatctgccgccctggtacgacacagccaatctctcacctgttcattcttgaattcggcccgctggcggcgctttaccaaagccacggcgtgcagatcggcgacgacgtgctgcgcaccgtcggcgagcgcctcaagacgctgatccgccccagcgactacgtctgccgctacaccggcggcctgtttttgatactggtgcacgatctgccctacggcgcggaaagcgagttcctggcgcgcattgtgccgccgctggaagcgccctacgattttggcgcgttcggcgaggtgaacatgcaactcaacgccggcattttggcgctgacgcaggattatgcgacggtggaagatttgatgagttcggcgcagcaggcactggcggaagccaaaggcgggaaaaagtaa

SEQ ID NO: 424798 - DNA, 1479 bp, Serratia marcescens
atggctcagcaggatataaaaacatcggggcagcaagcacccggattgcgccgcgagctgaaagcccggcatttgaccatgatcgccatcggcggctccatcggcaccggcctgtttgtcgcctcgggcgccacggtttctcaggcaggccccggcggggcgctattgtcttacgctctgatcggtttgatggtgtacttcctgatgaccagcctgggcgaactggcggcctttatgccggtttccggttcattctccacctacggcgccaaatacgtggaagaaggcttcggcttcgcgctgggctggaactactggtacaactgggcggtgaccatcgccgttgacctggtggcttcgcaattggtgatgagctactggttcccggacacccccggctggatctggagcgcgctgttcctcggcctgatgttcctgctgaactacatttcggtgaaagggttcggcgaggcggaatactggttcgcgctgatcaaggtcagcaccgtgattatcttcatcgccgtcggcgtgctgatgatcgtcggcattctgaaaggcggcgagcacgccggctggcagaactggacgataggggacgcgccgttcgccggcggcttctcggcgatgattggcgtggcgatgatcgtcggcttctcgttccagggcaccgagctcatcggcatcgcggccggcgaatcggagaacccgggtaaaaacatcccgcgcgcggtgcgtcaggtgttctggcgtattctgctgttctatatcttcgccattctgatcatcagcctgatcattccgtacaccgatccgagcctgctgcgcaatgacgtgaaagacatcagcgtcagcccgttcaccttggtgttccagcatgccggcctgctgtcggcggcggcggtgatgaacgcggtgatcctgacggcggtgctgtccgccggtaactcgggcatgtacgcctctacccgcatgctgtacaccctggcgtcggaaggcaaggcgccgcgcatcttcgccaagctgtcgaaaggcggcgtgccgcgcaacgcgctgtatgcgacctgcgtggtggccgggctgtgcttcctgacctcgatgttcggcaaccagtcggtttacctgtggctgctgaatacctcgggcatgaccggtttcatcgcctggttgggcatcgccatcagccactaccgtttccgtcgcggttacatgctgcaggggcacgatctgaacgacttgccataccgttccgggttcttcccgctggggccgatcttcgccttcgtgctgtgcctgatcattaccctgggccagaactaccaggccttcctgcaagacaagatcgactggtacggcgtgaccgccacctacatcggcattccgctgttcctgctgatttggttcggttacaagctgtcgcgcggcacccgcgtcgtgaagtacagcgaaatggaattcccgaagatggacgtgaagtaa

SEQ ID NO: 424799 - DNA, 867 bp, Serratia marcescens
atgcatatcacgttgcgtcaactggaagtcttcaccgaagtgctgaaaagcggttcgaccactcaggcctcggtggtgctggcgctgtcgcagtcggcggtcagcgcggcgctggcggatctggaggggcagctgggcgtgcagctgttcgatcgcgtcggcaaacggctggtgatcaacgagcacggccggttgctgtatcccaaggcgctggcgctgctggagcaggcgggggagatcgagcagctgtttcgccatgacggcggggcgttgcgcatcgccgccagcagcaccatcggcaactacatgctgccggagatgatcgcccgttaccgccgggactttccggccacgccgctggagctgaacgtcggcaacagccaggacgtgatcgtggcggtggcggatttccgcgtcgatctgggattgatcgaagggccttgccatatgccggagctggtgacgcagccgtggctggaggacgagctggtggtgttcgccgcgccggacaacccgctgacccgtcagccgccaacgctggaggcgctggccaatgccccttggatcctgcgcgagcgcggttcgggcacccgtgaggtgctggatcatctgctgttggcgcacctgccgcatttccagctggtgatggagctcggcaactcggaggcgatcaagcacgcggtgcggcacggcatcggcatcagttgcctgtcgcggcgggtggtggcggaacagttggccagcggcgcgctggtggaactgccggtgccgctgccgccgctgcggcgcaccctatacctgatccgccatcggcaaaagcacatttctaacgccttgcagcgttttctcagctattgcgcgctgtaa

SEQ ID NO: 424800 - DNA, 198 bp, Serratia marcescens
atggataccgacgatcaacgcagagagcagatagaccgggaagtgggccgcgcggtgcggcggttgattgaagaaaacaaggcgatcgaccgcgaccatctcgtggcgatgctgcaattgatacagcgggacgaagccggcacgccgcgcgaggcggcgctggctgcggcggcgcagctggtcgccttgggtaagtag

SEQ ID NO: 424801 - DNA, 1074 bp, Serratia marcescens
atggcgactgataccactcatacttaccccgagcgacgctttccgctgttcggcctgccgcggctggtgccggggctggcgctgaccggcgcgctcaccgcgctggccgtctgggccggcgacattccctgggtggcggagctgggcctgggggcgctgacgctggcgatcctgttcggcattctggtgggcaacacgctgtatccccgctggcaaaccgtttgtcacggcggcgtacagctggccaaacaacgcctgctgcgtctgggcattatcctgtacggctttcgcctgacctttcagcaaatcgccgacgtgggcgccagcggcatcatcatcgatgcgctgaccctgaccaccaccttcctgctggcctgctggctcggcaagaaagtgttcggcatcgacagccagaccgcgatgctgatcggcgccggcagcagcatttgcggcgcggcggcggtgatggccaccgagccggtgctgaaggccgactccagcaaagtggcggtggcggtctcgaccgtggtggtgttcggcaccctggcgatcttcgcctacccgtggctgtatcaattgaacgagcacttccagtggctgccgttcagccaggaaaccttcggcatctacgccggctccaccatccacgaagtggctcaggtggtcgccgccgggcacgccatcgggcctgacgccgaaaatgcggcggtgatcgccaagatgatccgcgtgatgatgctggcgccgttcctgctgctgctgtcgggctacatcagccgcggcggcgcaggcaaggcggaaaaatccgcgattaccattccgtggtttgccgtgctgtttatcgccgtcgccgggctgaactccttcaacctgctgccggccacgctggtgcagcacctgatcaccgccgacacctggatgctggcgatggcgatggcggcgctgggattgaccacccacatcagcgccgtgcgccaggccgggatgaaaccgattctgttggccacgctgctgttcgtctggctgctggtcggcggcggcgcgataaaccagctggtgcaacactggctctaa

SEQ ID NO: 424802 - DNA, 840 bp, Serratia marcescens
atgaagtttgtcggtgcacatgtcagcgcgtcaggcggcgtggatcaggcggttatccgcgcgcacgaattggaggcgaccgcgttcgccctgttcaccaaaaatcagcgtcaatggaaggccgcgccgctggccgccgacgtgatcgataagttcaagagcgcctgcgcccagtacggcttcgggccggggcagatcctgccgcacgacagctacctgatcaacctgggccacccggtggccgaagcgttggaaaaatcgcgcgaggcgttcatcgacgagctgcagcgctgcgaacagctggggctgacgctgctgaacttccaccccggcagccacctgctgcaaatcgatgaagacaagtgcctggcgcgcatcgccgaatcgatcaacatcgcgctggataaaaccgccggcgtgacggccgtgatcgaaaacaccgccggccagggcagcaacctgggcttcaaattcgagcacctagcggcgatcatcgacggcgtggaagacaaaagccgcgtcggcgtttgcatcgacacctgccacgccttcgccgccgggtacgatctgcgtaccgaagaagactgcgaacacaccttcaaacagctcggcgacatcgtcggcttcaactacctgcgcggcatgcacctgaacgacgccaagagcgagttcaacagccgcgtcgaccgccaccacagcctgggggaaggcaacatcggcaaaacggtgttcagctacatcatgcgcgatccgcgcttcgacaatatcccgctgattctggaaacggtaaacccggatatctgggcggaagagatcgcctggctgaaagcgcagcagtaa

SEQ ID NO: 424803 - DNA, 1686 bp, Serratia marcescens
atgaaaacgctgctgatggtagacagttcgctggggcaggcccgtggccacctggcgaaacgcatgctggaggccgccgcggccaaaaccggcctgacgctggtcgagtcgctgcaggacgccgaactggtggcggtggcggggcagtcggccccggctgacgccgggctgaacggcaaattggtgtatgtgggcgatgtagaacaggcggtgcgtgaaccggacgcttttctggcgcgcgccaaggccgaagctgaaacctatcaggcgccgcaggctgcggcgccggtgaaagccggtgggcaaaaacgcatcgtggcgatcaccgcctgcccaaccggcgtggcgcatacctttatggcggccgaagccattgaaagcgaagcgaagaaacgcggttggtgggtgaaggtggaaacgcgcggctccgtcggcgccggcaacgccatcaccccggaagaggtggcggcggcggatctggtgatcgtcgcggcggatatcgaggtggacctggataaattcgccggtaagccgatgtaccgcacctccaccggcctggcgctgaagaaaaccgcccaggagctggacaaggcgctggccgaggccgaggtgttccagccgcagcagcgcggtagcgcggcgccggcgggtaaaaagaaagagggcaacggcccgtatcgccacctgctgaccggcgtgtcctacatgctgccgatggtggtagccggcggtctgtgtatcgcgctgtcgttcgtgttcggcatcaaggcgtttgaagtcaaaggcacgttggcggcggcgctgatgcagatcggcggcggctccgcctttgcgctgatggtgccggtattggccggtttcatcgccttctccatcgcggatcgcccgggcctgacgccgggcctgatcggcggcatgctggccgtgagcaccggcgccgggttcctcggcggcatcatcgccggtttcctggcgggttacgtcgccaaggcgatcagcagcaagctgcgcctgccgcagagcatggaagcgctgaagcccatcttgatcattccgctggtggccagcctgatcaccggtcttatcatgatttacgtggtcggcacgccggtcgcgaaaatcatggaaggcctgacccattggctgcaatcgttgggcaccgccaacgccgtgctgctgggggcgatcctcggcggcatgatgtgtaccgacatgggcggcccggtgaacaaagcggcctacgccttcggcgtggcgctgctcagctcctcggtgtatgcgccgatggcggcgatcatggcggcgggtatggtgcccccgttggcgatggggctggcgacgctgctggcgcgccgcaagttcccgaaatccgagcaggaaggcggcaaggcggcgctggtgctggggctgtgcttcatcaccgaaggggcgattccattcgccgcccgcgacccgatgcgcgtgctgccgtgctgcattgccggcggggcgctgaccggcgcgctgtcgatggcgttcggcgccaagttgatggcaccgcacggcgggctgttcgtgctgctgatcccgggcgcaatttcgccggtgttgctgtacctggtggcgatcgccgccggtacgctgctggcgggcgtggcttacgccctgctgaaacgtgctgaagtgccggcggccagcgtggcataa

SEQ ID NO: 424804 - DNA, 942 bp, Serratia marcescens
atgagcagaagagtagcaacgatcaccctgaaccctgcgtacgatctggtggggttttgcccgcagatcgaacgcggggaagtcaaccgggtaaaaaccgccggcctgcacgccgccggtaagggcatcaacgtcgccaaggtgttgaaggatttgggcatcgacgtcaccgtcggcggcttcctgggcaaagacaatcaggacggtttccaactgctgttcagcgatctggggatcgccaaccgcttccaggtggtgccgggccgcacccgcatcaacgtcaagctgacggaaaaagacggcgaagtcactgatttcaatttctccggttttgaagtgacgccgcaggactgggatcgcttcgtcagcgactcgctgagctggctgggccagtttgacatggtggcggtgagcggcagcctgccggccggcgtcgatcccgatgcctttaccgactggatgacccagctgcgcgccaaatgcccgtgcatcattttcgacagcagccgcgaagcgctggtcgccgggctgaaggcctcgccgtggctggtgaaaccgaaccgccgcgagctggagatctgggccggccgcccgctgccggcgctggcggacgtggtcgaggccgcacatgcgctgcgcgagcagggcatcgcccacgtggtgatctccctcggcgcggaaggcgcgctgtgggttaacgcctctggcgcctggatcgccaaaccgccgtcctgtgaggtggtcagcaccgtgggcgccggtgattcgatggtcggcggcctgatttacggcctgctgatgcgcgaatccagcgaacacaccttgcgtctggccacggcggtagcggcgctggcggtcagccagagcaacgtcggcgtgaccgatcgtccccagttggccgcgatgatggcgcgcgtcgatctgaaacctttcaatcaatag

SEQ ID NO: 424805 - DNA, 1134 bp, Serratia marcescens
atgttccagttgtcaccgcaagacattcatctgggcgccgctgccgacggtaagcaagaagccatccgccaggtggccgccgccctgaccgaagccggctgcgtcagcgccggttacgtggacggcatgctgcagcgcgaactgcagacgtccacctacctgggcaacggcatcgccattccgcacggcaccaccgatacccgcgatctggtgctgaaaaccggcgtgcaggtgttccagttcccgcagggcatcgcctggggcgaaggccagaccgcctatgtggcgatcggcatcgccgcccgctccgacgagcatttggcgctgctgcgccagctcacgcacgtgctgagcgatgacggcgtggcggaacggctggcgaaaaccacctccgcggaagagctgcgcagcctgctgatgggcgaacagcaaagcgccgaattccagttcgacgtttcgctgattgcgctcgacgtcgcggccgacagcctgatgacgctgcaggcgctgaacgccggccggctgcaaaaggttggcgcagtcaacgcgcagttcgtcagcgatgccatcactcgcaagccgctgaacctggggcagggcatctggctgagcgacagcgtcgaaggcaacctggccagcgcggccaccgtcagccgcccggcgcaggctttcgtggaagacggcgagccggtggcgctgctgctgacggtgtcagtcgccgacgcgcagccgctggcggtgctcaactacctcagcgatctgctgctggccaacaaagctgaacgcctgctgaaggcggatgccgccggagtgctggcgctgctgaccagcgaagtggccgaggagagcagcgtgctgagcgccgagttcgtgatccgcaacgagcacggcctgcacgcacggccgggcacggcgctggtcaacgtgatcaaaagtttcaacagtgacatcaccgtcaccaacctggacggcagcggcaagccggccaacgggcgcagtctgatgaaggtggtggcgctgggcgtgaaaaaagggcatcacctgcgctttaccgccaatggagaagatgctgaagccgcgctgaaggcgatcggcgaagcgattaatgaaggactgggcgagggcgcagcatga

SEQ ID NO: 424806 - DNA, 423 bp, Serratia marcescens
atgaacgtagtgaccggcgtcggggtgatcatcgtcaacccacatggcgagattttgttgggcaagcgctgcggttcccacgcgcccttttggtcgatccccggcgggcacctggaggccggtgaaaccttcgagcagtgcgcccggcgcgaaatcgccgaagagaccgggctgctcatcgatccgccgcgcttcgtgggcgtcagcaacaatctgcaaacctggcgcgccgaaggcaaacacacggtgtctgtctgcctgcaggtggatcaccccggcggcagcgccgagttgaaagaacccgaaaagtgcgccgagtggcgctggtgcgcgcccgacgccctgccggaaccgcatttcgaagccagccgcaccgccatccggctatggctgagcggccagccctatttgcccacggcctga

SEQ ID NO: 424807 - DNA, 1161 bp, Serratia marcescens
atgagcaaaaaactgactggctttgaaaaaaagcgccggtggggatggctatggcttttgctgctggggattatcctcggcgcggcgctgttggccgggaccgccaccgtattccataaaaccagcgataccgccttctgcgtttcctgccacaccatgcaacagccgctggccgaatatcagggcagcgttcacttccaaaacaccaagggcatccgcgccgagtgcgccgactgccacgtgccgcaccagccgatcgattacctgtggaccaaaatccgcgcggtgaaagacatttacggcgaaatggtcggcaccatcgatacgccggaaaaatacgaagcgcacaagctggcgatggcgcagtcggtctggaagacgctgaaagagaacgactcagccacctgccgttcctgccacagctacgacgccatggacatcaccgcccagcgccctgaggcgcgcctgcagcacccggtggcgatcaaacagggcgagacctgcatcgattgccataagggcgtggcccacatcttgccggacatgagcggcgaaacccaggccggcgccgccgagctggcgaaggccgcggcgttgaccgctccggacgccaccaccctctacaccatcgccaccgaaccgttcttcctcagcgcggacgacagccataacgccggcaacctgatgccttccaccgaagtgcaggtggtgaagcaggatggcgacaaggtgctggccaccgtgagcggctggcagcaggacggcgtcagcgaagtgttctacgctgcgcagggcaaacgcatcctcagcgtgctgctgggtgaagacgcgcgccaacagctgaagaccgcctccacccagaccgatgcggaaaccggcctggtctggcatcaggtttctctgcaggtgtggctgccgcgtaaacagttgattgacgatcagcaaaaaatctggcgctacgccgcggacatgatgtcggccaactgcaccggctgccacgggctgaccgcgctcgatcgcttcaacgccaaccaatggattggcgtcatcaaaggcatggcgccgcgcacctcgctgacgcaggaacagctgcgcgtgctgacgcaatacgtacaaaaacacgccagcgacatgccacctgccgcaccggccaagctttaa

SEQ ID NO: 424808 - DNA, 2475 bp, Serratia marcescens
atgagcaaccaacaaccgttaaccatgagccgccgccgcttcctgaccggagccgccgctctggccgccgccccgctgctggcgggcttatggcccaaagcggcgctggcgcaggccatcagcgaagcgctgccgcagttcatcgccttgcgtcaggcgcagaaaggcattctgaccggcgcccactggggcgcgttcgaggccatcgtgcaagacggcaagatggtgggcgtgcagccggtgcaggacgatccgtatccgaatgagctgatcgccatggcgccttatcaggtgcacgccgagaaccgcatcaaatacccgatggtgcgtaaaagctggctggagggcggccccggcagccgcaccgagctgcgcggccgcgacgagtgggtgcgcgtcagctgggacaaagcgaccgagctggtgtgcaatgaaatcactcgcctgcaaaaagatcacgggccgcagtcgatctacgccggttcctacggctggaaaagcgtcggcatgctgcacaacagccgcacgctgctgcaacgcctgatgaacctgaccggcggtttcctcggctacgccggcgactactccaccggcgcggcgcaggtgatcatgtcgcacgtggtcggttcgatggaggtctacgaacagcagaccgcctggccgaacgtgatcgagaacagcgagctggtgatcctgtggggctgcaacccgatggtcacgctgaaaaacagctggaacgtgccggatcacgtcggccagaccggcttcgaggcgctgaagaagaaaggcacccgggtgatcagcatcgatccggtgcacagcgacagcgccaagttcgtcaatgcgcagtggatcgccccgcgcccttataccgacggcgccatgctgatcggcatcgcccacacgctgctgaccgagaagctgcataacccggacttcctgaaaacctacaccgtcggcttcgacaagttccaggcctacctgctgggcgagagcgacggcgtggcgaaaaccgccgaatgggcggccgacatcagcggcgtcgatgccgacacgctgcgccaactggcgcgcgagatggcgaaacaccgcaccatgatcatgggcggctggggcattcagcgccagcaccacggcgaacagcagcactggctgctggtgacggtggcggcgatgctcggccagatcggcctgccgggcggcggcttcggcttcagctaccactattcctccggcggcagcccgaccgccaaaggcggcatcatcgccggcatctccgccggcaacgcgccgaagagctcgccggcgccgatcccggtggcgcgcatcgccgaatgcctgagcaacccgggcaaaaccatcgacttcaacggcgccaaggtcacctaccccgaggtgaaaatggtatatgtggcgggcggtaacaccttccaccagcatcaggacaccaataacctggtcaaagcctggcagcggccggacaccatcgtggtcaacgagccttactggaccgccaccgccaagcatgccgacatcgtgctgccggccaccaccagctacgagcgcaacgatctggaaatgggcggcgactattcgcagctctacgtgttcccaatgcatcaatgcgtgccgccgcagcacgagtcgcgcagcgacttcgacatcttctcggcgatggcggtcaggctgggcgtgcaggaagcctttaccgagggcaaggatgaaacccagtggctgaaaggcatgtacgacgacatgaagaaccaggcgcgcgccgcccgggtggcgctgccgccgttcgacatgttctggcaatccaacaactacgtgcgcttcccggtgccggaggccaacaagcagtgggtgcgctttgccgattatcgcgacaacccgctgctgaacccgctgggcacgccgtcgggtaagatcgagatctactccgacgccatcgccaaaatgcattacgaggattgccccggcatcccgacctggatgccgccgcacgagtggtatcgcgggccggaagcggccaagtatccgctgtcgctcaataccgcgcacccgaccaaccggctgcactctcagctcgacaacacgccgctgcgcgagaaatacgcggtagcggatcgtgaagctatcctgatccacccgcaggacgcgcagccgcgcggcatcagcggcggcgatctggtgcgggcgttcaacgatcgcggccagatcctggtgggggcggtggtcagcgaagacgtgcgaccgggcgtggtgcgcatcagcgaaggcgcctggttcgatccggccgatccggcgcagcccggctcgctgtgcaagaacggcaacgtcaactgcctgaccttcgacatcggctcttccagcctggcgcagggcaactgcgggcagatggcgcagctgcagatcgagaagtatcgggggccggtattgaaaaataccgcgcacgcggtgccgcaaggcgcctga

SEQ ID NO: 424809 - DNA, 1176 bp, Serratia marcescens
atgccgacttcatccgcagtaacgcgacgcgcgcccgatctcacttcgctggcctttttggcggtggcgtttctgaccggcatcgccggcgcgttgcaaaccccgacgctgagcctgtttctggaaaccgaggtcaaggtacggccggcgctggtcgggctgttctttaccggcagcgcggtgatcggcattctggtcagccagtttctcgccggccgttcggataaacaaggcgaccgcaaatcactgatcttcctctgctgcatgctgggtgcgctggggttcacgctgttcgcctggagccgcaactattacctgctgctgctcgtcggcgtgctgctcaccagcttcggctccaccgccaatccgcagatgtttgcgctggcgcgcgagcatgccgatcgcaccgggcgcgaggcggtgatgttcacctccatcatgcgcgcccaggtttcccttgcctgggttattggcccgccgatcgccttcgcgctggcgctgggcttcggctttaaggtcatgtatctggcgggcgcggcggcctttgtgctgtgcggcctgctggtgtggaagcggctgccttcgatgccgaaaaccgcggcgacgaacgcgcccctggccgcaccgcggcagcatcgccgcgattcgctgctgctgttcgtcgcctgcaccctgatgtggaccgccaacagcatgtacctgatcaacatgccgctgtatgtggtgcacgagctgcggctgccggagcggctggccgggatattgatgggtgccgccgccgggctggagatccccatcatgctgctcgccggcatggtggcgaaacgctgcggcaagcgttgtttgatgcgcggggcggtggtcgccggcgtgctgttctattgcggcctgctgtttatcaccggcagttggccgctgattgccctgcagctgctgaatgcggcgtttatcggcgtgctggcgggcatcggcatgctctactttcaggatttgatgcccggtcaggccggcacggccaccacgctgttcaccaacaccattcgggtaggctgggtcatcgccggcgccatcgccggtgcggtggcggaaatctggaattaccatgcggtgttttacgccgcgctggcgatggcggcaggcgcgacgctgtgtctgtggcggttgagggaagcttaa

SEQ ID NO: 424810 - DNA, 255 bp, Serratia marcescens
atggactgtcgcagcgactgcggcgcctgctgtatcgcgccgtcaatatccagcccgatccccggcatgccgaacggcaagcccgccaatacccgctgcattcatctggatgaacggcttcactgtggcctgtttcattcgccgctgcggccgaaggtgtgcggcagcctgcagccgagccgcgacatgtgccacgatcaccgcgatcaggcgttgatttatctcgccaggctggaagcggacaccgcgccttaa

SEQ ID NO: 424811 - DNA, 1245 bp, Serratia marcescens
atgtctacggacaccatccagaagctggcccgcccttccgtcctcggcggcgcgatgatcattgccggaaccgccgttggcgccggcatgttttccattccgatcgtcacttccggtgtctggttcagcggctccgtcgcgctgctggtatatacctgggcctgcatgttactttccggcctgatgatcctcgaagccacgctgcactacccgagcggcgccagcttcaacaccatggtcaaggatctgctgggcaaaggctggaacgccgtgaacggcctgtcggtggcgttcgtgctgtacatcctgacctatgcctatatctccgccggcggctcgatcatcgcccacacgctggagggcatcgtcggcgtcggccagaccaccgccggcctggtgttcgcgctggtcgtggcgtttatcgtctggctctccacccgcgcggtcgaccgcctgagcaccattttgatcggcggtatggtgatcaccttcgtgatgtcggtgggcgacatgttcacccacgtacagcccgcggtgctgttcaacaccggcgatgaccaggccagctatctgccttacgccctggcggcgctgccttacctgctgacctcgttcggctaccacggcaacattcccgggctggtgaagtattaccataaggacagcggctccgtggtgcgcagcctggtgtacggcaccctgctggcattggctatctacatcctgtggcagtacgtgatccagggcaatatcgcgcgcgacgcctttaagcaagtgatcgccgagggcggcaacatcggcagcctgctcaagcaaatgggcaacgtctccagcagccagaccgtcagccaactgctgaacgccttctcctatatggcgctggccagctcgttcctcggcgtgtcgctaggcctgttcgactacctggcagacttctgcaagttcaaggacgacgccgtcggacgcagcaagaccgcgctggtgacctttgtgccgccgaccctggccgcgctgctgttcccgaacggtttcctgtacgccatcggcttcgccgggctggcggccaccatttgggcagtgatcgtgccggcgctgatggcgcgcgccagccgccgccgctatccgcaggcgggataccgcgcaccgggcggcaacggcgtgatcctgttcgtcatcctgttcgggctaatcaacgccgccgcgcatattctgtcgctgttcggtctgctgccggtcttccactaa

SEQ ID NO: 424812 - DNA, 573 bp, Serratia marcescens
atggcaagagctaacgaaattaagcgcggcatggcgatcagctacaacggcaaactgctgctggtaaaagatatcgacgtgcagagcccgagcgcccgcggcgccagcaccctgtacaaaatgcgcttctccgacgtgcgtaccggcctgaaagtggaagaacgcttcaagggcgacgatatcctggacaccatttccctgtcgcgccgcaaggtgaacttctcctatatcgacggcgaagaatacgtgttcatggatgacgaagactacaccccgtacatcttcaagaaagaccagatcgaagacgagctgctgttcattccggaaggcggcctgccgggcatgcaggtgctgacgctggacggccaggtgctggcgctggagctgccgcagaccgtggatatggaaatcgtcgagaccgcgccgggcatcaaaggcgcttccgccagcgcccgcaacaaaccggccaccatggcgaccggcctggtgatccacgtgccggaatacctcagcgccggcgacaaaattcgcattcatatcgccgaacgccgctacatgagccgcgccgactag

SEQ ID NO: 424813 - DNA, 1191 bp, Serratia marcescens
atggaacaaacatggcgttggtatggcccgaacgatccggtctctttggacgacgtgcgtcaggccggggcgaccggggtggtgacggcgctgcatcatatcgcgaacggcgacgtctggccgatcgatgagatccgcgcgcgacaggcgctgttggcggaaaaggggctgatgtggtcggtggtggagagcgtgccggtgcatgaggagatcaaaacccacagcggcgactggcggcggtacatcgccaattatcaacagtcgctgcgcaacctggcggcctgcggcatcgacaccgtctgctacaacttcatgccgatcctcgactggacgcgcaccgatctggcctatccgctgccggacggttccaaagcgctgcgcttcgatcagatcgccttcgccgcgttcgagctgcatatcctgcagcgcgccggcgccgaggccgactatacgccgcaagagcgcagtcaggcggcggcctatttcgccgccatgagcgaggaggaaaaaaaccggctgaccggcaacatcatcgccgggctgccgggggcggaggagggctacacgctggaacaattccgccgccggttggcggagtacgacggcatcgacaaggcgcggctgcgcgagaacatggcggtctttctgcgcgccatcgtgccggtggcggaagaggtcggcatccggctggcggtgcaccccgacgatccgccgcggccgatcctcggcctgccgcgcatcgtctccacgattgaagacatgcagtggctgaagcagaccgtcgacagcatctataacggcttcaccctatgcaccggttcctacggcgtgcgcgccgacaacgatctggtgcggatgattgaaacctttggcgatcgcattcactttacccacctgcgcgccacctgccgcgaggagaacccgaaaagcttccacgaaggggcgcacctgcagggcgatgtggacatggtggcggtgatcgaagcgatcctgaccgaagagttgcgtcggcagcgggcgggcgatcggcggccgatcccgatgcgccccgatcatgggcatcagatgctggacgacttgaaaaagaaaaccaatccgggctattcggccatcgggcggttgaaagggctggcggagctgcgcggcgtcgagctggcgctcaagcggcgttttttcccggagttgccgtag

SEQ ID NO: 424814 - DNA, 1473 bp, Serratia marcescens
atgaaaacgatcgccaacaccccattgccgggcgccgtccggcagccgggctatgaccgccgggctctgcgcagccgcatcgtgcaccttggcttcggcgcgttccaccgcgcgcatcaggcgctgctgaccgatcgggtgctgaacgcccacggcggcgactggggcatctgcgagatcagcctgtccggcggcgtgccgctgtttgaggcgctgcggcaacaggatcatctgtacagcgtgctggagaaaggcgcggacggccatcaggccatcgtgatcggcgcggtgcatgagagcctgcaccgcaagctggagggcatcgccgcggtgctggagaaactggccgagccgcaggtggcgatcgtctcgatgaccatcaccgaaaaaggctactgcatcgagcccggcagcgggcgattggatcggcagcatccggggatcgtcgccgatctggcgtggccgcatcagccgcagaccgtgcccggcattttggtggaggcgctgcggctgcggcgcgaacgcggcctgcccgccttctccctgctctcctgcgacaatattccggagaacggccacgtgctgcgccgggcggtgctcgatctggcgcaggcgcgggatccgtcgctcgccgattggatcgccaccgccgccaccttcccctgcaccatggtggatcgcatcgtgccggccgccacgccggccacgctggatgagattgccgccgcgctgggcggcgtgcgcgacgactgcgccatcgcctgcgagccctttattcaatgggtggtggaagacaacttcgccgccggacgcccggcgtgggagctggccggcgcccagctggtcagcgatgtgctgccgtttgagcacatgaaactgcgcatgctgaacggcagccactcgttcctggcttacctcggctacctgggtggctaccgctatatcaacgagtgcatggcggatgaacactaccgtcgcgccgccctgcggttgatgctggacgaacaggcgcccaccctgagcgttaccggcatcagtctgaccgactacgccgcacagcttatcgcgcgcttcagcaacccggcgctgcaacacctcacctggcagatcgccatggacggttcgcagaagctgccgcagcgcctgctggacgcggtgcgctggcatctgcggcacggcggcgactatagcgggctggcgctgggcgtggcgggctggatgcgttacgtcggcggcgtcgatgacgccggtcagccgatcgacattcgcgatccgctggcagacgcgctgcaacagactattgccgctacgccggacgatcggcggcgcgtaacggcgctgctggcgctgaaatcggtgttcggcgaatcgctggcaacgcatgcggcgtttgccgacgcggtgacgcaagcctatttgtcgctgcgcgatcgcggtgcgcgtgaaacggtgaaggagtgggtgctgcggtga

SEQ ID NO: 424815 - DNA, 309 bp, Serratia marcescens
atgaatacctttcggttatttttgatcgtaggaatgttgttttcatggacggcagtgagtcatgcaggagtggccggcggggtaattcgcttcgtcggttctatcgttgaaagtccttgcacggtcaatattgcagattctaaggcgaatacgcaatgttaccgcaacggccagcgttatcaggcccagcaagcgttgtcaggttttgatactacacgcaaagaacttccgctaaatctaggcacaaccgaaatgaagtgggtagaccaacagaagaaactcgctgttatgacggtcgtttatcgttaa

SEQ ID NO: 424816 - DNA, 975 bp, Serratia marcescens
atgaccaaaaccaatttgattaccggtttcctcggcagcggtaaaaccaccactatccgccatttgctggctcataagcccgaacatgagcgctgggcggtattggtcaatgaattcggcgagatcggcatcgacggcgcgctgctggcagacagcggcgcggtgctcaaagagatccccggtggctgcatgtgctgcgtcaacggcctgccgatgcaggtgggcttgaatatgctgttacagcaggccaaaccggatcggctgctgatcgagccgaccgggctcgggcatccgaaacaaattctgtcgctgctgacccaggagagctatgccggctggatcgatctgcaggccaccctgtgcctgctggatgcccgccagctcagccagccccgctaccgcgacaacgaaaacttccgcgatcagctggccgcggccgacgttattttggccagcaaaagcgatacctatcagccggaagacaggcgggcgctggaggcctggagggcgcaagatccgctgcggcggccctgttatgccatcgcgcaaggcgaagcggatgtcgcgctgttgtcacttccgcgcacgaatcgtacagaattgccggacgcgcagcatcatcatggtcaggcgaaaacgcaggggctggcggcgctgcggctgccggagcacgcccgctggcggcgagcgttgaacgaggggcaaggcttcaccagctgcggctggatttttgacggcgacacccaattcgacaccgtcggctttatggaatgggtgcgactcgcgccggtagaacgcgccaaaggcgcggtgcgcatccccgaaggcacattgctgatcaatcgtcagggacaggatctcaacatcgaaacccgcccggtcgcgccgctcgacagccgaattgagcttatccacagcgaaaatgccgattggaacgccctgcaatccgccttgtttaagattcgtttaagttag

SEQ ID NO: 424817 - DNA, 711 bp, Serratia marcescens
atgacacgccgcaatttacccctcattatcctcttcaacttactgggcgttgcgctgttcctgtcctggttcctgccggccaatcacggcggctggtttaccctggactcggcgatctttttcttctttaaccgccatctggccaccgacccggcgtttttgcacctggtcgccatcaccaacaaccgcgcgtttgacgtgatttcgctgctcgccatgggcctgctgtatttgtacttctacctgaagcaggacgccgccggccgccgccgcctggtgatcaccggcgtggtgatgctgctgaccgccgtggtgctgaaccagcttggccacctgctgccggtgaagcatccgagccccaccctgaccttcgacaatatctatcgcgtcagcgagctgaccggcatccccaccaaggacgcttccagcgacagcttccccggcgaccacggcatgatgctgattattttttcctgctttatgctgcgctatttcggccgccgcgccttcgccgtcgccctgctgattacgctgctcttctcattgccacgcgtgatgattggcgcccactggtttaccgatatcgccgtcggctcgctgtcagtggtgctggttggcgccagctgggtgctgatgacgccttgcagcgactggatcgtcgatcggttgaatcgcctgttgcccggcaagcatcgccccggccaaccataa

SEQ ID NO: 424818 - DNA, 453 bp, Serratia marcescens
atgcgtgcagttaatgacaaagacggtcttttactgcaagcctctcaggatgaattcgaagcgatggtccgcaacgttgacgtcaagtcaaagattatggatcagtacgcggactggaaaggcgttcgctaccgtttaggcggtgacagcaagcgcggcatcgattgctcggcgtttgttcaacgcaccttccgcgaacagttcggcatggatttaccgcgttctacctatgaacaggaagatctcggcaagaaaatccagcgcaccaagctgcgcgtcggcgatttggtgctgttccgcgcaggttccaccgggcgccatgtcggcatctatttaggcaacgatcagttcgttcacgcctccaccagcagtggggtcatgatttccaagctgaccgataactattggaataaacgttatcgagaagcgcgccgggtgttgaccaacggttaa

SEQ ID NO: 424819 - DNA, 1584 bp, Serratia marcescens
atgggcttgaaaagagcttttgcccgcagcgtatctcaccgacagcgtagcctggctaaaagcggcgtcgccgctctggtattttttacgctcttcaccgcggtcacgctttctttgattaaccaccagcgcacgcaatatcaacataaggtcgaagcgcgcacgcaaaagttcacgctgggttatatctcgcacctgaagacggtgatgcagcaaatgatgccgctgctggccaagccttgcctctcaagccagtcggacattacctaccaggcggcctttaccagcggcgtgcgcaccttcctgttggtgaaagacggctacgcctattgctcttccgccaccggcgacatgatgttgccgatgaaaaatctctaccaggatatcgactggaatctgcccctggatctcaagctgcagcagggcacgccgatcgtgccgaacaaaccggcggttgcagtttggctgcggcatcccgacgaaaaggccaccggcatcctcgctacgctagacatcgatctgatgccctatctgctgttcacctcgcacgacgaacaggcgccgggcatcgccatcgtgatgggcaaccgcgcgctgaccaccttcagcccgaacctgatgccggtcgatcagttgccgaagggcaaggcggataaactgacgctgcccaatctgccgctgaccatcctgttctacaacgagaaactgacccccaacgacattcgcctgacgctgctgggcagcctggtgctgtcattgatgatcggcgtactctgctattacatgctgctgctgcggcaaagcccggaacgcgcactgctgcgcggcatcaagcgcaacgagttctttatcgaataccagccggtgttccataccgacagcaacagcatcggcgggctggaagcgctgatccgctggcagcatccgatcgaaggccgcatcccgcccgacgtctttatcccctacgccgaaagcaacgggctgatcgtgccgctcacccgccacctgttcaggctgatcgccgaagatgcgccgcagctcgccaaagcgctgccgcggggaggcaaggtcgggctcaacatctcccccgcccacctgagcgcgccgtcgttccaccaggacgtgtatgaactgttgacgcagctgccgggcgattactttacgctggtgtttgaaatcaccgagcgcggcatggtggaagaagagagtgcgctggcggagtttgactggctgcacaaacagggcatcgagatcgcggtggacgattttggcaccgggcacagcgcgttgatctatcttgagcgcttcaccatggattacctgaagatcgatcgtggcttcgtcaacaccatcggccaggacacggtcaccgcgccggtgctggatgcggtgatctcgttggcgaaaaagctgaaaatgctgacggtggccgagggcgtggaaaccgccgagcagatgcagttcctgcaagaacacggcgttaacttcatgcagggctactacttcagcaagccgctgagcatcgacaatttcgtcgcttactgcaatgctcatcaggtctttgattatcaggcaaataaatag

SEQ ID NO: 424820 - DNA, 1809 bp, Serratia marcescens
atgtccgtgcgcattttcgctgctctggtgctctcggcactgagtttcggtctgcgggccgaagccctcaacgaaagctacgctttcgcccttctcggtgaaccgaaatacgccaccgacttcagccatttcgactacgtcaacccggcggcacccaaaggcggcgacgtgcggctggcggccatcggcacctacgacaacttcaaccgcttcgctacccgcggcgtgcccggcgaacgtacgatggagctgtacgatacgctgttcaccaactccgacgacgaacccggcagctattatccgctgattgccgaatcggcccgtttcccggccgacatgcgctggatggagttggatatcaacgcccgcgcccgcttccaggacggcagcccgatcaccgccgccgatgtggcctttaccttcaataaattcatgaccgaaggcgtaccgcagtttcgctcctattacaaaggcgtcacggtcaaggccatttcccggctgacggtgcgcatcgagctgcctaaagccaaccgtgagcaaatcctcagcctgctcagcctgcgcgtattgccggaaagcttctggaaaaaccataagctcaacgaaccgctcagcaccccgccgctcgccagcggcccgtataaaatcgccgattaccgcctcggccagtacatcacctaccagcgagtgcgcgactactgggccgccaacctgccggtgaaccgcggccgctacaacttcgacagcattcgctacgattattacctggacgataaagtatcgctggaagccttcaaggccggcgcttacgatttccgcatcgagccgtcgcccaaaagctgggccacccagtatcagggcggcaacttcgcgcgcaactacatcatcaagcaggatgagaccaatcaggcggcgcagaatacccgctggctggcgttcaacctgcaaaaaccgctgttcgccgatcgtcgggtacgagaagcgatcggcctggctttcgacttcaactggatgaacaaggcgctgtattacaacgcctatcagcgcgccgacagctatttccaaaacaccgcctacgccgcccgcggctacccggacgccgccgaactggccttgctggcgccgctcaaaggccagataccgccggaggtgtttaccagcatctaccagccgccctcctccgacggcagcggcaacgatcggcaaaacctgctgaaggcgacccaattgctgaaagaagccggttgggtggtcaaaaatcaaaagctggtcaacgccaaaaccggccagccgttcaccttcgaactgatgctgctgagcggcagcaacttccagtacgtattacccttccgccacaacctgcagcggctgggcatcgagatgcaaattcgcgaaattgacgcctcgcagtacacccgtcgcatgcgtgaacgcgatttcgacatgatgtcgaccgtatatatggcgatgccgttccccagcgccgatctgcaaatcctgtgggattcgcagtacatcgattccagctacaacacggccggcgtcaaagatccggcggtcgacagcctggtgaggcaaatcgccgcccatcagggcgacgaaaaggccctgttgccgctcggccgcgcgctggatcgggtgctgacctggaacaactacatgctgccgatgtggtactccaaccacgatcgttacgcctattgggacaagttctccacgccgtcgatccgcccggcctatgcgatcggcttcgataactggtggtacgacgtcaacaaggcggcgcgtttaccggctcaacggcaataa

SEQ ID NO: 424821 - DNA, 1092 bp, Serratia marcescens
atggcggcctatctgatacgcagactgttactggtgatccccacgctgtgggcgatcatcaccatcaacttttttatcgtgcaaattgcccccggcggcccggtcgatcaggccatcgccgccattgagctggggcacggcagcggttttggcagcggcggcgtcagcgaaggcctgggccatgcccgagcgggaatcgcggctagcgacagccaataccgcggttcgcgcggtctggatccggaggtgatcgccgagatcacccaacgttacggcttcgataaaccgctgcacgagcgctacttcaccatgctgtggaactatatgcgcttcgacttcggcgacagcctgtttcgcggcgcttcggtgatgcagctgatcggccagagcctgccggtctccatcacgctgggtctttggagcacgctgatcatctacctggtgtcgatcccgctcggcatccgcaaggctgtccacaacggcagcgcgttcgatacctggagcagcacgctgatcatcatcggctacgccattccggctttcctgttcgccatcctgatgattgtgctgttcgccggcggcagctacctcgactggttcccgctgcgcggcctggtctccagcaacttcgacaccctctcgtggccggcgaagatcgccgactacctgtggcacatcacgttgccggtgctggcgacggtgatcggcggcttcgccaccctgaccatgctgaccaaaaactcgttcctcgacgagatccgcaagcagtacgtcaccaccgcccgcgccaaggggctggatgagaaaaagatcctgtaccgccacgtgttccgcaacgccatgctgctggtgatcgccggttttccggccacctttatcagcatgttcttcaccggctcgctgctgattgaggtgatgttctcgctcaacggcctggggctgctgggctacgacgccacgctgcagcgcgactacccggtgatgttcggcacgctgtatatcttcaccctgatcggcctgctgttgaatatcctcagcgatatcacctacaccctggtcgatccgcgcattgacttcgaggcccgccaatga

SEQ ID NO: 424822 - DNA, 1026 bp, Serratia marcescens
atgagccgccttagcccgattaaccaggcgcgctgggcgcgctttcgccgcaaccgccgcggctactggtcgctgtggatctttttggtgctgttcaccctgagcctggccgccgatctgatcgccaatgacaaaccgctgttggtgcgttatgaaggccggctgtacctgccgtttatgattagctacagcgaaaccgccttcggcggcgaactgaataccgaagccgactatcaggatccgttcgtgcagcggcagatcgaacggcacggctgggcggtgtgggcgccgatccgcttcagctacgacaccatcaacttcgccaccgaagtgcccttcccctcgccgccttcccgccaaaacctgctgggcaccgacagcaacggcggcgacgtgctggcccgggtgctgtacggttttcgcatctcgatgctgttcggcctggcgctgacgctgttttccagcctgatcggcgtgtgcgtcggcgcgacgcaagggtattacggcgggcgtttcgatctgtgggggcaacgctttatcgaagtgtggtcgggcatgccgacgctgtttctgatcattctgctgtcgagcatcgtccagcccaatttctggtggctgctcggcatcaccatcctgttcggctggatgagcctggtgggggtggtgcgcgccgaattcctgcgcacccgcaattttgactacatccgcgccgcgcgcgccatgggcgtgccggatcgcgttatcatgtcccgccatatgctgcccaacgccatggtggcgacgctgaccttcctgccgtttatcctgtgtggctcgatcactaccctgacgtcgctcgatttcctcggtttcggtctgccgatcggttcgccgtcgctcggtgaattgctgctgcaaggcaaaaacaatctgcaggcgccgtggctcggcatcaccgccttcctggtcttggcggtgctgctttcgttattaatctttatcggcgaagcggtgcgcgacgcctttgaccccagcaaggcgcattga

SEQ ID NO: 424823 - DNA, 1611 bp, Serratia marcescens
atggccactcctttgctcgctattcaggatctcagcatcgccttccgccagggcgacaccgtcacgccggtggtcaacgaactctcgctgcaaatcgcgccggcggaaacgctggcgctggtaggggaatccggctccggcaaaagcgtcaccgccctgtcgatactgcgcctgctgcccgcgccgccggtggtttaccctgccggcgacattctgttcaacggcgattcgttgctgcatgcgccggaagcggcgctgcgcaaggtgcgcggcaatcagatcgcgatgatctttcaggaaccgatggtgtcgcttaacccgctgcacaccatcgagaaacagctggcggaagtgctgatgctgcaccgcggcctgcggcgcgatgccgcgcgcgcggagatcgtcgagtgcctggagcgcgtcggcatccgccaggccaaaagccggctgcaggactatccgcatcagctgtccggcggcgaacgccagcgggtgatgatcgccatggcggtattgacccgcccgaaactgctgatcgccgacgaacccaccaccgcgctcgacgtcactatccaggcgcagatcctgacgctgctgcaagaattgaaacgagagatggacatggggctgctgttcatcacccataacctgaatatcgtgcgccgcctggcggacaacgtggcggtgatgcgccaggggcgctgcgtggagcaaaacgcccgcgcgcggctgttcagccggccgcagcatccttacacgcagcagctgctggccgccgaagacgtcggtgaaccgctgccgttgcctgccgcggccaacgggcgccccggcgacgagcggccgctgctcaaggtggagaacctgcaggtgcgcttccccattcgccgcggcctgctgcgccgcacggtggattatcactatgcattgaaatcattgagtttcgagctgcgggccggggaaagcgtggggctggtgggggaatccggctcgggcaaaagcaccaccgggctggcgctgctgcgcctgttggcctcgcagggcgccatctggttcgacggcgaaccgctgcatccgctcacgatgaagcagatgctgccctaccgcagccggatgcaaatcgtcttccaggatccctattccgccctgaacccgcgccttaacgtgcagcaaatcatcgccgaggggctggaagtgcaccagcagcttagcgccgagcagcgggaacagcgcgtgatcgaggtgttgcaggaggtcggcctggatccgcagctgcgccaccgctatcccaccgagttttccggcgggcagcgccagcgtatcgccatcgcgcgcgcgctgatcctgcagccgcagctgctgatcctcgacgagccgacctcttcgctggataaatcggtgcaggcgcagatcctggcgctgctgaaatcgctgcagcaacgccaccggctggcttatctgttcatcagccatgacctgcaggtggtgcgttcgctatgccaccaggtcatcgtgctgcgacagggagaagtggttgaacagggagactgtcgggcgattttcgcggcgcccgccgccgactatacccgtcaactgctgcagttagcggattag

SEQ ID NO: 424824 - DNA, 345 bp, Serratia marcescens
gtggagagtatccaactttcggtagtgcatcgcttgccgcaaagttatcgttggctatccggtttcaccggcgtgaaggtcgaaccgattccgtttaacggaatagacgaagataacaacctgattgggctgaagttgctcagccatgaaggggccgaggcctggcaggtaatgcaacagctcaatctgtcgctgcaggagattcaggtcgactgcgcgattgtcgaatgggaaggagagccttgcctgttcgtgcagcgcagcgacgagagcgccaccatgtgccgcctgaaaaacgtcggcgccgcgatcgccgaaccgctcagcgcgcagtaccccttctga

SEQ ID NO: 424825 - DNA, 1197 bp, Serratia marcescens
gtgcaacagaaccgaacctctcatctcggtttgattttcattctgggcctgttgtccatgttgatgccgttggcgatcgacatgtacctgcccagtatgccggtgatcgccgcccagtttggcgtcgagtccggcagcgtgcagatgacgctcagcgcctatatgctcggctttgccttcgggcagctgttctatgggccgatgtcggacagcatcggccgcaagccggtgatcctgtggggaacgctgatcttcgccatcgccggctgcgcctgcgccatggcgcagtctatcgatcagctgatcgggctgcgtttcctgcacggtctggccgccgccgccgccagcgtggtgattaacgccctgatgcgcgacatgttcaccaaggatgagttctcgcgcatgatgtcgttcgtcattctggtgatgaccatcgcgccgctgctggcgccgatgatcggcggtgcgctgctgttgtggttcagctggcacgccatcttctggaccatgggtgccgcggcgctgatcggttcactgctggtggccttgttcatcaaggagacgctgccgaaagagcggcgtcagcggttccacctgcgcaccacgctgggcaacttcggttcgctgttccgccacaagcgggtgctgagctacatgttggccagcgccttctcgtttgcgggcatgttctcgttcctcagcgccgggccgttcgtctacatcgaactgaaccacgtttcgccgcagcacttcggctactattttgcgctgaacatcgtcttcctgttcctgacgacgctgatcaacagccgcaacgtgcggcggttcggcgcggtcaagatgttcaagctggggctgttggtacagctggcgatggggctgtggctgctggcggtgagcgccgtcggcctgggcttctgggcgctggtgatcggcgtagcggtctacctggggtgcatcgcgatgatttcctccaacgccatggcggtgatcctggatgattttccgcatatggcgggcaccgcgtcttccctggccggcacgttgcgcttcagcatcggcgcgctggtgggggcggtgctgtcgatggcgccgggcaaaagcgcctggccaatggtcacctcgatggcgctgtgcagcatcgtggcggtgctgttctacgtttacgccagccggccgcgcgatcgcgcagcctga

SEQ ID NO: 424826 - DNA, 714 bp, Serratia marcescens
atgcgattggacaagtttttatctcagcagttaggcatcagccgtgcgctggtcgcgcgcgaacttcgggctaaacgcgtcaccgttgacggtgaggtggtgaagagcggggcgatcaaactgaccccggagcaagaagtggcgttcgacggcaatccgctgcagcagcagaacggcccgcgctatttcatgctcaacaaaccgcagggctacgtctgctccaccgacgatcccgatcatccgacggtgctgtatttcctcgatgagccggtcgcgtacaagctgcacgccgccgggcggttggatatcgacaccaccgggctggtgctgatgaccgacgacggccagtggtcgcaccgcgtcacgtcgccgcgccaccactgcgagaaaacctatttggtcacgctggagcacccgttggcggaagacaccgcgcagcgtttcgccgaaggggtgcaactgcacaacgagaaagatctgacgcggccggcgacgttggagcaggtcgacgagcgcgtggtgcgcctgaccatcagcgaagggcgctaccaccaggtgaagcggatgttcgccgccgtcggcaaccgggtgatcgagttgcaccgtgagcgcatcggcgccatcgtgctggatgacgatctggcgccgggcgaataccgcccactgaccgaagaagagatcgctagcgtgggcgcgccgcacctgcaggactga

SEQ ID NO: 424827 - DNA, 1758 bp, Serratia marcescens
atggcctttaccctacgcccctaccaactggaagcggtcgaagccaccatcaatcatttccggcggcaccccgaaccggcgctgatcgtgctgccgaccggtgccggcaaaagcctggtgatcgccgaactggcgaagcgcgcccgcgggcgggtgctggtgctggcgcacgtcaaggaactggtggcgcaaaaccacgccaaatactgcgcctacggcctggaagcggacatcttcgccgccggcctgcaacaaaaagagagcgccggcaaggtggtgttcggcagcgtgcagtcggtggcgcgcaacctgccgctgttcgacggcgccttttcgctgctgatcgtcgatgaatgccaccgcatcagcgacgacgacgacagccagtaccagcaaatcatccagcatttgcagaaaaccaacccgcagctgcggctgctggggctgaccgccacgccctatcgcctgggcaagggctggatttaccagtatcactaccacggcttcacccgcggcgacggcgccagcctgtttcgcgactgcatctacgagctgccgctgcgctacatgattaagaacggcttcctggtgccgcctgagcggctggacatgccgatcgtgcagtacgatttcagccggctggaggccagaagcaatggcctgttcagcgaagcggatctgaaccgtgagctgaagcggcaaaaccgcgtcacgccgcatatcatcagccagattgtagagtacgcccaagatcgtaaaggggtgatgatcttcgccgccaccgtcgagcacgcccgcgagatccacggcctgctgccgaacggcgaggccgcgctggtcagcgccgaaacgccgcccgccgagcgcgatgcgctgatcgaggcgttcaaacagcagcagctgcgctatctggtcaacgtagcggtattgaccaccggtttcgacgcgccgcacgtcgatctgatcgctattctgcgcccgaccgagtccgtcagcctgtatcagcagatcgtcggccgcggtctgcggctggcgcccggcaaggaggattgcctgatcctcgactacgccggcaacccgcacgatctgttcacgccggaggtcggcgtcagcaagccgcacggcgacagccagccggtgcaggtgttctgcccggcctgcggcttcgccaacctgttctggggcaagtgcaccgagaatggcgacatcatcgagcactacggccgccgctgtcagggctggctggaagacgacgacggccaccgcgaacagtgcgattaccgcttccggttcaagagctgcccgcactgcggcgcggagaacgacatcgccgcgcgccgctgccatcagtgccaggaggtgctggtcgatcccgatgacatgctgaaggcggcgctgaagctgaaagacgcgctggtgctacgctgcggcggcatggaattgcagagcggccgcgacgacaagggcgaatggctgaaggccacctattacgacgaggacggcaccagcaccagcgagcgtttccgcctgcaaacgccggcgcagcgcaaagcgttcgaaatgctgttcctgcgcccgcaccagcgcgcgccgggcgtgccgttcgcctggcacaccgccgccgacgtgctggcgcaacagcaggcgctgcgccatccggatttcgtggtggcgcgcaagcgcgggcagttttggcaggtgcgcgagaaagtgttcgattatcaaggccgtttccgccgcgccaatcagttggcctga

SEQ ID NO: 424828 - DNA, 285 bp, Serratia marcescens
atgttcactatcaatgcagaagtacgtaaagaccagggtaaaggtgcgagccgccgcctgcgtgcagcaaacaaattcccagctatcgtttacggtggcaaagaagctgcagtttccatcgaattggaccatgattctgtcaagaacatggaagctaaaccagaattctacagcgaagcagtaactctggttatcgacggtaaagaaaccaaagttaaggttcaggctgtacagcgtcacccgttcaagccaaaactggctcacatcgacttcgttcgcgtttaa

SEQ ID NO: 424829 - DNA, 1008 bp, Serratia marcescens
atgagtctggatatcgaccagatcgctctgcaccagttggtgaaacgcgacgagcaaacgctggacgtggtgctgcgcgattccttgcttcccaccaacgcggcggtggaagaaatgatgacggaactgcatcgcgtctatagcgccaagagcaaggccttgggcctgttcaacgaaggcagcgagctggcggaagcgctgcgcacctgccgcaaggacgataaggactttctggccttcagccgcgcggcgactggtcgcctgcgcgacgaactggcgaagtatccgttcgccgaaggcggcgtggtgctgtttggccaataccgttatctggcggtggagtatctgctgatcgcggtgctgaacagccgtaacagcatgcgcgttaacgaagagctggatatcaacaccacgcactatctggacatcaacaacgccgatatcgtcgcgcgcatcgatctgaccgaatgggaaaccaacccggaatcgacccgctacctgaccttcctgcgcgggcgcgtgggccgcaaggtcgccgacttcttcatggatttcctggcggcgtccgaagggttggacaccaaggcgcaaaaccgtgggctgctgcaggcggtggacgactactgcgccgatgcgcagctggacaagaacgagcgccagtcagtgcgccagcaggtgtacagctactgcaacgaacagctgcaggcgggcgaagagattgagctgcaggcgctgtcgcaggagctgtcgccggtcggcgagaaagacttcatgcagttctccagcgagcaagggtatgagctggaagaaagcttcccggcggatcgcggcacgctgcgccaactaaccaaattcgccggcagcggcggcggtatcagcctgaacttcgacgccatgctgctgggcgagcgcattttctgggatgcggccaccgacacgctgaccatcagaggcacgccgccgaatctgcgcgatcagctgcagcgccggaccggcagcggcaagtaa

SEQ ID NO: 424830 - DNA, 228 bp, Serratia marcescens
atgccacaatcatcccgttacagtgacgaacacgttgaacaactgctctcagagctggtcaatgttctggaaaaacaccatacccccaccgatctttccctgatggtgctgggcaatatggtcactaatttgatcaacaccagcgttgcccccgcgcagcggaaaaccctggcgagatcgttcgcggaagccctgcaggcttctgtccgtgaagataaagcacattaa

SEQ ID NO: 424831 - DNA, 1782 bp, Serratia marcescens
atggtgacaaaccgtcagcgttatcgtgaaaaagtctcccagatgatcagctgggggcactggttcgccttattcaacattttgctcgcccttgggctgggcagccgttacctgtttgtcaccgactggcccgcatccctgctgggccgggtttatgcctttgtcagcctgctggggcatttcagctttatcgtgttcgccggctatttgctggtgatcttcccgctcaccttcgtggtgatgtcgcagcggctgctgcgatttatttccgccgcgctggccaccatcgggctcacgctgttgctggtcgacagcgaagtgttctcccatttccacctgcacctcaatccggtggtgtgggatctggtggtcaacccggaccaaagcgagctttcgcgcgactggcaactgatgttcatctgcgtgccggcgatcttcctggtggagatgctgttcgccacctggagctggcagaagctgcgcagcctgaaccgccgccgcttcggcaaaccgctggcggcgctgtttatcagcgcctttttcgcgtcgcacctgatttacatctgggccgacgccaacttctatcgcccgatcaccatgcagcgagccaacctgccgctctcgtacccgatgaccgcgcgcaagttcctcgaaaaacacggcctgctcgaccagcaagagtatgagcgccgcctgatgcaacagggcaatccggaagcggtggcggtagagtatccgctcagcgatctcagctacggcgataaaggcagcggctataacctgctgatgatcgtggtggacggcattcgcgccaaagacgtggcgcaggacatgccggcgctgacgcgcttcgcccaggaaaacgtgcgtttcagcgatcattacagttcgggcaaccatgccgataccgggctgttcggcctgttctacggcatttccccgacctatctggacagcgtgctcgccggccgcaagccgtcggcgctgatcgctgcgctcggcgatcggggctaccagctggggctgttctcctccgatggcttcaacgccagcctgtaccgtcaggcgctgttgaccgacttctcgctgccgacgccggcgccgcaaagcgacgcgcaaaccacgcagcaatggcagcgttggctggcggatcagggtagcaaagagccgtggttctcctatatcagcttcagcggcgccgagactgtcgaaggcgacaaaaccccggcgccggccgactttattcggcgctatcgcaccggcgcgcaagatgtggacgcccagatagcccaggtgctggacaccctgaaacagcgcggcctgctggataaaaccgtggtggtgatcaccgccgagcacggcgtcgagttcaacgacagcggcaaaggccaatggggcgccggcaccggtttcaaccaggcgcagctgcaggtgccgttggtgatccactggccgggcaccccggcgcagaccatcagcaagctgaccggccataacgacgtgatgcgcaccctgatgcaacgattgctgcacgtgaagaccgcgccgaaagactattcgcagggcgaagatctgttcaccgcccagcgccgcaacgactggatcgctaccggcgatggcaatcagctggtaatcatcacgccgacgcagacgctgatgctggacaacagcggcaactatcgcgtctacgatcagaacggcgatgaaataaaagacgagaaaccgcagcttgctctgctgttgcaggtgctgaccgatgtaaaacgctttatcgccaactaa

SEQ ID NO: 424832 - DNA, 1194 bp, Serratia marcescens
atggctaaagtgatgcgcgcaattatcgtgggtggaggcattggcggtgcagcgactgcgctctcgttggctcgccaggggattaaagtgatgttgctggaaaaggcgcacgagattggtgagattggggcgggcattcagctcggacccaacgccttttccgcgctggatagcctgggtgtgggcgacgttgcacgcgagcgcgccgtctttaccgatcacataaccctgatggacgcggtaaacgcccaggaggtagtgcatattgagaccgggcaggcatttcgcgatcactttggcggtccctatgcggttatccatcgggtggatatccacgcatccgtctgggaagcggtattaacccatccggatgtggaataccgtacctcaacgcaggtggtgagtatcagccaaacgacggatgatgtgacggtatttgatgagcagggcaatcgctggacggcggatattctgatcggctgtgacggcgtgagatcggttgtgcgccagtacctactggaggatgcgccgcgggtgaccggacatgtggtttaccgcgccgtgattgattgcgatgagatgccggaggatttacgcattaacgcgccggtgctgtgggcggggccgcactgccatctggtgcactacccgctgcgcggggggaagcaatataacctggtggtgacgttccatagccgtcagcaggaggagtggggggtgaaggacggcagtaaagaggaggtgctctcctatttttccggtattcacccgcgtccgcgtcaaatgctggataagccgacctcgtggcgccgctggtcaaccgccgatcgtgagccggtggagaaatggggcaacgaccgtatcacgctggtgggagatgcagcacacccggtggcacagtatatggcgcagggagcctgcatggcgctggaggatgcggtaacgctgggtaaagcgctggaagagcatggaggggatgcggcaaaagcgcttgctctgtacgagtcggtgcgtattccacgcacggcgcgcatcgtctggtcaacccgtgagatgggccgtgtttatcacgccgcaggcgttgagcgccaggtgcgtaatctgttatggaaaggcaaatctcaggcggaattttatcgcggaatggaatggctgtatggctggaaagaagaaaactgcctgcagccgcgctga

SEQ ID NO: 424833 - DNA, 645 bp, Serratia marcescens
atgaagctgtacagtttctttaatagctcagcgtcctaccgcgtgcgcattgcgctggcgctgaaaggcatccattaccagacggtgggcgtcaatatccgcattgggcaacagaatgagctggcttatcggcgaatgaacccggtcgggctggtgccgacgctgctcacggacgacggtgagtttctcagccagtcgctggcgattaccgactggctggatcgccattttcctcagttgccgttgttaccaacggccgatccggcgcgcagccggatactggaaatcgtctatgtcatcgcctgcgatattcacccggtaaataacctgcgggttttacgctacctgagtgaagaattgaaggtgagtgacgaagagaaaaaacgctggtatgcgcactggatccgccaaggactgagcgccgtagaacagttgttgctccagaggccgccaggccccttctgcgttggtgataccccgacgttggcggactgctgcctgatccctcagtgggcgaatgccctgcggatggggtgcgatctgagcggctacccgcgctgtaaagcggtttacgacgcctgtactcgactcccggcattcatcgccgcggcgccagaaaaccaacaagacaaaatctcagcctga

SEQ ID NO: 424834 - DNA, 702 bp, Serratia marcescens
atgacgcaatacgtattttcaccgcaagcccccgtgactgttcctgtcgtggggagtgataagcagtttcccgtacgccgtgtttactgcgtcgggcgcaactatgccgcgcatgcccgcgaaatgggctttgacccggatcgtgagccaccgttcttcttctgcaagcctgccgatgcggtggtgccggtggcggccgacgaaacgctggcgttgccgtatccgtcgcaaaccgacaactatcactacgaaatcgaactggtggtggcaattggtaaacgggggagtgatattccactggacaaggcgcatgaatacatctggggatatgctacgggcctggacatgacccgccgcgatcggcagatggacatgcgtcagatggggcgcccatgggaaatcggcaagtcattcgatctttctgcgcccatcgcgccattgcataaagccggcgacagcgcagacgtgagtagcgcacctatctggctgcaggtcaacggcagcgatcgccagcgcagcgacatccgtcatctgatctggtcggtgaatgaaaccatcagctatctgtccggcttttttgagctgcagcccggcgatctgatttttaccggaacgccggaaggggtgggcgcggtggtgaaaggcgatgtgattaccggcaatgtagaagggctaacccctatcgccgtgaagattatctga

SEQ ID NO: 424835 - DNA, 1038 bp, Serratia marcescens
atgcctgaacgcaatcaggatgttaaccccagccgtcagcagttctaccggcatatttccgcgcagaatctgaccccattgtgggagtcactgcaccatttggtgccgcaaacgccgaatgcaaactgcgctccggcttactggaactatcaggagattcgcccacatcttctggccagcggcgagttgattggcgccaaagaggcggttcgccgcgtgctggtgctggaaaacccgatgctgcgcggacagtccgccatcaccccgacgttgtatgccggattgcagttgatcatgccgggtgaagtcgcgccgagccatcgccataatcagtcggcattgcgttttatcgtcgaagggaaaggggcatttaccgccgttgacggtgaacgtacgcaaatgcatgaaggcgacttcattttgacgccgcagtggtgctggcacgatcacggtaatcccggcgaggaggcggtggtatggctggatgggctggatctgccgctggtgaacttgctgggttgcggtttcgcggaggactatccgcaagaacagcagcccgtgacgcgccaggagggggattatttacctcgctatgcggccaatatgctgccgttgcgccatcagaaaggcaactcgtcgcctattttcaactaccgctacgatcgcagtcgggaagcgctgcacgacctcacccgcttgggggaagtcgacgagtgggatggctacaagatgcgctacgccaacccggtgaccggcggctatcccatgccctcgatgggcgccttcctgcaactgctgccgaaaggcttttcctcacggaaggcgcgcaccacggacagcaccatttaccacgtggtggaagggcgcggccaggtcagcatcggcaacgaaaccattcactttttggcaaaagatatctttgtggcgccgacctggttcgatgtgtcgtttcaggcggacgaagacaccgtgttattcagtttttcggaccgaccggttcaggaagccctgggactgttccgtgaagcacgttattaa

SEQ ID NO: 424836 - DNA, 1350 bp, Serratia marcescens
atgactcaacggcgtgatttacaagcactgatcgacgctgctcccatcggtaagacgcagtggcgcgttatcatctgctgctttttagtggtgatgctggatggttttgacaccgccgccattggtttcatcgcacctgacatccgcacccagtggcaactgaccgccggcgaactggcgccgctgtttggcgcggggctgttggggttgacggcgggcgcattgctttgcggcccgctctctgaccgctttggccgcaagcgcgtcattgaactttgcgtggcgctgtttggtgcgctgagcctgatttcggccttctcccccgatctgccaacgctggtcgttttgcgttttctcaccggcctggggttggggggcgcgatgccgaacaccatcacgatgacctctgaatatctgcctgctcgccgccgtggcgcgctggtcacgctgatgttctgcggtttcacactcggttcggccctgggcgggatcgtcagcgcccaactggtgccggtgatggggtggcaaggcattttggtgctcggtggcgttttgccgttgatgctctttgtggtgctgctgtttgccctgccggaatcccctcgctggcaggtccgtcgccaactgccgcacaaggtgattgccaaaacggtcagcgccatcacccgagagtgcgatgaagagactcatttttacctcaacgaagccgctgcggtggccaaagggagcatcagcccgctgtttgcaggccgccagctgcgcattactctcatgctctgggtggttttttttatgagcctgttgattatctatctgctctccagttggatgccgacgctgcttaaccatcgcggtatagatctgcagcacgcctcttgggtgaccgccgctttccagatgggcggaacgctgggggcgctggggctgggggtgttgatggacaaatacaatcccttccgggttttggcggcgagctacgccctgggcgccgtgtgtatcgtcatgattggcctgagcgagaacggcctgtggctgatggcgctggccatcttcggcaccggcatcggcatcagcggttcgcaggttgggctgaatgccttgaccgccacgctctatccgacacaaagccgggcgaccggcgtcagctggtccaatgccattggccgctgcggcgcgattgtcggctcgcttgccggcggcgtgatgatggcgatgaatttctcattcgaaacgctatttttcattattgccgtgccggcggcgttcagtacggtgatgttaattctgctgacggctgttgttcgccagccggccccagcccctgatacgttgcctcgcgcagcgtcgtga

SEQ ID NO: 424837 - DNA, 909 bp, Serratia marcescens
atggcgaactgggcgcagaaaatgaaactgcaccatctgcaaatgttggtggcgttaggtgaacagggaaatctgacccacgttgcccggatgatgaacatctcccaacctgctctgtcaaaatggttatcgcagctcgaagatgagattgggatcacactgtttgagcggcatagcaaagggctgcgcccttccgaaggggggaaactgctgcttcagcatgcgcagcgtttgatcaatgacctggaacgttcgcagtctgaaatcgcccgctttaaacaaggcgggctagtgggaagcctgaaaatcggctgctcaccggtcgccaccgactgcgtttcacaggccgtattgagcctactgcaggaaatgccgacgcttcatctcaatattgaggaaaaagtaatgaccccgctgctgcacgatctgatcgcgggcgcggtggacgtcgtcgtgggccgcgttggcgggcgggcgctgcaactgccgctcaactatcaagtgctctacaccgaaccggtgtgttttgttgcccgccctcaccacccgctggcaaaatccaccaccctcacctggcacgatctcacccactggcgctggattgtctggccgaccggcacacccatccgcctcagcattgataatgcgctggcagataacggcgtgatgctgcctgaaaacacggttgaatcggcatcaatgaacgtcagtaccaacctactgcaaagcagcgatatgatctccattctttctctacggctggcgcagcattatgccagtcaggggcagttggcgatcctgaatctgccgaagattgagcaaaaaggcagtgtgggcgtcttctggcgcaacagcgagccgccttttgccgcactgagccgctttttgcagctgcttacgcaggcttaa

SEQ ID NO: 424838 - DNA, 3072 bp, Serratia marcescens
atggctaaactcacccggcgtcagtggttgaaagtgggcctggccttcggcgggctgtccgctttcggcctgagctatcgcgaggtcgccaaacgggcgatcgacggcttgattcacggcacctcagggcgcgtggctctggatcgcatcaacggcaactctctgcagcccgaagggcgggcagtgccggaatggcaaggcaatccgcagcaggccatctcgatgacccagtgcttcggttgctggacgcaatgcggcgtgcgggtgcgggtggacaggcagaccgatcgggtattgcgtatcgccggtaacccgtatcatccgctgtctcaggagcggcacctcgactctgcgttgccgctgcaggacgcgtttgcgcagctgggcggggagagcggcctcgacgcgcgttccaccgcctgcgcgcggggcgctacgctgctggaggggctttacagcccgctgcgcgtgctggagccgatgaaacgcgtcggcaaacgcggcgagggcaagtggcagcgcatcagcttcgagcagttgatcgccgaagtggtggagggcggcgatctgttcggcgaggggcatgtggacggcctgcgggcgatccgcgatctggaaacgccgatcgatgcccgacagccggggctggggccgaaagccaaccagctgctggtgaccaacgccggtgatgacgggcgcgacagcttcctgcggcgcttcgcccagaacagcttcggcagcaaaaatttcggcgcgcacggcgcttactgcgggctggcctaccgcgccggttccggcgcgttgatgaacgatctggacaagaatccgcacgtgaaaccggactgggaacaggtcgaattcgcgctgtttatgggcacctcgccggcgcagtccggcaacccgttcaagcggcaggcccggcagttggccagcgccagattgcgcagcgaattccgctacgcggtagtggcgccggcgctgccgttgaccaccacgctggcggacgatcatggccattggatcccgatactgccgggcaccgactcggcgctggcgatggcgatgatccgttggatcctcgacaatcggcgttatcaggccggttatctcgccatcccgtcggaggccgccatgcaacgcgccggcgagaagagctggaccaacgccacgcatctggtgatcgccgagagcgagcacccgttggcggggcagcatctgacgctggcccatctgaacggcgcggagtcggcgtcgccgctggtggtcaacggtgcgggggaactggtggcggccgagacgtgcgacagcgccgagctgtggataacccgcacggtgacgctgcacgacggcgcacaggtggcggtgaagagcggctttcagtgtctgaaagaggcggccgacaagctgtcgccggaagcctacagccgggaatgcggcgtaccggtggcgcgcatcgcggcgctggccgaggcctttaccgcccacgggcgcaaggcggcggtgatcgcccatggcgggatgatggcggcgaacgggttttacaatacctggtcggtgatgatgctcaacgtgttgatcggtaacctgagcctgacgggcggggtgttcgtcggcggcggcaaattcaacggtttcgccgaggggccgcgctataacctggtcgagtttcccggcctggtaaaaccgaaggggttgaatatcgcgcgcagcaaggccgcctatgaaacctccgacgaataccgcgaaaaagtggcggcgggcgtttcgccctggccggccagggcgccctggtatccgttcgtcgccgggcagttgaccgagctgctgacgtcggcgctggcgggatatccgtacgggctgaaagcctggatctcgaacatgaccaaccccctgtacggtatcgccgggttgcgcggcgtggcggaagagcggctgaaagatccggcgcgtttgccgctgtttatcgccatcgatgcgtttatcaacgaaacgacggcattggccgactatatcgtcccggacacccataactttgagagctggggattcagcgccccctggggcggcgtcgccagcaaggccaccactgcgcgctggccgatagtgacgccggcgaccgcgaaaacggcgcaagggcagccgatctccatggaggcgttttgcatcgccgtcgccaaacgcctggcgctgccggggttcggcgatcgcgctatcggcgacggccggggcgggctgctgccgctcaaccgcgccgaggattattatctgcgcgccgccgccaacgtggcgtttgccggcaaggcgccggtgccggccgtgagggaggaagagctggcgttgagcggcgtcgatcgcttgttgccgcagcttgcgcagacgctgcgcgccgatgagatcggccgcgtggcgtttatctacagccgcggcggccgcttcgccgttcatgacagcggccgccgcgacggcagcgtgggcaaccgctgggagaagccgctgcagatctggaatgcggaagtggcgaagcaccggcatgcgattaccggcgagcgtttcagcggctgcccaacctgctacccggcgcgtttgtctgacggccgcgcggtggaagaactctaccctgagcggcagtggccgctgcggctgatgtccttcaaatccaatgtgatgagcagctccaccgcggtgatccggcgcctgcacgacgtgaagccggtgaacctggtggcgctgaacccggcggacggggcgcgtttcggcattcaacacggtgattgggtgagcatcagcaccccgggcggcagtcgggaggcgcagatcagtctgctggcgggggtgatgcccggcgtgatcgcggtggaacacggctacggccaccgggagatgggcgccagccagcactacctggacggcgagccgctggcgatggataagcgcattgccgccggcatcaatctcaacgatctggggtttgccgatccgacgcgtgaagtgccgaacacctggctggactgggtgaccggtgcggcggtgcgccaggggattccagcggcgatcgtcaaactttccgcgtaa

SEQ ID NO: 424839 - DNA, 1026 bp, Serratia marcescens
atgagccgccaactgatgatcgcagaggttttgagccagccgcaggcggtgagctggctgccgtgggccgtgcaatatttcttctttatcggcattgccgcctgcgccgcgctgctggcctgcgtgtggcgctggcgcggtggagacaacgccgcacatttggagcgcgcggcgctgtttatcgggctgacgtgcgccatcaccgcgccgctggcgttgaccgccgatctgcatcaaaccgcccgtttctggcatttttacgcctacccgacgccctggtcgtggatgccgtggggcgcgctgttcttgccgttgtttaccttgctgatcggcctgtggtttatcgcgattgaatttacacggctgacgggcagaccggttgcgctgttgcgtgggatcgcgcccgcctgcgcgctggtggctatcggcctgctgttgtacaccgggcgcgaggtttccgtcgtgcgcgcccgcccaatctggttcagctacgcatttccgatcgtgatgttcctcagcgcgctgcaggcgctcttggctctgttgctgttggcgatgcgcaaacggcccggcctgcaggcgccgctggcgcgcgggatgctgctgacgctgctgccgctcggcggggcgatcctgctgtgggtgtgcggcgatacgctatccggcgcggcggtacgccactggctgcagacgcaggcgacggcgcgccagtatgctgccggctggatcgcgctgtgggggctggcgctggcgtgggccgcctgggcggcctatcgacgtttgccgcgcggcggcgcgccgctgctggtggcctgcgcgctggggctgagctggctgatgcgctggacgctgttgattgaggtgcagaccatcccgaaatacaacgcgtcttattccccctatagcctgccgcttggtaccgatggcttgctggcgatcgtcggcaccttcgggctgtggctggcgttaatgatcatggtgcgtgaagcacaggcgtttttactgcggagaaaacaacatggctaa

SEQ ID NO: 424840 - DNA, 738 bp, Serratia marcescens
atggatttcggtaaacggcagtttttgcagcggctgggcgtgttgacggcgggggcttcgctgatccccgtggcggaggccgggctgacgttagcgccgacgcggcgcgagggggatgccagccgccgctacgcgatgctgatcgatctgcggcgctgcgttgggtgccaggcctgtaccgtcagttgtgccattgaaaaccagacgccgcacggcgagttccgcaccacggtaaaccagtaccaggtcagtctcgaaggcgaagcggtggcgaccaacgtgctgctgcccaggctgtgcaaccactgcgacaacccgccctgcgtaccggtgtgcccggtgcaggccaccttccagcgcgaggacgggatcgtggtggtcgacaacaaacgctgcgtgggttgcgcctattgcgtgcaggcctgcccgtacgatgcccgttttatcaatcacgccacccaaacggcggacaaatgcaccttctgcgtacaccggctggaggcgggattgctgccggcatgcgtggagtcgtgcgtgggcggggcgcggatcatcggcgatatgcgcgatccgcacagcacgctgagcaagctgctgcggcgtcacgaggccgagatcaaagtcctcaagccggagaaccaaaccgcgccccacgtgttttatctggggctggatgatgccttcgtcacgccgctgccggggcgggcgcaggtcgccttatggggagagggacgatga

SEQ ID NO: 424841 - DNA, 1761 bp, Serratia marcescens
gtgagggtcgtgttattactgctgttcagtctcggctgggggatggcggcacaggcgggcgagtggtcggtcggcgtgctggcgatgcgcggcgatgcggcgaccgagcgtgactggcagccgctgatcgacaggctcaacggcagcgtcggcggagaacgcttccgcctgcggccgctcgatctggcgcagatgcgcgaagcggtcaatcggggcagcgtgcagttcgtggtcactaatccggcgcagtttgtgcagctgaacagccactatcatctgcgctggctggcgtcgttgcgcgccgccaacggcgatcgggcaacgggcaacatcatcggcagcgtgattctggtgcggcgcgacagcggcattacgacgccgcaggcgctgatgggcaaaacggtgggcgccatcgatccgcaggccttcggcggctatctgaccggctataaggcgctcagcgacgccggcatacggcccgagcgcgattttcacctgcgctttaccggtttccctgccgacgccctgctctatctgttgcgcgagcgcgccattcaggccgccatcgtcccggtctgcctgctggagaaaatgggcaaggaaggcctgatcaacccggcggattttcgcccgctgctgcaacaggccacgtcggctccctgcgtcaccagcacgccgctttatcccaactggtcgttcgccgccctgcccggcctggataactcactggtggatgcggtggcgagagccttgctgaccgcaccgccccagtctcccttcctgtggggcgcaccggcctcgaccagcgaggtggaagcgctgctgcgcgccgtcaatcagcacccggaacagcggcggctatggctggatatcaagagctggctgatccagcatcagacggccgtcggcctgtcgctggcgctgctggcgctgttgatcgtcaaccatatctggatcgcgctgctggtgcgccgacgcgggcgacaactgctccacgccgacgagcaactgcggcggcaggaacgggcgctggaaaacgccaggcagctgaacgtgctgggggagatggcctccggcttcgcgcacgagctcaaccagccgctggcggccattcgccactatgcgcaggggtgcctgatccaactgcgcaacacggacgccgggcatccgctcctggggccgctggaaaatatcgaccggcaggcgcagcgcggcggcgagacgattcataacctgcgccagtgggtgcagcccaccgcggaggcgatagaccaaacgcgctggcgccccaccgcggtaagcgaaaccgccgagcgggtgtggacgctgttgcgcctgacgcagcgctatcccgacctgacgttgttcaataacgtggcaccttcgctgacgctaaccctgccgccggcgctgctggaacagttgctggcgaacctgctgctgaatgcggcgcaggccggggccaatgccgtctggctttccgccgccaagagcgaacgggcgatggagttgcatctgcaggacaacgcgggcggcatgacaacggccgggctggaacaggcttttcgccccttcaacaccaccaaggccggcggcatggggctggggttagccatttgccggcgccttgcccgctatggcggcggcgaaatccgcctggctaaccgcccggctcccgaccgccgcaacgggctgtgcgtaacgctgcatttcatattggataacgaggaaaaccatgtcgctaatttatctggtggatga

SEQ ID NO: 424842 - DNA, 600 bp, Serratia marcescens
atgtcgctaatttatctggtggatgatgacgtcgccgtcaccgacgcctgccattttttgctgaccagcctcggccacggcgtgcaatgctggaatgacagcgccgattttctggcgcaggcggacctgtttcagaccgggatcgtcttgctggacatgcggatgccgaagctcgatggtcaccaggtttacggggagctgcgccgccgcggcagcacgctggcggtggtgttcctgtccggccatggcgacgtgccgatggcggtggagcagatgaagtacggcgcggtggacttcctgcaaaaaccgatcgccgctgaaccgctgatcgccgccctcgaacgggcgcagcaggtctccgccgaggcctggcaacgccatgaaacttgcggccgctaccgcacgctcacgccgaaagaacgcgacattgcgcagctggtggtgcggggcatgatgaacagggaaatggctgagcggttgaatatcgccctgcgcaccgtggaggttcaccgggcaaaagtgatggagaaaatgcaggccgccagcctggcggaattggtgattcagctgcaggatttaccgcacgccgcgcaagaatga

SEQ ID NO: 424843 - DNA, 243 bp, Serratia marcescens
atgtttgtagaattggtgtacgacaaacgcaacgtcgctgggttacccaacgccgccgagattattcgcaacgagctggaaaaacgcgtgcatgcactgttcccggaagctgacgtgcgcgtgaagccgatgcaggccaacggcctgaactccgacgccagcaaaagcgatcgtgagaagctgaaccgaatgttggaagagatgttcgaagaagcggatcagtggctggtcacggatatttga

SEQ ID NO: 424844 - DNA, 330 bp, Serratia marcescens
atgacgaagaagttggttttggccgtcggcaccgcggcggtattttccattcttgccggttgcaccacctatgatcgcgcagccagttatgtcaatgagccggtggtcagcgatgtcaaagtagggatgaccaagcagcaggtgcgggctatcgccggtccgccgtcgacgtccgccacgctgatccatgcgcagggcacctgcgacacttatgcggtggcgccgcgcgacggcaaggtgcaaacctattttgtcagctacaacgacacgggccatgtcatgaacaagggctatcaaacctgttcagactacgattctcagccgaaataa

SEQ ID NO: 424845 - DNA, 468 bp, Serratia marcescens
atgagcattaaacccccattgccgccgtttacccgcgaatccgccatcgagaaggtgcggctggcggaggatgcctggaacagtcgcgatcccgaacgcgtatcgcaggtgtattccctcgatacccactggcgtaaccgcgcggagtttgtcgacggccgcacagcggtggtcggctttttgcaacgcaaatgggcgaaagaactggagtatcggctgattaaggagctgtgggcgtttgacggcgcgcgcatcgcggtgcgtttcgcctatgaatggcgcgacgattccggcaactggtatcgcagcttcggcaatgaaaactgggagttcaatcaggaggggctgatgatcaaccgccatgcctgcatcaacgacatgccgattcgcgaacaggatcggcgttttcattggccgctcggccggcgcccggacgatgttccagcgctgagcgatttcggtttttga

SEQ ID NO: 424846 - DNA, 579 bp, Serratia marcescens
atgaccgccgatctcaacgccttgcccgcccgccagcgcatcctgctgacggcgcacgatctgttttatcaagaagggatccgcgccaccggtatcgatcgcatcatcaagcaatctggcgtgaccaaagtgaccttctaccgccactttcccagcaagaacgatttgattacggcgtttttgacctatcgccatcagcagtggctcagctggttcagcacatcactggcccgccatgtggcgcagaccggcgggttgctgccggcgctggcgccctgcctggcggaatggttcgacgatccgcgctttcgcggctgcgcgtttatcaatactgcggtggagatagccgacctgctgccggaaagcctgcacatcgccggccggcataagcggcagatggcggatgaactggcgcgccacctgcccgccgggccgcagcgggaacagcgggcggcaatgctggcgatgctgatcgacggcgccatcgtcagagtgcagatagagcggcaaccgcaggccgcgctgcaggtgctgaatgccgcgttggacatgttggcgcaaggcgggttcgatcagtaa

SEQ ID NO: 424847 - DNA, 417 bp, Serratia marcescens
atggaactcaagatcgataaggtgatcgaaacggtgttgtacgtcagcgatattgaacgcgcggacgctttttaccggcaggtgctgaagctgccggcgatggtcgccaacgaacggtttcgcgcctataacgtcggcgaacggagcgtactgttgctgtttatcgagggcgattcgctgagcggggcgcactatccgaccgggtttattcccgcgcacgatggcgtggggccggcgcatatcgggctggcggtggcgaaagagcaactgccgcactgggaacggcatctggtggccaacggcgtggagattgaggggcgaatgcgttgggaacacggcggggagagcatttattttcgcgatcccgacgcccacctgctggagctggtgacgccgggcatctgggccaattactga

SEQ ID NO: 424848 - DNA, 1131 bp, Serratia marcescens
atgaaacttcgagtactctctctgatggtacccgcactgctggttgcaggcacagcaggcgcggcggaaatctacaacaaagacggtaataaactggatttgtacggtaaagtcgacggtcttcactatttctccagcaacaacggcgtggacggcgatcagtcttatatgcgttttggcctgcgcggcgaaacgcaaatcagcgatcagctgaccgggtacggccagtgggaatatcaggcgaacctgaaccacgctgaaaaccaggacaacaagaacttcacccgttacggcttcgccggtctgaaattcggcgactatggctccttcgactacggccgtaacaccggcgtgctgtacgacgtcgcggcgtataccgacttgcagcctgagttcgacggtatgacctacggcgccgaccagttcatgttccagcgttccagcggcctggcgacctaccgtaacaatgacttcttcggtctggttgacggcctgaacttcgccctgcagtaccagggtaaaaacggcaacggcgaagagaccaacaacggtcgtgacgtcctgggccaaaacggcgaaggctacggtatgtccatgagctatgacatgggctacggcatcagcgccgcgggcgccttcttcaactctcgccgcaccagcgagcagaacggcgccggcgcgtaccgcaatattatgggccgcggcgacaaggcggaaggttactccggcggtctgaaatatgacgccaacgacgtctacctggcggtgatgttcacccagtcctacaacgcggcgcgtttcggcagttccgacagcagcgtttatggctacgccaacaaggcgcagagcttcgaagcctacgcgcactaccagttcgacttcggtctgcgtccgttcgtgggctataaccagactaaaggtaaagacctgggccgcgccggcaacggcaaggactacggcgatcaagatctggtcaaattcgtcgacctgggtgcgacctacttcttcaacaaaaacatgtccacctatgttgattacaaaatcaacctggtggacaacaacgatttcaccgacgctgccggcatcaacaccgacaacgtggttgccgtgggcctggtttaccagttctaa

SEQ ID NO: 424849 - DNA, 408 bp, Serratia marcescens
atgatgccctttcaacccgacgtgctgtggcggcggctgcaaagttcccccttccgcgctcgctttcgtttaaatgccaaagaccaggcttatctggagggcaaaggattgccccttatcctcagccatgcccgcgattttatcgatcgccgcctggccgccgcctaccctaaaaacgacggcaagcaaacgccgatgcgtggccacccggtattcgtcgcccaacacgccaccgccacctgctgccgcggctgcctggaaaagtggcacggcataccgcagggcgtcgcactggacgagcggcaaaaggactatattgtccaggctatcgcgctgtggctggtgcgcaggggcggcgccagggatgtgtcaggcacgaatattttcgacccggatcgcggattgtga

SEQ ID NO: 424850 - DNA, 1155 bp, Serratia marcescens
atgacagccaccttgtgcaatgaacagcaaacgcccggcgttcctcaacagatcgccacccgtctggcctttttcgtcgccggtctcggcatggccgcctgggcgccgctggtccccttcgccaaagcgcgcatcggcatcgacgacggctcgctcggcctgttgctgctctgtatcggcgccggctccatgctggcgatgccgctgaccggtttcctgaccggcaaattgggctgccgctcggtgatcttgatggcggggctgggattgtgcatcgatctgccgctgctggcgctgatggactctctcggcggcatggccgtggcgctgctgctgttcggtgcggcgatcggcatgatcgacgtagcgatgaacgttcaggcggtgatcgtcgaacgcgccagcggcaaggcgatgatgtccggctttcacggtttcttcagcatcggcggcattgccggtgccggcggcgtcagcgcgctgctgtggctggggctgacgccgctgcaatccaccctgcttaccgtattggcggtgatagtgctgctggcgctcgccagccgccatctgctgcgtgagagcggcgccgacgacggcgggccgatgttcgtcttgccgcgcggctgggtgatgttcatcggcattctttgcttcatcatgttcctggcggaaggatcgatgctcgactggagcgcgctgttcctcaccacattgcgcggcgtcgaacacagccaggccggtctgggctatgcgctgttttccatcaccatgacgctcggtcgcctcaatggcgatcgggtggtgaattcgctgggccgctaccgggtgttgctgctgggcagcctgtgcgccgctctcggcctgagtctggccatcgccttcaatcacgccaccgtgtcgctggtcggtttcatgctggtcggcctgggcgcctcgaacgtggtgccgatcctgttcagcgctgcaggcaaccagcgcgacatgccggccaatttggcgatcgcctccgtcaccaccgtcggctatgccggtattctggccggcccggcgctgatcggcttcatcgctcagttttccagcctgacggtggctttcgcctgcgtagccgctctgctgttggcggtgaccgccagcgccagggccgtcactcgctga

SEQ ID NO: 424851 - DNA, 2703 bp, Serratia marcescens
atgcaaaataaacaattgaccatcagctccagcaacattacccgctgcttcctgctgtttatcgtgctgctgacgatcggcatcggcctgtatggctacaactacaccaacgcctggctggcggaaaagaagtacgcgctgaacagcattgccggttcgctgcaaaagcgcatcgatacctaccgctatatgacctatcaggtctatgacaaattcggcaatgcgccggcgcagaatgtcgatcccggtttgcaggaaacccgcctgcggcccgacgtctattatatcgagaaaccgcacaagaaaaccgacgcggtgatcttcggcagccatgacgagagcacgctggcgatgatcgccaacatctcggattacctggacacccgctggggcgccaagaccgaaaactacgccatgtattacctcaatggtcaggacaacagcctcagcctgatcaccacccagccgctcaaagagctggcttcgcgctttcgggaaagctacctgaccacctcggcggacgaacgccgcgccgagatgctgcagcaggccaatatgctcgacgagcgcgagagcttttccgatctgcgcaagcagcgcttccagaacgcctattcgttctcgattcgcaccactttcaatcagccagggcatctggcgacggtgatcgccttcgacttgccgatcaacgacatcattccggccaatctggcccgcgccaatttcctgctgcagccggacgatgttgatctcgacgacagcaccatcccggcggaaaccgtcctcggcacccatgcgacgatgagcggcggctgggtggagttcagcgccgccctgcccaatgcgccgctgaaggtggtgtatcgcgtttcggccatcaatctggccatcgacctgctgcgcaacaacatctggctgatcgcggtcaacttgctgctgctggcgctgtcgatgctgagcatctactttatccgccgccagtacattcgcccgagcgaaaacatggcggtggaactggaggccgagcgcgcgctgaatcaggaaatcgtctccagcctgccttccggcctgctggtctacagcttcgccaacaatgcggtgatcgccagcaataaaatcgccgagcacctgttgccgcacctcagtctgcaaaagatcgcccatatggccgaacagcatcacggggtgatccaggcgacggtcaacaacgaggtgtatgaaatccgcatcttccgcagccagctgtcgccggacacctacctgttcctgatgcacgatcaggataaagaggtgatggtgaacaagcggctgcagcaggcacggcgcgaatacgacaaaaacgttcaggcgcgcaagctgatgctgcacaacctgggcattgagctgaatcagccggtacgccagatgcacgatctggtcgatcgtctgcacggccggccggatgaggaacagcagcaggcgctgctgggccagctgacggcggcgtcggcttcggtgctggaattgatcgataacatcaccctgctgacccgactggaaacccaggactggcaaccctcgcgcgagccgtttagcccgacggcgatgatcgacgagttgctgttggaggccctgcccgcccttaatcagaaggggctggcgctgttcaagcatttccagctggacgtcgagcagaactatatcggcgacgccaacgcgctgcgcaaggtgatctcgctgctggtgcattacgccattatcaccaccgcctgcggcaagatttccctggttgtcgaccatgagcccgagcacccggatcgcctgattttccaaatcaacgacaccggctccggcatctccaacgaagagatcagcaacctcaactatccgttcctcagccagacgctggtggaccgcttcaaccacggttccggcctcaccttcttcttgtgcaatcagctgtgcaagaagcttaacggccagttggacattcgcagcaaggtggatatcggcactcgctacaccattcgcgtcgccatggagatggagaaaaaagagccgcaggagcaggaaaaactgctcgacggcgtcaccgccctgctggacgtcacgtcggatgaagtgcgcggcatcgtgacccgtctgctgcaggcctacggcgccgactgcctcgtcgccgacgatcgcgcggtcaatcgcgattatgacgtgctgctgaccgataacccgcagcgagccgatgattacaccctgctgctggcgaccgatgagccgggttggcaagcgctggataaacgctacattcgggtgaactacaacctgaacggcgcattaatcgacgccgtgctgatactgatcgaacagcaaatggccgcgctggaacaggaagaaagcccgctttcattgagctcagaagatatccaactctatgaaaaacaattgaaatcaagtgattactatgggctgtttgtcgatacagtacccgacgatgtcaaaaaactgtatactgaggcgggcagcagtgatttcaatgcgctgtcacaaaccgcacatcgcctgaaaggcgtgtttgccatgttaaatctgcttcccggcaagcagctgtgcgaatcgttagaacagcgcatcgcagaaggtgatgcgcccgagatcgagaataacatcagtcagattgattttttcgtcagcagactgctgaagcaaggtagccaacaacatgaataa

SEQ ID NO: 424852 - DNA, 651 bp, Serratia marcescens
atgaataacctgaacgtaattattgctgatgaccatcctatcgtactgtttggcatccggaagtcacttgagcaaattgaatgggtgaatgtcgttggggagttcgaagactcaaccgcactgatcaacaatctgtccaagctggacgccaacgtgctgatcaccgatctgtcgatgccgggtgacaagtatggcgacggcatcacgctgattaagtacatcaagcgtcactatccgcagttgtcgatcatcgtgctgaccatgaacaacaacccggcgatcctgagcgcggtattggatctggatatcgaaggcatcgtgctgaaacaaggcgcgcctaccgatctgccgaaggcgctggccgccctgcagaaaggcaagaagttcacgccggaaagcgtctctaaactgctggagaagatcagcgccagcggctatggcgacaaacgcctgtcgccgaaagagagcgaagtgctgcgcctgttcgccgaaggtttcctggtgaccgagatcgccaagaagctcaaccgcagcatcaaaaccatcagcagccagaagaaatcggcgatgatgaagctgggcgtcgagaacgacatagccctgctcaactacctctcctccgtcagcatgacgccgttggacaaagagtag

SEQ ID NO: 424853 - DNA, 2805 bp, Serratia marcescens
gtgctggcgattttgctgtggtcgttgggagcgctgctcaccaccttttatattctgaatatcctgcatcagaaagagtcggatatccggcaggattacaaccttaacttcgatcaggcgcagggctacatccgccattccgccgacatcatccgcgacatcaagtatatggcggaaaaccgcctcaacggttcggtcagcggcctggacatgttcagcggcgtgatccccggcaagggcagcccgccgcaattctttccgctgtacccggagtccaactgcgcgctgagcaccacctatcgcagttcgctcgattcgctgagcggcctgatccagtattggaaagagaacttcgtggcggcctacgatctcaaccgggtgttcttcatcggcggcgacagcctgtgtatggcggaattcggcggcggcaacgcgagcgccaatcgggaaaacatgctgaagttgctgcacgagcgcattctgaaataccgcaacgccaagaatctcgacaaagacaacaacctgtattggatcagccccagcgcgcagcggccggacgtcggttatctgtacgtgctgacgcctctctatatcggcaacaagctggaggcgttgttgggcatcgagcaaaccgttcggctggaagatttcgttaccgccggcaacctgccgatcggcgtcacgctgctggatgagaacaacgagccggtgctgcgcctggcggatggcgaacgctatgccgctgcgctcaacagctaccccgaagagcatgcctacttcggttatgtcgacaattaccgcgacctgatcctgaagaaagcgctgccgccttcttcgctgagcatcgtctatgcgctgccggtgaaaagcgtggtggaacgcttcaaaatgctgatcctcaacgcgctgttgctgaacctgctgtcggccatcgtgctgttcacgctggcgtggctgtttgagcgcaagatgttcctgccggcggaggacaacgcgtttcgcctggaagagcacgagcagttcaaccgcaagatcgtcgcttcggcgccggtgggcatctgtatcctgcgcatcagcgacggcaccaatatcctgagtaacgaactggcgcacaactacatcaacctgttgacccacgaagatcgcgatcgcataacgcgcatcatttgcgaacagcaggcgaatttcgtcgatgtgatgaccagcaacaacaacaacctgcagatcagctttgtccattcgcgctaccgtaacgaagaggtggcgatttgcgtgttggtggacgtcagcgcgcgcgtgaagatggaagagtcgctgcaggagatggcggcggcggcggagcaggccagccagtcgaaatcgatgttcctggccaccgtcagccatgagctgcgcacgccgctgtacggcattatcggcaaccttgatctgctgcaaaccaaggcgttgccgcaaggggtcgatcggctggtcaatgcgatgaacaactcttccggcctgctgctgaaaatcatcagcgacattctcgatttctccaaaatcgagtccgagcagttgaagattgaaccgcgcgagttctcctgtctggaggtgatcacccatatcgccggcaactatttgccgctggtggtcaagaaacgtctggggctgtactgctttatcgaacagaacgtgccggagcgcatcttcggcgatccggtgcggctgcagcaggtgctctccaacctggtgaacaacgccatcaagttcaccgataccggctgtatcgtgctgcaggtctgcacccgcggcagctacctggagttcagcgtgcgcgataccggcgtcggcatcccggagaaggagatttcgcgcctgttcgatccgttcttccaggtggggaccggcgtgcagcgtcatttccagggcaccggcctgggattggcgatctgcgagaaattggtcaacctgatggacggcgacgtctccgtcgagtccgagccgggcctgggcagcttgttcagcattcgcattccattgtttaacgcccagttcccgatcccgcaggccagcgatacctggcaggggcgtcggctgtggctggatatccgcaatcagcggctggaaagctacctgatggcgatcctgggcggctacggcgccgatatccagcgctatgacgggcaggagaccgccgcgggagaggtgctgctcagcgatcatccgctgatgctggatgcgccgctgctggctcagatccaattctccaccgagcatattggcccatcacaggaaacccggccgggctattggatgcacagtacctccacgccgcgtgaaacgctgaccttgctcaaccggttgttcggcgtcggcagcggcgcggcagaggcgctggtgcagctgccggtgcccgccaaggccagcgcggcggacaacggcgatattcatctgctggtggtcgacgatcatccgatcaaccgtcgcctgttgtccgatcagctgggatcgctgggatatcaggtggtgaccgccaacgacggcgtcgacgcgctcggcgtgctgaaacagcatcgcgtcgatattgtgctgaccgacgtcaatatgccgaatatggacggttatcgtctgacgcaggcgctgcggcagatgcagttcagcgcgccggtgattggcgtgacggcgaacgcgctggcggaagagaggcagcgttgcctcgaggcgggtatggataattgcctgtcgaaaccggtcacgctggagacgctggaacagacgttggcttactacagccagcaggtgcgctacagccgcagcgaggcttga

SEQ ID NO: 424854 - DNA, 2643 bp, Serratia marcescens
atgagcgaccttgccagagaaatcacaccggtaaacatcgaagacgagttgaaaaactcgtatctggactatgcgatgtccgttattgtcggacgtgcgctgccagatgttcgtgatggactgaagccggttcaccgccgcgttctgtacgcgatgagcgtattgggtaacgactggaataaaccatacaagaaatcggcccgtgtcgtcggggacgtgatcggtaaatatcacccgcacggtgacagcgcggtttacgacactatcgtgcgtatggctcagccgttttcactgcgctacatgctggtggacggtcagggtaacttcggctccgtcgacggcgactccgccgcggcgatgcgttataccgaagtgcgcatgtccaagattgctcacgaactgttggcggatctggaaaaagaaaccgtcgacttcgtgcctaactatgatggcaccgagcagatcccggccgtcatgccgaccaagatcccgaacctgctggtcaacggctcgtcgggcatcgccgtgggcatggccaccaatatcccgccgcataacctggcggaagtcgtcaacggctgcctggcctatatcgacgatgaaaacatcagcatcgaagggctgatggaacacatcccggggccggacttcccgacggcagcgatcatcaatggccgccgcggcattgaagaggcctaccgcaccgggcgtggcaaagtctacctgcgcgcgcgcgcggaagtggaggccgacgccaagaccgggcgcgaaaccatcatcgttcacgagatcccgtatcaggtgaacaaggcgcgtctgatcgagaagatcgccgagctggtgaaagaaaagcgtgtggaaggcatcagcgcgctgcgcgacgagtccgataaagacggcatgcgcatcgtgatcgaagtcaaacgcgacgcggtcggcgaagtggtgctgaacaacctgtatgcgctgacgcaactgcaggtcaccttcggcatcaacatggtcgcgctgcatcagggccagcctaagctgctgaacctgaaagacatcctcgaagccttcgtgcgtcaccgccgcgaagtggttacccgccgcaccatcttcgaactgcgcaaggctcgcgaccgcgcccatatcctggaagcgctggctatcgcgctggccaacatcgatccgatcatcgagctgattcgccgtgcgccgaccccggccgaagcgaaagtcgcgttggtggcgcagccgtgggatctgggcaacgtcagcgccatgctggagcgcgccggtgacgacgccgcccgccctgagtggctggagccggagttcggcatccgcgacggcaaatactacctgaccgagcaacaggctcaggcgattctggatctgcgcctgcagaaactgaccggcctggagcacgagaagctgctggacgaatataaagaactgctcaactttatcgccgagctgatctttattctggaaagcccagagcgcctgatggaagtgatccgcgaagagctggtggcagtcaaagagctgtacaacgacggccgccgcaccgagatcaccgccaatacttccgacatcaacatcgaagacctgatcaaccaggaagacgtggtggtgaccctgtctcatcagggctacgtgaagtatcagccgctgtccgactatgaagctcaacgccgcggcggcaaaggcaaatctgcggcgcgtattaaagaagaagactttatcgatcgcctgctggtggccaacacccacgatacgatcctgtgcttctccagccgtggccgcctgtactggatgaaggtgtaccaactgcctgaagccagccgtggcgcgcgcggtcgcccaatcgtcaacctgctgccgctggaagccgatgagcgtatcaccgccatcctgccggtgcgcgagtatgaagaagggcgccacgtgttcatggccaccgccagcggtaccgtgaagaaaaccgcgctgaccgagttcagccgcccacgcagcgccggcatcatcgccgtcaacctcaacgagggcgacgagctgatcggtgtcgatctgaccgacggcagcaacgaagtgatgttgttctccgccaacggtaaagtggtacgcttcccggaaacgcaggtgcgttcgatgggccgcaccgcaaccggcgtgcgcggcatcaacctcggcgaaggcgacagcgtgatctccctgatcgtgccgcgcggcgaaggcgacatcctgaccgtgacgcaaaacggcttcggtaaacgcaccgccgtgaccgaatatccgaccaagtcacgcgccacccagggggttatctccatcaaggtgagcgagcgtaacggccaggtggtcggcgccgtacaggtggaaaccagcgaccagatcatgatgatcaccgatgccggcacgctggtgcgtacccgcgtttcggaagtcagcgtggtgggccgtaacacccagggcgtgacgctgattcgcacggcggaagacgaaaacgtcgtcggcctgcagcgcgtggccgagccggtggaagacgaagagctggacagcctggaaccgggcgcggaagcggtggaagaagacaccacgccgctggacgatggcgacgacgcggctgagccgatggacgacgacaacgtttaa

SEQ ID NO: 424855 - DNA, 726 bp, Serratia marcescens
atgaacgcagaatcatccagccgagtgcaaaacgttgaccaccaggaaatcgccaagttcgaggccgtcgcctcccgctggtgggatctggaaggcgagttcaaaccgctgcaccgcatcaacccgctgcgcctgaactacatcatgcagcgcgccggcggcatttttgacaagcaggtgctcgacgtgggctgcggcggcggcattctggcggaaagcatggcgcgcgaaggcgccaaggtcaccggcttggacatgggcgcggagccgctgcaggtcgcccgtctgcacgcgctggaaagcggcatggacgtcacctatgtgcaggagacggtggaaagccacgctcaggccaacccgcaacgctacgacgtggtcacctgcatggagatgctggagcacgtgccggatccggcctcggtggtgcgcgcctgcgcccagctggtgaaaccgggcggccacgtgttcttctccaccatcaaccgcaacactaaagcctggctgatggcggtgatcggcgcggagtacgtgctgaagatggtgccgcagggcacccacgatcataagaagttcattcgcccttccgaactgatcggctgggtcgacggcacgccgctgcgcgaaaagcacatgatcggcctgcattacaacccgatcaccgatcatttcaagcttggacgcaacgttgacgtgaactacatggtgcacacccagcacgaaggctaa

SEQ ID NO: 424856 - DNA, 2289 bp, Serratia marcescens
atgaaccaaagtctgcttgtaactaaacgcgatggccgtaaagagcgcatcaatctcgacaaaatccaccgggtcatcgattgggccgcagagggattacacaacgtctcggtttctcaagtagagttgcgttcacacattcagttttatgacggcatcaaaaccgccgacattcacgaaaccatcatcaaagccgcagccgatctgatctcccgcgatgcgccggactatcagtacctggccgctcgcctggcgatcttccacctgcgtaaaaaggcttatggccagttcgagccgccgaagctgcacgctcacgtgacgcgcatggtcgagatgggcaaatacgataagcatctgctggaagactacagcgctgaagagttcgagcagatggattcctttatcgatcactggcgcgacatgaacttctcttatgccgccgtcaagcagctggaaggcaagtatctggtgcagaaccgcgtcagcggcgagatctacgaaagcgcccagttcctgtacatgctggtgtccgcgtgcctgttctccaactacccgcgtgaaacccgtctggactacgtcaaacgtttctacgacgcgatttccaccttcaagatttcgctgcctacgccgatcatgtccggcgtgcgcaccccaacccgccagttcagctcctgcgtgctgatcgagtgcggcgacagcctggactccatcaacgccacctccagcgccattgtgaaatacgtttcgcagcgcgccggcatcggtatcaacgccggccgcatccgcgcgctgggcagcccaatccgtggcggtgaagccttccataccggctgtattccgttctacaaacacttccagaccgccgttaaatcctgctcgcagggcggcgtgcgcggtggcgcggcaacgctgttctacccgatgtggcacctggaagtggaaagcctgctggtgttgaaaaacaaccgtggcgttgaaggcaaccgcgtgcgtcacatggactacggcgtgcagctgaaccgcctgatgtaccagcgtctgatcaagggcgaagacatcaccctgttcagcccgtccgacgtgccggggctgtatgacgcgttcttcgccgatcaggacgaattcgaacgcctgtatacgcagtacgagaaagacgacagcattcgccagaagcgcgtgaaagcggttgagctgttctcgctgatgatgcaagagcgcgcctctaccggccgcatctacatccagaacgtcgatcactgcaacacccacagcccgttcgatccgcagatcgcgccggtgcgtcagtccaacctgtgcctggaaatcgccctgccgaccaagccgctggaagacgtcaacgacgaaaacggcgagattgcgctgtgtaccctgtccgccttcaacctgggcgcgatcgacagcctggacgatctggaagaattggcaaccctggcggtgcgctcgctcgacgctctgctggattatcaggattatccgatcaaggctgcgcaccgtggcgcgatgggccgccgcaccttgggcatcggcgtcatcaacttcgcctattacctggcgaagaacggcgtgcgctactccgacggcagcgccaacaacctgacgcacaaaacgttcgaagccattcagtactatctgctgaaagcctccaaccgtctggctcaggaacaaggcgcttgcccgtggttcaaagagaccacttattcgcagggtatcctgccgatcgacacttacaagaaagacctggatgctgtctgcaacgagccgctgcactacgactgggaaaccctgcgtaaagagatccaggaaaccggcctgcgcaactcgacgctgtctgccctgatgccgtcggaaacctcttcgcagatttccaacgccaccaacggcatcgagccgccgcgcggccacatcagcatcaaggcgtcgaaagacggcatcctgcgccaggtggtgccggagtatgagcgtctgaaagacaactacgagctgctgtgggaaatgccaagcaacgacggctatctgcagctggtggggctgatgcagaaattcatcgaccagtcgatttcggccaacaccaactacgatccgacccgcttcccgggcggcaaggtgccgatgaagcagctgttgaaagacctgctcaccacctacaagttcggcgtgaaaacgctgtactaccaaaacacccgcgacggtgcggaagacgcccaggaagatttgcagcctgccaaggccggcgatgacgactgcgaaagcggcgcctgcaagatctaa

SEQ ID NO: 424857 - DNA, 1131 bp, Serratia marcescens
atggcttacaccactttttctcagaccaaaaacgaccagctgcaagagccgatgttcttcggccagtcggtaaacgttgcgcgtttcgaccagcaaaagcatgaaatcttcgaaaagctgatcgaaaaacagctctccttcttctggcgcccggaagaagttgacgtctcccgcgatcgcatcgattaccaggcgctgccggagcacgagaagcatatcttcatcagcaacctgaagtatcagacgctgctggattctatccagggccgcagcccgaacgtcgccctgctgccgctgatctcgatccctgagctggaaacctgggtggaaacctggtcattctccgagaccatccactcccgttcttacactcacattatccgcaacatcgtcaacgatccggcgctggtattcgacgacatcgtcaccaacgaagagatcaaaaagcgcgcgaaagacatctccggctactacgacgatctgatcgagatgaccagctactatcacctgctgggtgaaggcacccaccaggtgaacggtaaaaccgtcaccgtcaatctgcgcgcgctgaagaaacagctgtacctgtgcctgatgagtgtgaacgcgctggaagcgatccgcttctacgtcagcttcgcctgctccttcgcgttcgccgagcgcgaactgatggaaggcaacgccaaaatcatcaagctgatcgcccgcgacgaagcgctgcacctgaccggcacccagcacatgctgaacctgatgcgttccggcgccgatgatccggaaatggcggagatcgccgaggaatgccaacagcagtgctacgatctgttcgtgctggctgcccagcaggaaaaagagtgggcggaatacctgttccgcgacggctcgatgattggcctgaacaaagacatcctgtgccagtatgtagaatacatcaccaatatccgcatgcaggcggtcggcctcggtctgccgttcgaaacccgctccaacccgatcccatggatcaacgcctggctggtgtccgacaacgtgcaggtggcgccgcaggaagtggaagtgagctcctacttggttggccagatcgactcggagatcaacgccgacgacctgagcgacttcgaactgtaa

SEQ ID NO: 424858 - DNA, 261 bp, Serratia marcescens
atggcgacgccaatcgtaacgctgcgcgccgccggcacgcagctctcctgtcccaacagtgaaagctgcctgctcgacgtgctggagttgcacgacgtgcaggtagagtaccaatgccgctccggctattgcggcgcctgccgcctgaagctggtgaaaggcgaagtggcctaccgccaacagccgctggcgtttatcaacgccggcgaaatcctgccctgctgctgtatgccgctgacggatatcgagctggaaatgtaa

SEQ ID NO: 424859 - DNA, 153 bp, Serratia marcescens
atgcgcttaaggcatgtgcttcactcgctaaccgttgtatgtattacggttttgttatttatctggatgataagagactcgttgtgcgagctgaaaatctaccaggaaaatatcactatcctgatcaggttggcgtgtgaggtgaagcggtaa

SEQ ID NO: 424860 - DNA, 1197 bp, Serratia marcescens
atgttaagggtggagatgctcagcaccggcgatgaggtgctgcacgggcaaattattgataccaacgccgcctggctggcggactacctgttccagcagggggtgccgatgagcgggcgggaaacggtcggggacagcctctctgcgttgatcgagatcctgcaggaacgaagccatatcgccgatgtgctgatcgtcaacggcggcctggggccgaccagcgacgatctcagcgcgctggccgccgccaaagcctgcggcgtagagctggttgaacgggccgactggctggcgcgcatggaagcctatttcgccgagcgcgggcggccgatggccccttccaaccgcaagcaggcgcagatcccggccaatgcggaaatgctggataacccggtgggcaccgcctgcgggttcgcgctgcagctgaaccgatgtcagatgttcttcacccccggcgtgccgtcggaattcaaagtgatggtcgaacagcagatcatgccgcgtttgcgtgggcgcttcaccttgccggcgccgccgctgtgcctgcgcctgaccaccttcggcacctccgagagcgatttggccgccgagctggacggtatgccgctgccgccggatgtggtgctgggttaccgttcctccagcccgatcatcgagctgaagctgaccgggccggaaagccggcgtgtggaaatggaactggcctggcggcgcgtgcgcgaggtggcgggggacaactgcatctttgaaggcacaatcgggttgccggcgatgctgacgcagcgcctgaatcagcaagggctgaagctggcgttgagcgagcagttcagcgccgggttgatcaatctgcagctgcagagcgaaggagcgccgctggcggggggagaactgctgccggcgaactgcatcgaaacgctggaaaccacgctggcgcgcgcccgctcgctggcggaattgaccggcgcgccgttggcgttggcggtcagcgccatgcgcgacgagcaagtgagcattgcgctgcacacgccgcgcggcgggattggccagaccttgcgttatcgtgcgtcgcgccacggcctgcggctgcggcaggagtcggtggcaatgctggcgctggatatgctgcgccgctggctgaatgggggccaggcgtgcggtaaaaacgcctggctggaggtggtggagattatcgagtga

SEQ ID NO: 424861 - DNA, 1209 bp, Serratia marcescens
gtgaagaatcgcactcttggcagtgtttttatcgtggcgggtaccaccattggcgccgggatgctggcgatgccgctggcggcggccggcgtcggcttcggcgtcacgctggccttactggtcgggctgtggctgttgatgtgttacaccgcgctgctgctggtagaggtttaccagcatgagcaggcggataccggtctgggcaccctcgccaaacgttatctcggcggcggcggccagtggctgaccagctttagcatgatgttcctgatgtacgccctcaccgccgcctacatcagcggcgccggcgaactgctcgccaccagcatcagccagtggacgtcgcaggacttcccggtgtcgctcggcgttctgctgttcaccctggtggccggcggcgtggtatgcatcggcacccactcggtcgatttgttcaaccgcatcctgttcagcgccaaagtggtatttctggtggtgatgctaggcctgatgttgccgaatatccaccaaaccaacctgatgacgctgccgctggagcaaggcctggcgctgtcggctattccggtgatcttcacctctttcggcttccacggcagcgtgccgagcatcgtcaactatatgggcggcaacattcgcaaactgcgctgggtgtttatcatcggcagcgctatcccgctgatggcctacatcttctggcagctggcaacgctgggcagcatcagctccgacaccttcgtcggcattctggcgcagcaggccgggctgaacggtctgttgcaggcggtgcgcgacgcggtggcttcgccgcacgttgaactggcggtgcacctgttcgccgatctggcactggcgacctcgttcctcggcgtcgcgctcgggctgttcgatttcctggccgatctgttcaagcggcaagacaacgtgcgtggccgcctgcaaaccggtgccatcaccttcctgccgccgctggcctttgcactgttttatccgcgcggcttcgtgctggcgttgggattcgccgccatcgctctgtcggtgctggccctgctgttgccttcactgctggtatggaaaacgcgccaaaaacatcaggcacagtatcgcgtctggggcggtacgccggcgctggcgttggtgtttgtctgcggggtgacggtgatcgccattcaactgggcatcgccagcggcatgctgccggcggtggggtaa

SEQ ID NO: 424862 - DNA, 540 bp, Serratia marcescens
atgaaaaagacttgggtcgcgtgcgcggcaggattgctgttggtgaccggcgcggcgaacgccatcagcgtgtcgggcgaagccgggcagcactacaccaacctgggcgttggcatgagcaccggctcttctggtctgggcctgaccggcaactgggcgcgcagcgaccacgacggtaacgtcggcagcctggggctgaacttcggcgtgccgctggggccgttgacggcgaccgtgggtgccaaagcgctgtacctcagcccgaaagatgggaagagcggcggggcggtggcgctgggcggcggcctggagtgggagatcaaccgttacttcagcctgcacggcgaagggtactttgcccctgaatccttcaccagcggcgtgaaagcctataacgaagccagcggcggcctgcgctggaagttccgtccgctgagcgtggacgtgggctaccgttacatgcaaatggaaggcaaagacgggcgtcgcgacaacacgctggccgatggcccttacgtcggcgtgggtctgagcttctga

SEQ ID NO: 424863 - DNA, 1437 bp, Serratia marcescens
atgagcaagaaaggactgaccaccgcagccggcgccccggttgtcgataacaataacgtgatcaccgcaggcaaacgcggcccgatgctgttgcaggacgtgtggttcctggaaaaattggcccacttcgaccgtgaagtcattcccgagcgccgcatgcacgccaagggatccggcgcttacggcacctttaccgtcacccacgacatcacccgctacacccgcgccaagatcttctccgaggtcggcaaacagaccgacatgttcatccgcttctccaccgtcgccggtgaacgcggcgccgccgacgccgaacgcgacattcgcggcttcgccatgaagttctataccgaagaaggcaactgggatttggtgggtaacgatacgccggtgttctacctgcgcgatccgctgaaattccccgatctcaaccacgtggtgaaacgcgatccgcataccaacctgcgcaacccggtctacaaatgggactttttctcccacctgccggaatcgctgcaccagctgaccatcgacttcagcgatcgcggcattccgaagtcctatcgccacatgcacggcttcggcagccacaccttcagctttatcaatgccgccaacgagcgtttctgggtgaaattccacttccgctgccagcaaggcattgaaaacctgatggatgaagaagcggaagcgatcatcgccaaggatcgcgaaagctcacagcgcgatctgttcgacgcgatcaaacgcggcgacttcccgcgctggaagctgcaaattcagatcatgccggaacacgaagcctcgcagacgccatacaacccgttcgatctgaccaaggtgtggccgcacggcgactatccgctgatcgacgtcggctatttcgagctgaaccgcaaccccgacaactacttctccgaggttgagcaggtggcgatgaaccccgccaacgtggtgccgggcatcagtttctcgccggataaaatgctgcagggccgtctgttctcctatggcgatgcgcaccgctatcgcctgggcgtcaaccaccaccagatcccggtgaacggcgccaaatgcccgttccacaactaccatcgcgacggcgcgatgcgcgtggacggcaacagcggcaacggcgccacctacgaaccaaacagcttcggcctgttccaggagcagccggacttcagcgagccgccgctgagcattgagggcgcggccgaccactggaaccatcgtgaagacgacgattactacagccagcctcgcgcgctgttcaacctgctgagcgccgaagagcaccagcgcatgttcacccgcatcgccggcgaactgtcgcaggtgccggagcaaatccagcgccgtcaggtcgagctgttcaccaaggtgcacccggactacggcgccggcgtcgccagggcgttggggctgaaataa

SEQ ID NO: 424864 - DNA, 1386 bp, Serratia marcescens
atggcgccgttaagcgattggccgtggcgacactgggcgcgccttcagccgcaggcgacggcgttgctgctcggcgaacagccgctgagctggctggcgttgcaaggccaggtggatgagctggcggcggattttcagcaccagggcgtggagccgggctgcggcgtggcgctgtgcggtaaaaacagctacccgctgctgttggcctatctggcgctgctgcaatgcggcgcgcgcctgttgccgctcaatcctgccttgccgacgccgctgctggcacagctgctacccgaattggacatcacctttgccttcggcccggatccgttgccggcgctgccggaagaggtgattcgattgacgccgccctcgaccgagccgcgctggccgaacttgccgatgtgggatgcgcaacgtctggcgacgctgacgctgacctcgggctccagcggcctgccgaaggcggcggcgcacagctacgccaaccatctggccagcgccgccggggtgttgcggctgatggattttcagcgcgaggattgctggctgctgtcactgccgctgtttcacgtctccggccagggtatcgtctggcgctggctggcggcgggtgcgcggctggcggtgcgcgagatgcatccgctggccgaggcattggcaggctgcacgcacgcctcgctggtgccgacacagctctggcggctgctggcgcaaccgctgacgggcacgacgctgaaagaggtgctgctcggcggtgcgatgatcccggtggcgctgaccgaacgggcggaagcggcggggatccgctgctggtgcggctacgggctgaccgaactggcttccacggtgtgcgccaagcgcgccgatgcgcggccgggcgtcggcctgccgctaagcggccgcgaggtaaaactggtggacgaagaggtctggatccgcgccgacagcctggcgctcggctactggcatcatggccagctgcagccgctggcggatgaacagggttggttcgcgacccgcgatcgcggcgcgatggccgagggggaactgcgcattttgggccggctggacaacctgtttttcagcggcggcgaaggggtgcagccggaggatatcgaacgcgtgttggcggcgcacccgcagatctcgcaggcgtttgtggtgccggcggcggacgccgagttcggccagcggccggtggcggtaatcgacggcgatccgtcgctgtcgctggcggcgttgctcgcctggtcgcaggacaagctggccaatttccaacgcccggcggcgctgctcccgctgcctgacgagctgaaaaacggcggcatcaagatttcgcgccgccagttgcagcaatgggtggcgcggcgtctctctcaggcataa

SEQ ID NO: 424865 - DNA, 984 bp, Serratia marcescens
atgaacggggtaaaccgcagcgcggcgctttaccgttacagcctgccgatggaggcgggcgtggtgctgcgcaatcagcggttgaaaacgcgtgacggatgggtggtgcagctgcgtcagggcgagcgtgaaggctggggcgagatcgcgccgctgccggaattcagccgggaaacgctggcgcaggccgaacaggccgcgttggactggctgcaggcctggttggcgggcaacgaaccggatgacagcgcgctgccttcggtggcctttgggctcagctgcgcgcaggccgagctggagcagcgcttgccgacgcaggcggatttccgcaaggcgccgctgtgtaccggcgatccggatgagctgttcgagacattgagcgccttgccgggcgagaaagtcgccaaggtgaaggtggggctgtatgaggcggtgcgcgacggcatgatcgtcaacgtgctgctggaggcgctgccggatctgcggctgcggctggacgccaaccgcagctggacccgcgccaaagccgacggcttcgccaaatacgtcaatccggcgtggcgcgatcgcatcgcctttttggaagagccctgcaagacccgtgatgaatcgcgcgatttcgcccgggcaaccggcatcgccatcgcctgggatgagagcgtgcgcgaggcggactttgtggtgcaggccgagccgggcgtggcggccatcgtggtcaagccgacgctggtcggcagcctggcgcgctgccaggcgctggtggcgcaggcacacgcggcggggctgacggcggtgatcagctccagcatcgagtccagcctgggattaacccaactggcgcgcatcgcccgctggctgacgccggacaccgtgccggggctggatacgctggggctgatgcaggcgcaggtgctgcggccttggccgggcagcgcattgccgctgctggatatttcggcgctggagtgcctatggcgccgttaa

SEQ ID NO: 424866 - DNA, 858 bp, Serratia marcescens
atgctttatccgaatgaagaacagctgtatgccgctatcgcctggcaggattgcaccggcgatttcgaagacattctgtatcacaagtccgccgacggcatcgccaaaatcaccattaaccggccgcaggtgcgcaacgcgtttcgcccgcaaacggttaaagagatgatcgacgcgctggccaacgcccgttacgacgacggcatcggcgtcattattctgaccggcgccggcgataaggccttctgctccggcggcgatcagaaagtgcgcggcgattacggcggctatcgcgacgacagcggcgtgcatcacctcaacgtgctggacttccagcgccagatccgcacctgcccgaaaccggtggtggcgatggtggccggttattcgatcggcggcggccacgtgctgcacatgatgtgcgatctgaccatcgcggcggataacgccatcttcggccagaccggcccgaaagtgggctcgttcgacggcggttggggcgcgtcttacatggcacgcatcgtcggccagaagaaggcgcgcgaaatctggttcctgtgccgccagtacgatgccgctgccgcgttggacatggggctggtcaataccgtggtgccgctggccgatctggaaaaagagacggtgcgctggtgccgcgaaatgctgcagaacagcccgatggcgctgcgctgcctgaaggcggcgctgaacgccgactgcgacggccaggccggtttgcaggagctggcgggcaacgccaccatgctgttctacatgaccgacgaagggcaggaagggcgcaacgcgttcaacgagaagcgtcagccggacttcagcaaattcaagcgtaacccgtaa

SEQ ID NO: 424867 - DNA, 771 bp, Serratia marcescens
atgatgctggcgacgcgaattttgcaacagggcgaggcgggccgcccgtggctggtgtggctgcatggcctgcttggcaacaacaatgaatggcgggtgatcgccgcgcgcagcccggaatggccgtcgctggccatcgatctgcccggccacggcgattccgtggcggtgagctgccgcggcttcgacgacatcagcgcgcagatcgccgccgcgctgcagctgcgcaatatcgaacgctattggctggtgggctactcgctcggcgggcgcatcgccatgtatcacgcctgccacggccaccatgccggcctgcagggggtgatcgtcgagggcggtaatccggggctggaggacgaagaacagcgccgccggcgctgcgaacaggatgcgctgtgggcggcgcgttttcgcagtgagccgatcgccgaggtcctggcggactggtatcagcagccggtgttcaaagagctcagccacgtgcaccgccaggcgctgatcgccgcgcgctcggtcaacagcggcccggcgatcgccgacatgctcgaagccacgtcgctcgggcggcagccctatctggcgccgcagctacgtcaactgaccgtgccgctgcgggtgctgtgcggtgagaacgaccccaaatttcaacggctggcgcgcgacgccgggttgccgttgcgcatcgtgccgcaggccggccacaacgcgcacctggccaatccgcaggatttcgtcgccgagctgcagacctttctcgttaaccctggttaa

SEQ ID NO: 424868 - DNA, 1677 bp, Serratia marcescens
atgtcgacaagtgtttttaatcgccggtgggcggctgtgctgctcgaggcgctggcccgccatggggtgcggcatgtttgtatcgctccgggatcgcgctccacgccgctgacgctggccgccgcggctaaccgatcgtttatctgtcatacccattttgacgagcgcgggctcggccatctggcgcttgggctggcgaaggcggcgcgtgagccggtggcggtgatcgtcacgtccggcaccgcggcggccaacctttatcccgcgttgattgaagccggcctgaccggtgagcggctggtgtttctcaccgccgatcggccgccggagttgatcgactgcggcgccaatcaagctatccgtcaaaacggcctctacagcagccacccgacgctggcgatcgatctgccgcgtcctacgccggatattccggccgcgtggctggcctccagcgtcgacagcgcgatggcgcgcctgcagcacggcgctttgcacatcaactgcccgttcgccgagccgctgtacggcggcgacgaacgtcactttgccgactggtccgccgcgctgggcgactggtggcagagcgatcgcccgtggctgcaggaaagcgagacgcatgcggcgccattgccgcagccggactggttcttctggcggcaaaagcgcggcgtggtgttggccgggcgcatgagcgcgcaagagggcgcgcaggtggccgaatgggccgcaacgctgggctggccgctgatcggcgacgtgctgtcgcagaccgggcaaccgctgccctgcgccgatttgtggctcgctcacccgcaggcgcagcgcgtactgcaagatgcgcagctggtggtgcagttcggcggcagcctgaccggcaaacgcctgctgcagtggcaggcgcagtgtcggccggaagagtattgggtcatcgacgagctgccggggcggctcgatccggctcagcatcgggggcggcgcctgcgcgccggcgtggcgcagtggttggcacagcacccggcgcagccgcgccagccttgggccgccgggctggccgtgctggcggataaagcgctgacggcggcatccacgcatctgcacgataactttggcgaagctcaactggcgcaccgcctgccggagctgctgccggagaacggccagctgtttctcggcaacagcctggtggtgcgactgatcgacgcgttaacgccattgcccgtcgcctacccggtattcagcaaccgcggtgccagcggcatcgacggcctgatctccaccgcagccggcgtgcagcgcgccaccgccagaccgacgttggcggtggtgggcgacctttccgcactgtatgacctcaatgcgctggcgctgctgcgccagagctcggcgccgacggtgctgatcgtcgtcaacaacaacggcggccaaattttctcgctgctgccgacgccggaagaggatcgtcagcgcttttactgcatgccgcagaacgtcgagttcagccacgcggcggcgatgttccagctgggttacgcgcggccggcgaactggggccagctgcaacaggcggttgagcaaagctggcggcgcggcggcgccacgcttgtcgaactgcaggtgccgccgagcgcgggggccgaaagcctgcaatacctggtgcaacagatggcggtgcaatga

SEQ ID NO: 424869 - DNA, 312 bp, Serratia marcescens
atggcaagacatacggatgctgggcaaactacgctggatgacgatctgagaatgctgaccgagacgctggaagaagtgctgcaatataccggcgatcgcgcggatcaggcctacatcgacatcaagtcgcacgccgagcaggcgctgagtgaggttaaggcgcgctgggcgaacaccggcgaatcctactatgcgcgcgccaaagaagcggtgcaccgcaccgacgactacgtgcgggataaaccctggcacagcgtaggcatcggcgccaccgtcgggctggtgctggggctgctgctggcccgcaaataa

SEQ ID NO: 424870 - DNA, 1032 bp, Serratia marcescens
atgaaaattcaaacccagtcctgcgtggtcaatggccaacgcgacgtggcggtgattgcgcaagaagtggattaccgggggcagggaacgctggtgaaaatcagccgcggcggcatctgcggctcggatctgcattactttcaggaaggcagggtcggcaattttcaggtgcgccagccgatggtgctgggtcatgaggtgatcggcgaggtggtcgccagcgattcgccgcagctgccggtcgggcagaaggtggcgctcaatcccagcaaaccctgcgggcagtgcaaatactgcctggcgcagcaaagcaatcaatgcgtcgagatgcgctttttcggcagcgcgatgtattttccgcacgtcgacggcgcttttacccaatacaaggtggtggatagcgcgcagtgcattccttacggcgccgatcgcgacgacagggtgatggtgttcgccgaaccgctggcggtggcgatccacgcggcgaagcagcccggcgacgtggcggggaaaaagattttcgtgtccggcgtcggcccgatcggctgcctgctggtggcggcgctgaaagcgctgggcgccgccgagattgtctgtgccgatctcagcccgcgctgcctggcgatcgccaggcaaatgggggccgatcggtgcctgcatgctgcggacgacgatgttagcggttatcagcaggacaaagggtatttcgacgtcgccttcgaagtggcggggcatccgcagtcgctgcagcgctgcctggagatcacccgcgccaaaggcaccgtggtgcaggtgggcatgggcggcagcttccccgatttcccgctgatgttgttgatcgccaaggagttgaacctgctcggatccttccgcttcgtggcggagtttgcgctggcggtggcgtggctggccgacggcgtggtcgatccgctgccgttactgtcggcggagttcgccagcgggcagctggcgcaggcgctggagtttgccggcgataagcgccaggccgccaaggtgcaattggtgttttag

SEQ ID NO: 424871 - DNA, 765 bp, Serratia marcescens
atgaacaacctgttttcactggataacaaaattgtcttgatcaccggcgcctcgcgcggcatcggttttctgctggcgcgcggcctggcgcagcaaggcgcgcatattctggtcaacgccaccaccgacgaacatgcccgacacgccgccgatcgcctgcgcgaagagggcttgcgcgccgatgcggcggcgttcgacgtcaccgattcccaggcggtgcatgccgccatcgatcgtatcgaagcggatatcggcgcgatagacgtcttgatcaacaacgccggcatccagcgccgccacccgttcaccgagtttccggagcaagactgggacgacatcatcgccgtcaaccagaaggcggttttcatcgtgtcgcaaaccgtggcgcgttatatggtgccgcgccggcgcggcaagatagtcaacatcggctcgatgcaaagcgagctggggcgggacaccatcaccccttatgcggcctccaagggcgcggtgaaaatgctgacgcgcggcatgtgcgtggagctggcgcgctacaacattcaggtcaacggcatcgcccccggctacttcaaaaccgagatgacgcaggcgctggccgacgatccggccttcaccgcctggctgacccaacgcacgcccgccgcgcgctggggcgatccgcaggagctgatcggcgcggcggtgttcctggccgccgacgcctccgccttcgtcaacgggcaactgctgtttgtcgatggcggcatgtcggcggcggtgtaa

SEQ ID NO: 424872 - DNA, 984 bp, Serratia marcescens
atgaaacacccccgcgttacgctacaggacatcgcacaattggccggcgtgaccaaaatgaccgtcagccgcttcctgcgcacgccggaaaaagtggcggccgacaccgccgaacgcattgcgcaggtcatgcgggagctgaacgtcacagataccgataccgcacaggccggcagaaaaccgcgcatcggcgtactgatcccctccttcaacaaccagatcttcgccgacctgctggccggcatcgaatccgttacccaagcgcggggttaccaaacgctggtggtgaactacgattacagcccgcagcgggaagaagagcagatcgcacagctgttgagctacccgatcgccgggctgatcctcaccgactctgcgcataccttgcgcgcagagacctacctcggcgccgccaaaatccccctcgcgcaggtgatggatctcgacgcgccgccggggcggattgcggtggggtttgataatgaacaggcggggtatgacatgaccgaagcactgctcgccagcggcaaacggcatatcgtttactttggcgccatgtcggacgcccgcgacaataaacgctatcgggggtactgccgcgccatggcggctcaggggcaaacgccgcgccagatcacgccgcatcgggtctcttcggtttcgatcggcgcccacatgctggcgatggcgcgcgaacgctacccgcagttggacggtatcctgtgcaccaacgacgatctggcggtgggcgtgttgcaggcctgcctgcgtctcggcgtgcgcgtgccgcaggagattgcgctatcgggttttcacggcctggatattggccaggcgaccacgccgggcatcgccagcgtgatcacgccgcgctttgacatggggaaaaccgccgctgaaatgctgctgctgcggatcgcgggcgaaccctgcgccgagcgccacgatctgcactaccgcctctcactcggcggcaccgtttga

SEQ ID NO: 424873 - DNA, 510 bp, Serratia marcescens
atgaacgttcttttcgccattgccgttactaccgggatcctctccggcgtgtggggctgggttgccgtcagcctggggctgatcggttgggccggttttctcggctgcacggcgtatttcgcctgcccgcagggcgggctgaaagggctgttgatcggcgcgttgacctgctgcagcggtgtcttctgggcaatggcgatcatccacggcagcgaactggcgccgcagtgggagctgctggggtatctgctgaccggcgtcgttgcgttcctgatgtgcattcaggccaaacagcagtggctggggtttgtgcccggcacctttatcggcgcctgtgcgaccttcgccggcggcggagattggccgctggtgacgctttctctgttggtgggcttgctgtttggctatgcgatgaaaaacagcggtctgtggtgggcggcgcgcagcgaaaaagcccgtgccgcacagccggtcagcccgaatgccggctcaaacggtgccgccgagtga

SEQ ID NO: 424874 - DNA, 1236 bp, Serratia marcescens
atgtcagaaaataccgccagccagatcgcggcgccgcaaaatgctcaggcgtcgcgcaggaccattttattgttcctggcgctggctttgatgtcggcattgctgaacagcagtgcgccgacgccgctttatccgctgtatcagcagcagtttgcgctgagttccgtcagcctgaccgtcgtttacggtgcctacgccgccggcgtgctgatcgctttgttcggcgtcggcaatctggccggcaaagtgaaggatttgcgcagcatgatcgtgccggcattgctggtggtgttgagcggtgcgctgctgttcgcgcgggccgatacctttgtcatgatgctcatggcgcgactgttagccggtgtcggcaccggcgccctgaccggtgcggcgaatatcgcgttggtgcgttttgggccacgagacggcggtaaaaacgccgcgctgatcgccacgttgtcctttaccacaggattggcactgggcccgatcttcagcggcatcgctttgcagaccggttttcatcccacgacgctgccgtttgttttcatcatggtcattgccgccgtggcggcgttgggcgtgatattctcgtggccgcgtggcgtggtcgcggcgccgacccatgctgcgccgacggcgacagaaaaaagcacgctgctcgatggcctgcgcgccaccggcggtaaattctttgtgtgtgccggggcgctgtttatctgttgggccctggccgccagcattttggctattggccccagcgtggcggaaacgctgttaggcatgcaccagcggggcgtctttggctatgcgattgcggtgtatctgttgatcgccggtattagccagatcctgagccgccgccttaacgcccgtcattcgctgttgttcggttgcctggcgcaggtgctggcggcggtggtattcgctgcggcgatccaatggcattcactgtggctggcggctgtgggcctggtggtggccggctatgcttacggcgccattttcgtcggcagcgcgaccctggtaaacctgatttcgccgccagccagccatgcgcgtttgctttcactgttttacgttatcgcttatatcgccaactgggtgccgatcttgctggggatcgtggtcgaccgtgtcgatctgcagcaggcaacccatctgctattcctgagcagcaccacggtatgcctgttgttggcatggatgacggtacgtgtagggttcccacgttaa

SEQ ID NO: 424875 - DNA, 876 bp, Serratia marcescens
atgataaattgggacgacgcgcgcttctttttggccgtcgcgcgctgcggcacgctacgcaaagccgccagccagctgcatgtcgatcaggcgaccgtcggtcgacggctgtccgctttcgaggatgcgctcggctccaagctgtttatccgcacgccgaaatccttcgccctcagcccgctgggggagcaaatgctggcggacgtgatgaagatggaaaatgcggtgcaggcgatcaaccgcaaagccgccagcggtgacgaaagcctgtgtggcaacgtgcgcatcgccaccaccgataccctcgccgaagccttcgtgatgccggcgctgcaagatctgcgggaacgctaccccgccatcaccgtcacgctgttgacggcggtcaacatcgccgatatttcttaccacggcgcggatctggcgatccgtggcgcccgccccgatgacgatgagctgatcatcaaacgcttagccaccatcgaaatgggtctgtacgccagcccacactatctggcacggcgcggcatgccgctcaggggcgagcagctgcgcggccacgatctgctgatgttcccgcgcgatctggtgccgcgccactggaacaatttctgcggcgaggccctgcacgagcccaacgtggtgctgcaatgcaattcgcagctactgctgcgttccgccacccgcagcgggctgggcatcggcctgctctccgcgtttttggcggacaaagacccggagctggtgcgcctgttgccggagaacaaagactgggtggatatctggctggtgttgcatcccgatttgcaacgcgccgcccgcgtgcgcgcggtagtgcaggcgctggaaacctcgtttagcgcccattacggctga

SEQ ID NO: 424876 - DNA, 1458 bp, Serratia marcescens
atgacaataactcctcaacaactgatcgcactgctgccgctgttgatcgtcggattgacggtggtggttgtgatgctaggcattgcgtggcgacgcgaccactttatcaacgccaccctgaccgtgatcggtctcaacctggcgctgctttcgctgtactttgtcggccaggcaggcccaatggacgtcaccccgctgctgcgggttgacggttactcgatgttctacaccgggctggtgctgctggcgagcctggcgacctgcaccttcgcctatccgtggctggtcggctatccggataaccgcgaagagttctacctgctggtgctgatcgccgccatgggcggcatcctgctggcgagcgccaaccatctggcttcgctgttcatcggtatcgagctgatctcgctgccgctgttcggcctggtgggctacgcctaccgccagaagcgcccgctggaagccgccatcaagtacatgctgctgtccgccgccgcgtcgtcgttcctgctgttcggcatggcgctgctgtatgccgaatccggcgatctgtcgctggccggcctcggcaagagcctgcaggaaaacatgatgcaccagccgctgatcctggccggtatgggcatgatgatcgtcggtctgggcttcaagctgtcgctggtgccgttccaactgtggacgccggacgtgtatcagggcgcgcctgcgccggtctcgaccttcctggcgaccgccagcaagatcgcgatcttcgcggtcgtgatgcgtctgttcctgtatgccccggccgccgacaacgaagcgctgcgcatggtgctgtcgatcatcgcgttctgctctatcttgttcggtaacctgatggccatcagccagaccaacatcaagcgtctgctgggctactcgtcgatcgctcacctgggctacctgctggtagcgctgattgcggtgcaaacccaccagctgtcgctggaaaccgccggcgtttacctggccggttacctgttcagcagcctgggcgccttcggcgtggtcagcctgatgtccagcccgtaccgcggcccggatgcggattcactgttctcttatcgcggtctgttctggcataagccaatcttgtccgcggtgatgacggtgatgatgctgtcgctggccggtatcccgatgacgctgggctttatcggcaagttcttcgtgatcgcgatgggcgtcagcgcgcatctgtggtggctgaccggcgcggttgtggtaggcagcgccatcggcctgtactactacctgcgcgtgaccgtcagcctgttcctcagcgcgccggaatcgctgcagcgcgataccccgaacaactgggcgttgaccgccggtggcgttgtggtgctgatctccgccgcgctggtgctgctgctgggcgtctatccgcagccgctgatttcgctggtgcagatggcgcagccgacgttctga

SEQ ID NO: 424877 - DNA, 1530 bp, Serratia marcescens
atgctattaccttggctaattcttatcccctttatcggcggtctgctgtgctggcagcttgagcgcttcggtactaaggtgccgcgctggatagcgctgatcgcaatggggctgacgttggcgctctctctgcagctgtggatgcagggcggctataccttgaccacgccgaaaggcattccgcagtggcagagcgaattcctgctgccgtggatcccgcgcttcggcatctccatccacctggcgctggacggcctgtcgctgctgatggtggtgttgaccggtctgctgggcgtgctggcgatcctctgttcctggcgtgaaatccagaagtatcagggcttcttccacctcaacctgctgtggatcctgggcggcgttatcggcgtgttcctcgccatcgacatgttcctgttcttcttcttctgggaaatgatgttggtgccgatgtacttcctgatcgcgctgtggggccacaaggcgtcggacggtaaaacccgcatcaccgcggcgaccaagttcttcatctacacccaggccagcggtctggtgatgctgattgcgatcctgggcctggtgttcgtgcactacaacgccaccggcgtgtggaccttcgattacgaagacctgctgcaaacgccgatgtcccacaacgtgcaatatctgctgatgctgggcttcttcatcgccttcgcggtgaaaatgccggtggtgccgctgcacggctggttgccggacgcgcacagccaggcaccgaccgcaggttccgtcgatctggcgggcatcttgctgaaaaccgcggcctacggcctgctgcgtttcagcctgccgctgttccctgaggcttcgcacgagtttgcgccaatcgccatgtggctgggcgtgatcggcatcttctacggcgcctggatggcgttcgcgcagaccgatatcaagcgtctgatcgcctacacctcggtatcgcacatgggcttcgtgctgatcgccatctacaccggcagccaactggcttaccagggcgcggtgatccagatgatcgcgcacggcctgtccgccgccggtatgtttatcatctgcggccagctgtacgagcgtctgcatacccgcgacatgcgtcagatgggcggcctgtgggggcgtatcaaattcatccctgcgctgtcgctattcttcgccgtggctacgctggggatgccgggtaccggtaacttcgtcggcgaattcatgattctgttcggcagctaccaggtggtgccggtgatcaccgtgatctccaccttcggtctggtgttcgcttcggtttactcgctgatcatgatgcagcgcgcttactacggtgcgcctaaatccgaccagccgctgcagggcatgaccgcgcgcgaactgttcatcattctgctgctggtggtgttgctggttctgctgggggtttacccgcagccgattctggatacttccaacgcggcgatgagcaacgtgcaacactggtttggttcgtcagtttcagcaatttcaacaacaaggccgtaa

SEQ ID NO: 424878 - DNA, 1848 bp, Serratia marcescens
atgaacctattatatttaacaattctgctaccgctgatcgggttcctgctgttggcattttcccgcggtcgttggtctgagaacacggcggctaccgtcggcgtgggctctatcggcctggctgcgctggtcacggtgtatgtggcgatggatttcttcgcccagaaagccgccggcgtgcagctgttcgagcaaagcctgtggacctggatggccgtcggcaacttcaatatcggcgtgaccctggtgctggacggcctgtcgctgaccatgctgtcggtggtcaccggcgtcggcttcttcatccacatgttcgcctcctggtacatgcgcggtgaagagggctattcgcgcttcttcgcttacaccaacctgtttatcgccagcatggtggtcttggtgctggcggacaacctgctgctgatgtatctgggttgggaaggcgtgggcctgtgcagctacctgttgatcggcttctactacaaagatccggccaacggcgcggcggcgatgaaagccttcatcgtgacccgcgtgggcgacgtgttcctggcgttcgcgctgttcatcctctacaacgagctgggcacgctgaacatccgcgagctgatgatcctggcgccgcagaaactggcggtgggcgatacggccatcacctgggcaaccctgatgctgctgggcggcgcggtcggtaaatcggcgcagctgccgttgcaaacttggttggcggacgcgatggcgggcccaaccccggtttccgcactgatccacgcggcgaccatggtgaccgcgggcgtctatctgatcgcccgtacgcacggcctgttcctgatggcgccggaagtgctgcacctggtgggcatcgtcggtgcggtcaccctgctgctggccggcttcgccgcgctggtgcagaccgacatcaagcgcgtgctcgcttactccaccatgagccagatcggttacatgttcctggcgctgggcgtgcaggcatgggacgcggcgatcttccacctgatgacccacgcgttcttcaaggcgctgctgttcctgtcgtccggttcggtgatcctggcttgccaccacgagcaaaacatcttcaagatgggcggcctgcgcaagagcatcccgctggtgtacgtctgcttcctggtgggtggcgcggcgctgtctgcgttgccgctggtcacggccggcttcttcagtaaggacgagatcctggcgggcgcgatggccaacggccacatcaacctgatggtggccggcctggtcggtgcgttcatgacctcgctgtacaccttccgtatgattttcatcgtgttccacggcgaagagaaaatcaaagcgcatgctggtaaaggcatcactcaccacctgccgctgctggttctgctggtgctgtccaccttcgtcggcgcgatgatcgtgccgccgttgcagggcgtgctgccggagacgaccgagctggcgcacggcagcgtgctgacgctggaaatcacctccggcgtggtggctatcgtcggcattctgctggcggccgcgctgtggctgggcaaacgcagcctggtcaacagcatcgccaacagcgcgccggggcgtttcttctcgacctggtggttccatgcctggggcttcgactggctgtatgacaaagtgttcgtcaagccgtacctgggcattgcgaagctgctgcagcgcgatccgctgaactcgctgatgaacctgccggccgtcttctcccgctgggggaaccgcggtctgacggtgagcgagaacggtcaggtgcgttggtatatagcgtctatgggtgtgggtgcagtggtcgtattggctctgttgattttggtttaa

SEQ ID NO: 424879 - DNA, 303 bp, Serratia marcescens
atgatccctcttcaacacggcctgatcctggcggctatcctgtttgtgctcgggctgaccgggctgctggtgcgccgcaacctgctgtttatgctgatcagcctggaagtgatgatcaacgccgcggcgttggcgtttatcgtggcgggaagctactggggccaggcggacgggcaggtgatgtacatcctggcgatcagcctggcggcagccgaggccagtatcggcctggcgctgctgctgcagctctaccgtcgtcgtcataccctgaatattgatactgtcagtgagatgcgcggatga

SEQ ID NO: 424880 - DNA, 558 bp, Serratia marcescens
atggaaattgcattttacctggcaggtttgattgcggtggccgcgacgattcgcgtgatcacccataccaaccctgtgcatgcgctgctgtatctgatcgtctcgttattggcgatctcggcagtcttcttctcgctcggcgcctactttgccgccgcgttggaaatcatcgtctatgcgggcgccatcatggtgctgttcgtgttcgtggtgatgatgctgaacctcggcaacgtgcagcagcaagagcgcgactggatgaagccgacggtgtggatcgggcctggcctgctgtcgctggcgctgctggtggtattgatcgtcgcgatccgcagcgtatccgaccagggtatcagcggcgagatggtcgacgcgaaggcggtgggcatcagcctgttcgggccttacgtattggcggttgagctggcttcaatgctgctgttggcgggtctggttgtcgccttccatatcggccgcgagcacaagcctggcgaggtgctgagcaacgcgccggcgagtggcgaaatggcgagaagaaaatcggaggagcaagcatga

SEQ ID NO: 424881 - DNA, 543 bp, Serratia marcescens
atgacattgaaagagttagtggttggtttcggcacccaggtgcgcagcatttggatgattggcatgcatgccttcgccaagcgcgaaacccagatgtatccggaagaaccggtttacctgccgccgcgctaccgcggccgcatcgtgctgacgcgcgatccggacggcgaagagcgctgcgtcgcctgtaacctgtgtgcggttgcctgcccggtcggctgtatctcgctgcaaaaagcggagcagaaagacggccgttggtatccggagttcttccgcatcaacttctcgcgctgcattttctgtggcctgtgcgaagaggcttgcccgactaccgctatccagctgacgccggatttcgaactgggtgagtacaagcgtcaggatctggtgtacgaaaaagaagatctgttgatctcggggccgggtaaatatccggaatataacttctaccggatggccggtatggcgattgacggcaaagccaaaggcgaagccgaaaacgaagccaaaccgatcgacgtcaaaggtctgttgccctaa

SEQ ID NO: 424882 - DNA, 978 bp, Serratia marcescens
atgagctggtttacccctgaggtgatcgacattctgatcgccattcttaaagcggtcgtgatcctgttggtggtcgtggcgtgcggggcattcatgagctttggcgaacgccgcctgctcggcctgttccagaaccgctacggaccgaaccgcgtaggctggggcggctcgctgcagctggtcgccgacatgatcaaaatgttcttcaaggaagactgggtgccgagattctccgaccgggtgatcttcaccctggcgccgatgatcgcctttacttccctgttgctggcatttgccatcgtgccggtcagcccgacctgggcggtgtccgatctcaacatcggtattctgttcttcctgatgatggccggcctggcggtgtacgccgtgctgttcgccggatggtcgagcaacaacaaatactcgctgttgggcgcgatgcgcgcctccgcgcaaactctgagctacgaagtgttcatcggcctgtcgctgatgggcgtggtgatgcaggcggattcgttcaacatgcaggccatcgttgaatcccaggcgcacgtctggaacgtcattccgcagttcttcggcttcgtgaccttcgcgatcgccggcgtggcggtgtgtcaccgtcacccgtttgaccagccggaagccgagcaggaactggccgacggttaccacatcgaatattccggcatgaagttcggtctgttcttcgtgggggaatacatcggtatcgtcaccgtgtccgccctgattgtgacgttgttcttcggcggctggcagggtccgttcctgccgccattcatctggttcgcgttgaaaacggccttcttcatgatgatgttcatcctgatccgtgccgcgctgccgcgtccgcgttatgaccaggtgatgtccttcggctggaaagtgtgcctgccgctgacgctgctgaacctgctggcaaccgccgcggtcattttgtacaacgctcaataa

SEQ ID NO: 424883 - DNA, 2748 bp, Serratia marcescens
atgctgactatggctacgattcatgtagacggcaaagagtatgaggtagacggagcggacaacctgctgcaggcttgtctctccctcggccttgatattccttacttttgctggcatccggcgctgggaagcgtcggcgcttgccgccaatgtgcggtaaagcaataccaaaacgcggaagatacgcgcggccgtttggtgatgtcctgtatgaccccggcatccgatggcaccttcatctccatcgatgacggcgaagcgaagcagttccgtgaaagcgtggtcgagtggttgatgaccaaccacccgcacgattgcccggtctgtgaagaaggcggtaactgtcacctgcaggatatgacggtaatgaccggccacagcttccgccgctaccgcttcaccaagcgcacccacaacaaccaggagctggggccgtttatctcgcacgagatgaaccgctgcatcgcctgctaccgctgcgtgcgttactacaaagactatgcggacggcaccgacttcggcgtgtacggcgcgcacgacaacgtctacttcggtcgcccggaaagcggcacgctggaaagcgagttctccggcaacctggtggaagtgtgcccgaccggcgtattcaccgacaaaacgcactccgagcgctacaaccgtaaatgggacatgcagttcgcgccgagcatttgccagcagtgcagcatcggctgtaacaccagcccgggcgagcgctatggcgagctgcgccgtatcgaaaaccgttacaacggcagcgtgaaccactacttcctgtgcgaccgcggccgcttcggttacggctacgtcaaccagaaagatcgtccgcgtcaaccgcagcagctgcgcggcgatgactggatcaccctgaacgccgagcaggcgatgcagggcgcggcggacatcctgcgtcaggcgaagaaaaccatcggcatcggctccccgcgcgccagcctggaaagcaacttcgcactgcgcgagctggtcggcgccgagaactactacaccggtatcgctcaggcggagcaatcacgcctggcgctgatgctgaacgtgctgaaaaacggcggtgtccatacgccggcgctgcgtgagatcgaagattacgacgcggtgctggtgctgggcgaagacctgacgcaaaccggcgcgcgcatcgcgctgtccgtgcgccaggccgtcaagggcaaagcccgcgcgatggcggcggcgcaacgcgtggccgactggcagatcgcggcggtgcagaacatcggccagcacgccaagtacccgctgttcaccaccaacgtcgacaacacccgcctggacgacatcgccgcctggaactaccgcgcgccggtagacgagcaggcgcgctttggtttcgccatcgctcacgcgctggacagcgcggcgccggcggtgaacgatctggctgaaggcctgaacaagaaagtcgatatcatcgtgcaggcgctgaccggcgcacgcaaaccgctgattattaccggcagcaacgccggcagcgaagccatcatcgaagcggcggccaacattgccaaagcgttgaagggccgcggttccgacgtcggcatcaccttcgtggcgggcgcagccaacagcatgggcctggcgatgatcggcggcggttcgctcgatcaggcgctggaacagctggcgagcggcgcagccgataccgccatcgtgatggaaaacgatctctatcgtcatgcgccggcggcgcaggtggacgcggcgctggccaaggttaataacctgatcgtcgccgaccaccagcgcaccgcgatcatggacaaagccaacctgatcctctcctcggccagcttcgccgagagcgacggtacgctgatcaaccaggaaggccgcgcgcagcgcttcttccaggtctacgatccggcctactacgacgacgccaagaagaatcagttcaccgtgatgctggaaagctggcgctggatgcactcgctgcactccacctacaccagccgccacgtggactggacccagctcgatgacgtgatcgccgcttgcgtcgccgcgttgccgcagctgcagggcatcgtcgacgccgcgccggacgcgactttccgcattcgcggtcagaagctggcgcgttcgccgcaccgctccagcggccgtaccgccatgcgcgccaacatcagcgtgcacgagccgcgtcagccgcaggataaagacaccatgttcgccttctcgatggaagggaacaacagcccgctggccgatcgtcagcagatcccgttcgcctgggcgccaggctggaactcaccgcaggcatggaacaagttccaggccgaagtgggcggcaaactgcgccacggcgatccgggcgtgcgcctgatcgaagcgggggagggcagcctcggttacttcgaccgcgtgcctgccgcgttcaatccgaacgacggctggcgtgtcgcgccgtactaccacctgttcggcagtgacgaaatgtcgcagcgctctcacgtgatccagcagcgcatgccggaagcctacgtgatggtcaacccggccgacgcggcgacgcttggcgtcaacgcgggcagcctggtggagttcagctgtgcgggccagaccctgcgtctgccggtgcgtctgagtgaaaccctgacccagggccaggttggtttgccgctcggcttgccagggatcccgccgatcttggtgggtgctaaggtagacaatctgcgggaggcggcacgatga

SEQ ID NO: 424884 - DNA, 1347 bp, Serratia marcescens
atgaccaagcacattgtacgcactcccgaaacgcatccgctgacctggcggctgcgtgatgacaagcagccgctgtggctggacgaataccgcagcaaaaacggctatgccggcgcggaaaaggccctcaaaggcctggccccggacgagatcgtcggcctggtgaaagactccgggctgaagggccgcggcggcgcgggcttctccaccggtttgaagtggagcctgatgccgaaggacgaatccatgaacatccgttacctgctgtgtaacgccgatgaaatggagccgggcacctataaagaccgcctgctgatggagcagctgccgcacctgctggtggaaggcatgctgatctccgcgttcgcgctgaaagcctaccgtgggtacatcttcctgcgcggtgagtacatcgaagcggcggcgcatctgcgtcgcgccatcgcggaagccaccgaagccggctatctgggcaagaacattctcggcaccggatttgatttcgagctgatcgtgcacaccggcgccggccgttacatctgcggcgaagaaaccgcgctgatcaactcgctggaaggccgccgcgccaacccgcgctccaagccgccattcccggccagcgccggcgtgtggggcaagccgacctgcgtcaacaacgtcgaaacgctgtgcaacgtaccggccattttggcgaacggcgtggagtggtacaccggcatctccggcagtgaggacaaaggcaccaagctgatgggcttctccggccgggtgaaaaatccgggcgtttgggagctgccgttcggcaccaccgcgcgcgagatcctggaagactacgccggcggcatgcgcgacggtctgcgcttcaaagcctggcagccaggcggcgcggggaccgacttcctgaccgccgatcatctcgatctgccgatggaatacggcgcaatcggcaaagccggcagccgcctcggcaccgcgctggcgatggcggtagaccacgagatcggcatggtgccgctggtgcgtaacctggaagagttcttcgcccgcgagtcctgcggctggtgtacgccatgccgcgacggcctgccgtggagcgtgaagatcctgcgtgcgttggaaaacggcgaagggcagccgggggatatcgaaaccctcgaacagctgtgccgttccctcggcccgggcaaaaccttctgcgcccacgcgccaggtgccgtagagccactgcaaagcgcgattaaatatttccgtgaagagttcgaggcgggcatcgccgtgcagcacttcagcaacgcccatgcgattggcggcattcagccgaacaatctgctgaagcagcgctggtaa

SEQ ID NO: 424885 - DNA, 552 bp, Serratia marcescens
atgcactctcaaaaagacaatcacgcagtcaatgatgcgctcgagcccatcaacgcagccgctcctcagagcggcgttgatgcatttgtactgagtgcggaagaacgtgatgcgatcgagcacgaaaagcatcattacgaggatccgcgcgccgcttccatcgaagcactgaaaattgtgcagaagcagcgcggctgggttccggacggtgcgatttacgccatcgcggaagtgctgggcatccccgccagcgacgtagaaggcgtggccacgttctacagccagattttccgtcagccggtaggacgtcacgtgatccgttattgtgacagcgttgtttgtcacatcaccggttaccagggcattcaggccgctatcgagaagaagctgaacatcaagccgggtcaaaccacctttgatggccgcttcacgctgctgccgacctgctgtctgggcaactgcgataaagggccgaccatgatgattgatgacgacactcacagtcagctgaagcctgaagatatcgagacgctactggagcagtatcaatga

SEQ ID NO: 424886 - DNA, 1797 bp, Serratia marcescens
atgacagatttgacgacgcacgacgccttgcctgcctggcagacccgagatcaccttgacgacccggtgatcggcgaactgcgcaaccgttttgggccggaagcctttactgttcaggccacccgtaccggcatgcccgtggtatgggttaaacctgaccagttgctggaagtaatgacgttcctgagaaaacagccgaagccgtatgtcatgctgttcgatctgcatggcgtggacgaacgtcttcgcacccaccgcgatggcctgcccgctgcggatttctccgttttctaccatctgatttccatcgaacgcaaccgcgacatcatgctgaaggtggcgctgtctgaaaaagacctgcacgtgccgacggcgaccaaggtgttcccgaacgccaactggtacgagcgcgaaacctgggaaatgttcggtatcaccttcgacggccacccgcacctgtcgcgcatcatgatgccgcagacctgggaagggcacccgctgcgcaaggactacccggcgcgcgccaccgaattcgatcctttcgtgctgaccaagcagaaagaagatctggagatggaagcgctgaccttcaagccggaagactggggcatgaagcgcggcaccgagaacgaagatttcatgttcctcaacctcggcccgaaccacccgtccgcgcacggtgcgttccgcatcattctgcagctggacggcgaagagatcgtcgactgcgtgccggatatcggctatcaccaccgcggcgccgagaagatgggcgagcgccaatcctggcacagctacataccgtacaccgaccgtatcgagtacctcggcggctgcgtgaacgaaatgccttacgtgctggcggtcgagaagctggccggcatcaaggtgccggagcgcgtcgacaccatccgcgtgatgctgtccgagctgttccgcatcaacagccacctgctgtacatctccaccttcattcaggacgtcggcgcgatgaccccggtgttcttcgcctttaccgaccgtcagaaaatctacgatctggtggaagcgatcaccggtttccgtatgcacccggcctggttccgcatcggcggcgtcgcgcacgatctgccgcgcggctgggatcgcctgctgcgtgaattcctcgactggatgccgaagcgtctggactcctacgtgaaagcggcgctgaagaacagcatcctgaaaggccgttccatcggcgtagcgtcttacaacgccaaagaagcgctggagtggggcgtgaccggcgccggcctgcgcgccactggcgtcgagttcgacgtgcgtaaatggcgtccgtactccggctacgagaacttcgacttcgaagtgccggtcggcgacggcaccagcgactgctacacccgcgtgatgctgaaggtggaagagctgcgccagagcctgcgcatcctcgaacagtgcctgaacaacatgccggaaggcccgttcaaggccgatcacccgctgaccacgccgccgccgaaagagcgcacgctgcagcacattgaaacgctgatcacccacttcctgcaggtttcctggggcccggtgatgccagccaacgaatcattccagatgattgaagccaccaaagggatcaacagctactacctgaccagcgacggcagcaccatgagctaccgcacccgggtacgtacgccgagctttgcgcacctgcagcagatcccatcggtcatccgtggcagcctggtttccgacctgatcgtctatctgggtagtatcgattttgttatgtcagatgtggaccgctaa

SEQ ID NO: 424887 - DNA, 675 bp, Serratia marcescens
atggactatacgctcacccgcatagacccgaacggtgagaacgaccgttatcccctgcaaaaacaggagatcgtcgccgatcccctggaacaacaggtccaccgcacggtttacatgggtaaactcgaacatgcgctgcatgacatggtgaactgggggcgtaaaaactctatttggccgtataacttcggcctttcgtgctgttacgtggagatggtgacgtcgtttaccgccgttcacgacgtggcgcgtttcggtgcggaagtactgcgcgcctccccgcgtcaggctgacctgatggtggtggccggtacctgtttcaccaagatggccccggtcatccaacgcctgtacgagcagatgctggaacctaaatgggtgatctcgatgggcgcctgcgccaactccggcggcatgtacgacatctattccgtggtgcagggcgtggacaagttcctgccggtcgacgtgtacattcccggctgcccgccgcgtccggaagcctacatgcaagcgctgatgctgctgcaggaatccatcggcaaagaacgtcgcccgctgtcgtgggttgtcggcgatcagggcgtttaccgcgccaatatgcagtctgaaagagagcgtaaacacggcgagcgcatcgcggtgaccaacctccggacgcctgacgagatttaa

SEQ ID NO: 424888 - DNA, 438 bp, Serratia marcescens
atgtcaacaaccactgaagttatcgctcatcactgggcgctcgccgtatttctcgtcgtggctatcgggctctgcggcttaatgctgctgggtgcgttcttcttgggcgggagagcccgggcgcgcgccaaacacaccccgtttgaatcaggcatcgactcggtcggcacggcgcgcatgcgcttgtccgccaagttctacctggtggccatgttcttcgttattttcgacgttgaagccttatacctgtatgcctggtcggtctcggttcgcgagagcggttgggtaggctttatcgaagccgccattttcattttggtgctattggccggtctggtttatctggtgcgcatcggcgcgttggattggactccggcgcgttcccaacgccgcagcaaaccgagcacgatcactaacaccaacagtcatccgcagtaa

SEQ ID NO: 424889 - DNA, 810 bp, Serratia marcescens
atgcagcgattagagcaactggtcggcaaagaactgtttgcccgccatgggcgcaacaaactcctgactgagcatggtattcagcttctcggttatgccaggaagatcctgcgctttaacgacgaagcctgtacctcgctgatgtacaacaatattaaaggtgttctgaccatcggcgcttcagacgacaccgccgataccattctgcctttcctgctgaaccgcgtgaccgccatctatccgaagctgtccattgacgtgcgcgtaaagcgcagcacgacgatggtcgatctgctggaagagggcgagatcgatctggcggtgaccacggccgatccggccgggcacccgcacatcgtgctgcgcacatcgccgacgctgtggtactgcgccgccgattatcactatcaggccggcgaaccgatcccgctggtggtgatggatgagccaagcccgttccgtgcgctggcgatcaagcagctggacgaagccggtatcccgtggcgcatcgcctacgttgcctccacgctgtccgcggtgcgggcagcctgtaaggccggcctgggcgtgaccgcgcggccgatcgagatgatgagccccgacctgcgggtgctgggggcggtggaaggtttgccgccgctgccggatacccagtatgcgctgtgcaaaaacgcgcagtgcagcaatgagctggcgatggccatcttcagcgccatgcagggcggcaatgacagctatggcttcaacggcgcagaggccggtctccagggcgatcaggatgacgccagcctggtggacgaggaagaataa

SEQ ID NO: 424890 - DNA, 1215 bp, Serratia marcescens
atgtcccccattgagaaatccagcaaactggacaacgtctgctatgacattcgcggcccggtgcttaaagaagctaaacgtcttgaagaagaaggcaacaaagtcctgaaactgaacatcggcaaccctgccccgttcggtttcgacgcccctgacgaaatcctggtcgacgtgatccgcaatctgcccacggcgcaaggctattccgactccaagggcctcttctcggcgcgtaaagcgatcatgcagcactatcaggcgcgcaacatgcgtgacgtgaccgttgaggatatctacattggcaacggcgtctcggaactgatcgtccaatccatgcaggcgctgctcaacagcggcgacgaaatgctggtcccggcgccggactacccgctgtggaccgccgcggtatcgctgtccggcggcaaggccgtgcactacctgtgcgatgagcaggccggctggttcccggatctggacgacatcatcagcaagatcaccccgcgcacccgcggcatcgtgatcatcaacccgaacaacccgaccggcgcggtttacagcaaagcgctgctggaacagatcgtcgagatcgcccgtcaacacaacctgatcatcttcgccgacgagatctacgacaagatcctgtatgacgaagccgagcaccattcgatcgccgcgctggcgccggatttgctgaccgtcaccttcaacggcctgtcgaaaacctaccgcgtggcgggcttccgccagggctggatggtgctgaacgggccgaagaagcacgccaaaggctatatcgaagggctggagatgctggcttcgatgcgcctgtgcgccaacgtgccgatgcagcacgccattcagaccgcgctgggcggttatcagagcatcagcgagttcattcagcccggcggccgcctgtatgaacagcgcaaccgcacctgggagctgctcaacgacatcccgggcgtctcttgcgtgaagccgcagggcgcgctgtacatgttcccgcgcatcgacgccaagcgcttcaacatccacgacgaccagaaactggtgctggatctgctgctgcaggaaaaagtgctgctggtgcagggcaccgcgttcaactggccttatccggatcacgtgcgcatcgtcaccctgccgcgcgtagacgagctggaaatggcggtcggcaagctgggccgcttcctggaaggctaccaccagtaa

SEQ ID NO: 424891 - DNA, 600 bp, Serratia marcescens
atgagccagagccatttcttcgcccatctgtcccgcctgaaactgatcaaccgctggccgctgatgcgcaacgtgcgtaccgagaacgtttccgaacacagtctgcaggtggcttttgtcgcccacgcgttggcggtgatcaaaaaccgcaaattcaacggcaacctcaacgccgaccgcgttgcgctgctggcgatgtaccacgacgccagcgaagtgatcactggcgacatgccaacgccgatcaagtactacaatccgcagatcgcccacgaatacaagaagatcgaaaagatcgcccagcaaaaactgctggacatgatccccgcggagctgcgcaacgattttcgcactattctcgatgagcactactacagcgaagatgaaaagcaggtggtaaagcaggcggacgcgctgtgcgcctacctgaaatgcctggaggaactctctgccggcaataacgaattcaccctggccaaggcgcggctggataaaaccctggaacagcgccgcagcccggaaatggactacttcatggacgtgttcatccccagcttcagcctgtcattggacgaaatcagcctcgacagctcgctgtaa

SEQ ID NO: 424892 - DNA, 1833 bp, Serratia marcescens
ttgaacagcgaattactgtgggtgctgagtttactgctgattgccatcgtgctgtttaccaccaacaagctgcgtatggacgtggtggcgctgttggtgatcatcgccttcgtgctgagcggcacgctcagcctgcaggaggcgacggtcggtttcagcgatcccaacgtgattttgatcgccgcgctgttcgtgatcggcgaagggctggtgcgcaccggcgtggcctatcaggtcggcgactggctggtgaaagtggccggcagcagcgaaaccaaaatgttgatgctgctgatggtgacggtcgccgggctgggcgcgttcatgagctcgaccggcgtggtggcgatctttatcccggtggtgctcagcgtgacggcgagaatgaagattgcgccggggcggctgatgatgccgctcagcttcgccgggctcatcagcggcatgatgacgctggtggccacgccgcccaacatggtggtcaacagcgaactggtgcgtgaaggcatccatggtttcggcttcttcagcgtgacgcccatcggtctggcggtgctggcgctgggcgtcggttacatgctgatcgctcggcgttggctgggcagcggtgacacgggcaaagccggcgatgactggcagcgccgaaccttccgcgatttgatccgcgactacaagctgaccggccgcgcgcggcggctggctgtccgcagcgcttcgccgctgatcgggcgttcgctggatgaactgcacctgcgtgcgcgctatggcgccaacgtggtgggcattgagcgctggaaacgcttccggcgggtgatggtcagcgcttccggcagcaccgagctgcgcgagggcgacgttcttttaatcgacatgtcggacagccaggtcgatctgcgcgaattctgcggcgagcagcggctggagccgatggtgctgcgcggcgattacttctcggaacagtcgcgcaacgtcggcatggccgaagtgtcgctgatcccggactcggcgctgctgggcaaaagcctgcgcgaagcggcgttccgcagccgctacgatctgaacgtggtgggcatccgccgccacggcgagacgctgggcggcaagctggtggacgagccgctggagctgggcgacatcttgctggtgatcggcgactggaaggcgatccgtcagctgcaggccaaaacccacgactttatcgtgctcaacctgccggccgaggtggacgaagtggcgccggccatcacgcaggcgccgcacgcgctgttttgcctggcgctgatggtggcgatgatgctgaccgacgaaatccccaaccctatcgcggcgctgatcgcctgtctgctgatgggcaagttccgctgtatcgatatggagagcgcctataaatcgatccattggccgagcatcattttgatcgtcggcatgatgccgttcgcgcaggcgctgcaaaagactggcggggtggatatgatcgtcagcgggctgatggacgtcgccggcggcgcggggccgcgcgtgatgctgctgtgcctgttcgtcttgtgcgccaccatcggcctgtttatttccaacaccgcgacggcggtgctgatggcgccgatcgccatcgccgccgcgcgcgaaatgggcgtttcgccatacccgttcgcgatgattatcgccatcgccgcgtccgccgcctttatgacgccggtttcttcaccggtcaacacgctggtgctggggccgggcaattacaagttcggcgatttcgtgcgtctcggcgtgccgttcaccctgctggtgatggcggtcagcgtgattgtggtgccgtggctctacggcttttaa

SEQ ID NO: 424893 - DNA, 657 bp, Serratia marcescens
gtggagtgtaagggttttctgttcgatcttgatggcaccctggtggattcgctgccggcggtagagcgcgcctggacgcactgggccgaacgccgcggtgtcaacccgcaagcggtgctggacttcattcacggtaaacaggccattacttctctgcgccactttatgccgggcgaaagcgaagcggaaattcagcgcgagttcgagttgctggagcaggtggaagcgcaggataccgacggcgttcgcgcgctgccgggcgcgattgcgctgctggagcgcctgaacgcgctcggcatcccttgggcgatcgtcacctccggttcggtgccggtggccggcgctcgccgccaggccggcggtttgccgcagccggaggtgttcatcaccgccgagcaggttaaacacggcaagccgcagcccgacgcctatctgttgggcgccgagcgcttggggctggcgccgcacgagtgcgtggtggttgaagacgcgccggccggcattctctccggcctggccgcgggctgccaggtgatcgcggtcaacgcgccggcggatacgccgaagctggagcaggtcgacctgcggctggattcgctggcgcagatcgccgtcgataaaacggcgcagggcgcgatcgttcgccggctggcctga

SEQ ID NO: 424894 - DNA, 495 bp, Serratia marcescens
atggaaatgaccaacgcccagcggctgatcctgtcgaaccagtacaagatgatgaccctgctcgatccggacaacggcgaccgttatcgccggttgcaaaccatcgtcgaacgcggcttcggtttgcaaatgcgcgaactggatcgcgacttcggcgaactgagcgaagaggtgtgccgcaccatcatcaacgtgatggagatgcaccatgcgctgcaggtttcctggggcaacctgaaagagaagcaggatctggacgagcgccgcctggcgtttctcggcttcgacgccgccaccgaggcgcgctacctgagctacgtgcgtttcctggtcagcaccgaggggcgctatactcacttcgattccggcagccacggtttcaacgcccagaccaaaatgtgggaaaaataccagcgcatgctggcgatctggctggcctgtccgcgccagtatcacttgagcgccgttgagatagcgcaaatcatcaatgcttga

SEQ ID NO: 424895 - DNA, 456 bp, Serratia marcescens
atgacgagcaaaccgtccggttccgtaagctggtttcaggtcttccagcgcgggcagcattatatgaaaacctggccgtcggacaaacgtctggcaccggtctttccggagaaccgcgttgcgcgtgccacccgtttcgctatccgtttcatgccgccgttggcgattttcacgctgacctggcagatcgcgctcggcggccagctcggcccggcgattgccaccgcgctgttcgcctgcagcctgccgatgcaggggctgtggtggctggggcgccgttcggtcacgccgctgccgccgacgctgctgcaatggttccatgaggtgcgcaacaagctgacggaagccgggcaggcggtggcgccgctcgaaggcacgccgacctatcagacgttggccgatctgctcaagcgcgctttcaagcagctggacaaaactttcctcgacgatctgtaa

SEQ ID NO: 424896 - DNA, 1203 bp, Serratia marcescens
atgtcgagtaagctagtactggttcttaactgcggcagttcttctctgaaattcgccatcatcgatgccgttaacggcgacgaattcctctccggtttggccgagtgtttccacctgcctgaagctcgcatcaagtggaaaatggacggcgccaaacacgaagctgccctgggggccggcgctgcacacagcgaagcgctgaacttcatcgtgaatactattctggcacaaaaaccagagctttccgcgcagctgaccgccatcggccaccgcatcgtgcacggcggcgagaagttcaccgcttccgccgtgatcaacgacgaagttctgcagggtatcaaagattccgtgccgtttgcaccactgcacaacccggctcacctgatcggcatcgcggaagcgctgaaatccttccctaacctggccgacaagaacgttgccgtgttcgataccgcgttccaccagaccatgccggaagaatcttacctgtacgccctgccgtacagcctgtaccgcgaccacggcgttcgccgctacggcgcgcacggcaccagccacttctacgtgactcaggaagccgcgaagatgctgaacaagccggtggaagaagtgaacgtgatcacttgccacctgggcaacggcggttccgtcaccgcagtgcgcaacggccagtgcgttgacacctccatgggcctgaccccgctggaaggcctggtgatgggcacccgcagcggtgacatcgatccggctatcatcttccacctgcacgattctctgggcatgagcgttgaccagatcaacaagatgctgaccaaagaatccggcctgctgggcctgaccgaagtcaccagcgactgccgttacgttgaagacaactacgacagcaaagccgacgccaaacgcgccatggacgtgttctgccaccgtctggccaaatacgtcggcgcatacagcgcgctgatggaaggccgtctggacgcggtgatcttcaccggcggcatcggcgagaacgccggcatggtgcgtgagctgaccctgaacaaactgggcctgctgggcttcgaaatcgaccacgaccgcaacatggccgctcgcttcggcaaatccggcgccatcaccaaagacggcagccgcctggcgctggtgatcccgaccaacgaagagttggtcatcgcgcaggacgcatcccgcctgaccgcgtaa

SEQ ID NO: 424897 - DNA, 2157 bp, Serratia marcescens
gtgtcacgtactattatgttgatccccaccggcaccagcgtcggcctgaccagcgtcagcctgggtgtcatccgctccatggagcaaaaaggcgttcgtttgagcgtgttcaagcctatcgctcaaccgcgcaccggcgacaacgcgctcgaccagaccaccaccatcatccgcagcaactccaccatcccggcggccgaaccgctgcgcatggactacgttgagggcctgctgagctccaaccagcaagacgtgctgatggaagagatcgtggcgcgttaccacgagaacaccaaagacgcggaagtggtgctgatcgaaggcctggtaccgacccgcaagcatcagttcgccaacgcgctgaactacgagatcgccaaaaccctgaacgccgagatcgtcttcgtgctggcgctgggcaacgactccccggcgcagctgaaagagcgcatcgaactggcgcgcaccagcttcggcggcagcaagaacaaaaacatcaccggtgtgatcatcaacaagctgaacgcaccggtcgacgatcagggccgcacccgtcctgacctgtccgaaatcttcgacgactccaccaaagccagcatcgcccacgtcgatcctgcgcagctgttcgccaacagcccgctgccggttctgggctgcgtgccgtggagcttcgatctgatcgccacccgcgccatcgacatggctcgccacctgaaggcccgcgtggtcaacgaaggcgacatcatgactcgccgcgtgaagtccgtgaccttctgtgcgcgcagcatcccgcacatgctggaacacttccgcccgggctctctgctggtgacctccgcggaccgtcctgacgtgctggtctccgcctgcctggcggcgatgaacggcgtagaaatcggcgccatcctgctgaccggcggctacgccatcgacgagccgatcaagaagctgtgcgaacgcgccttccagaccggcctgccggtgttcatggtcgacaccaacacctggcagacctcgctgagcctgcagagcttcaacctcgaagtgccggcggacgaccaccagcgcatcgagaaagtgcagaactacgtggccagccacatcaacaccgagtggatcgactcgctgaccgccacctccgagcgttcacgccgcctgtctccaccggcgttccgttacgagctgaccgagctggcgcgtaaagccggcaaacgcatcgtgctgccggaaggcgacgagccgcgcaccgtgaaagcggcggccatctgcgccgaacgcggcatcgcggaatgcgtgctgctcggcaacccggacgagatccagcgcgtcgcggcagcgcaaggcgttgagctgggcaaaggcatcgaaatcgtcgatccggtcgccgtgcgtgaaaactacgtgccgcgcctggttgagctgcgcaagagcaaaggcatgaccgaagtggtcgcgcgcgaacagttggaagacaacgtggtgctcggcaccctgatgctggaacaaggcgaagtcgacggtctggtctccggcgcggttcacaccaccgccaacaccatccgtccgccgttgcagctgatcaaaaccgcgccgggcagctcgctggtgtcctccgtgttcttcatgctgttgcctgaccaggtgctggtctacggcgactgcgcgatcaacccggatccgaccgccgagcagttgtctgaaatcgccatccagtctgcggattccgccgcggccttcggcatcgaaccgcgcgtggcgatgatttcctactccaccggcaactccggtgcgggcagcgacgtcgagaaagtgcgcgaagcgacccgtctggcgcaggaaaaacgcccggatctgatcatcgacggcccgctgcagtacgacgccgccatcatggccgacgtggccaagtccaaggcgccgaactcaccggtagccggccaggcgaccgtgttcatcttcccggatctgaacaccggcaacaccacctacaaagcggtacagcgttccgctgacctggtctccatcgggccgatgctgcaaggcatgcgcaagccggtgaacgacctgtcgcgcggcgcactggttgacgatatcgtctacaccgttgcgctgacggcgatccagtcttcccaggctgacgctgccgccaaggcgtaa

SEQ ID NO: 424898 - DNA, 447 bp, Serratia marcescens
atgcaaatcggcatggttactagatgggctcatcggctgctgacggcaattttgttggttattgtcgtcggattagcgggatactggtataccacccgcgatacttatgacgataagctctatagcaaaaagcagttgaccgacgatatttggctctacatcaccgagtaccagaatgcgggggccaccgacacggatgtgtatcgttactatttgaaccgaagcctggatggggatcctatcaaagtgctggggcaaagcgcgccaatcttgacggcggatcgggctgatgcaactatccgcggcgagggtaaccgcgtcaccatcaatttttccgggaaggtgtattcttttacgaattcggcatttttctatgccacgaacagccaaacacccatcatgcccaccattgatttttctgcacggggcgtcagcgcctggcgatga

SEQ ID NO: 424899 - DNA, 630 bp, Serratia marcescens
atgctacccattgtaaagtcccctaggggactttttctttttttattgataataactggccaatgcaggaataaaaatttattatttgtaaataagtcaataaaaacaattggttatattcattttgtgaataatatacatcaccctctcttattcatacatggagtgaataagggagggggtaatttttccattaaccctatgattgaattgcattcggctctcaaggaggagattatggccgtggttccattactgccgccaggcggttttactgttcttgccagaaatttgcgcgaggcgcgcaggcaggggcaacctcgcaacatggcgctgccaggtacttattattggttctaccagcaggtaaaaaatcggggcccttgggattacaaacagcaaaatcgcgcattggctaactttggtaatttcaattatggggcaaccggtactgcggctggaattcccgcagaaattttgttgatgggcgccggatttgctcagtcacgggcaggaacatctcggtcagaatggagtcattggtatcaacgcccgccgtatggtgatgaccctcaggatcaatattggatcaagcaaggaattgattatgcaaatcggcatggttactag

SEQ ID NO: 424900 - DNA, 954 bp, Serratia marcescens
atgtttaacgtagtgacgcagttggaaaacgacgccgtcgaaatgcgcaaagtctacgccggcgcggtgcgtcggcagattgaggcgggcgcgccgatcatcgcgctggaggcagatctgatgagctcgatggcgatggacggcgtacacaaggatcacccgcagcacgtgatcaactgcggcatcatggaggccaatgtgatcggcgtcgccgccgggctgtcgctcaccggccgggtgccgttcgtgcatacctttaccgccttcgccagccgccgctgtttcgatcagctgttcatgtcgctggattatcagcgcaacaacgtcaaggtgatcgcctccgacgccggggtgagcgcctgccacaacggcggcacccacatgtcgttcgaggacatgggcatcgtgcgcgggctggcgcattcggtggtgctggaggtgaccgacgccaccatgttcgccgacattctgcgccagctgatggatctgcgcggcttctactgggtgcgcaccattcgcaagcaggcgacgcgcatctatcaggagggctcgcgctttaccatcggcaagggcaacctgctgcgcgacggcgacgacattacgctgatcgccaacggcatcatggtggcggaggcgctgaaggcggcgcagaggctggcgcggcagggcgtcagcgcggcggtgatcgatatgttcaccctcaagcctatcgaccgtgaactgatcaaaacctacgcggccaagaccgggcgcatcgtcacctgtgaaaaccacagcattcataacgggctgggatcggcggtggcggaggtgctggcggaagagtgcccgacgccgatgcggcgcgtgggggtgaaggagcgttacggccaggtgggcacccaagcgttcttgcaacaggagtatggcctgaccgccgagcatattctggaggccgccgggcagctattgtaa

SEQ ID NO: 424901 - DNA, 852 bp, Serratia marcescens
atgaactacacaacgagcgaaacggaaattgaagagctgcatgccctggcgcggacgatccgcctggaaacgctgaaagcgctgaccgggctgggcttcggccactacggcggttgcatgtcggtggtggagacgctggcggtgctatatggcagcgtgatgcgcatcgatccggcggatccggactggccggagcgcgatgacttcgtgctgtcgaaagggcacgccggcccggcgctgtacagcacgctggcgatcaagggctacttcccgctggcggagctgaagaccctcaaccaaaacggcacgcgtctgccgagccatccggaccggctgcgcacgcgcggcgtggacgccaccaccggttcgctggggcagggcgtgtcgatcgccgccggcatggcgttgtcccatcggctggcggggcgccgcaatcgggtgttcagcatcctcggtgacggggaactgaacgaagggcagtgctgggaggcgttccagtttatcgcccaccacaatctgaacaacctgacgctgttcatcgattacaacaagcaacagctggacggcgcgctggacgaggtgatccaaccgtttgatctggccgccaagttccgcgccttcggctttgaggtgcagaccatcaagggcgacgatatcgcggcgctgttggcggcggcggcgccggcgcgcggcggcgaacagcggccgctggcgatcgtgctcgacagcatcaaagggcagggcgttgcctatctggaaaacctgtcgaactctcaccacctgcgcctgacgccggacgtgcagcaggaaatcgaaaaagccatcgccgaactggaggccgcccatgtttaa

SEQ ID NO: 424902 - DNA, 1380 bp, Serratia marcescens
atgtttatccaggaaacgcttaagtttgtggtggatatattaaaggtgccttcggtgctggtcgggcttattgcgctgatcggtttgctggcgcaaaagaaatcgttttccgacgtggtgaaaggcacggtaaaaaccattctcggctttatcgttttaggcggcggcgccacggtattggtcgggtcgctcaatccgctgggcggcatgttcgaacacgcgttcaatattcagggcatcattccgaataacgaagccattgtctccatcgcgctggagaaatacggcgcctccaccgcgctgatcatggcgttcggcatggtggcgaatatcgtggtggcacgcttcacccggctgaaatacatcttcctgaccggccaccacaccttctacatggcctgcatgatcggcatcatcctgacggtggcgggcttcgagggcgtgcaactggtgtttaccggcgcgctgaccctggggctggtgatggcgttcttcccggcgatcgcccagcgctatatgcgccgcatcaccggcaacgacgatatcgccttcggccacttcggcaccctgggctacgtgctgtccggctggatcggctcgaaggtgggtaaaaactcgcgctcgaccgaagagatgaacctgccgaaaaacctcagcttcctgcgcgacagctccatttcgatctcgatgaccatgatcgtcatctacctgatcctggcgatctccgccgggcgggcctatgtggaaagcgagctcagcggcggccagaactacctggtgtattcgatcattcaggccatcaccttcgccgccggggtgttcatcattctgcagggcgtgcgcctgattctggcggaaatcgtgccggcgttcaccggcttctcggaaaagttggtgcctaatgcgcggccggcgctggattgcccggtggtttatccctatgcccccaacgcggtgctgatcggcttcctgttcagcttccttggcggattggccgggctgttcctgctggggcagctgaagatggtgctgatcctgcccggcgtggtgccgcacttcttcaccggcgctaccgccggggtgttcggcaacgccaccggcgggcggcgcggcgcgatgctgggcgccttcgccaacgggctgctgatcaccttcctgccggtattgctgctgccggtgctgggggcgttgggctttgccaacaccaccttctccgacgccgattttggcgcgatcggcatcctgctgggcaatatggcgcgctttatgtcgaaagagatgatcatgctggcgatcgtcgccgtgttcgcgctgctggtggcgcataacttcctgggaaaacgcaaaggcgcgccggccgctgaccgcgtcgagaaataa

SEQ ID NO: 424903 - DNA, 282 bp, Serratia marcescens
atgaaaatcatggcgatttgcggttccggtctcggcagcagttttatggtggaaatgaacattaaaaaggtgctgaaaaagatgggcgtggaggccgaggtcgaacactccgatctgtcctccgccacccccggcgccgccgacgtgttcgtgatggcgaaagacatcgccgacagcgccagcgtaccggccgagcagctggtggtgatcagcaacatcatcgacattaatgagctggaagccaagctgcgcgcttacttcgaagcccactcaatcatctga

SEQ ID NO: 424904 - DNA, 444 bp, Serratia marcescens
gtgctgaaagagtggctgaccgccgatcatatacagctgtgcgaacgggtggaggactggcgccaggcggtaacgctgagtgcgcagccgctgctgcaagacggcgtgatcacgccgaattacctgacggccatctttcatcagcaggaaaagctcgggccttactttgtcctggcgccgggcatcgccatgccgcacgcccggcccgaagagggcgccaacgcgttgggattatcgctgttgaagatccatcagggggtgaactttcattccgcggataacgatccggttcaggtggtggtgatgctttcggcgcccgacggcgacagccacatagaattgatttcgcaactggcggaattattttcagacaatcaggccatggaggcgttatttcacgccaaagataaacgacaaatcgaggatattatcgcccgctattaa

SEQ ID NO: 424905 - DNA, 1020 bp, Serratia marcescens
atgtcgatcggtaaaaaacgacgcagcacgggcagggtgacgttggctgacgtagcgcagctggcgggcgtcggcaccatgacggtgtcgcgcgcgctgcgcacgccggagcaggtatcagacaaactgcgcgagaagattgaagccgcggtgagcgaactggggtatctgcccaacctggccgccagttcgctggcatcggcctcgtcctacaccatcgccatggtggtgcccagcctgtccgaatccggctgcgccgagatgttcgccggcctgcagaaagtgctgcagccggccggctatcacatcatgctggcggaatcgcagcaccatctggagcgcgaagagaagctgctggagaccctgctctcttacaacctggcggcggcggtactgctcagcgtcgagcattcgcaaaacgcccgcaacgcgctgatcgccgccaacattccggtggtggagatcggcgccgtgcgcgccgatccgatcgacatgagcatcggcatcgactacgtggcggccatgtatcaactgacgcaaacggtgatcgccagtggctaccagaacatcgggctgctgtgcgccaaccaggaacagtggattttccagcagcacctgcagggctggcacaaggcgctgctgcgcaaccatatgtcgccgcatcgggtgatcaacgccgcgcagcccgccagcttcagcaccggcgcgcagcagctgccggaattcttgctggcctggccggagctggacgcgctggtgtgcgcctcggacgaactggccggcggcgcgctgtatgaatgccagcggcggcgcatcaaggtgccggacaatctggcggtggtgggcttcggcaacagcgaattcagccgggtatgccagccgccgctgaccaccatgaccattccgcatcgcgacatcggcattcaggccggccaggcgctgctggcgcggctaaacgagcagccctggcagccggcaggctccctgcccgccacgctgtgccgccgcgacagctgctga

SEQ ID NO: 424906 - DNA, 546 bp, Serratia marcescens
atggcggaacagggtcaggctgcagataccgaatgggttgatatcgtcgacgagcaaaacgaggtgattgcgcaatccagtcgtcaacagatgcgggcggagcggctgcgtcatcgtgctacctatattgtggtgcatgatggaatgggaaaaattctggtgcagcgtcgcaccgagatcaaagacttctacccgggctggctggacgcgacggcgggcggcgtggtgcaaagcggtgaaaacgtgctggactcggcgcgccgcgaggcggaagaagagctgggcatcgccggcgtgcctttcgccgaacacggtctgttctacttcgaagaagagcagtgtcgggtgtggggcgcgctgttcagctgcgtatcgcacggcccgttcgcgctgcaggaagaagaagtggccgaggtgtgctggctgacgccggaagagatcaccgcgcgctgcgacgagtttactccggattcgctgaaggcgctgtcgctgtggctgacgcgcaacaacgaacaggattacggcaagccgctcgacaaccactga

SEQ ID NO: 424907 - DNA, 552 bp, Serratia marcescens
atgaagctgatgttcgcctcggatattcacggatcgctgccggctaccgaacgcgtgctggaattgttcgcacaaaacggcgccgactggttgattcttctgggtgatttgctgaatcacggcccgcgcaacgcgctgccggccgggtatcaacctgctcaggttgccgaacgattgaatcgctatagcgacaagatcatcgccgttcgcggcaattgcgacagcgaggtcgaccagatgctgctgacgtttcccatcgaggcgccctggcaacaggttttactgcaaaaaagacgattgtttttgacccacggtcacctttatcatccctcggcactgccgccgttatcccgcggtgacgtcctggcctacggccatacgcatctgccgcaggcggagcggcagggtgagatctattgcttcaatccgggctcggtcagcatccccaaagggggctttccggccagctacggcatgttggatcggggcactttgcgcgtgctgacgctcgacggcggcaaggtcgtcgcggaggtggcgttaacacgctaa

SEQ ID NO: 424908 - DNA, 630 bp, Serratia marcescens
atgattgacctgtattacgcgcctactcccaatggtcacaagatcaccttgtttttggaagaggtcggcttaccctaccgtatccatcgcgtaaacatcagcgccggcgagcagttcaaaccggactttctgagcatttctcccaacaacaaaatcccggcgatcgtcgatcagcaaccggtggacggcggcgagccgatcagcctgttcgaatccggtgaaatcctgctgtatctggcggagaagaccggcaaactgctgagcaagggcctgcgcgaacgtgccgccaccctgcagtggctgttctggcaggtggccgggttcgggccgatgctcgggcagaatcaccacttcaaccactacgcgccgcagccggtgccctacgccatcgagcgttatcatctggagaccaagcggctgtatggcgtgctggaagccgaactgcaaaagcacccgtacctgggcggcgacaactacagcatcgccgatatcgccacctacccgtgggtggtgtcgcatccgcgccagcgcatcgatctggcggattacccggcggtgcgcaactggttcgaacgcatcagcaaccgcccggcgaccgagcgcgcctacaaactggccgaacaaagctaa

SEQ ID NO: 424909 - DNA, 372 bp, Serratia marcescens
atgtctttcagtcaacccgacgccgttatccgcattaaaaatctgcggctgcgcacgttcatcggtatcaaggaagaggaaatcaacaaccgacaggacatcctgatcaacgtggtgatccactacccggcggacaaggcgcgcaacagcgaagacatcgccgatgcgctcaactaccgcaccatcaccaaagcgatcatccgccatgtggaagataaccgtttcgcgttgctggaaaaattaacgcaggatgtgctcgatatcgtaaaagaacacgcctgggtgacctatgctgaagtggagatagataaacttctggctctgcgctacgccgattctgtctccatgaccatgagctatcgcagggactaa

SEQ ID NO: 424910 - DNA, 915 bp, Serratia marcescens
atgcggatcctgatcaccggcgcaacgggtttgatcggcagcagcctgacggccaggctgctggcgctttctcaccatattacggtactaacgcgagacgaacggcgggctcgggcccggctcggcgaccagccgagctattggcgcacgctggacgaccggcagtcgctggatgacttcgatgcggtgatcaatctggccggcgaacctatcgccgacaagcgctggagcgcacagcagaagcagcggttgtgtcatagccgctgggatctgaccgaacgcttggcgcagctgatcaaggccggcagcacgccgcccggcgtgctgatttccggttccgccgtcggctactacggcgatcaggggcaggcggtggtcaccgaagaggagccgccgcacgacgaattcacccaccagctgtgccaacgctgggaagcgctggcgctgcaggcgcagagcgacgccacccgcgtctgcctgctgcgcaccggcgtggtgctggcgccgcagggcggcgcgctggccaaaatgctgccgccgttccgcttcgggctgggcggcccgatcggcgacggccgccaatacctgccgtggatccatctcgacgacatggtcaacggcattatttatctgctggatcacgccacgctcaccggtccgttcaacatggtcgctccctacccggtgcataacgagcagttcgccgcccaattggccaacgtgctcgatcgcccggcgtttctgcgggtgccggcgttcgtcatgcgtttgttgatgggggaagcggcggtgctggtgctcggcggccagcgggcggtgccgaagcggctggaggaggccggcttccacttccgctatctggagctggagcaggcgctggatgacgtgattaatcagcgggccgaagcccgctga

SEQ ID NO: 424911 - DNA, 774 bp, Serratia marcescens
atgtctgagaataaattagccgtcacggaactgcacaaacgctatggcgaccacgaagtgctgaagggcgtctcgctggcggccaacgccggggatgtgatcagcatcatcggctcctccggctccggcaaaagcacctttctgcgctgcatcaacttcctcgagaagccgagcgaaggctcgatcagcctgaacaacgaagacatccgcatggtgcgcgacaaggacggccagctgaaggtgttcgacaagaagcagctgcagctgctgcgcactcgcctgaccatggtgttccagcatttcaacctgtggagccacatgacggtgctggagaacgtgatggaggcgccggtgcaggtgctggggctgagcaaggccgacgcgcacgagcgcgcggtgcgctatctggataaggtgggcatcgatgagcgggcgcgcggcaaatacccggtgcacctgtcgggcggccagcagcagcgcgtctctatcgcccgcgcgttggcgatggagccggaagtgctgctgttcgacgaaccgacgtcggcgctggatcccgagctggtgggcgaggtgctgcgcatcatgcagaagctggcggaggaggggaaaaccatggtggtggtgacgcacgaaatggagtttgcgcgccacgtttccaaccacgtgatcttcctgcataaagggttgattgaagaacaggggccgccggccgagctgttcggcaaccccaaaagcccgcgcctgcagcagttcctgtccggcgcgttgaagtaa

SEQ ID NO: 424912 - DNA, 705 bp, Serratia marcescens
atgatcgagattttgcaacagtattggcagtcgctgctgtggagcgacggctaccgtttcaccggcgtggcggtaacgctgtggctgctgatcgcttcggtggtgatgggcgggctgctggcgatcccgatggcggtggcgcgcgtctcttccatccgctgggtgcgtttcccggtgtggctctatacctacgtgtttcgcggcacgccgctgtacgtgcagctgctggtgttctactccggcatgtacagcctcgagatcgtgcgcggcagcgagtttctcaatgcgtttttccgcagcgggctcaactgcaccatcctggcgctgacgctcaacacctgcgcctataccaccgagatcttcgccggggccatccgctcggtgccgcacggtgaaatcgaggccgccaacgcctacggtttctcgcgcttcaagatgtatcgctgcatcattttgccttcggcgctgcgcaccgcgctgccggcctacagcaacgaagtgatcctgatgctgcactccaccgcgctggcgtttaccgccaccgtgccggatctgctgaagattgcgcgcgacatcaacgccgcgacctatcagccgttttacgctttcggcatcgcggcggtgctgtacctgatcatctcctacgtgttaatcagcctgttccgcaaggctgaaaaacgctggatggcacacgttagtcactga

SEQ ID NO: 424913 - DNA, 687 bp, Serratia marcescens
atgctgcaaggctattcccaactgattttcgagggggctctggtgacgctggagttggccctcagttccgtattgttggcggtggtgatcgggttgatcggcgccggcggcaaactctcccacaacccccttatttccggcctgttcggcgcttacaccacgctgatccgcggcgtgcccgatctggtgctgatgctgctgatcttttacggtctgcaaatcgcgctgaacaatatcactacgctgctgggcttctcgcagatcgatatcgatccgctcggcgccggcatcattaccctcggctttatctacggcgcttattttaccgagaccttccgcggcgcctatctggcggtgccgaaagggcagatcgaagcggcgacggcctacggcttcagcggcgcacagatcttccggcgcattctgttcccggcgatgatgcgtttcgccttgccgggcatcggcaacaactggcaggtgatcctgaaggcgacggcgctggtgtcgatcctcggcctgaacgacgtggtgaaagccacgcagctggcggggaaaggcacctatcagccgttcttcttcgccatcgtggccggcgtggtgtacctgatcttcacgaccgtttccaacggcgtgctgctgtggcttgaacggcgttactcactgggcgtcaagagggccgagctatga

SEQ ID NO: 424914 - DNA, 783 bp, Serratia marcescens
atgaaaaagctggttaaggttcttcctttagtcttggctttggcggccgcaaacagcgcattcgccgctatcccatcgacattgaagatcggcaccgatccgacttatgcgccgtttgaatccaaaaacgccaaaggcgagctggtcggcttcgatatcgatttggccaaagagctgtgcaaacgcataaatacccaatgcaccttcgtggagagcgactttgacgcgctgatcccatccctcaaggcgaagaaaatcgacgccatcatctcttcgctgtccatcactgaaaaacgccagcaggaaatcgcctttaccgacaagctgtatgccgccaacgcgcgtctgatcgcgccgaagggctccaagctgttgcctaccgtggacgccctgaaaggcaagagcgtgggcgtgctgcagggcaccacccaggaagcctacgccaacgccatgtggcagccgaagggcgtcaccgtggtgccttaccagaaccaggatctggtctacgccgatctggcgtccgggcgcatcgacgccgccttccaggatgaagtggcgggcagcgacggcttcctgaaacagccgccgggcaaagactacgcgttcgccggcgaatcggtgaaggatgacaaattcttcggcgtcggcaccggcatggggctgcgcaaagccgataccgagctgaaagcggcgctggacaaagccttcgccgaaatgcgcaaagatggcacctacgataaatacgcgaaaaagtacttcgactttgacgtctacggcgggtaa

SEQ ID NO: 424915 - DNA, 573 bp, Serratia marcescens
atgaaacgactcatcatcggcatttccggcgccagcggcgccatctacggcgtgcgcctgttacaggttttgcgcgacgtcgcagaggtggaaacccatctggtgatgagcaacgcggcaagacagacgctggcgctggaaacgccgtacagcctgcgggaagtgcaggcgctggccgacgtggtgcacgatgcgcgcgacatcgccgccggcatttcctccggctccttcaaaaccctgggcatggcgattttaccttgctcagtcaaaacgctgtccggcatcgtcaacagctacagcgacgggctgctgacccgcgccgccgacgtggtgctcaaagagcgccgccgtttggtgctgtgcgtgcgggaaacgccgctgcatttgggtcacctgcggttgatgacccaggcggcggagatgggggcggtgatcatgccgccggtgccggcgttttatcaccagccgaaaagcgtggaagacatcatcgatcagaccgtcaatcgggtgatcgatcagtttgatatcgaactgcctgccgatctgttcacccgttggcagggcgttagttaa

SEQ ID NO: 424916 - DNA, 1518 bp, Serratia marcescens
atgtgcggtattgtcggtatcgccggtttcatgccggtaaaccagtcgatttatgatgcgctgacggtgcttcagcaccgtggccaggatgccgcaggcatcgtcaccattgacgcccacaacgggttccgtttgcgtaaagccaacggcctggtgaaggatgtgtttgaggcgcgccatatgcaacgcttgcagggcaacatgggcattggccatgtgcgttacccgacggccggcagctcgagcgcctctgaggcccagcctttctacgtcaactcgccgttcggcattacgctggcccacaatggcaacttgaccaacgcccatgagctgcgccaaaagctgttcgaaagcggccgccgccatgtcaacaccacctccgactcggaaatcctgctgaacgtgctggccagcgagctggaccgtttcccgcactacccgctggaggccgacaacatctttaccgcggtcgccgccatgcatcagcaactgcgcggcgcttacgcctgcgtggcgatgatcatcggccacggtctgctggcgttccgcgatccgaacggcattcgcccactggtgatcggcaagcgcacgctggaggatggccgcagcgagtacatggtggcttccgaaagcgtggcgctggataccctgggctttgagttcctgcgcgacgtggcgccgggcgaagcggtgtatatcaccaccaagggccagctgttcacccgccagtgcgcagagaacccgaaaaccaacccgtgcctgttcgaatacgtttatttcgcgcgcccggactcctttatggacaagatctcggtctacagcgcccgcgtgcgcatgggccagaagctgggcgagaagattgcccgtgagtgggaagatctggatatcgacgtggtgatcccgattccggaaacctcctgcgacatcgcgctggagatcgcgcgcattctcgagaagccctaccgccagggctttgtgaagaaccgctacgtcggccgcaccttcatcatgccgggccagcaggcgcgtcgtcagtcggtgcgccgcaagctgaacgccaatcgcgccgagttccgcgacaagaacgtgctgctggtggatgactccatcgtgcgcggcacgacctcggaacagatcgtcgagatggcgcgcgaagcgggcgccaagcgggtgtacctggcttccgccgcgccggaagtgcgtttcccgaacgtttacggcatcgacatgccgagcgccaacgaactgatcgcccacgggcgcgaagtggatgaaatccgccagattatcggcgccgacgggctgatcttccaggatctggacgatctgatcgaagcggtgcgcgaagagaacccggacatcacccagttcgaatgctcggtgttcaacggcatctacgtgaccaaagacgtcgatcaaagctatctggaatacctggagtcgctgcgcagcgacgacgccaaggcgctgcgggtgcaaaccgaagcggaaaatctggaactgcataacgaaggctaa

SEQ ID NO: 424917 - DNA, 501 bp, Serratia marcescens
atggtctggattgattacgtcattatagcggtaattggattttcggctctggtgagcctgatccgagggtttgttcgcgaagcattgtcacttgtgacatggggatgtgcgttttttgttgccagccatttctactcttaccttgcggtctatttcactcgttttgaagatgaactggtgcgaaacggcatcgcgatcgcgattttgttcatcgcgaccttgatcgtaggggctattgttaactatgtgattagctcactggtagagaaaaccgggttgtcgggcaccgatcgggtgctgggcatctgcttcggcgcgctgcgcggagtattgatcgtcgcggcgatcctgttcttcctggatacctttaccggcttttcacagagtgccgactggaaacagtcgcagctcattccccagttcagttacgtcatcaggtggttctttgactacctgcagagcacgtcgagtttcttgccgacccaattgccggggcggtag

SEQ ID NO: 424918 - DNA, 699 bp, Serratia marcescens
gtggcgagtaaatttcagaaccgactggtcggaaccgtgattctggtggcgctgggggtgatcatcctgccagggctgctggacggcaaaaagaagcattacgaggatgaatttgcggccattccgttggtgccgaaaccgggcgatgtcgaagagaacgacgtgctgccgccggtgacgcaaccgctgccggcgcagccgccggaaggggcgggcgcgctggtcgagcagcaggcggccaatgaagcggcggcgcaacaggcggtgcggcagagcgctcagcagccgacgcaggtggcgccgccgccggtcgagacgcgtcctcagccggtgccgcagcccaagccgaaaccggtggaaaccaaaccggtggaagtgaagccggtgccgaagccggagccgacgccgaaacctgagccagcgccgcagccgaaaccggcggaagaaaaagcgccggcagggcaagcctatgtcgtgcagctcggggcgctgaagaacgccgccaaggcgaacgagattgtcgcctcgctgcgcctctcgggctaccgcgccttcaccgtgccgtcaacgccggtgcaggggcagataacccgcatctacgtcggcccggacgcctccaggcagaagctgcaggcggcgctgccgtcgctgaactcgatcagcgggttgagcgggcaggtgaagccgtacggccgttaa

SEQ ID NO: 424919 - DNA, 1266 bp, Serratia marcescens
atgcaaaaccaccaaattccccaagccacgtcgccattgagctcgtggctttattatctggaacgtctgcacagccaggcgatcgaactcggccttgagcgcgtacagcgcgtcgcggcgcatctggatttactgacccccgcccccacggtgttcaccgttgccggcaccaacggcaaaggcaccacctgtcgcaccctcgaagccattctgctggccgccggcctgcgcgtcggcgtctacagttcgccgcatctggtgcgctataccgaacgcgtgcgcattcagggggaagagctgagcgaagcggagcacagccgctcgttcgccgccattgaggccggccgcggcgaaacgtcgctgacctatttcgaattcggcaccctgtcggcgctgcagctgttcaaacaggcgcggctcgacgtggtgatcctggaagtgggcctgggcgggcgtctcgacgccaccaacatcgtcgatccgagcgtggcggtgattaccagcatcgcgctcgatcacaccgactggctgggcaacgatcgcgaaagcatcggtcgcgagaaggccggcattttccgcagcggcaagccggcggtggtgggcgaacccgacatgccggacagcattcgtcaggttgccgaaacgctgggcgcgccgctgtatcgccgcggcgaagcctggagcttcagcgagcagggcgatcgctggcagtggcagggcggcgacacgctgctgaccgatctgccgacgccgaatgtgccgctggccaacgccgctaccgcgctggcggcgctgaactgctccccgctggaaatcgacgaacgcgcgatcttcaccgggctgcagcaggcgacgctgccggggcgtttccagatcgtgcggcgggagccgacgctgatcctcgacgtggcgcacaacccgcacgccgccggctatctggccgggcgtctggccaaactgccgcgcgaaggcggcaaggtgcgcgcggtggtgggcatgctgtcggacaaggatatcgccggcacgctggcctgcctgagcgagcaggtggatgaatggtactgcgcgccgctcgaagggccgcgcggcgccagcgtcgaacagctggcgcaacatctgaaggaaccgcgccgctttaatgatgtcgaaactgcctggcggcaggctatgcaggatgctgataaacaggatattgtgatcgtctgtggatcgttccacaccgtggcgcaggtgatggcggcgttagacgagatgcggggagtgtga

SEQ ID NO: 424920 - DNA, 909 bp, Serratia marcescens
atgagctggattgaacgaattcttaacaagagcaatatcacacaaacccgtaaggcgagcattcctgaaggggtctggaccaaatgcgacagctgcggccaggtcctctaccgcgccgagctggagcgtaatctggaagtgtgtccgaagtgcgaccaccacatgcgtatgggcgcgcgcgcgcgtctgcataccctgctggacgaaggcagcgaagtggagctgggcagcgatctggagccgaaggacgttctgaaattcaaggattccaagcgctataaagatcgtctggttgccgcacagaaagcgaccggcgagaaagacgcgctggtggtgatgaagggcacgctgtacggcatgccgatcgtcgctgcgtccttcgagttcgccttcatcggcggctcgatgtcttccgtggtcggcgcgcgtttcgtgcgtgcggttgagcaggcgctggaggacaactgtccgctggtgtgcttctccgccagcggcggcgcgcgcatgcaggaagcgctgatgtcgctgatgcagatggcgaagaccagcgcggcgttggccaagatgcaggagcgcggcttgccgtacatctccgtgctgaccgacccgaccatgggcggcgtttccgccagcctggcgatgctgggcgacatcaacatcgccgagccgaaagcgctgatcggctttgccggcccgcgcgtcatcgagcagaccgtgcgcgagaaactgccaccgggcttccagcgcagcgagttcctgatcgaaaaaggcgcgatcgacatgatcgttcgccgtccggaaatgcgccaaacgttggcgagcattctgtccaagctgaccaaccagccgcagccgcatttcgatgaggccgcgccggtcattgagccggagccgcaggccgacgcctga

SEQ ID NO: 424921 - DNA, 663 bp, Serratia marcescens
atggacatcatcaagtttattattgatttcattctgcatattgatgtgcacctggccgaactggtcgcacaatacggcatgtgggtctacgctattctgttcctgatcctgttttgcgaaaccggtctggtggtgacgccgttcctgccgggggattctttgctgtttgtcgccggcgcgctggcggcgttgccgaccaacgatctgaacgtgcacaccatggtggcgttgatggtggtggcggcgatcctcggcgatgcggtgaactacactatcgggcggttgttcggcgagaagctgttcagcaacccgaattcgaaaattttccgccgcagctacctggacaagacgcaccagttttatgagaagcacggtggaaaaacgattattctggcgcgatttgtgccgatcgtgcgtacttttgcgccgttcgtcgccggtatggggcatatgtcctatcgccacttcgccgcctacaacgtgattggcgcactggtttgggtgctgctcttcacttatgctggctacctgttcggcgatctgccggtggtgcaggagaacctgaaactgttgatcgtcgggatcatcatcgtttcgattctgccgggcgtgattgaaatttggcgccacaagcgcgcggccgcccgccagcaaaaacagtaa

SEQ ID NO: 424922 - DNA, 822 bp, Serratia marcescens
atgtctgaggtggtctcgcccgctcagccgacgctgaagatcgcgctgggcatcgaatatgacggcagccggtactacggctggcagcggcagcaagaagtggccagcgtgcagcaacgcctggagcaggcgttgagcaaggtggcggatgcgccgattagcgtgctgtgcgccgggcgcaccgacgccggagtgcacgccaccgggcaggtggtgcatttcgaaaccaccgcgcgccgcaaggacgccgcctggacgatgggggtgaacacccatctgccgccggacatcgcggtgcgctgggtgagccccgtcgccgacgattttcacgcgcgcttcagcgccaccgcgcgccgctaccgctatattattttcaaccatcgctaccggccggcggtgctgcaacagggagtgacgcatttttatcacccgctggacgccgatcgcatgcatcgggcggcgcaggcgctgctgggcgaaaacgacttcacttcgtttcgcgcggtgcagtgccagtcgcgcaccccgtggcgctgcgtaaaacacgttaaggttacgcgctacggcgaatatattgtggtagatatcaaggcgaatgcctttgtgcatcacatggttcgcaacatcgtcggcagcctgatggagatcggctgcggcaatcaggatgagaactggatggccgagctgctggcgctgaaggatcgcaatctggcggcggcgacggcgcgagccgaggggctgtatctggttgccgtggattatcccgaccactttggtctaccgcggccgccgatggggccgttgtttttgcccgacgattaa

SEQ ID NO: 424923 - DNA, 1011 bp, Serratia marcescens
atgtctgacggctggaatatcgcgctgctcggcgccactggcgcggtaggtgaagcgttgctggaattgttgcaggatcgccagttcccggtgggtgagctctatcctctggcaagcgaacgcagcgcgggcgccaatgtgcgcttcaacggcaagtctcttttggtgcaaaacgccgaagagttcgactggtcgcaggcgcagctggccttcttcgtcgccggcagcgacgcttccgcgcgctatgccgaagaagccggcaacatgggctgcctggtgatcgacaccagcggcctgttcgccatggagccggatgtgccgctggtggtgccgggcgtcaacccgcaggtgctggcggattaccgcaaccgcaatattgtggcggtggccgacagcatggtcagccagctgctgacggcgatcaagccgctgaccgaacaggcggggctgtcgcgtttgcacgtcaccacgctgatgtcggtatcgtcgcgcggcaaggcggcggtggacgacttggccggccagagcgcacgcctgctgaacggcatcccggcggaggaaggcgttttcggcaagcagctggcgttcaacctgttgccgctgattgccgacgagcagggcagcgtgcgcgaagaacgcctgatcgtcgatcaggtgcgcaaggtgctgcaggatgaagggctgccgatttcggtgagctgtgttcagtcgccggtgttttacggccacgcgcaggtggtgcacctggaagcgctgcgcccgctgtccgccgaagaggcgcgcagcgagctggaagaggtcgaggacattcagctgagcgaagaggacgattacccgactcaggtcaccgacgcctccggcagcgatgcgctcagcatcggttgtctgcgtaacgattacggcatccccgagctgctgcagttctggacggtggcggacaacgtgcgcttcggcggcgcgttgatggctgtcgaaaccgccgagcgtctggtgcaggagcagatgtactga

SEQ ID NO: 424924 - DNA, 1179 bp, Serratia marcescens
atgattcagtggcacactatttcgcagacaaatagccgtaaaccgtcggagaacgcagtgaaaattctggttgatgaaaatatgccgtacgcggccgagctgttcagccgcctgggcgacgtgcaggcggtgccgggccgcccgatcccgcgcgaggcgctggcggatgccgatgcgctgatggtgcgttcggtcaccaaggtcaatgaagccttgctggccggcagccgcatcggctttgtcggcaccgccaccgccggcaccgatcacgtcgatgacgcctggctgcaacggcagggcatcggtttttccgccgcgccgggctgcaacgccattgcggtggtcgagtatgtgttctctgccttgatgctgctggccgaacgcgatggcttccacctgcgggataaaaccgtcggcatcgtcggcgtgggcaacgtcggttcccgcctggacgcgcgtctcaaagcgctgggcgtgcgcacgctgctgtgcgatccgccgcgcgccgatcgcggcgacgccggggaattctggccgctggagaagctggtggccgaggccgacgtgctgaccttccatacgccgctgaataaatccggccgataccattcgctgcatctggcggacgccgatctgttggcggcgctgccggacaaccgcattctgatcaacgcctgccgcgggccggtggtggataacgccgcgctgctgcaggcgctggaaaaaggcaaaaagctgagcacggtgctggacgtgtgggaaccggagccggatctctccttgccgctgctggcgcgggtggatatcggcactgcgcacatcgccgggtatacgctggaaggcaaggcgcgcggcaccacccaggtgttcgaggcgttcagccgccatttggggcagccgcagcaggtggcgttggcctcgctgctgccggtgccggagttcagccagatccgactcaacgggccgctggatgaagcgcggttaaaacgattgatgcacttggtgtatgatgtgcgccgcgatgatgcgccgctgcgcaaagtcgccgggcaaccgggcgaattcgatcgcctgcgcaagcactaccaggagcgccgcgagtggtcttcgctggccgtgcaatgcgatgacagcgccagcgccgagctgctcggcaagctgggcttcagcgtggcatag

SEQ ID NO: 424925 - DNA, 774 bp, Serratia marcescens
atgccagaaatccgccacttccccgagtcgctgatcccggcacccaacccggtgcagttccgctgcgaggagttcaatgcgcgcaccgaattccagccgcacagccacacttggggccagttgatgtgggttaaagccggggtgatggtgctgcgcatcggcgggcagcgctttctggcgccgccggagttcgtgctgtgggcgccggcgggcatcgaacactcctgttacaaccaacggctggcgcagtgccgcatggtggacatcacgccggcgctgtgcgccggcatgcccgccgatccctgcctggtgagcgtgacgccaatcttccgcgccatcgccgaggatttctatgcgcgcaaacagtacattccgcaggcggaggaggatttgcgcctgtgccaggtgctgatcgaccagctgcgtctgtcgccgcgccagcaaacctatctgccgtcgtcggacgacaagtttttggcgccggtgctggaagcgttggaacattgcccggcggacaacacctcgctggcggcgtgggcggctcgggtctacaccaccgagcgtacgctgtcgcgccgctgccagcaggatctgggcatgtcgttcagcgaatggcgccagcgtctgcgtttcttgcacgccgtgtcgctgctcgagcagggcaagacggtgcaggacgtggcgctggacgtcggctacagctccgcgtcggcctttatcgtcatgttccagcagatcgccggcaccacccctgagcgctttcgccgtgcatga

SEQ ID NO: 424926 - DNA, 921 bp, Serratia marcescens
atgaatatgctcttcccgctgttggccgtgctgatttggtcgattaacgccgtcgtcagcaaactctccgccaccgccatcgatccggcggccatttcgctctaccgctggctgctggcgctgattgccctgacgccgtgcgtgctgccgggcgtgctgcgcaactgggcgcaggtgcgcgccaactggtggaagctgatgatcctcggcctgctgggcatggtgctgtatcaaagcctggcctattacgcggcgcacagcgtcagcgcgctgtttatgggcatcatcgtgtcgctgatcccgctgctgaccatcctgatcagcatcgtgctgctgcgcattgcaccgaccgtcggcgtactgctcggcagcatactctccttcggcggtttgatctggctggtcagcggcggccagcccggcgtgctgctgcagcacggtatcggcaagggggaattgatgatgctgctcgccaccgcctcttacgcgctgtatggcgtgttgaccaaacgctgggccatcgcgctgccgaactggcaatcgctgtacgtgcagatcctgttcggcgtgctgctgctgctgcctaatttcctgatggcgcaggatgtcggcttgaacggccataacctgccgctggtgctgttcgccggcattccggcttcgatcatcgccccgttcctgtggatccagggcgtgatgcgcctgggcgccaacaccgcctcgatcttcatgaacctggcgccggtgtttaccgccgctatcgccgtgctgttcctgcatgagcagctgcacggttaccacctgatcggcggcggcatcaccctgctgggcgttatcctgtcgcagcggctgcgcacgccgctgacgcgtaaagccaaagccccggcggccaacgtcgagtcctgcaaagaacaggcttaa

SEQ ID NO: 424927 - DNA, 1419 bp, Serratia marcescens
atgcggtggtttaacgcgccgcgttcgctgttctatcaactgctgctgttttttggcctgccgttgctggcgttgggcggcatctctatctacacccactatttcagcgccatgagcgccgccaccctggcttacgatcgcacgctgctggcgtcggcgcgcaccgtggcggagcgactggtggtgcgcgaaggcaagctggcggtcgatgtgccctatgtggtgctcgacagcttcgagcgcaacatgaacgatcagctgtattacgaggtgatttcgccgcaggggaaaagcatttcgggctatgacgatttgccgtcgctgccgccccatatcccgcgttccacgctctacccggcgctggtgcatttttacgatgcggaatacctcggccggccgatccgcgtggcggcgctgtttcaaccggtcaacgagtcgggggtgagcggcatggcgaccattttggtggcggaaaccctggagtcgcgccgttacctggcgcggcagatgatgatcgcggcgctgttgagccagggcacggtggtggtgttgaccctgatcctggcgttcgcgctgctcaagcgggtgttgaaaccgatgcgtaaactctccggcatcatgctgcggcgcgatccgggcgagctgacgcccttgccgcgggtgttgccgtggtcggagatgcagccgctgctggtggcgttcaatcgttacatcgaacggctgcggctgatggtggcgcgtcaggaacgtttcagcgccgacgcctcccaccagctgcgcacgccgctggcggtgttgaagactcaggtcggggtggcgctggccagcgatcggccgcagcagtggcgtgaaagcctgcaggcgatgagcgcgacgctggataataccgtggcgctgaccgatcgcctgctgcacctctcacgcctgaaggccagcgagcaccaggccgagcgccagctgcagccggtcaatctggcgcaggtgctgcgcgacgcctgcttttcccgcttgccgcaggcgcgcagcaaacagatcgatctgggtttcgaaggcgaggcggcgtgtcaggtggcgggggagccgctgctgttggccgaactgtgcgccaatctgctggacaatgcgctgaaatacacgccgcgtcaggggatagtgaccgcccgcctcactcaggataaggcggcgggggaaggcgtgctggagattgaagacagcggccccggcatcgccttgcaggataaggcgctggcgctgcagccgtttcaccggctggacaacgtgggcgatcagccgggcgccggcctggggctggcgctggtgaaggacatcaccgcctatcacggcacccgcccggagttgctgagctccgccgcgctgggcggcctgttggtgcgggtgcgcttcaggctgctgccttaa

SEQ ID NO: 424928 - DNA, 675 bp, Serratia marcescens
atgcgactgttattggttgaagatcaccccgagctgtctcactggttgcaaaaggcgctgaccggcgccggctttgccgttgacgtcgccccggacggcgtggcggcggatcacctgctgctcaacgaacgctatgcgctcgcggtgctggatgtggcgctgccgcgtatgaacggcctggatttgttggcgcgcctgcgcaagcgcgggcaggatctgccggtgctgctgctgacggcacgcaccgacgtggccgaccgggtgaaaggcctgaatctgggggcggacgattacctcaccaagccgttcgaactggacgagctggaagcgcgcatccgggcgctgctgcgccgcagcgtcggcgccccgcagccggcgttgcagtacggcgcgttgacctatcacgacgaaggctattttctgctggagggcaagccgctggcgctgacgccgcgcgaactggcggtgctgaccgcgctgatgcaccggcgcggccgtccggtggccaagcaacagctgttcgaacaggtgttcacgctgtccgacgaagccaacccggagagcatcgagctttacgtacaccgcctgcggaaaaagctgcagggcagcgacgtggcgatcgtcacgctgcgcggcctgggctacagcctggagctgtgcaatgcggtggtttaa

SEQ ID NO: 424929 - DNA, 330 bp, Serratia marcescens
atgttttcgttagggaaattgtttggtggcagggacagcgccaaagtaggtgcgattaaacggttgcctgaggtttacgctgaaatgacgggaaaagccgggcagtgccgtttaaagcgactgcgtgccgacgttggcgtttttgagctgcatttcgtcaacgccgacggtgaaaaatatgcttgccagatgaccgcctgcgtgaccggcatcgatctggtgtttgccgtcaacaaccgctccgtgctggtttcttcaccgtttaccgccgacaaactgcgcccggtgctggacattgccgttgccgatagccccattccgctgatctga

SEQ ID NO: 424930 - DNA, 981 bp, Serratia marcescens
atgaaaaaaataatgacccgtacctttaccgccgccgccctgctgctggcagccaatcaggcctttgccgtggaagcgcccaaacgcaccgaatgcatcgcgccggccaagcccggcggcggcttcgatctgacctgcaagctgattcaggtgtcgctgcaggacaccaaggccatcgataaaccgatgcgcgtcacctatatgcccggcggcgtcggcgcggtggcctacaacgccatcgtcgcgcagcgcccggcggagttcggcaccgtggtggccttctccggcggttcgctgctcaatctggcccagggcaagttcggccgctacaacgtggacgacgtgaaatggctggcggcggtcggtaccgactacggcatgatcgcggtgcgcgccgactcgccttacaaaaccctgaaagacctgatggatgccttccaaaaagatcccaacagcgtggtattcggcgccggcgcctccatcggcagccaggactggatgaaaaccgcgctgctggcgcgcgaagtcggcgtggatccgcgcaagatgcgctacgtggcgttcgaaggcggcggcgagccggtcaccgcgctgctcggcaaccatatccaggcggtctccggtgacctgagcgagatggtgccttacctgcagggcgacaagatccgcgtcctagcggtgtatgccgagcaacgtttgccgggccaactggccgacattccgaccgccaaagaacagggatacagcctggtgtggccgattattcgcggcttctacgtcgggccgaaagtcagcgatgaagagtatcagtggtggatcgacaccttccagaaaatgatggcgaccgacgaattcaagcagcagcgcgatctgcgcggcctgttcgaattcaacatgaccggcaaagagctggacgcctacgtgaagaatcaggttgcccaataccgtgagcaggcgaaagtgttcggcctggccaaataa

SEQ ID NO: 424931 - DNA, 432 bp, Serratia marcescens
atgagcgatcgtatttttgccggcttttggctgctgctgtgtatcggcgggctgttcatcggctggggcatccaaagcgaatacagctatgaaccgctggggccgcgcccgttcccgctggcgatcctcagcctgatggcgctgtgctcggccctgctgttgctgcgccgcccgcaggcggtggagtggccgcacaacaaggtgctgcagcggctgctggtgctggtgatcaccctggtgctgtatgcctggggctttgaatggctgggcttcccgctggcgaccgcgctgctgacgttcagcatcggcctgctgtttcaggccagcctgccggcggcggcgatctccggcgtcatcatgggcgcagtgctgtattacgcctttgaccgccttcttgatgtcacactgccgctcggcgcctggctgagctaa

SEQ ID NO: 424932 - DNA, 1518 bp, Serratia marcescens
atggatacctggatgtatttgacccaagggttcgaagtggcgctggtgccgcagaacctgattatcgccctgatcggctgcttcgtcggcaccatcgtcggcctgctgccgggcctcgggccgatcaacggcgtggcgatcctgctgccgctggcgtttgccctcaagctgccggccgaatcggcgctgatcctgctggcgacggtgtatatcggctgcgaatacggcgggcgcatctcgtcgattctgctcaacgtgccgggcgacgcggcggcgatcatgaccgcgctggacggctacccgatggcgcagcaggggcgcgccggcgtggcgctgtccatctcggcggtcagctcgttcgttggctcgatgatcgccatcggcggcatcatcctgttcgcgccgctgctggcccgctggtcgctggccttcggccctgcggagtatttcgccctgatggtgttcgccatcgcctgcctcggcagcatgatgagccagaacccgctgaaatcgctgctggcggcgctgatcggcctggggctggcgacggtgggcgtcgacgccaataccggcgtttaccgctttaccttcgacagcgtgcacctctctgacggcgtgcagtttatcgtggtggtgatcggcctgttctcggtcagcgaaatcctgctgatgctggaaagcaccagcgccggacaaaagctggtgcgtaaaaccggccggttgctgttcaaccgcaaagaggcggcgcagtgcgcaggccctaccctgcgctcgtcggtgatcggcttcttcgtcggcattctgccgggcgccggcgccactatcgccagcgcgctgacctacatgaccgagaagaaaatcagcggcaacagcgacaccttcggcaagggcgacatccgcggcgtagcggcgccggaagcggccaacaacgcctctgcctgcggttcgttcattccgatgctgacgctgggggtgccgggttccggcaccacggcggtgatgatgggcgcgctgacgctgtacaacatcacccccggcccggcgatgttcaccgaacagccggatatcgtctgggggctgatcgccgcgctgctgatcgccaacgtcatcctgctgatcatgaacctgccgctggtcggcctgttcacccgcatgctgaccatcccgctgtggttcctggtgccggcgatcgccgcggtttcggcggtgggggtttatgcggtgcacagcaccaccttcgacctgctgctgatggtcgggttgggcgtgttcggctacatcctgcggaaaatgcacttcccgatgtcgccgctgattctgggcttcgtgctgggtgagatgctggagcagaatctgcgtcgcgcgctgtcgatcagcaacggcgagttcggcatcctgtggagcagcagcatcgcgcaaacgctgctggtgctggcggtcgcggtactggcgctgccgccgctgctgcgcctgatgcgcaaacgccgccaatcggcgatcgaggccaaggccgagtaa

SEQ ID NO: 424933 - DNA, 630 bp, Serratia marcescens
atgtccgaaaaacactggtccaacaccgagctgctgcatcagacggtgaccaacccgaatattatcgtcaaaggcacccacagctactacagcgactgctgggataacggcttcgaacgctcggtagtgcgctatctgcacggcgacgcggtcagccggcaatggcagccgctgggcgacatagaccgcctgctgatcggcgattacgtgtgcatcgcggccgaagcggtgatcctgatgggcggcaaccatacccatcgcatcgactggctgagcctgtatccgtttatggcaaccatcaagcaggcgtaccgccccaaaggcgatacccggctgggcgacggttgctggatcggcatgcgggcgatgctgatgccgggaatctcgataggtgagggggcgatcgtcgccgccggcagcgtggtggccggcgatgttgagccttatgccatcgtcggcggtaatccggcgaggtttatccgttggcggttcgcgccggaagtcatcgcgcggttgcttgccttgcgcctctatgacttgtcggaggcggactttacggtgattcagcccctgctcgccgatgacgatatcgatgcgttggaaaggggaattgcggccttgcgccgttaa

SEQ ID NO: 424934 - DNA, 996 bp, Serratia marcescens
atgtcattaccgtcaggcgtttccgcccggccggcgctgcccggcgcgcgtctttttcagggcagcagccagggttacgtcatcgccattatcagcgccatgctgctggcctttaccgccatcatcatccgcgcgctgaccgagtactatcacctgccgaccttcgtgctggcgttctggcgcgcggcgctggtggcgctggtgctgttgccgctgctgttgctggtgaaaccgcagtgggcgcgcctgcgccgtaaacaggtggctttctacgcgctttacgggctgttgctggcgctgttcaacagcctgtggacgctgtcggtggcgctgaacggcgcatcggtggcgaccattctgacctactgttcggtcggttttaccgtgttcctcggctgggtgatgtacagcgaacgcctgacgctgcgccaattgctggtgatcgccatcagcctgggcggctgcttcctggtcagcaacggcgacagtatggggaacagccacttcgatctgctggggctgctggtggggatgctgtcgggcatcggctataccctgtataccctcggcgggcgggtggccagcgaacgcggctatccggtgtggaacaccatcctgtacgtgttcggtttttcggcgctgtaccaattggtgttcaacgcggcgctgacggcgttcccgctggcggcgttccacggcatggccggctctctgtggttcctgtcgcacggcgcgcagggcattcaatggagcggctggctgttgctgctggcgctggccgccgggccgacgctgctgggcttcgggctgtacaatatcagcctgaaaacgctgccgctggcggtggccaacctgatcctgtcgctggagctggtgttcaccgcggtgatcgcctatttcctgctgggggagagcatgaatcagctgcagctgctgggcagcgcgctggtgatgggcggggtgctgctgttgaaaagcaagaccgccgaggcgtga

SEQ ID NO: 424935 - DNA, 1467 bp, Serratia marcescens
atgcatatcccgttggatcgcgagcaggacgttccgctctatttacagatcgaagaagcgctgcggcgcgccattctcaccggcgtgtttgtcgatggcgacaaactgccctcgacgcgcacgctggcggccgaactggcggtcagccgtttaacggtggataacgcctacgccgaactggcggccaagggctttttgcatcagcggcgcggcagcggcgcctatgtcgcgcatccgcagatgcaggcacgcccggcccggccgagcagcgatgcccctttcccgctggaaagcttcaccaccctcacctcgcggctggacggctacgccgacgccccgctgccggaggggctgatcaacttcgccgccggcgtcggcagccctaaggtgtttccgctggaggcgtttcgcaaagtgctgctgtcggtgctcagccgccacgcggaagaggccttcagctacggcgaatactgcggctactacccgctgcgcgatacgctgagccgcattctcagcgcgcagggcatccccacgcaggcggaacaggtgctgatcaccaacggctcgcagcacgccatcagcctggtggtgcaaagcctgctggcgccgggcgatacggcgatcgtcgaagagccgacctacgccgaagcgctgggcctgctgcgccagcaccgcgtcaatatcgtcaccgtaccgggcgaccgacacggcatgcgggtggatttgctgccggaattgttagaacgccaccgtcccaaactgatctacaccatccccaatttccacaacccgaccggccgctgcctgagcgaggcgcgtcggcgacgcctgctggcgatcgctcaacaggccggcgtggtgatcctggaagacgacttcgtcggcgatctgcgttatcagggcaaacagctgccgtcgctgcgcgcgctggcgcagccgggcgcggtgatctacgtcagcaccttctccaaaatgctgctgcccagcatgcgcatcggctatctggtggcggacagcgaacactatcagcgcttcgcaaggctgaagcacgtcgacagcttcaccagttccagcctgatccagcgggcgctggacgctttcgtcaccgtcggccgttacgacaagcagctgcggcgcgccgggcgcgtctaccgccgccatctggaggtgatgattgacgccttgcaacggcggctgccgtcgggatgccgctttgaaacgccgcagggaggcttgtttatctggctgacgctgccggcgtcggtgaccaccgccgagctgatgccggtcgcctggcgatacggcgtgaccttcgcgcgcggcgaatgcttttatgcgcaggaacatttgggcgcgcacggcctgcggctgaatttcgccgccaactcgccgccgcagattgaagaaggtatcgcccggctatgccgggcgattgaggaggtgataacggagaaaaacgccggttag

SEQ ID NO: 424936 - DNA, 501 bp, Serratia marcescens
atggctaagctcaagcgctgggggcgcgagttgctgctgttggcgctgatcgcgctggcggtggtgacggtgatggattggctgaacgcgccgcaggcgccgccggccttcgatgcccagaccctgaccacgctggatggcgagagtgtgtcgttggcgcagctcagccatgagcggccgctgctggtttacttctgggccagctggtgcggcgtctgccgtttcaccacgccggacgtcgcccgtttgcaggcggcgggcggcaacgtgctgaccgtcgcgctgcgctcgggcgacgatgcccaggtgaaacaatggctggcgcgcaaacggctggcgctgccggtggtcaacgatccggccggtacgctctcggcgcagtggcagattggcgtgacgccgaccttcgtggtggtctcgcagggcaaggtggtgcagagcaccaccggctggaccagctactgggggatgaagctgcggctgtggtgggccgccgtctaa

SEQ ID NO: 424937 - DNA, 717 bp, Serratia marcescens
atgaaaaagctactgattttactgatgatcatcgccgccccggtgtgggccgccgagcctttcactccggcacaagaggcgcgtatcaaagagatgatccgcgaaacgctggtgtccaacccggacattctggcgcaggcggtggacgcctggcagcagcaaaccgccggccagcagatcagccaggctatcaagcagaacgccaaaacgctgtatcaggatccggccagcccgcgcctcggcgccgccaaccccaaactgacgctggtgacctttaccgactataactgcccgtactgcaagcgtttcgatccgatgctggagaagatcgtcaagcaatacccggacgtggcgctggtggtgaaactgctgccgttcaagggcgaaagctcggtcagttcggcgcgcgtggcgctcaccacctggcagcaacatccggatcaattctgggccctgcaccagcggctgatggcgaaaaagggcttccacgacaacgccagcatcgccgccgcgcaagagaaaaccggcgtcaaggcggtggcgcccagcgaacagagcatgaccacgctgcgcaccaacatggaattggcggagcaactgggcgtgcaggggacgccggcgacgctgatcggcgatcggatgctgccgggggcggtatcctatgaagagctggaagcgatggtgaaacagcagctggcgaaggccaacaatggctaa

SEQ ID NO: 424938 - DNA, 2037 bp, Serratia marcescens
atgttgaaaattatcaggctggcctgcgcttgcctgtttatgctgtggctacctgccttgcaggcggcggacagcggctggctgcaaaatccggccaacgatcatgccaaggtgcggctgcgcgccgacacgtcacagccgggggagacccgcctgctgctgtcggtcgagctgcaaaagggctggaaaacctactggcgttcccctggcgaaggcggcatcgcgccggctatcgtctggcagggcaacccgccgccggcgacctggcactggccgacgccgcagcgtttcgaagtggccggcatttccacccagggctatcacgatcgggtcacgctgccgatcgtgatgtcaggcccggtatccggcccgctggcgggcaccctgacgctgtccacctgcagcaacgtctgcattctgaccgactacccgttcagtctggatctgacgacgccgaacgatccgcagtttaatcacgacttcgcgcaggcgatggggcaggtgccgatcgccgccggggtggcggagagcgtcaaggccggttaccgcaacggcgagctgcagattgccgccgaacgcgccgccggctggcagcagcccgcgctgttcttcgatacgctggcggatgccgatctcggtaaacctcaagtcgagactgacggcgctcaactgttggcgcgggtgccggtcagcgacggttggggcgatgcggcgccggatctgcgcggcaaaacgctgacgctggtgatcgacgacggcggcatggcgcagcagattacgctgccgattggcgatccgttggccgcgcccgtcggtgcggcgttcccgctgtggcaggcggtattgatggcgctggcgggcgggttaatcctcaacctgatgccgtgcgtgctgccggtgctgggcatcaagctcggctccatcctgcaggtggagcatcgcgatcggcgcagcgtgcgtttgcagttcctggcgtcgtcgctgggtatcgtcgcctcgtttatggcgctggccctgttgatgacgctgctgcggctcggcaaccatgcgctcggctggggcattcagttccagaatccgtggtttatcggttttatggtgctggtgacgctgctgttcagcgccaacctgtttggcctgttccacctgcgcctctcgtccgatctaaacacgtcgctggccacccataacgggcaggggctgagcggccatttctggcagggcgcgttcgccacgctgttggcgacgccgtgctcggcgccgtttctcggcacggcggtggccttcgcgctggcggcgtcgctgccggtgctgtggggcatgttcatcgcgctcggcatcggcatgagcctgccgtggctgctgatcgccgcctggccgtcgctggcgctgcgcttgccgcgccccggccgctggatgaataccgtcaagctggcgatggggctgttgatgctggcgtcgtcgctgtggctgctgagcctgttgagcaaccatatcggcgtgcaggccacgctgtggctgggggcgttggcgctgctggcgttgctgctggcggtgtggcgccaacagggcgcacggttggcggccaagctggcggccggcacgttagtgctggcgggcgtggccttgctggccggatcgctgaccgccggcctgtggcgccagccgttgcaggatcgggtgcagtggcaaccgctgagcgaacaggcgattaccgaagcgctggcccagcataagcgggtgttcgtcgacgtgaccgccgactggtgcgtgacctgtaaagccaacaaattcaatgtgctgttgcgcgatgacgtgcagcgcgcgctgagcgccgacgacgtggttgcgctgcgcggcgactggagccgcccatcggccgacatcagcgccttcctgcaaaagcgcggcagcgtcgccgtgcctttcaaccaaatctatggcctcggcagcccggagggcgaggtgttatccccgctgttgacccgtgacgccgtgctgcaaaccctttcccatgccaaaggaaccgaacaatga

SEQ ID NO: 424939 - DNA, 363 bp, Serratia marcescens
atggttaaacggcagcggattgcaaaatggtttttatgcctggcttgcctggtggtgctgacgtgcatgacccagcgcatggcgggcctgcatgcgctgcagcaaacgctggggatcccggcggccactgccgttcagtccggtgataccgccgccgaagcgcagccgacgccctgtgagctgagcgccaagtcattgctggccgcgccgccggtgatgttcgaaaccgtgctgttcgggctgggtctgctgctggcgctgttggcgccgaccatcgccgcgcgcctgcgcattcctcctccccgcgccatttcaccccccaccctcagggtgcaccttcgattatgcgtcttccgtgaatga

SEQ ID NO: 424940 - DNA, 1029 bp, Serratia marcescens
atgcaacctttgagtgggccgggcaccccaatcgccggcgaacgccctccctccccgggcaaaacggcggccactgacgatcaacccctctctccggcgcagcgcacgacgctggaaaagctgatcgtgaaaatcatgacgctcagcccggcaaagccggcggagatctgggcgactctgcgtcacgatctcggcgccgataacggcggtgaactgctggcgcgtcattttcaaccggcggaacagctgctgcaaacgcgcctgacgcaggcgcagcaaaaccatgccgggcgccagctgttgcaacagctggccgaattgctgccgcagggcaacaatcgccaggcggtcagcgactttattcgccagcagttcggccacacggtactgagccagctgagcccaccacagctgcagcaggtgctgaatctgttgcagaccggcggcctggccattccccagccgcagcaaaccgccaccagcgatcgcccgctgctgcccgcagagcatcaaagcctgcagcagcaggtcaccaaacttagcgcggccaccggtgaagcgccggctaaaatctggcaaacgctgtttgatctggcgggcgtgaaaaccaacgatccgctgccggcgcgccacttccagctgttaaaccaattcttgcaagtaaaggtggccctcagcccgcagagcgcgccgacgctgaacaatctgctggcggcgctcaagcagccggcggacgagcaagagctgcagcagatgaacgactattgccagacgcgcttcaactgcggcgccaatgcgccgctgacgcatccgcaaatgagcgacgccattcatcagctgtttgcccgccgcctggagaaggccggccaggcgcagccgatcgtcagccagcccgtcgagccgcagccgctgctcaacccgctgatcgccgccctgccgctgccgctgcaaaaagcgctcagcaagcctgccgcggcgctgatcctgctgctggtggcgctggcgatcgtactggcgctggtgttttaa

SEQ ID NO: 424941 - DNA, 456 bp, Serratia marcescens
atgtcgaaagaatcattggtgctggcttttccaccggcggcgccggaagagagcctggcttacctggcggccaagctgagccgctatgcggatgcctgggacgtggcggaagatctgcgcaacggcgtggacgggatagtggtgatcgacacccgcgcagaggcgctgtacgccgccgggcatatccccggggcgatcagcttgccgcatcgcctgatggatgaagccggcacggcgcagctggatcgccaaaaggtgtatgtgacctactgcgacggcatcggctgcaacggttccaccaaaggcgcctataagctggcgaagctgggattcagggtgaaggagctgatcggcgggctggatttctggctgcgcgacggccatccgttggccatcggcgaacagccgggatcgctgcgcgatcgggcggcggctgaggactgcggctgcgcctga

SEQ ID NO: 424942 - DNA, 1434 bp, Serratia marcescens
atgcggcactcgctggtcacgctgtttcagcaatcgccccacaccgccggcacgctgcgcgatcgcctgtgcggcgcactgcggcaggccatccatcaaggggcattgaacgttgggcaacgcctgccttccagccgggtgctggccagcgatctgggcctctcgcgagtgaccgtcgaagcggcctacggtcagttggaggcggagggatatctgcagcgccgcgtcggccagggcacctttgtggcgattaccatcgccaaatcaccgccgccggcagccggctccggcatgccgcgcctttcgcagcgcggccaacagatcgtgcaaaccggcggctgccgcgatccgcagcagccacaggcgttcaccgccggttcaccggacctgcgcgcgtttccgctggccttgtggaagcagctgaccgcacagcgcctgcggctacagggagaaagcctgctgcgctacggcgacccgcagggctatttaccgctgcgtgaggcgattgccgcccacgtcaaccaaacgcgcggcgtggtctgcgatgcacggcagattatcgtgctgaccagttcgcagcaggcgctgcagctgatcgccacgttgctgctggacagcggcgacagcgtctggatggaagagccgggttacaccggggcaagaaacgcctttatcagcgccggcgccgccctgacgccggtcgcggtggacggcgacgggctgcgtgctgaaccctccttgccggacccacgtttgatttatctgaccccctcacaccaatacccgaccggcgccgcgctcagcctggcgcgccgattggcgttgctggcgctggcagagcggcaacaggcctggatcatcgaggacgattacgacagcgagtttcattacgacggcctgccgataccggcgatgcagggcctggatcgccgtggccgggtgctgtacctcggcaccttctccaagtcgctgttcccttcactgcggttggcgtatctgatcgccccgcccgcgctggttgaagcgttcgtcaccgcgcgtacggtgtatgacggccacagcgcgcagctgatgcaggcggtcaccgccgaattcatccaccaggggcacttcgccgcgcatatccgctacatgcgccagctctaccgcagccggcgcgatgtgttgctggcggaagtacgcgaaaaactcggccacttcgccacgcccgctcccgccaccggcggcctgcagctcagcgtctggctaccgcccggccaggaggcggcgctcagccagcaggcgcagcggctcggcatcctcacgcccgggctgaaggcgcaataccagacggcgcaggcgcagcgcgacggctggctgctgggcttttcggccctgacgccgggcgagatccgcagcgccgtcgagcggctggcgcagatcgccgtggcttag

SEQ ID NO: 424943 - DNA, 897 bp, Serratia marcescens
atgcacaccggtcacgctctgcttatcaccttactgtccctgggcatctctcacagcgcctgggcctctgccgatgccggccatgccaacagcaacgccaacagccgcgaagtggccagcgcgttgggtggcctgaaaaataaaacctatgaactggagcaggcgccgaagatccgcgtcgccagcttcaatatcgccgccggcaaggtcagcgacatgaccgccatcgccaaggcaattcgcgcgatgaacgtcgacgtggtggcgctgcaagaggtggataaactcaccgcccgcagcggccgggtcgatcaggcggcggagctggcgaagctgaccggcatgcaggcggtgtttggccgggcgatcgattacgacggcggcgaatatggcctggcgtttctctcgaagtatccgctgcacgatgccgtgatctatccgctgccgtccggccagcgcgaacagcgcatcgccttcagcgccaaggttgacgtgccggagttcccggcgccgatcacgctgctcaacgcccacctcgataccaaggaagatccgacgatgcgcctggatcaggtgcgggagctgaacgatcgcgccatcgaagtacgcggtatcaagctgcttttcggcgatatgaacgatgtgccgggcagcgtgacctggctggagctgagccgctattggaacgacatcatgcctgacgggcaggacggccgcagttggccggcggaaaacgccgagatcaaggtggattacatcttcaccggtaacgcgcagcgctggcatctggacagcctgacggtgccgaacgccagcggcgactggaacggcgtgcattggccggcggtgagcgaccacctgccgctggtggcggagatgcgattgaccgagcaataa

SEQ ID NO: 424944 - DNA, 1248 bp, Serratia marcescens
atgaccagcccgattgccgaacagcttaccgaacgtttcttccgctacctggcggtcaccagccagagcaacgccgccgcaaccaccctgcccagcacgccggggcagcatgaaatggcgcagctgctggcagaagagctgcgccggctaggcctggccgacgtgcagatagacgagcacgccaccgtcaccgcccgcaagcccggcacccagcccggcgcgccgcgcatcggcttcatcacgcatatcgacaccgtggacgttggcctctcgcccgagattcgcccgcagcgcctgcgcttcaccggcgaagatttatgtctgaacgccgagcaagacatctggctgcgggtcgccgagcatccggagatcctgccctaccggaacgaagagatcctgttcagcgacggcaccagcgtgctgggcgccgacaataaggcggcggtcaccgtggtgatgacgctgctggccaacctgaccgcggccgatcgccacggcgatatcgtggtggcgttcgtgccggacgaagaaatcggcctgcgcggcgccaaggcgctggatctgcagcgcttccccgtcgatttcgcctacaccatcgactgctgcgaactgggtgaagtggtatacgagaatttcaacgcggcggcggcggaaatccgcatcgagggggtgaccgcgcacccgatgtcggcgaaaaacgtgttaatcaacccgatacgcatcgccaacgacatcatcaaccgcttcgacgtgcaggataccccggaacacaccgacgggcgcgagggctatttctggttcaccgatctggccgccaatgccaatcaggcgacgctgaaggtgtcgattcgcgacttcgatagcgcggcgttcgaggcgcgcaaagcccgccttgaggagacggtgcgtcaggtggcggccggctatccgcgcgccaacgtcagctgcagcatcagcgacatctacagcaacatcagcaacgccatcggcgaagatcggcgcgccatcgatctgatcttcggcgcccttgccgcccacggcatcccgccgaaggtgatcccgatgcgcggaggcaccgacggcgcggcgctctccagccgcggcatcctgacgcccaattacttcaccggcgcgcataacttccactcgcgcttcgagtttttacccgtcagcgccttcgtgaaatcctatcaggtgacccgcagcatttgcctgctggccgcgcggcaaagcggccaaccggcttag

SEQ ID NO: 424945 - DNA, 1113 bp, Serratia marcescens
atgagttcaaccgccatttcccggcttatccacccctttgtcaaagaccgtttcctgcacgtgcttttgctggccggcgcagcgatgttcgccgttgatccgcagccgctggcggcgctgggcggtttcatcgacgtccgcaccctcattactctgctggggctgatgctgctgaccaaaggcgtcgaggtcagcggctacttcgacttcgttggccgcaagattatcaaccggttgcacagcgaacggcggctggcgctgttcctggtgttttccgccgcgctgctgtcgtcgtttctgaccaacgacgtggcgctgtttatcgtcattccgctcaccatcacgctgaaaaagctgtcggcgctgccggttggccgtttgatcatctttcaggcgctggcggtgaacgccggttcgttgctgacgccgatcggcaacccgcaaaatatcctgctgtggagccgctccggcctctctttcctcggtttcatcggccagatggcgccgtttggcgccgcaatgatgttgagcttgctggcgctgacctggttaagcttcccggcgcgcgacattgtgaaagcgccgaataccgaggggtatccctaccagcggccgctgttgctgagctgcgtagggctatatgcggttttcctgctgagtctcgatttcgatctgccgttgtatgggctgttggcggtgttcgccggttttttgctgctggcgcgccgggtgctgttgcagatcgactggagcctgattttcgtgttcgccgccatgttcatcgatgtcggcctgtttacccgtttgccgccgcttcagccggcgttcgccgccatcgccgggctgagcgagggcggcgtgtatgcgttgggcgttgggctgtcgcagatcgtcagcaacgtgccggccaccatactgttgctcaactatgtgccttccagcgctcagctggcctatgcggtcaacgccggcggcttcgggttggcgatcggatcgcttgccaacctgattgcgctgcgcatggcgggggagcgcatgatctggttgcgcttccactattattcgctgccgttgttggtatgggccgcgttgctcggttgggtgatgagctaa

SEQ ID NO: 424946 - DNA, 1032 bp, Serratia marcescens
atggcttccctgttcgccaaaggggcgttgctcagcgccttatgcgccctgctcgccgcctgcgacgatgccgcctcccgcccgcaaatcgatatcgacggcaagaccatgggcaccttctacagcgttaaagtcagcggtgacgtcgcgatcggcaagcaagaactgcagcggcagatcgacgcggtgctcgaacgggccaacgacgatatctccacctaccgcgccgactcggtgctgtcgcaatttaaccgcagcgccggcctcgaaccgcagccgatcccgcgtggcatggcagacatcgtgctgatggcccagcgcatcggccgcgataccggcggcgccatggacatcaccgtcggcccactggtgaacctgtgggggttcggccccgacaagcacccggtcaaagtgccggaacaggcgcagatcgacgcggcgaagcagcgcaccggcctgcagcacctgaagctgatcagcgacaatcgcggggagtggctgcaaaaagatctgccggatatgtatgtcgatctctcgacgctgggcgaaggctacggcgccgatgaactggtgcgcctgatgaaccgcaacggcattaccaactacctggtgtcggtcggcggcgcggtctcttcacgcggcgtcaacggccagggcaaaccctggcgggtggcaatccaaaagccgaccgaccgtgaaaatgcggtgcaggcgctggtggatctgcacggttacggcatcagcaccgccggcagctaccgcaactacttcgaacaaaacggccagcgctactcccatgtcatcgatccgaccaccggcaggccgatcaaccaccgcctggtttccgccacggtgatcgcccccaccgcgctcgaggccgacggctgggataccggcctgatggtgctgggcacggagaaagcgttgaaacttgccgaagagaaagggctggcggtctacctgatcagcaaaaccgacgacggtttcagcgccgtgatgacgccgcagttcaaggcgtttttggtgcagtga

SEQ ID NO: 424947 - DNA, 222 bp, Serratia marcescens
atgaaaaagttaattgcggttgggttactgtcggccgtgttggccggatgcgccaccgattctccctgcgtgccggtctacgatgaccaggggcgcctggtgcacaccaacacctgcatgaagggcaccactcaggataactgggaaaccgcgggtgcgatcgccggcggcgcggcggcggttgccggcctgactctcggcatcatcgcgctgaccaagtga

SEQ ID NO: 424948 - DNA, 1221 bp, Serratia marcescens
atgaaacgtgcagtgattactggcctgggagttgtctccagcattggtaataaccagcaggaggtcctggcgagcctgcaggaaggacgttctgggatcactttctcccaggaactgaaagattccggcatgcgtagtcacgtatgggggcaagttaagctcgacacaaccggcctgatcgaccgcaaggcggtgcgtttcatgagcgatgcttccatctatgctttcctggcgatgcaagaagcgatcgcgtcttccggcctgaaggaagaagagtatcaaaacaacccgcgcgtgggcctgatcgccggttccggcggtggttccccgcgcttccaggtgttcggcgccgatgcgatgcgcagcccgcgcggcctgaaagcggttggcccatacgtggtcaccaaagccatggcttccggcgtttccgcctgcctggcgacgccgttcaaaatccacggcgtgaactactccatcagctccgcttgcgcgacctccgcacactgcatcggtaacgcggttgagcaaatccagctgggcaaacaggacatcgtgttcgccggcggcggcgaagagctgtgctgggaaatggcctgcgagttcgacgcgatgggcgcgctgtccaccaagtacaacgacacgccggaaaaagcctcccgtacttacgacgccgatcgtgacggtttcgtcatcgccggcggcggcggtatggtggtggttgaagaactggaacacgcgctggcgcgcggtgcgcacatctacgcggaaatcgttggctacggcgcaacgtctgacggcgccgacatggtagcgccatcgggcgaaggcgcggtgcgctgcatgaagatggcgatgcaggatctggatgcgccgatcgactacatcaacgtgcacggcacctccacgccggtgggcgacgtgaaagagctgggcgcgattcgcgaagtgttcggcgacaataccccggctatctcctccaccaaggcgatgaccggtcactcgctgggcgccgcaggcgtgcaggaagcgatctacagcctgctgatgctggagcacggctttatcgcgccgagcatcaacatcgacactctggatgagcaggcggctggcatgaacatcgtgactcagccgactcagcgcgagctgaccaccgtgatgtccaacagcttcggcttcggcggcaccaacgccaccctggtgatgcgcaaactggcgaaataa

SEQ ID NO: 424949 - DNA, 2022 bp, Serratia marcescens
gtgaaccacgcccccatccaaaccgcaacgctaacctggaacgaacagggtacacctgtttcgaaacagtttgatgacgtctatttttccaatcaggatgggctggaagaaacccgctatgtctttctgcacggcaaccggctgccgcaacgtttcgccactcacccgcgcccgctgctggtggtggcggaaaccggcttcggcaccgggctcaatttccttacgctgtggcaggccttcgcgggcttccgccaggccgagccggacgccgcgctgcaacgcctgcactttatcagcttcgagaaattccccctgcagcaggccgatctggcggcggcgcatgcgcgctggccggagctggttccctatgccgacgagctgcgcgcccaatggccgctgccgctgccgggctgccatcgcctgctgttggccgaaggccgcattacgctcgatctgtggttcggcgacgtcaacgaactgctgccgcagttcgacgccagcatgaataaccaggtcgacgcctggttcctcgacggcttcgcaccggccaaaaatcccgacatgtggaccgagcaactgttcgccgccatggcgcgtttcgcccggccggaaggcagcttcgccacctttaccgccgccggcttcgtgcgccgcggcttgcaacaggccggttttcaggtcaaccgttgcaaaggcttcggccaaaagcgtgagatgctcgccggctgtctgccggccgatgcgcagcccacgccccacccggcgccctggtatcggcgtccggcggcggacaacaccgccgacatcgctctgatcggcggcggcgtcgccagcgcgctcaccgcgttggccctattgcggcgcggcgccaccgtcacgctgtactgcgccgacgagcagccggccgagggcgcatccggcaaccgtcagggggcgatttaccccctgctgaacggcagcggcgacgcgctggagagtttcttcagcgccgcgtttcctttcgcccgccgccaatacgacgccctgttgcaacaaggcgtcgcctttgatcaccagtggtgcggcgtcagccagctggcctacgacgaaaagagcggcgccaagatcgccaatatgctgaaaaccgactggccgccggcgctggcggcggcagccgaccgcgaaacgctcagcgaactgtgcggcgtcgataccggctttggcggcatcacctacccgctaggcggctggctctgcccggccgaactgacgcgcggcgctatcgcgctggcacagcgacagggtctggtctgccgctaccggcacgatgcgctggcgctggcgcgtgaagaaaacggctggcgcatcgatttcgcccacggcgaaagccgccgccatgcgacggtgatcctggccaacggccaccggttggccgagctggcgccgacgcaagccctgccgctgtatgcggtgcgcgggcaggtgtcgcacatcccaacctcgccgtccctcggtcaactgaaacaggtgttgtgctacgacggctacctgacgccggtcaacgccaacaacggccaacactgcatcggcgccagctaccagcgcggcgacaccgccaccgactaccgcgagcaggagcaacaggaaaaccgcgagcgcctgctgcgctgcctgccggagcaggcctggccgcagcaggtggacgtcagcgctcatcaggcgcgctgcggcgtgcgcagcgccacccgcgatcatctgccgatggtcggcgcgctgccggactatcaggccacggtgacgcagtatcaggatttgcagcggcgaaaccagcgcggcgaaaccgtcgccgatgcgccggtctatcccggcctgttcgctatcggcgggttgggatcgcgcgggctgtgctcggcgccgctggcagcggaaattctggcggcgcagctgttcggcgaaccgttgccgggcgatacgcgcctgctggcggcgctgaatccaaatcggatgtgggtgcggaaattgctgaaagggcgtgcggtttaa

SEQ ID NO: 424950 - DNA, 282 bp, Serratia marcescens
atgatcgcagaattcgaagcgcgcattttggcgctgattgatgacatggtagagcacgccagcgatgatgaactgtttgccggtggctacctgcgcggtcatttgacgctggcggtggccgaagcggaagagcagggcgagcacactgccgaagcgctgaaagcgcgggtggaagagagcctgcacaaagcgatcgccgccggggaactctcgccgccggatcagatcctggtgcgcggcatgtgggaaaacctttatcaggccgctacccctgccgcctga

SEQ ID NO: 424951 - DNA, 558 bp, Serratia marcescens
atgtcagacacacagacccgtcatcactatgagcaactgatcgagatcttcaatcaatgcttcagcgatgactacaacacccgcctggtgaagggcgacgacgagccgatctacctgccggccgacgacgaattgccgtatcaccgcatcgtattcgcccacggcttctacgccagcggcctgcacgaaatctcgcactggtgcatcgccggcgaagcgcgccgccaacgggtggacttcggttactggtattgcccggacgggcgcgacgcgcaaacccagagtgaattcgaagcggtggagatcaaaccgcaggcgctggagtggatgttctgcgtggcggccggtttcccgtttaacgtcagctgcgacaacctgaacggcgactgcgagccggatcgcatcgcgttccagcgcaaggtgcgcgaccgggtattggcgctgctggagcagggaatacccacacggcctgcgcgctttattcaggcgttgcaatcgttctacaatacgccaccgttggcggccgagcattttccgtatccggaagatctcaactga

SEQ ID NO: 424952 - DNA, 807 bp, Serratia marcescens
atggactggtttgtcatcggccccgagatgctcggggtgttgtttgcggtagcgctgctggcggggtttatcgactccatcgccggcggcggcgggctgctgacggtgccggctctgctggcggtgggggttcccccggcgcaggcgctggcgaccaacaaactgcagtcggtcggcggttccttctccgccagcctgtactttattcgtcggcgggcggtgaacctcaacgaccagaagctgacgatctttctgacgctgatcggttcgatcgccggcgccattctggtgcagcatatgcgcgccgatttgctgcggcagatgttgccgctgctggtgatcggcatcggcctctacttcctgctgatgccgcggctgggtgaggaagatcgtcaacgccgtctcggcgccttgccgttcgggctggtggccggtggctgcgtcgggttttacgacggcttcttcggccccggcgccggatcgttttacgcgctggcctatgtgacgctgtgcggtttcaaccttgccaagtccacggcgcacgccaaggtgcttaacttcacctccaacgtcggcgggttggctctgttcatcatcggcggcaaggtggtgtggagcatcggtctggtgatgctggtggggcaggtgctgggggcgcgtttgggcgcccacatggtgctgacccgcgggcagaagctgattcggccgatgatcgtgatcgtctcgctggtgatgagcctcaagctgctgtacgacaatcacggcgcggaaattcagcagtggttgagcgccctggtgcacggttaa

SEQ ID NO: 424953 - DNA, 828 bp, Serratia marcescens
atgaaaaactggatgttgggcctggtggccctgacggcctccgcctccgccatggcgctgacgccgtggcagaaaatcgatcatccggtggccggcgcgccgcaggcggtgggcggtttcgccaacggctgcgttatcggcgcccagccgttgccgctgaactcaccgaactaccaggtgatgcgtaccgaccagcgccgctatttcggccacccggatctgttggcgttcattcagcgcctcagcagccaggcgaatcagaaagcgctgggcacggtgctgatcggcgatatggcgatgccggccggcgggcgcttcagcagcggccacgccagccaccagtcggggctcgacgtcgacatctggctgcaactgccgcgtcaacgctggagcgcgcagcagttgctgaagccgcagcctatcgatctggtgtcaagtgacggcaagcaggtagtggcgcgccaatggcagccgcagatcgagtcgctgatcaagctggcggcgcaggatgcggacgtgacgcgcatcttcgtcaatccggccatcaaacagcgtctgtgtctggatgccggcgccgatcgcgcctggctgcacaaggtgcggccgtggttcggtcaccgcgcgcacatgcacgtgcgcctgcgttgcccggcgggcagccttgaatgtaaagagcaggatacgccgccgccgggcgacggctgcggcgccgaactggcgagctggttcgtgccgcatcaaccgaacgccaaaccgggtaaaccggtgccgccgccgttaccgccgacctgtcaggcattgctggatcaccatttctcagcggaataa

SEQ ID NO: 424954 - DNA, 1086 bp, Serratia marcescens
atggcaggaaacagtattgggcagattttccgcgtcaccaccttcggtgaatctcacggggtggcgctgggttgtatcgtcgacggcgtgccgcccggcatcccgctcaccgaagccgatttgcaacacgatctggaccgccgtcgtccgggcacctcgcgttacaccacccagcgtcgcgaaccggatcaggtgcgcattctctccggcgtattcgaaggcgtgactaccggcaccagcatcggtttgatcattgagaacaccgatcagcgctcgcaagactacagcgccatcaaagacgtgttccgcccggggcatgccgactacacctacgaacagaaatacggcctgcgcgattaccgcggcggcggccgctcttcggcgcgtgaaaccgccatgcgcgttgcggcgggcgctatcgccaagaaatacctgcagcagaagttcggcgtgcaggtgcgcggctatctggcgcagatcggcgacgtgacctgcgagctgaaagattgggatcaggttgagcagaatccgttcttctgcccggatccggacaagctggaagcgctggacgaactgatgcgcgcgctgaaaaaagagggcgactccatcggcgccaaggtcagcgtgattgctgaaaatgtgccggttggtctgggcgagccggtgtttgaccgcctcgacgccgatctggcgcacgcgctgatgagcatcaacgcagtgaaaggcgtggagatcggcgacgggtttgccgtggtgaccaagcgcggcagcgaaaaccgcgatgaaatcaccccggaaggtttccagagcaaccatgccggcggcattctcggcggcatcagcagcggccaaccggtggtggcgcatctggcgctgaagccgacctccagcatcatggtgccgggccgcaccatcaatcgccagggcgaagcggtggaaatggtcacccgcggccgccacgatccgtgcgtgggcattcgcgccgtgccgatcgcggaagcgatgatggcgatcgtgctgatggatcacctgctgcgccagcgtgcgcaaaacggtgatgtggtttccgacgtgccgcgctggtaa

SEQ ID NO: 424955 - DNA, 933 bp, Serratia marcescens
ttggacaaaattttcgtcgacgaagcagtgaacgaactgcacaccattcaagatatgctgcgctggacggtaagccgcttcaacgccgccaatatctattatggtcacggaaccgataatccgtgggacgaagcggtgcaattggtgctgccaagcctgttcctgccgttggacattccggaggacatgcacaccgcccgtctgacctccagcgagcgccatcgcatcgttgagcgcgtgatccgccgcgtcaacgagcgcatcccggtcgcctacctgaccaacaaggcctggttctgcggcatggaattctacgtcgacgagcgcgtgctggtgccgcgttcgccgatcggcgagctgatcaacgatcgcttcagcgcgctgatcccgcacccgccgcgccatatcctcgacatgtgcaccggcagcggctgtatcgccatcgcctgcggctacgctttccctgaagcggaagtggacgcggtggacatctccagcgaggtgctggcggtgaccgagcgcaacattcaggcgcacggcgtcgaacaccaggtgatcccgatccgttccgatctgttccgcgacgttcccgcgatccagtacgatctgatcgtcaccaacccgccgtacgtcgatgcggaagacatgtccgatctgccgcaggagttccgctttgagccggagctgggcctggcggcgggcagcgacggcctgaagctggtgcgccgcatcctggcctgcgcgccggactacctgaccgacgacggcgtgctgatttgtgaagtgggcaacagcatggtacacctgatggaacaatatccggatattccgttcacctggctggagttcgaaaacggcggtgacggcgtgttcatgctgaccaagcagcaactggtggattgcaaggaacacttcagcctctatcgcagctaa

SEQ ID NO: 424956 - DNA, 531 bp, Serratia marcescens
atgaagaacaagccccctctgagccaagacgaacaacagctcttcagagagtcggtggcgggcgcgaaaaagctgcgccaggacaccatcgtccaccgcccgccgaagcccaaggtcaaacagattgccccgcagcggctgctgcaggagcaggtcgatgccagctattatttttcagatgaataccagccgcagctggaagaagaaggcccgacgcgctacgtgcgccccggcagcagcccgtatgagctgaagaagctgcgacgcggcgattactcgccggagctgtttctcgatttgcacggtctgacccagctgcaggccaagcaggagctgggggcgctgatcgccgcctgcaaacgcgaacacgtgcactgcgcctgcgtgatgcacgggcacggcaagcacattctcaaacagcaaacgccgctgtggctggcgcagcatcccgacgtgctggcgtttcatcaggcgccgaaggaatggggcggcaacgccgccatcctgctgttggtggagctggccgagtag

SEQ ID NO: 424957 - DNA, 483 bp, Serratia marcescens
atgcaagttttgattatgcgtcacggagaggcggcgctcgaggcagccagcgatgcggtaaggccccttaccctgtgcggccgcgacgagtcccgtcagatggcggcctggttgaacaccaagtctgtggatattgaacgcgtgctggtcagcccctatctgcgggccgaacagacgctggcgacggtgcgtgaagccttgacgctaccggagggcgaagaagtgttgcccgagctgacgccgggcggcaacgccgaacaggtcggcagctatctgcaggcgctggcgatgcaaggggtgagctcggtgctgatcgtgtcgcacctgccgctggtgggctatctggtggccgaactgtgcccgggcgagtgcccgccgatgttcgcgacctcggcgattgccaacgtcgatctgccggcggacggcagctacggcaagtttgaatggcaggtcagcccgtcgcaggtgatggccaaagtgtga

SEQ ID NO: 424958 - DNA, 2169 bp, Serratia marcescens
atgatgagcttcgaaaacgcattgcatgaacagcgcgccaaaccgtcggcctttcagctgacgattcgccccgacaacatcggcgtgatcaccatcgacgtgccgggcgacaaggtgaacacgctcaaggccgagttcgtcgaacaggtcaacgacgtgctgatccgggcgcagcagcataccgcgctggaagggctggtgatcgtttccggcaagccggactcgtttatcgccggcgccgacatcactatgattgccgcctgcaccagcgccaaagaggcggaaacgctggccaggaaagggcagagcacgctggcgcagatcgccgcgttcccggtgccggtagtggcggccattcacggcgcctgcctgggcggcggcctggagctggcgctggcctgccacggccgcgtctgttcattggatgacaaaaccgcgctcgggctgccggaagtgcagctgggcctgctgccgggctccggcggcacgcagcgcctgccgcgcctggtcggcgccgccaaggcgctggacatgatcctgaccggcaagcacattcgcgcccgccaggcgctgcgcatggggttggtggacgacgccgtgccgcagtcgattctgttgcagactgccatcgagcgggtgaagcagagctggaagcatcagcgcgagctgccgtggcaggatcgcctgctcaacggcccgctgggcagaagtctgctgttcagcatcgtgcgcaagaaaacgttggcgaaaacccacggcaactacccggcggcggagcgcatcattcaggtggtgcgcaccgggctggatcacggcagcgccagcggctatgaggctgaagcgcgcgcctttggcgagctggcgatgacgccgcagtcggcggcgctgcgcagcctgttcttcgcttccaccgcgctgaaaaaggagcggggcggcaatgcccagccgcacgccctgcatcgcgtcggcattctcggcggcggcctgatgggcggcggcatcgcctgcgtcaccgccacccgcggcggattgccggttcgcatcaaagacatcaatgaaaccggtatcaaccatgcgctgaaatacagctgggacgtgctcggcaagcgggtgcgccgcaagcgcatgcgcccggcggaacggcaaaagcagatgatgctgatctccggctctaccgattacaccggctttgaacaggtggatatcgtggtcgaggcggtgttcgaagatctggcgctgaagcagcagacggtggccgaggtagaagccaactgcgcgccgcataccgtgttcgcctccaatacttcctcgctgcctatcggccgcatcgccgaacaggcccagcggccgcagcaggtgatcggcctgcactacttcagcccggtggacaagatgccgctggtggaagtgatcccgcatgccggcaccagcgaagagaccatcgccaccaccgtggcgctggcgcacaagcagggtaaaaccgccatcgtggtgggtgacagcgccggtttttatgtcaaccgcatcctggcgccgtacatcaacgaagcggcgagctgcctgctggaaggcgagccgattgagtcgctggacaaggcgctggtggacttcggtttcccggtcggcccgatcaccctgctggatgaagtgggcatcgacgtcggcaccaagatcattcccgtgctggtcgaggcgctggggccgcgcttcgccgcgcctgccgcgttcgatgcggtgctgaaagacgggcgcaaagggcgcaagaacggccgcggcttctatctctacccgagcgaagggcagcagcggcagcggcgcaaacgtgcggatacctcattgtatacgctgctcggcgtcacgccgaaggcgcacatgctgccggcgagcgtcgctcagcgctgcgtgatgatgatgctgaacgaagcggcacgctgcctggacgaaggcgtgatccgcagcgcgcgcgacggcgacatcggcgcggtgttcggcatcggcttcccgccgttcctcggcggcccgttccgctatatggacgagcttggcgccgagaaagtggtgaagacgctggactacctgcgtcagcagcacggcgagcatttcgccccgtgcgaacgcctgcagcgcatggcgcagcagggcgagcgcttttacccgctggggagctga

SEQ ID NO: 424959 - DNA, 1311 bp, Serratia marcescens
atgagtaaggcactgccgttggtgacccgtcatggtgaccgcattgcgattgtgaatggactgcgtaccccctttgccaaacaggcgactgcctatcacggcattccggcggtggatttagggaaaacggcggtgagcgagctgttggcgcgcagcggcatcgatccgcagcttatcgaacaactggtgttcggccaggtggtgcaaatgcccgaggcgccgaacatcgcgcgtgaaatcgtgctcggcaccggcatgagcgtccataccgacgcctacagcgtgtcgcgcgcctgcgccaccagcttccaggcgatcgccaacgtggcggagagcatcatggccggcagcatcagcgttggcatcgccggcggggcggattcttcttccgtcttgccgatcggcgtcagcaaggcgctggcgcgcacgctggtggacgtcaacaaggcgcgcacgctgtcgcagcgcctcaaactgttcagccggctgaaattccgcgatctgatgccggtgccgccggcggtggcggagtattccaccggcctgcgcatgggcgataccgccgagcagatggcgaagagccacggcatcacccgtgaagcgcaggatgcgctggcgcaccgttcccacgagctggcggccaaggcctggcgggaagggtggctgcgcgacgaggtgatgaccgcctatgtgccgccttaccgcgcgcagctttctgaagacaacaacatccgtaaagattccagcctggcttcctacgccaagctgaagccggcgttcgatcgcaagcatggcagcgtcaccgcggccaacagcacgccgctgaccgacggcgcggcggcggtgctgatgatgagcgaatcgcgcgccaaagagctggggctgcagccgctgggctatttgcgcagcttcgccttcgccgccatcgacgtgtgggaagacatgctgctggggccttcctacgctacgccgctggcgctggatcgcgccggcatcggtctggccgatctgacgctcatcgacatgcatgaagccttcgctgcgcaaacgctggccaacctgaagatgttcgccagcgaagagttcgcccgtgagaagcttggccgcagccaggcgatcggcgaggtggacatggacaaattcaacgtcctgggcggttccatcgcctatggccacccgttcgccgccaccggcgcacgcatgatcacccagacgctgcatgagctgaaacgccgcggcggcgggctgggcctgaccaccgcctgcgccgccggcgggttaggggccgcgatgatcgtggaggtggaatga

SEQ ID NO: 424960 - DNA, 297 bp, Serratia marcescens
atgtcagatgcaattaataaatgcagcgcccaggaaaccgccgcgtgttgctgtgtggatgtcggcaccgtgatggataacaccgattgcaccgcgtcctacagccaggtgttcagcaatcaacaagatgcggaggcgatgctggccgccctgagcgaaaaggcgcgcgcggtagaatccgacccttgtgacatcagcagtagcattaaaccggttgacggcggcgtacagttggaggccgatttcaccttcgcctgccaggcggaaaccctgatcttccagctcggcctgcgttaa

SEQ ID NO: 424961 - DNA, 1323 bp, Serratia marcescens
atgagccagaaaaacctattgactaaatcagctctcgcagctgcagtggcaattatctcttcaaacgtgtctgccgcaggattccagctgaatgagttctcatcagctggtttaggacgttcgtattctggcgaaggcgccatggcggatacggcggcctccgcaagccgcaacccggcgttgctgatgatgtatacccgcccggaactttctttcggcgcggtcttcatcgacccagacgttgacattaccggtcaatccccttccggcgccagtttggattcgaaaaacatcgcgccgaccgcctgggtgccgaacctgcattatgttcacccgattaacgatcagttcgccgtaggcggctcggtcaccagcaactacggtctggcgacagaattcaacgacggctataccgccggcgcttacggcggcaagaccgatctgaccaccctcaacctgaacctcagcggcgcatatcgtctgaatcaacacttcagcttcggtctgggcttcgatgcggtgtacgccaaagccaaactggaacgttacgccggtgaactgccgaagctcatcgccggttcaggccaattaccgccgcagctagccggccctgtttcgcagatcccggcagatacccagatttcgcacctgaaaggcgacgaatggggcttcggttggaacgccggtattctgtacgaagtggatgaaaacaaccgttacggcctcacctaccgctctgaagtgaaaatcgacttcgacggcgactacaagagcagcctgccttcagccttcaacccgctgctggcctctcaaggtcttccgtggggcaccaacggcaacaccattccgggttctctgagcctgcacctgccggaaatgtgggagctgtccggttacaacaaagtggcgccgcagtgggccatccactacagcctggcctacaccagttggagccagttccaggagctgagagccaccggcaacaacggccaaacgctgttcgagaagcatgaaggcttcaaagacgcttaccgcatcgcgctgggtaccacctacttctacgacgacaactggaccttccgtaccggtatcgccttcgatgacagcccagtgccggcacagaaccgttcgatttccattccggatcaggaccgtttctggctgagtgccggtactacctatgcgttcaacaaagacgcgtcggtcgacgtcggcgtttcctacatgcacggccagaaagtcaccatcaaagaaggcccttacaccttcaactctgaaggtaaagcctggctgtacggcgccaacttcaactaccgcttctaa

SEQ ID NO: 424962 - DNA, 759 bp, Serratia marcescens
atgaactttcgcctgactggggtggcattcgcaacggtattactggtgggctgtgccagcgcgccagacaacgatccgcaagggcgttccgatcctctggaaggattcaaccggacgatgttcgacttcaactacaacgtcctggatccctatatcctgcgtccggtcgcggtggcctggcgtgactacgtgccgatgccggcgcgtaacggcatcagcaacttcacctccaacctggaagagccggccagcatggtcaacgccttcttcaagggcgacccttaccgcgggatgattcacttcaaccgcttcttcctgaacaccctgctcgggatgggcggcctgatcgacgtggccggcatggccaacccgaaactggcgcgcgaagagccgaaccgcttcggcagcacgttggggcattacgatgtaggttatggcccgtacgtgatgctgccgggctacggcagcttcaccctgcgtgaagacggcggcgactttgcggatacgctgtatccgatgctgagctacatcaccttctggatgtcggcgggcaaatgggtggtcgaggggatcgaaacccgcgcccagctgctggattccgacggcctgctgcgcaactcctccgatccttacatcatggtgcgcgaagcttacttccagcgccacgatttcatcgccaacggcggctcgctcaagccggaagagaacccgaacgccaaggcgattcagggcgaactggacgagatcgactcgcagtaa

SEQ ID NO: 424963 - DNA, 1215 bp, Serratia marcescens
atggctttttggctgattatttgcgtgttgctggccggcgccgccgcgttgctggtggtgccggcaatgcgccacggcaagcagagcgccgccacgcgcgatgcgttgaacaaggctttttatcaggatcgtctcagcgagctggagcaggacgagcagcagggcgtggtggccgagcgcccggagctggtgaaagagctgcaacagaacctgttgaacgacatcccggccgagcaagcggcgcaggcgaaaccgatcaatcgttgggcgctggtgccgggcgtgctgttattgctggcggtgaccgttggcttttatctgaaaaccggcggattggcgcaggtgctggactggcgtctggtgcaggcgcaaatgccggaattgcgcgagcgcgttgccaatgagcgcgccaaaccgctgagcatggaagagatcgcccgcctcgggctggggctgcgcaccgcgctgcagcaggacgatcgcaatatcaacgactggatgatgctggggcgcgtcggcatggcgttgaacaacgccaccaccgccacgcaggcgtttgcccatgcttatcaattggatccgaatagtctggaagtgcggctcggctatgccgaggtcttgacgcgctccaacgatccggaggataacaagcaggcgacgcagctgctgcggcgcatgatcgcggaaaaccacggcgatccgcgggtgctgagcctgttggcgttcaatgccttcgaacagggcgatttcaagcaggcgatcggtgcctggcaggtgatgctgcagctgctgccggccaacgatccgcgcgcggaagtgataaagcgcagcattgcacaagcaaaagcccaggcaggcggagaaaatgttaaactgaatgtgaccgtttcgctgtcaccgcaggcggcgaaagccttgccgccgcaggggacgctggtcatttcggtcactgacggcgttagcccggtgccggtggcggtaaaacaattgccgctgagccgttttccgctgtctttctcactggatgacggcaacgccatgatgcccgagcgtctgctctcggcgcagcatcaggtgcaggtgcgtgtgcgcctctcacaggacggattggccacgccgcagccgggggactggttcggcgaaagctcgctgcagacattcagcggtaaagagcaggttagcgttcagataaacaagcaggtcactgaaaaataa

SEQ ID NO: 424964 - DNA, 468 bp, Serratia marcescens
atgaggctgattgtcctgctgtgcgccgcgctgctgagctggagcgccgttgcggcgatcgatacctatcgcttcaactccgtcgagcaggagcagcagtatcgcgagttgaccgaacagctgcgctgcccgaaatgtcaaaacaacagcattgccgattccaacgccattatcgccgccgacatgcgcaccaaggtgtacgaactgatgatgcaggggcaaagcaagcagcagatcattgattacatggtggcgcgctacggcaatttcgtcacctacgagccgccggtaacgccggcgacgttgatcttgtggatcgggccgctgctgttcgtgctgatcggcggggcggtggtgatcctgcgcgctcggcgccggcccgacgcggcggtggacgatgtattctccgaacgggaacggcagcgcctggcggcgctgttgcaagagactgacaggaagaaaccctaa

SEQ ID NO: 424965 - DNA, 552 bp, Serratia marcescens
atgaagcgcaagctgctgtttatcccgttggtactcttcctgctgctggtggcggcgctgatggtgcagctgacgcgcaacgccggcggcgaagatccgaccatgctggaatcggcgctgatcggcaagccggtgccgaccttcaggctggaatcgctggatcagcccggcaaaacctacgatcaggcggtgctgcgcgacggcaagccgatattgctcaacgtctgggccacctggtgcccgacctgccgcgcggaacaccagtatctcaacacgctggcggcgcgcggcgtgcgggtggtcggcctgaactataaagacgatcgcgccaaggcggtgacctggctgaattccctcggcaatccctacgccctcagcctgtacgacggcgacggcatgctggggttggatctcggggtctacggcgcgccggagacctttctcatcgacggccaggggattattcgctatcgccacgccggcgacatgaacgagcgcgtctggcagcaggaagtgctgccgctgtataaaaagtacggaggtgaggcatga

SEQ ID NO: 424966 - DNA, 1971 bp, Serratia marcescens
atgatgccggaactgggcagttttctgctgtgcctggcgctggcgatcgcgctgctgctgagcatttacccgcagtggggcgcggcgcggcaggacagccgcatgatggcggtggcccggccgctgacctacggcatgttcgccgcgatagcgctggcgttcctgtgcctggtgcacgccttcgtggtcaacgattttaccgtcgcctacgtggccaccaactccaatacccaactgccggtgtattaccgcatcgccgccacctggggggcgcatgaaggttcgctgctgctgtgggtgctgctgctgagctgctggtcgctggcggtggcgttgtgcagccgggcgatgccgcaggatgcggtggcgcgggtgctgtcggtgatggggatgatcaccgccggtttcctgctgttcatcatcatgacctccaatccgttcacccgcacgctgccgaacttcccgatcgacggcagcgatctcaacccgctgctgcaggatatcggcctgatcttccacccgccgctgctgtatatgggctatgtcggcttctcggtcgccttcgcgttcgccatcgcctcgctgatggctggccggcttgacaccgcctgggcgcgctggtcgcgcccgtggaccacagccgcctgggtgttcctcacgctgggcatcgtgctcggatcggcctgggcctactatgagctgggctggggcggctggtggttctgggatccggtggaaaacgcctcctttatgccgtggttggccggcaccgcgctgatgcattcgctggcggtgaccgaaaaacgcggcacgttcaaagcctggacggtgctgctggcgatcaccgccttttcgctgtgcctgctgggcaccttcctggtgcgttccggcgtgctggtgtcggtgcactccttcgcctccgatccggcgcgcggcatgtttatcctcgcctatctggtgatcgtgatcggcggttcgctgctgctgtacgcggtcaagggcggccaggtgcgcagccgggtgcagcacgagaccttctcgcgcgagaccttcctgctgggcaacaacgtgctgctgatcgccgccatgctggtggtgctgttgggcacgctgctgccgctggtgcacaaacagctggggctgggcagcatctcgatcggcgagccgttcttcaacaccatgttcacctggctgatggcgccgttggcgctgctgttgggcatcggcccgctggtgcgctggcgccgcgatgagccgagcaagctgtggcgccgcctcggcgtggcgctgttggcgacgctggcgctgtcgattctgctgccgtggctgctgcaggacagcatcgccggcatgacggtggtgggcctgatcatggcgctgtgggtgatcatcctgacgctgatggaactgcatgagcgtgccacccaccgtcacggtttctggcgcggcctgcggcagctgtcccgcagccactggggcatggtgctcggccacctcggcgtggcggtgacggtgatcggcatcgccttcagccagaactatagcgtggagcgcgacgtgcggatgaaggccggcgacagcgtggatatccacaactatcacttcgtgttccgcgacgtgcacgacattcgcggcccgaactacagcggcggcgtcggcatcatcgacgtcacgcgcaacggcaagccggaggcgacgctgcgcgcggagaaacgctactacagcgtggcgcgcagcatgatgaccgaggcggcgatcgacggcggtttcagccgcgatctgtatgcggcgctgggcgaagagctggaggacggttcctgggcggtgcgcctgtattacaaaccctttgtgcgctggatttggttcggcggcgtctttatggcgatcggcggcctgctgtgcatcctcgacccgcgttaccgcatgagcaaaaaactcaagcgcgaaggcaagctggaggcgcaatcatga

SEQ ID NO: 424967 - DNA, 495 bp, Serratia marcescens
gtgaatccacgtcgtaaaagccgcctttatctggcgatcgttgtgctgatcggcatcgcgctgaccgcgaccctgatgctgtacgcgctgcgctccaatatcgatctgttctataccccgggtgaaattttgcagggcaagggcgagaatcatgagaagcccgaggtcggccagcggctgcgcatcggcggcatggtgatgccgggctcggtgaaacgcgatcccaatacgctgcaggtcagcttcaagatttacgacgcgcgcggcgcgatcggcgtgacctacaccggcattctgccggacctgttccgcgaagggcagggcgtggtggcgcagggggtgctgggtgagggcaacgtggtcaatgcgcgcgaagtgctggccaaacacgacgagaaatacaccccgccggaagtggccgacgcgatgaaagagaaccacaaaggcccggcggaagcgtataacgcgccgcaggcggagggcgccaagtcatga

SEQ ID NO: 424968 - DNA, 237 bp, Serratia marcescens
atgaatgccgcattcgattcctggtcggcgtttttcgccatgggcggttacgccttctatgtctggctggcggtcgccgccacgctgatttcgctgttggggctggtggcgcacaccgtctggcaacggcgccagctgctcgccgagatcggccgccgtcaggcgcgcgagcggcgcattcgccatgcgcaacaatcaaaacaaaaatccgccgcaccgcgggagaaatcattgtga

SEQ ID NO: 424969 - DNA, 738 bp, Serratia marcescens
atgtggaaatggttacatcaactggcgcggcctgaacggctgtatcacgtctgcggccgctttatcccctggctggggctggcggcggcggcctgcctgctgcttggctgggcatggggctttggtttcgcgccgaaggattatcagcagggcgacagcttccgcatcatttatattcacgtgccggcggccatgtggtcgatgggcatctacgcctcgatggcggtggcggcgtttatcggcctggtgtggcagatgaaaatgtccgataccgtggtggcggcgatggcgccgatcggcgcggtgttcacctttatcgcgctggtgaccggctccgcctggggcaagccgatgtggggcacctggtgggtgtgggatgcgcgtctgacctccgagctggtgctgctgttcctctatatgggcgtcatcgcgctgtacaacgccttcgaagaccgccgcctggcgggccgcgccgccgggattctggtgctggtgggtgtggtgaatatcccgatcatccatttctcggtcgaatggtggaatacgctgcatcagggctcgaccaacatgcagcagtccatcgcgcccagcatgcgcaccccgctgcgctgggcgatcctcggctacctgctgctgttcgtcacgctgacgctgatgcgcctgcgcaatctgatcctgttccaggaacgccagcgcccgtgggtcgccgggctggtgaataaggagcgtcagtcatga

SEQ ID NO: 424970 - DNA, 660 bp, Serratia marcescens
atgtttttgaccctggtgcgccgcgaactgaagatcgcctgccgtaaaggctcggagatcgtcaacccgctgtggtttttcctgatagtgatcacgctgttcccgttggggattggcccggagccgcagctgctggcgcgcattgcgccgggcatcgtgtgggtggcggcgctgctggcttcgctgctgtcgctggagcggctgtttcgcgatgatttcctcgatggctcgctggagcagctgttgctgctgccgacgccgctgccgatgacggtgctgggcaaagtgtgtgctcactgggtcgtgacggggctgccgctgctgatcctgtcgccgctggtggcgctactgctgtcgctcgatatgcagacctggctggcggtggcggggacgctgctgctcggcacgccgacgctgagcctgatcggcgctatcggcgtggggttgacggtcggcctgcgcaaagggggcgtgctgctcagcctgctggtgctgccgctgtatattccggtgctaatcttcgccaccggggcgatcgacgccgcttcgatgggcatgccgatcgacggttacctggcgatactcggcgcgatgctggcgggcagcgtgacattggcgccgtttgccaccgcggcggcgctgcgagtgagcgtacactag

SEQ ID NO: 424971 - DNA, 633 bp, Serratia marcescens
atgctggaagccaaaagtctgagttgcgtgcgcgatgagcgcatcctgtttagcgagctaagcttttcagttcagccgggcgatatcattcaggtagaagggccgaacggcgcgggcaagaccagtttactgcgcattctcgccggcctggcgcggccggacggcggcgaggtgtgctggcgcgggcgcaacacgctgcgcgatcgcgcgaattaccagcaagatttgctgtttatcggccatcagcccggcatcaaagccgtattgacgcccttcgaaaatctgcagttttatcaggcggtgcgcggcgcggccgagcatcaggccatctggcgcgcgctggagcaggtggggctggtgggttacgaagatctgccggtggcgcagctttccgccgggcagcagcggcgcgtggcgctggcgcggctgtggctcagcgcggcgccgctgtggatcctcgatgaaccgctgacggcgatcgacaaacagggcgtggccgagttgattagcctttttgaacaacatgcgcagcggggcggcatggtattgttgaccacccatcaggatttggccggcgtcggccaaacggtgggcaaagttcgtttggcggaacacgacgcggggagtttgtga

SEQ ID NO: 424972 - DNA, 927 bp, Serratia marcescens
atgaacgaacagcgacgccaggagcacgagccggatgagacgatgcaggtagagagcaaagaacaggaacagggcaagcgcgaaatcgaagtcagggaagaaaatctgccgtcgcgcgcggcggcggtgcatgaacagatccggatggaaggcgaaaaagagctggagcgcgactggctggcattgctgtggtcggcgatcgccgccgggctgtcgatgggcgcctcgctggcggcaaagggtattttccacgcccgcctgccggacgatcccagccgctttttcatcgagaacctcggctacaccttcggtttcatcattgtcatcatggcgcgccagcagctgtttaccgaaaataccgtcacggcggtattgccaatcatgcataaacccacgccgcgcaacctgctgatcctgctgcgcctgtggggcgtggtgctgctcggcaacctgatcggcaccgggctggcggcgctggcgtttacccatatgccgctgttcgacgccgagacgcgcggcgccttcatcagcctgggcgaagaggtgatgcgccatacgccgggagaaatgttcgccaacggcatcctggccggctggatcatcgccaccatggtgtggatgttcccggccgccggcgcggcgaaaatctgggtgatcgtactgatgacctacctggtggcgatttgcgatctgacccatatcgtggtcggctctgtcgagatcctctatctggcgttcaacggcgcgattgaatggcaagaattcatttacccgttcgccctgccgacgctggcgggcaacatcatcggcggcacctttatctttgcgctgataagccacgcgcagatccgcaacgatttgagcgccaaaaatcgggcggcgcgcctgcaagaggaaaaacggcgccacggcggggaaaaaccgtga

SEQ ID NO: 424973 - DNA, 1275 bp, Serratia marcescens
atgagtatagagaacccccccgattcgatgaataagcgtcattatgcgcgccgtatgctacctttgacattgtctgtgtctgacggagcgagcgtggccggtttagccagacaggccattcaattcgcgttggtattaactcttttcatgttttcaggaaatgcgatggcaaataatcgggagcatcagcaaatagcgttagtcggtacctggacccatattccggatgcgcctgcggtgcagaaaccggcgcaccccagtgaaggcctctatcgtctggcggttaatggcgacggcacattaacgctgctcgacgtgattaaaatgaaaagcccgtcatggatcgtaaaatctcgcgatggccgtttcgcctatgtcaccaatgaggagaacgcgggaacggtcactgccttggcgatagacaaagacggcgccgtgcgggtgctgaatacggtgagcagcgcgggccggcagccgacgcatgccaccctcagcccggatggcaagtttctatttgtcgccaactactccgtcgccaaaggtggcgcgggggtgacggtattaccgattggcggcgacggcaaactgggggaacgagtgcagcattttccgttcacgcccggctccggcgtcgtgcaggggcgccaggaagggggccatgcgcactccaccaccttcagccgcgatggccaatacctgtacgcggcggatctcggcggggataagctgcgcgcctaccgctatcgctcggacaacgcgcagccgttgcaggcggatgcttcgcgcgatgtcgccttcgcacccggcgccggcccacggcacatggcgttctcgccagaaggggaatacgcctacgtcatcactgaaatggcgagtgaaatcgaggtgtttgccgtcagcgaccatcgattgacgcggcaagggaaggtgaaactgaacggcgggcaggattcagcggaggcgaaaagcggtggggcaataatcctcagcccgagcggcagatatcttattgccaccaatcgcggtgccgataaccacctgctggtattaaaaattggcgaggatgggctgccgggcgcaccgacgcgctatgaggccggcggtattgaaccgcgtgcgctcgctttcgatgccggcggtaaccatttctatgtgacgaatgtgtttaccaataccgttatgttgttcgatttcgatgatgagaagggcgagttgcaggccagagggcaggcgacgacggtttctactccgacggatattaagttttttaattaa

SEQ ID NO: 424974 - DNA, 801 bp, Serratia marcescens
atggactatcgaaaagatattcttttacaggtgttagagtatatggagaagaatattatagagggactttccgttgagaaagtgtctattatctcgggttactctaaatggcatttacagcggctgtttaaacattattttggcattacgttagggacttatatcaggcacagaaagctgagccgatccgcagtcttgcttaaacaacatcaagggaacatattggatgtcgccttggcatcgggctttgcctctcagcaatgttacacgcgggcgtttaaacgtttctttggcgaaacgcccaacagctttaggaacagccggggatgggatttttccacccagatcccaccgtatggcactgacaagaaaccctatttttatcacacggtcatgccggatgatatcgagctgttaaagcagtacaaggcattgatcttccattccataaggaaatacagagatgccggtgacattacgcagactaatgagaaatggttaagcaagcatgggaaggcttatcgtgcggaaaacaacagagcgggaaaatggcattcaaacggtaaggagcaagaggtttttcattctgtcttcaatttctacatacccagagggaaatatattgtcatcccctttatgggggagttgtctgagtacattgatttttttgcagatatctatgacgcctatctgccggctatcaatgtcaaggtgagagaaagtttttttatcgaactatatagacatgagaatttacacagtcgcgtcgtcaatgtcgatatacttattcctgtagcgtag

SEQ ID NO: 424975 - DNA, 222 bp, Serratia marcescens
atgaaaaaaaacctgtcgtgcatctcgctgaattatcgaaaagtagcgggggcctctgctcccgtgctcgtcatcgacttttgcaacgagaataacgagcgctacaccctgcgctacaacctgccgccggataccccggaacgcaccgagcggcgggtatctttgctgctgtatctgttgcgcaagcacagatccgcagagatcgacaacctggctgattaa

SEQ ID NO: 424976 - DNA, 972 bp, Serratia marcescens
atgaccactgtctatgaatcaaatcgctttgcgtttcaggtgtcatggggctcgatattggccgggagtgccgtggcgctggtgacttatctgatcttcagcgtgctgggcacggctatcggcgcccaggccgtggatatgatgcaaaagggtaacccgctgagcggctttggcaccggcaccgggatctggctgctggtttcaacgctggcgtcgctggccgcaggcgcgtttgtcgccggccgcaccgcaccgaaccgcggcggcttgcatggcctgctgagctgggcgatcaccaccttgctgaccacctggctggtggtttcattggcgagtggcgtggtggggctggcgggcagcgcggtgggcaaagggctttcgctggcgggcagcggcctggcggcggcggcgccaaacgtgggcgaaggcctcaagcaacagctggataaaaagggcatcagccttgactggggaagcctggaaaaccagttgaacgccacgctcaagcagaccggcaagccggaactggatccggctcggttggaacagaaggccgatagggcgaccgccgacggcaagcaatcggccatggacgcggctgccgatccggcgcgggccgcctccgagctcaagcagtggttcgaccgcgtcaagcagtccggtgagccgacgttgagcgccgccgacaaggatgcgctggtgaatatcgttgcggcgcgcaccggcaaaagccgcgatgaagcgagccaaatcgtcgataactatgctcaggcttaccagcaggcggtgcagaaagtggaaaaactcaaggccgaggcagagcagaaagcgcgtgaagcggccgacgaagcggccaaacagctgtcgcgcgccgcgtggggttcgctgttgatgctgctgttgggcgccgcgctgagcgccggtgtggggcggattgccgaatcaacccgccgcactgtcgcggtaagttga

SEQ ID NO: 424977 - DNA, 1497 bp, Serratia marcescens
atgagccaatccgtcctggccagcgaaacccaccgcggccacctgcagcaaatcatctccggcttgtccgacggcgtgatcctgacggataccgatcgaacgctgctctgggccaacgaggccgcgttggccatgcatggcgtgagtcatcagaaagctctgggggccaatgccggcgagtacgcggcgcggtttgccctgcgctatcgcaacaatcacccgttggcgctggaacagtatccgctgaaccgggttgccgatggcgagaccttcaccgatgtggtggtggaggttcggcaagccgacgatccggacagcttctgggtgcaccgcctgcggagcctgattatcaccgatgcgcaggggcaaccggagctgctggcgctgatcctgagcgacgcgacggagtgggccagcgccgaacagcgctttgaaaaaaccttcaacgccaatccggcgccggcggtcatttgtcggctaagcgacctgcgctacgtcaaggtcaatcaggggttcctcgatatgaccggttaccagcgtgaacaggtcatgggccgttcggtttatgaactcgacgtgttggaacaggcggagcacaaagatctggcgattcagcgcctgggggaaggcgccaccattccgcaaatggaggccgagctgaaactgcccggtggcggaagcaagctggtggtggttgccggccaaccgctggacatcaatgaagacgactgcatgctgttcacttttaccgatctcgaaccccggcgccaggcggaatcggcgctgcgggaaagtgaagagcggttcgccaaggcatttcgcctgagcccggtgccgacgttgctgtgtaccgcgcacgagcggcgcgtgctggacgtcaacgaagccttcacccgcaccaccgagtacgacaccgaagccttgatcggcaagacgatcgatgagatcccgtttattgacgatcccgaggcgaaccgccgtttgtttgccgcgctggaaaaaagcggcaacgtcgaagggctggacatccgggtgcgcaagaaagggagcgagtcgatcgactgcgtggcctcggcggatgccgtcagcatccacaatgcgccctgctacctgctggtgctcatggatattaccgaacgcaaacgctcggagctggagctggtcagcgccatcgaagaagtgatgcaggacgcctcctggttcagccaaaccctgattgaaaaactggccaacgtgaaaagcatcaaccggcccgaccaggccggattgaccgccagcgatctcacgccgcgcgagcgcgatgtgctggagttgatttgcgaggggctgccggacaagaaaatcgcggcgcgtctcaatctggcgctcaacaccattcgcaaccatgtcgcgacggtctattccaagcttggcgtgcacagccgtagcgaagccatcgtctgggccagagaacgcgggctgtttaccggcgggctggccgccaggaacggcaagtag

SEQ ID NO: 424978 - DNA, 252 bp, Serratia marcescens
atgaacagcgaaaaagccaatggcatgatggaaaaagtggcgggcaaggcgcaggaaatggcgggcgacgtcaccggaaacccacgtttgcaggccgaaggcgccacgcgctatgcagcgggcgcgctgcaagaaaaatacggcgatgccctgagctgcgccggcagcatgatgaagaaaaatcccctcgccgcattagccctcattgccggcgctggcctgttgaccggcctgctgctgcgccgccgttga

SEQ ID NO: 424979 - DNA, 930 bp, Serratia marcescens
atgttccccagtaaaaaacattcacagcgggccaccccgctgaccagctatcaattttcccggctgcatactttcgaatgcgtcgcccgtcatttatcttttgcgctggcggcgcaagaattgtcgatcacccccagcgccgtaagccatcgcattaatttgctcgaaaaggagttgggttttctgctattccagcgctttcatcgcagaattaccctgacgccggagggcgagcgcatgcaatgggcgctggacagctccttcaacacgctgaatcaggaaattctggacatcaagaatcgcgagctgacgggcaccctgaccctctactcgcacccgtctctggtgcaatgcctgctgctgccgcgcatcggcgactttatcgcccagcaccccaccattcacctcaacattctgaccgggcaggagatcatcaacctggccaaccgcggcgtggacttggcgatgtacttcggcaaactgccctcgggccggcatctggacgaggcctttatgcaggaatcgatggtgccgatctgtacgccgcagtacgccgccgcacatagcctgtacgatgcgccggaaaatttggcccactgcacgctgctgcacgatcgctacaactccggcgaagacgagtggcaaacctggtcgcaacactttgcgctggggctggataccgacagcaagagcatggagttcgaccgctccgatctcgcggtgctggccgccacgcggcaccttggcgtcgccatggggcggctcaatctggtgcaggactggatcaaaagcggcgagctgatcattccgttcaccgacatgaccgtgccctgcgagcactgctattttacctcgaccatctccgagcggcagtggccgaaaatcctcgcgtttaaacagtggatcatgaaaatcgcccctctggtctga

SEQ ID NO: 424980 - DNA, 303 bp, Serratia marcescens
atggatgttgatgtacaaaactaccaaataagctgcgaaagccaattcattattcagctgcaaatatcccgctatgcctggggcgtgccgctgattacgctcagcgacaacggtgattttaccgtgataagaagccgaggctggtcgaggttggctaatgggatgcaattggaggtttattattttgccaataatgccctgttggcctgggataaaaaccgcaaatatatctcttattcaaaggccggccggctctacgcctgcgcgctgaatttttcttattcccctaaaataacgcgctag

SEQ ID NO: 424981 - DNA, 924 bp, Serratia marcescens
atgaatgcgagaatcggaatcgacggcagggctgccgccacgatggtgatgctatgcgccatctggggaatgcaacaggtggcaatcaaggccgccgagccggatgtgtcggcggtgctgcaaatcgccattcgctcgggtcttgccgcgctggcggtttacctgctggcgcgcggctgcggcgagcgcttcacctgggatcgcgccacgctgtgcgccggtttgagcgtgggggcattgttcgcgctggagttcttttttgtctccgcagggctgcgttacaccagcgcctcgcatatggcggtgtttttgtacaccgcgccgctgttttccgcccttggcctgcattttctccttcctcaggagcgcctgtcgccggtgcagtggctgggcatgctcatcgcctttggcggcgtggtgctggccatatcgggcatggctgagggaagcggcggagccgaacggctgaaaggcgatctctacggcctgctggcggggatcgcctggggagcttctaccctggtgatccgcaccacgcgcctggcggagtgcccggccaaacagacgctgttgtttcagttgacgggcgcctgtgtgctgttgttgttgccggcactggcgacgggaaacctgcatttcaccctgagcccggtggcctggtacagcctgctgttccagaccgtggtggtgtcatttttcagctacctgatctggttttcgctgctgcgccgttatcaggcttcctcgctgggcattctcacctttatgacgccggtattcggcatcctggcgggggtcgtcattctcggcgagccgttgcaaattgagtttgtattgggtgccgtgctgatcgtgctgggattaatcgtggtgagttgttcttatcttatttattttgacagaagggtggcacccaaaatataa

SEQ ID NO: 424982 - DNA, 291 bp, Serratia marcescens
atgagaaacctgttaatgttattagtggggctgttttcactgccggcgatggcggcggagtcgcacgtttgtcattctcaagcctatgattatgcagaggttagcaagcttaggttgtcggatgataccctgttcacctgccgcgacgtggggcgcctgacgatccctgaattagcgcgaaaaggatggaaggtgattcatttggcgcagcaaaccgaatataccgactccgtcgacagcgacggtgaagttattaagctttaccaggaaatcgtggtgtataaagaataa

SEQ ID NO: 424983 - DNA, 1152 bp, Serratia marcescens
atggcaatcaaattgcgcgtattgactcaagcggtggcgctgggtctggcgatcggcagcgcgtcgttcgccgctcaggcggaaatcaccctgctgaagcaggatccgcaggccggcgatccgctcagccgcctgaacttcaccgttggcggcagcatccgtccacagttcaacaacatgacgggcgacggcgacaagggttcctacaagcgtaacggcttcgacggcggcacccgcttccgtttcgcggcggactactacctgttcgacgatatcagctggatcagctactacgagctgggcgtgaacattccggcgctgttcgactgggatcaccactatgccgacggcgcgagaaacaccagccgccgcatgctgtacaccggcctgaaaagcaacacctggggccagatgaccttcggccagcagaacagcgtttactatgacgtggtgggcgccaagaccgatatctgggactacgacatgttggcccaggcgccgggcaacggcatcaacggcgactacgacggctcttaccgttcacgcaagatgctgaagtacaagaaccgcttcggcgatgcggacgtttatgcctcgtacctgttcagcgacagcgactacctgccgggcaacggcctgcgctataagcgcaaaggcggcggctcactgggcgtggactaccacatcacgcaggatctgacctggggcaccgcctggaactacacccgcgccgaaatgcgcaatccgtccaccagcggcagcaagagctacgatcagcacatcgtcggcaccgccctcagctggaaaccggacaactggacgctgactttcggcggcggttactaccacgacttcctgaccaccaagaaaaccgacatcaacaattacttcgccggcgatgcctggggtatcgaatacctggccggttataccgtgccggtgggccagtacgcggtgaaatcggtaatgccgtactttatgggcgatcgcctggaatacgtcaccggccgcaactaccagcgcatcgacaacggcctcggggtgaccgtacagtttgactacggcttccgcgttgacgtagagcacgtgctgacatcgagcaccgacaacctcggcgatatgaccgtggtgcgtctgcgctacgatttctga

SEQ ID NO: 424984 - DNA, 1089 bp, Serratia marcescens
atgcgtcacctggttgcgcttttaccgctgattaccttgcttgctgcctgtagcagcacgccgaaacccagtaccaccgctacgccgcagggcaccccggtaaagggcggctttttgctgagcccggcgcacagcggcgcgccgctgggtggagatttcgccaataacccgaataccgcacgctttatcgataagatggtgcgggaacatggctttgatcgacagcagctgcacgacgtgctggcgcaggctcggcgcctggattcggtgctgcggctgatggacaggcaggcgccgaaaccgtctacccaggggcctaccggcccgaacggttcctggctgcgctaccgcaacaagttcatcacgccggataacgtgcaaaacggcgtggtgttctggaatcaatatcaggatgcgctgcagcgggcctggcaggtgtacggcgtgccgccggagatcattgtggggattatcggcgtggagacccgctggggtcgcgtaatgggtaaaacccgcattatcgatgcgctggcgacgctggccttcaactacccgcgccgcgccgattacttcgccggcgagctggaaaccttcctgctgatgtcgcgtaccgagggcgacgatccgctcgaactgcgcggctccttcgccggcgcgatgggctatgggcagttcatgccgtcttccttcaagagctatgcggtcgacttcaacggcgatggtcatatcaacctgtgggatccggtcgatgccatcggtagcgtggccaattacttcaaggcgcacggttggtccaaaggcgagccggtcgcgattcaggccaacggccaggcgccgggattggaaaacggcttcaagacccgctactcggtcgctgcgctggcggaagccggcctaagcccgcagggttcgctcggcgacaatcaggaagccagcctgctgcggctggacgtcggcaccggctaccagtattggtacggcctgccgaacttctacgtcatcacccgctataaccacagcacccactacgccatggcggtatggcagctgggcgaagcggtagggcgttcggcgcgcggcggcttctga

SEQ ID NO: 424985 - DNA, 456 bp, Serratia marcescens
atggaatctctcggacaactcgccaaagacctataccgtgggcgcatctcgcgcaaaccctttattttctcgctggcgatcttcgccgttggcatcgtgctgctgtcgtttctgtcgacctatctggacaaaaaccattttcgcgcccatgcgcacagcgataccgaggaattcgtctcggtgctgctgtatctgctgtgcattatggtctgggcgctgttctgtttcggcctggtggcgtggttcatggccaaaaccgcgttccggctcaacgatatcggcctgcccggctgggcgctggccgcagcgtgctatgtttgctcggtgctcaacaactactcccccggcccggtggcgcgctggctgccgcttttcagcctggccgtcatgatctgcgctctgctgttgccgccgggcgggctgcggcgcaggccgggcggcgacgctgacgactaa

SEQ ID NO: 424986 - DNA, 441 bp, Serratia marcescens
atgacggacgtcctgatttattccgaacgcggcctgttgccgcgcgtggtagacagcctgctgacgcttttcgcctggtgcggcttcctttatctgttcagccgcggcctgatgtcggtgatggatcagcacggggtgggctccgccctgtcgctgctggaagtgatctcgctgtacatcattgtggcgttgttcaatgccgtcacgctgatcgcctgggccaaatacaaccagtatttctcccgtcgcagggcggccgaccgctggcggaaacagcaacagaacacccacatcggctatatcacgcccgagctgacccggcagctgcggcgtttgccgatcgccgtggtgtcccataacagcggcggcggcatcagccaggtcagcggcaggctgacggcggccgaaccggccgcgaacaaggtggtgcagctgcgttag

SEQ ID NO: 424987 - DNA, 1335 bp, Serratia marcescens
atgaccgatcgtttaattgccttattcatcctgtgtctggtgttgagcgtgcctttcggcatcgtcctgctgtttaccggcgaagtgctgctcaacttcgtgtttttctggccgctgttcatgtccggtatctggatcgccggcggcatctatttctggctgcaccgcgagcgccactggcgctggagcccggacatgcccgcgccggtgctgccgggcaacccgtcgatcagcgtgctgatcccctgtttcaacgaagggttgaacgcgcgtgaaaccatttcggcagcgatggcgcagcgctatgaaaatatcgaagtgatcgccatcaacgacggctccagcgatgacaccgccgaggtgctggatcagttgacgctggagttcccccggctgcgggtgatccatctggcgcaaaatcagggcaaagcgatcgcgctgcaggcgggcgcggcggcggcgcgcagcgagtatctggtgtgcatcgacggtgatgcgctgctggatcgtgatgcggcggcctatttggtggcgccgctgttggccaatccgcacgtcggcgcggtgaccggcaacccgcgcatccgcacgcgctccaccctgatcggccgcatccaggtcggtgagttttcgtcgatcatcggccttatcaagcgcacgcagcgcgtttatggccgcctgttcaccatctccggcgtggtggccgcgtttcgtaagcaagcgcttaccgatgtcggttactggagccaggacatgatcaccgaagacatcgacatcagctggaaactgcagctcaagcactgggctatcttcttcgaaccgcgggcgctgtgctggatcctgatgccggagaccctgcgcgggctgtggaagcagcgcctgcgctgggcgcagggcggcgccgaggtgtttttaaagaatctgcgcaacctgtgggcctgggagcaccggcatatgtggctgctgttcgccgagtattgcctctccacgttgtgggcgttcacttacctggtcagcgtgctgattttcctggtcgggctggcggtgccgctgccggagggcatccgcattcactcgttgctgacgccggcgtttaccggcctggtgctgggcgtggtgtgcctgctgcagttcaccgtcagcctgctgctggagaagcgttatgagaagggcttcggccgctcgctgttctggatcatctggtatccgctggtgtattggctgctcagcctgctgaccacgctggtggcgttttccaaagtgatgttgaaagctcggcgcgggcgtgcgcgctggatcagccccgaccggggcattgggaggatcaaagaatga

SEQ ID NO: 424988 - DNA, 2007 bp, Serratia marcescens
atgcttattcgatcctcgcttttcgtgttggccgcgttgctgaccaccacctgcagccaggcggacgtgccgcgcttcacgccgccggcggagcggcccgtggggccgatggaacgcccgtggccggccaaccgttacgcggtgctggcgtatcacgacgtggaagacggcgcggcggaccagcgctacatgtcggtgcgcaccagcgcgctcaatgaacagttcgcctggctgaagcaaaacggctaccagccggtgtcggtcgagcagatcctgcaggcgcaaaacggcggcccggcgttgccgaacaaggcggtgctgctgaccttcgacgacggctaccgcagcttctacagccgggtttttccgctgctgaaggcctacaactggccggcggtgttggcgccggtcggcgtctggctggatgcgccggccgacaagccggtcgatttcggcggcctgatgacgccgcgcgatcgcttcctcacctggcagcaggtgcgggaagtgtcggactccggcttggtggagatcggcgcgcacacctacgcttcgcattacggcggcatcgccaacccgcagggcaataccgaaccggcggtcgccaatcggttgtacgacgccaaacagggccgctacgaaagcgaggcggaatatcgccaacgcatcgagaaagacgtggcgttgatcacccagcgcatcaccgcagccaccggcaaggcgccgcgcgtctgggtctggccgtacggcgcggccggcggcgtggcgctggacatcgcgcgcaagcacggttaccgcatggcgctgacgctggagaacgggctggcagacgtcaacgcgcctgagaacgtgccgcgcatgctggtggccggcaacccgtcgctgacgagcttcgcccagcagctgacgcagatacagaaccggcagatcatgcgggtggcgcacgtcgatctcgactacctttacgatcccgatccgcagcagcaggccaaaaacctcgacaagctgatccagcgcatctacgacctgcgcatcaataccgttttcctgcaggcgttcgccgatccaaaaggcgacggcaacgtgcgcgagctctatttccccaaccgctggctgccgatgaaggcagacctgttcaaccgggtctcctggcagctctcttcgcgcaccggcgtggccgtgtatgcctggatgccggtgttggcgttcgagctgggatctgacgtgccgcgcgtacagcgcctcgatccgcaaaacgggcagctgtcggtagacgacaagcagtaccgccgcctgtcgccgttcagcccggtggcgcgccagcgcatcggtgagatctacgaggatctggcggctcacgccaccttcaaagggatcctgttccacgacgatgccctgctgtcggacttcgaggacgccggccccgacgccgctgcggcctaccgccaggccggcttcgccgattcggtggcggcgatacgccaggatccgcaggcgatggcgcgctggacgcgcttcaagagccgggcgctgatcgaatttacccagtcgctgaccgagcgggtgcgggcgatccgcggcccgcaggtgcaaaccgcgcgcaatatctatgcgatgccggtgctcgatcccgccagcgaggcctggtttggccagaatctggcggatttcctgcaggcctacgactgggtggcgccgatggcgatgccgctgatggaaaacgtgccgcgcgccgacagcggccgctggctggatcaactggtgggcaaagtggccgcttaccccggcgcgctcgataaaacggtgtttgagttgcaggccgtcgactggcgcaaggagcgccggataagcctggatgacggtcaactgctggccgaatggatgcgtcgcctgcagcgcaatggcgctcagagctttggttattaccccgacaacttcctcgacgatcggcctaagctggatgccgttcgcccggtgttgtcctcagcctggttcccactgccatga

SEQ ID NO: 424989 - DNA, 2457 bp, Serratia marcescens
gtgcctaaagttaactcgcgttcattacgctttaccgaacgccacgtcaccaaatatgcggcgtcattgctgtttatcggtttatccctgccggccgccgcgctggcggatgagcgctatgacgcgctgatccgtcaggccagatcgggcgataccgcgccggtgttggcgtatttatcgcagcggcgcgctcgggaggggttgagcctgcagcagcgagccgattatatccaggtggccggttgggccggccatgacgaagaggtggtcgcactctggcgtgccgacggcgccgcgctgcagcgggatagcgccagcctggcgacggcggcccgcgcctaccgcaatgttaagcagtggcaaccatcgctgcgcctgtggcgggcggcgttgcagctcgatcccgccgacggcggcctgcagcgtggctacgtgatgacgctggcggatgccgggcgggatgcgcaggcgcaaacggaagcggccaaagcggagaagttactggaaccggcgacgtggtatctgacgcgcgcctatgtggatcaggccgccggccgcagctgggcggcgttggaaaacgtgacccgcgcccgtacgctggcgccgtccgacgccggcattcaggcttattacgtgacgctgctggcggcgaaccgggtcgcggatccggcgctgcgtgcaagccaggggctggcattgccgcccgcgcagcagcggcgcctgcaggcggatgaagccgccgaactggtgcggctgtcgtttatcgatgctcgtggcgaacaggaacgcttcgtcatcgccgaccgtgcgctggcgcgctatgaccaactgctgacgcagtggcggccgctgccggaggcgcaggacagctaccaacaggcgcgtatcgatcgcctgggcgcgctgctggcgcgttatcgcatggccgacgtggtgagcgagtatcaaaccttgcaggcggaaaggcgcacggtgccggattatgcccagcgctgggcggcgtccgcctacctctacctgcagcagccggacaaggcgcaggccattttcagccgcttgaacgccgccgcgccgcaggcggtgaccgccgaagacgaaaccgatctgttttacgcgcaggcggaggacgaacgcatcgatcgggcggcgttgctggcgcagcgcgtcagccagcgctatccctacgcgacccacctgtaccagctgccgacgctggcctacaacgatgactggctggtcggccaatcgctgctggcgcagtcacgggtttatcaacgcgatctggccgaggccgaacggcagttgacccatctggcgcgcacggcgccgggcaatcaggggctgcgcatctcattggccagcgtttatttggcgcgcggctggccgcgccgcgccgaggacgagttgaagcaggtggaagggctggagccgcgcagcctgccgttggagatccagcagggctatgtcgcgcaggaattgcaggagtggcggcagctggatttgctggccgacgacgtcatccagcgcgcgccggaaagcgtcgccgctcagcagctcgagcgttcgcgtcgcattcaccacatgtctgaactgcgcatcagcggcaatcagggcatcgattccgacgggccggtcagcggcagccacgatttcggcattcacgccgcgctctattcaccgccgatcgacgacaactggcggctgttcaccggctggggattcaacaccggccagttcgacgagggcaagggcatcaaccgcgatctcagcgccggcgccgagtggcgctcgcgcgatctgtggctggaagccgaggtggccaaccgcaactacggccacggcaatgagctcggcctgcgcctttcatcctggtatgacctgaatgatcaatggcgcctcggcggttcggtggcgcgcctgtcggccgagacgccgctgcgcgcgttgaccaacggcatcagcgccaacggcggcaacctgtggctgcgttggcagcagaacgaaagccgcgagctgcgcgccagcgtggcgccttcgcacttctcggacggcaacaaccggctggaatacggcctggaagggcggcaacggctgctcgccggcgcccgttatcggctggacatgaacctgacgctgtccggcagccgcaacagccaggagaacgtgccgtattacaacccgaagcgcgacttcacgctgctgccgtcgttaacgctcgatcacaccctgtatcgccattatcagaccgagtggagccagcagtttcaggccggtgccggcagctattggcagcgggactatgcgcgcaagccgatcacccagctgggttacggccagcgcatcagctggaacggggtgttggacgccggcgcgatgctgcagtttgagaagcatccttacgacggcaagcgcgagcggaacatcggcgtgacgtttgatctgaattatcgtttttaa

SEQ ID NO: 424990 - DNA, 438 bp, Serratia marcescens
atgtacagccactaccccgcccattacaccttcgatcgcgatagcgacgcctggcagatcggttttcacgacttccccgagtggcaatctgcctgctataaacgcgaagacatcgagctggaagcgcaggaaagcctgctggccgccatcgccgccgcgatggacgaagggctgcccctgcccgccccttcccctgtgcaaaccgatgatctgagagtacatctgccggcgctggtggcgctgaagatcgagctgcacaacgccatgctgcgcaaaaacaccggcaaagcggcgctggcgcgcaagctgggattcaacggcgggcaaatggagcggttgctggatatcggctacgcctcgaaggttgaggcgttggagcaggctctgtatctgctgggctacgaagtgcgcgtgacaataagcgaagtttgccaatag

SEQ ID NO: 424991 - DNA, 525 bp, Serratia marcescens
atgagtaaccgctacgcgcgatcgcaaatcgttttacattggctgacgctgctgctggtgatcctcacctattcggcgatgttgctgaaggattcgatgccggaggcgtgggggccggtggtcaaaaatctgcactttaatttcggggtatcggtctttgccctgatgctgattcggttggcggtgcgcgctttccgcgctgcgccgccgatcacgcccccgctggaggaatggcaggaagtgggcgccaagatcttccattggctgctgtacgtggtcttcctgatgttgccgctgctgggcatgttaaccctggcctacggcggaaaatcgtggtctttgctgggctggccggtgccgcagtggatgacgccggatccggtgatgcgccggctggtcaaaacggtgcatgagacgctggcaaacgttggctactttatcattggcgcgcatgcgttggcggcgctgtatcatcactatctgcgcaaggacgacaccctgcgccgcatgatgccgggcaaatga

SEQ ID NO: 424992 - DNA, 1230 bp, Serratia marcescens
atggctgataacagtccacagcgccgttttacgcgcattgaacgtcttcccccttacgtattcaacatcaccgccgaactgaagatggccgcgcgccgtcgcggcgaggatattatcgacttcagcatgggtaaccccgacggcccgacgccgccgcacatcgtggaaaaactgtgcgccgtcgcccagcgcgacgacacccacggttattccacctcgcgcggcattccgcgcctgcgtcgcgccatttcgcgctggtatgccgaccgttatcaggtggagatcgatccggaaagcgaagccatcgtcactatcggttcgaaagaggggctggcgcacctgatgctggcgaccctcgatcacggcgataccgtgctggtgccgaaccccagctacccgatccacatttacggcgcggtgatcgccggcgcccaggtgcgttcggtgccgctggtggacggcgtggatttcttcggtgagctggagcgcgccattcgggaaaccattccgcgcccgaaaatgatgatcctcggcttcccgtccaacccgaccgcgcagtgcgtggagctggatttcttcgagcgggtggtggcgctggccaagcagtacaacgtgctggtgatccacgatctggcctatgccgatatcgtctatgacggctggcaagcgccgtcgatcatgcaggtgccgggggcgaaagacattgcggtggagttcttcaccctgtcgaaaagctacaacatggccggctggcgcatcggtttcatggtcggcaaccccgagctggtcagcgcgctggcgcgcatcaagagctatcacgactacggcacctttacgccgctgcaggtggcggccatcgccgcgctggagggcgatcagcagtgcgtgcgcgatatcgccgagcagtatcggcagcgccgcaacgtgttggtgaagggactgcatgaggccggctggatggtggaaaatcctaaggcgtcgatgtacgtgtgggcgaaaattcccgagccttatgcccacctcggttcgctggagttcgccaaacgcctgctggcggaagccaaggtctgcgtctcgccgggcatcggcttcggcgactacggcgatacccacgtgcgcttcgcgctgatcgagaaccaggaccgtatccgccaggcggtgcgcggcatcaaggcgatgttccgcgcggacgggctgctgaagccggggaaaggcggcagcgccaaataa

SEQ ID NO: 424993 - DNA, 540 bp, Serratia marcescens
atgaagctggtcactgaacgtctgcacttacagtcgataaccgccgaggattggccgctgtttttgcgcctgtaccaagatcccgaggtgatccgttacatctccgatccgcgcagcgaagcggagatccgcgcccggttcgaggagcggttgccggcctgggacaaacacggtgagcagtggctgtgcctggtgatgcgtgagaagcacagcggggaggcggtgggcgttaccggctttcgcccgcagtgggtgccgtatcggcaggcggaagtgggatacgggagtttgcctgccggccagggcaagggctatggcaaggagtcgctgcgggcggtgctggattttgcagtgaacgcctgcggctttcacaagctgaccgccaccgtgaccgcgggcaaccttgcttcgcgcggcctgctggagtcgtgcggttttcagctggaaggcacgctgcgcgacaactaccgtctggcggggcagtggtgcgacgactggctgttcgggctgctggcggcggagtttcagggcggcaaataa

SEQ ID NO: 424994 - DNA, 1245 bp, Serratia marcescens
atggcctctttagtcatcgacgatattccgcagacgatcgttaacgtcaagcgccagctgcgccaggcattgccgaactaccgcgacgtatttctggcgctggaagagaacatccgcggccaggtcgaacagatccggtgcgagctggccgccggccacaatccggtgccgcagatcgacgcggaagatatcctgcagcagcgcgtcagcgagcagcagatagcgctgatcaaacagcgcggcgcctgcgccattcgcggcgtgtttccccgcgccaaggccgagggctggaaccgggaaatcggcgactacctcgagcgcaacaacttcgtcgagcggtcgaaaaacgccgccgaagacaactatttcggcaagctggccgccagcaaaccgcagatctacggcatctattggtcgaaaccgcaggtcgaggcgcggcaggatgcgcgcatgcatgcggtgcaggtgttcctcaatagcctgtgggccaccgagagcaacggcaaacagcatttcgatccgacccgcgtcgccacctatgccgatcgtacccgccgccgcccgccgaactcctcgtcgctgggtctgtcgccgcacgtcgacagcggcaccatcgagcgctggctggacgaaaacttccgctatgtgtatcgccacgttttctccggcgactggcagcagtacgatcccttcgccgccgacggccgcaccgaggtgcgcgagatagcctcgccggcggtctgttcgatgttccgcaccttccagggttggacggcgctgacgccgcagcgcaccaatgccggcacgctgaacctggtgccgatcgccaatgccatggcctatgtgctgctgcgcgcgctgcaggacgacgtcgccgacgacgatttgtgcgatgcggcgccgggccgcgcgctgtcgatctcggaaaaatggcatccccttttattaagtgggatttcccctattcccgatctggagccgggcgacacggtattttggcactgcgacgtgatccacgcggtggagaacgagcataacggcgagttcgacagcaacgtgatgtacatcgccgccgcgccgggctgcacgaaaaacgacgcctatctgcagcgccagctgccgagctttatcgacggcagaacgccgccggacttcgcccccgacgatttcgaggtggatttcgacggccgcgccaccgtcgacctgctgacgccgctgggcaaaacgcagctcggcatgggctga

SEQ ID NO: 424995 - DNA, 1710 bp, Serratia marcescens
gtgcaccctttttttgaaatgctgttggcggtgtttgatcgcgccgcgctgatgttgatctgtctgtttttcctgacccgcacccggctgttccgccaactgctgcaaaaagaagaccatacgccgctcgagctcggcatcgtcacggcgatcttctcgctgttcgcgctgttcagcacctactccggcatcaacgtcgaagggtcgctggtcaacgtgcgcgtcatcgccatcatggccggcggcatcctgttcggcccctgggtgggcatcgtcaccggcatcgtcgccggggtgcaccgctatctgatcgacatcggcggcatcacctcggtgccttgtcttatcaccagcatcatcgccggcatcagcgccggctacatcaacctcaaggtgaaaaaagagcagcgctggcgcgccggcatcgtcggcggcatgctgtgcgaatccctcaccatgctgctgatcgtgctgtgggccaagccgaccgagcttgggttggacatcgtgtcgcagattgccctgccgatgatcctcggcacggtgtgcatcggcctgatcgtgctgctggtgcagagcgtcgaggatgaaaaagaggtgatcgccgcgcgccaggccaagctggcgctggatatcgcccacaagacgctgccctatttccgcaacatcaacagcgaatcgctggccaccatctgcgatatcatccgccaggacatccgcgccgacgcggtggcgatcaccgatacccaccaggtgctggcctacgtcggcgtagggcgcgaagcctacccgatcggccgcgaagggctgagccgcgtcacccgcgaaagcattcgccacggcaaaatcatcatcaagaacaacctggaaaacccggccgcgccgcagatccattcgcagctggtggtgccgctgtgggaaaaaggcgaagtgaccggcgcgctgaaaatttactactgccacgcccaccagatcaccaacacgctgaaggtaatggcggtcgggctgtcgcagatcatctccacgcagatcgaggtttcccgcatcgagcatctgcgccagatggcggacaaagccgaaatgcgcgcgctgcagagcaagatcaacccgcacttcctgttcaacgcgctgaacgccatctcttcctctatccgcctgaatccggacaccgcgcgccagctgatcatcaatctgtcgcgctacctgcgctacaacctggagctgaacgacgaactgatcgatatccgcaaggagctgcatcagattcaggactatatcgccatcgaacaggcgcgcttcggcgccaagctgacggtgatttacgacatcgacgacgacgtctcggtgcgcattcccagcctgctgatccagccgctggtggaaaacgccatcgtgcacggcatccagccctgcaagggtaaaggggtggtggtgatcgcggtgaaagatcagggcgatcgggtgaagatttcggtgaaggataccggccacggcatcaatcaggaaaccatcgaccgggtggcgcgcaacgagatgccgggccacaatatcggcctgctcaacgtgcaccaccgcgtgtcgctgctgtatggtgaagggctgcatatccgccgcctggagccgggcaccgaaatcgcgttctacatcagcaaaaacggcggcaagctgcatcaggaaccgagcgcgccgccggtcggggaggcctcatga

SEQ ID NO: 424996 - DNA, 735 bp, Serratia marcescens
atgaaagccatcatcgtggaagacgaactcctcgcgcaggaagaactcagctacctgatcaagaaacacagcaatatcgatatcgtcgccagcttcgaggacggcctcgacgtcctgaaatacctgcaaacccaccaggtcgacgccattttcctcgacatcaatatcccgtcgctggacggcgtgctgctggcgcaaaacatcagcaagttcgcgcatcgcccgtcgatcgtgttcatcaccgcctataaagagcacgcggtggaagcgttcgagatcgaggcgttcgactatatcctcaagccctatcacgaagcgcgcatcgtcaccatgctgcaaaagctggaggcgctgcatcagcgccccgccggcgcggcggaaccggccagcgcgccgagccgcggcagccacagcatcaacctgatcaaagacgagcggatcatcgttaccgacatcaacgacatctactacgccgccgccgatgaaaaggtgacgcgggtctatacccgccgggaagagttcgtgatgccgatgaacatcaccgagttttacggccggctgccggaagcgcatttcttccgctgccatcgctcttactgcgttaacctggcgaagatccgcgagatcgtgccctggttcaacaatacctacattctgcggctgagcgatcttgagtttgaagtgccggtcagccgcagcaaggtgaaagagtttcgccagctgatgcgcctgtaa

SEQ ID NO: 424997 - DNA, 333 bp, Serratia marcescens
atgaaaaaaacgctgttgttactggccgcgctgctggcgctgccgctggcgagccacgccgacgtgtccatcggcgtgaacgtgccgggcctgtcgttgcatatcggcgatcgcgataatcgcggccactactgggacggctatcgctggcgcgatccgcgctggtgggccgatcaccaccggtatgaacgcccgcgcgggtactattatggcccgccgccacgggtgatttactacgggccgccgcggcgcgactggcgagaccggccgcattaccgcatgccgccaccgccgccgcccggctattactaccgtccgggcccgcgctggtaa

SEQ ID NO: 424998 - DNA, 1230 bp, Serratia marcescens
atgaacaccaaaccggcaaatcgcagcttaatcgttctcggcaccatcatctgtcagatgggcctgggcaccatctacacctggagcctgttcaaccagccgctggtcgacaagttccactggggactggcggacgtcgccaccaccttctccatcaccagcttcttcctggccttcgccacgctgttcgccggcaagctgcaagagcgcttcggcatccgcaacctgacgctgtgttccggcattctggtcggcctgggcctgatcgccagcgcccacgtcagctcgcttgacatgatctacctgctggccggcgtggtggtgggctttgcggtcggtatcgcctacatctccactctgtccaacctgattaagtggttcccggccaataaaggcctgatttccggcatctccgtcggcgcattcggcagcggcagcctgctgttcaaatacgtcaacgccgccctgatcgccgacgtcggcgtttccggcgccttcttctactggggtgccatcgtgatgggtctgatcgtcgtcggttccctgctgctgaaagagccggtgctggcgaccaacgccgcgcagcaaggcgccaacggtctgggcaacgacttcagcgtgcgccagatgctggccaccaaagaagcctacctgctgttcaccatcttcttcgcggcctgcatgagcggtctgtacctcatcggcatcgtgaaagacatgggcgttcaactggccgggatggatttggccaccgccgccaacaccgtgtccgccgtcgccatcttcaacaccgccggccgcatcatcctgggtacgctgtccgataaagtgggccgcatgcgcgtcatcagcttcaccatgctggttaccgtgctggcgattgtcgcgctgagcttcatgaccctgaaccacacgctgttcttcatctgcgtcggcgcggtggccttctgcttcggcggcaacatcaccgtgttcccggcgattgtcggcgacttcttcggcctgaaaaaccacagcaaaaactacggcatcatctaccagggcttcggcctgggcgcgctggccggttcgttcgtcgccaaatacttcggcggcttccacgccaccttcatggtgattggcgtcctgtccgccgcctccctgctgattacgctgttcatcaaagcgccgaaagcggtggaagcggaaacggcagaaaccgcccagacggcggagttggccaaagcctga

SEQ ID NO: 424999 - DNA, 963 bp, Serratia marcescens
atgacctatgccctcgtgggtgatgttggcggcaccaatgcccgcctggcgttgtgcactgttgcgacgggtgaaattacccaggcgaaaacctattccggcctggagttcgacagcctggaggcggtgatccgccaatacctgaaagcgtgcgatatcgaggtgcaggacgcctgtatcgcgatcgcctgcccggtgaccgaagactgggtggcgatgaccaaccacagctgggcgttctcgatcaaagaaatgaaggccagcctggggctgagccacctggaagtgatcaacgatttcaccgccgtctcgatggcgatcccgatgctttcgccggatgacgtgctgcagtttggcggcggcgatgcgcagccgggcaaaccgatcgcggtgtacggcgccggcacagggctgggcgtcgcccacctggtgcacgtcgatcgccgctgggtcagcctgccgggcgagggcggccatgtcgatttcgcgccgaacagcgaagaagaggacatcattctggaggtgctgcgcggtgaagtggggcacgtttccgccgagcgcgtgctatccgggccgggtctggtcaatctgtatcgcgccatcgtcaaggcggacaaccgcctgccggaaaaatgggagccgaaggacatcaccgagcgggcgctggcagacagctgtatcgattgccgccgcgcgctgtcgctgttttgcgtgatcatggggcgcttcggcggcaacctggcgctgaatctgggcacctttggcggcgtgtacatcgccggcggcatcgtgccgcgctttatggaattcttcaaggcctcgggcttccgcgccgccttcgaagacaaagggcgtttccgtgactatgtgcgcgacatcccggtgttcatgataacgcacggccagccgggcctgctgggtgccggcgcgcatctgcgccagacgctgggcatgcagctgtaa

SEQ ID NO: 425000 - DNA, 1248 bp, Serratia marcescens
atgctgcatccgcgcgccaatgccatgttggcctttgctttgcctgcgctgattatcggttccgcttccagtctggtgctgctgctggtgatgaaagtcgccgccgcgctgcagcaattactgtgggtgacgctgcccgatgcgctgagcctggatgcccagtcgccctggtggccggtcgcgatgctgacgctgaccggcgtggcggtgggccttatcgtgcgttatatgccgggccacgccgggccggacccggcgacggaatcgctgatcggcatgccgctgccgctctccgccctgccggggctggggttggcgctgatcgtcggcctggccggcggcgtcagcctggggccggagaacccgatcaccgccatcaatatcgcgctggtagcggccgccggtgcgcgcctgctgccgaaggtgccgcgcatggactggatcatcctggcggctgcgggcaccatcggcgcgatgttcggcacgccggtcgccgccgcgctgatcttctcgcaaaccctggcgggcaataacgaaacgccgctgtgggatcgcctgttcgccccgctggtggccgccgccgccggcgcggtcaccacccagatgttcttcgtgcccaatttcgccctacagctcgacgcctacgacgtgacgcggctgccggacatcttcagcggcgccatcgtggcgctgatcgccatcgcgctcggcatggtggcgctgtggtgcttcccgcacgttcaccgcctgttccattcgatgaagaatccggtgttgatgttagggctggggggttttgtgctgggcctgctggcgctggtgggcggagagattaccctgttcaaagggctggatgaaatgaagcgcctcgcgcaagacgacggctattcggtgccggcgctgttggccattaccctgaccaagctggcggcgctggtgatcgccgccgccagcggctttcgcggcgggcgcatcttcccggcggtgttcgtcggcgtggcgctggggctgatgctgcaccagcacgttccggcggtgccggcggcgatcaccgtctcctgcgccatcatggggctggtgctggtggtgacgcgcgacggctggctcagcctgttcatggcggtggcggtggtgccggatctgcacctgctgccggtcttgtgcatcgtgatgctgcccgcctggctggcgctggcgggcaaaccgctgatgctggtgaaccgccggcaaccgccgcacgacgattag

SEQ ID NO: 425001 - DNA, 693 bp, Serratia marcescens
atgaaagtgttgggcttgctgggtggcatgagctgggaatccaccattccgtattaccgcaccatcaacgagcaggtaaaggcgcgcctcggcgggctgcattcggccaaaatcgtgctctacagcgtcgattttcaggagatcgagcgcttgcagcaccagggcgattgggacggcgccggccgattgctggccgccgccgcggtggcgttgcgcgccgccggcgccgaagccatcgtgatctgcaccaacaccatgcataaggtggcggaggcggtcgagcaggccagcggcctgccgctgatccacatcgccgacgccacggcgctgcaggtgcgggaaaaaaacattcgccgcgtcgggctgctgggcacgcgctttaccatggagcagaccttctaccgtggccgcctgcaggaattgcacggcattgaggtggtgacgccggtcagcgccgatcgcgacatcgtacaccgcatcatctatgacgaactgtgcctcggtaaaattcgcgacgcctcgcgcgacgagtatcgccggatcatcagcgatctggagcagcagggcgcgcaggggattattttcggctgcaccgagatagggttgttggtgagcgagcaggatgcctcggtgccggtgttcgacaccaccgcgatccacgcccgcgccgccgcggcgttcgcgctggcctaa

SEQ ID NO: 425002 - DNA, 453 bp, Serratia marcescens
atgcaactgcaaaacaagtctctcattgaacgtatcgtccacgccgtcggtttcgaggtgattgccgtgatgatcgtttctccgctgggggcatggctgcttaatcgttcgatggtgcaaatcggcgcattggcggtggccttggcgaccatcgccatggtctggaatatggtttacaacacggtgttcgaccgtctgtggccggtcagccgggtcgtccgcaacctgaaggtgcgtgtgctgcacgccgtcggctttgaagccggttttatcctgatcggcgtgccgatcgccgcctggatgctgaatatttccgtattgcaggcctttatgctggagatcggtttcttcctgttcttcctgccgtacaccatggcctataactggctgtacgacacgctgcgccagcgctggttcgaagcgcgccagccgatcaattccggcgctgaataa

SEQ ID NO: 425003 - DNA, 870 bp, Serratia marcescens
atgcactattccccggaagcgctgcacgcgtttgtcgaagccgccgccctcggctcgttttccgccgccgcgcgcaagctgcgcaaaagccaatccaccatcagcaccgccatcgccaatctggaggccgacctggcattgacgctgttcgatcgcagcgcgcgccagccggtgctcaccgccgccggccgcaaagtgctggggcatgtgcaggcgatcctcgccgccagcgagcggctcgacgccctgagcattcaactggcgggcgaggtcgaaccgcgcctgagcatggtgttctccgatacctatcaacccaagcatcacgatcaattgatgcaacaattcgaactgcgttacccggagattgagctggagtggatgatcgccgaagatggcgacgttatcgatctgctgcaaagcggccgcgcgcatttgggcatggtggaagtgcaaaaaagctacccgccggatatcgccttctctcgtttgccggaacaaaccgacatggggctgttcgtcgcccaccagcatccgctggcgcaggccgccgcgccgacgccggagcagttgtccagcacccgacagctgatcctgaacacctacaccggcgccgaagcggccagacaaggcggcctggtttggtcggcgcccagctatctgctgctgctggagatggcggaacaggggttcggctgggcggtattgccgcactggctggtgcaacaatacggccacaatatgctgaccgagctgcggccgcgcggctggccgaaaatgatctcggtggatgcggtatggtcaaaactgaccccgccgggcccggcggggttctgggtgctgaagcgcctgctgggcgattccctgccttaa

SEQ ID NO: 425004 - DNA, 1662 bp, Serratia marcescens
atgactcagacctatacggtggccgattatctgctcgatcgtctggcccaaatcggcatccgtcatttcttcggcgtgccgggggattacaacctgcaattcctcgatcacgtcctcgcccatccgcaaatcacctgggtaggctgcgccaacgaactgaacgccgcctacgccgccgacggctatgcgcgctgcaaaccggcggccgcgctgctcaccacctttggcgtcggcgagctgagcgcgttgaacggggtggccggcagctacgccgaatacctgccggtgatccacgtggtcggcacgccggcgcagcgcgctcagcgcgccggtgatttgctgcaccattcgctgggggatggcgacttcacccacttcgcccgcatagccaaagaggtgaccgtcgcgcaggccgacctgaccgccgacaacgcagcagaggagatcgaccgcctgatcggcgtcgccttgctggaacatcgccctgtttacctgatgttgcccagcgacgtcgcacaggcgccgctgccgagtaaaccggcgccgctgatgctgcgccaggccaaactgtcgcgcagcgcattgcaggcgtttatcgccgcggcgcgcgaaaagctgctgtcggcgcggcgggtatcgctgctggcggacttcctggccgatcgcttcggtgccgaagcggcgctggacgagtggctgcaggaggtcgacattccgcacgctacgctgctgctcggcaaaggcgtgctggatgagaaccgcgccggttttgtcggtacctactgcggcggtgccagcgatccggcggtgaaacagcttatcgaaaacgccgatgtggtgatcaacgtcggcgtgcgtttgaccgacaccattaccgctggtttcacgcatcatctgccggtggaaaaatgtatcgacattcagccgttcgaagcctgggtcgggcggcagcgctttagccgcattccgatgcgcgaggcggtgcaggcgctgcatcgcctgagcctgtcgctggcgtcgcgttggccgttgccgccgatcgtccgcccggcgctgccggaaggcgatggagaagggctggatcagcacgccttctggcggcagatgcaggatttcctgcggcccggggatatcgtgctggccgatcagggcaccgcctgttttggtgcggcggcgctgacgttgccgcgcggctgccggttgatcgtgcagtcgctctggggatcgatcggctataccctgccggcgacgttcggcgtgcagaccgccgaaccgcagcgccgggcagtgctgctgattggcgacggcgccgcgcagctgaccgtgcaggagctgggttcgatgttgcgcgacggacttaaaccggtgatcttcgtgctgaataatcagggatataccgtcgagcgcgccatccacgggccggagcaacgttataacgacatcgcgcgctggaactggacgcagctgccgcctgcgctggccggcgagcggccggtgaaggcgctgcgggtcagcgattcggacggcttgcgccaggcgctgcgcgaggtagccgacggcgatcggctggccttcattgaagtgatgctgccgaagatggacattcccgagctgctcgacaccgtttcgcgcgccatccaggcgcgcaacgccgccgcttaa

SEQ ID NO: 425005 - DNA, 990 bp, Serratia marcescens
atgtcctaccccgcctccccctcacgttatcaagacatggaataccggcgctgcggccgcagcgggctgaagctgcccgccgtctcgctcggactgtggcacaatttcggcgacgccacgctgtacgacaacgcccgcggcctgatccgctgcgccttcgatcgcggcattactcatttcgatctggccaataactacggcccgccgcccggcgccgccgaggagaactttggccgcatactcaacgccgatctgcgggcctggcgcgatgagctgatcgtctcatccaaagccggttacaccatgtggcccggcccctacggtgattggggctcgaaaaagtacctggtcgccagcctcgatcagagcctgaggcgcatggggctggagtatgtggatatcttttatcatcatcggccggatccgcagacgccgctggaagaaaccatggcggcgctggatttgttggtgcgccagggcaaagcgctgtatgtcggcctgtccaactacccggccgagcgcgcgcggcaggcattcgacattctgcagcggctcggcacgccgtgcgtgatccaccaaccgaagtattcgatgttggaacgcgggccggagacggcgctgctggatacgctggcggagcatggcgtcggctcgatcgctttctcgccgctggcgggcggcctgctgaccgaccgctacctgcacggcgttccgcaagattcccgcgccgccagcggcagccgcttcctgcagccggagcagttgaccgccgagcggctggacaaggtgcgccgcctcgatgcgctggcgcggcaacgcgggcagaagctgtcgcaaatggcgctggcctgggtgctgcgcggcgatcgcgttacctcggtgctgatcggcgccagcaagaatgcgcagatagaagacgcggtgggcatgctggccaatcgccacttcagtgaagaagaactcgcgcagatcgagaaaatcttattgtaa

SEQ ID NO: 425006 - DNA, 411 bp, Serratia marcescens
atgtttaaacctctgctcttggccgccatcttggcgacgacggtactgcccgccgcacagcaggcgcacgccgaagggatcagcatcgatctgatgccgggcgtttcactgcgcatcggcgatcgggacaatcgcggccgttactgggacggttacgactggcgcgatcgcgactggtggcaaggccatcaggggcgctatctcggcgaccgcagccgccgcggttactactgggacggctatcgctggcgcgaccgcgactactggcgcaaacactattactatcatgaaggacgctatcgtaaatacgacaggcattacgataagcaccactggaagaaagagaaaaagcaccaccacgatcatgaccgcgatcgttggcgccgccacggcgatgacgaccgcgattaa

SEQ ID NO: 425007 - DNA, 1236 bp, Serratia marcescens
atgctgaacagtcgcgtggttgaaaccacctccggtcgctccgccagaaaaatcaaactctcgctgatggggcctgccttcatcgccgctatcggctatatcgaccccggtaacttcgccaccaacatccaggccggcgcctcgttcggctacagcctgctgtgggtggtagtttgggccaacgtgatggcgatgctgatccagctgttgtccgccaagctgggcatcgccaccgggaaaaatctggccgagcacattcgcgatcgctttccgcggccggcggtgtgggcctattgggtgcaggcggagatcatcgccatggcgaccgatctggccgagtttatcggcgcggcgatcggcttcaagctgctgctcggcgtttccctgctgcagggcgcggtgctgaccggtatcgccacctttttaatcttgatgctgcaaaagcgcgggcaaaagccgctggagctggtgattggcggcctgctgctgttcgtcgccgccgcttatatcgtcgagctggcgttctcccagccgcagcttgcgccgctgctgaagggcatggcgctgcccgatctgcccaacggcgatgcggtatttctggccgccggggtattgggcgccaccatcatgccgcacgtgatctacctgcattcgtcgcttacccaaatcggcggcgagcacgacaaggcggagcgctatgccgccaccaaagtcgacgtcgccgtggccatgaccattgccggttttgtcaacctggcgatgatggccaccgccgccgccgcgtttcatttcagcggccacagcggcatcgccgatctcgacgtggcctacctgacgctgcaaccgctgctcgggcaagccgccgccaccgtgtttggcctgagcctggtggccgccggcctctcctctaccgtggtgggcacgctggcggggcaggtggtgatgcaggggttcgtgcatttccatattccgctgtggctgcggcgagcggtgaccatgctgccgtcgtttatcgtcatcatgctggggatggacgccacgcgcattctggtgctaagccaggtgctgctcagcttcggcattgcgctggcactggtgccgctgctggctttcaccggcaatcgggcgctgatgggggagatggtcaacggccctgtggtgcaaaacctgggcaagctgatcgtgctggtggtggtgggattgaacggctacctgctgatcggcagcgtactgtag

SEQ ID NO: 425008 - DNA, 1188 bp, Serratia marcescens
atgtcccatattgcgcactttgcgttggcgatagtggtggtggcgatcctggccctgttggtgtgccgcgatcgcaaaagcatccgcattcgctatgttattcaattactggttatcgaagtactgctggcctactttttcctgcattcggaagcgggtttgggcttcgtaaaaggatttgccgcgctgtttgacaaactgctcgggtttgcgggacaagggactgatttcgtgttcggcggcatgggcgacaaaggcctggcgttcttcttcctgaaggtgctgtgcccgatcgtcttcatttcggcgctgatcggtattctgcagtacatcaaggtgctgccgttcatcatccgcattatcggtaccgtgctgtcgaaagtgaacggcatgggcaagctggagtcattcaacgccgtcagttcgctgatcctcggccaatccgaaaacttcatcgcctacaaggatatcctgggcaagatgtcggaaaagcgcatgtacaccatggcggcgaccgcgatgtctacggtgtccatgtccatcgtcggcgcctacatgaccatgctggacgccaagttcgtggtggcggcgctggtattgaacatgttcagcacctttatcgtgctgtcgctggtcaacccgtacgacactaataaagaagaagagctgcacctcggcaacctgcacgaaggccagagcttcttcgaaatgctgggtgaatatatcctggccggcttcaaagtagcgattatcgttgccgcgatgctgatcggcttcatcgccctgatcgccgcgctcaacggtgtgttcagcgccatcttcggcctgagcttccaggaaatcctcggctacttcttctatccgttcgcctggatcatgggcattcctaagcacgaagccctgcaggttggcagcatcatggccaccaagctggtttccaacgagttcgtggcaatgatggagctgcagaaagtgtctgccgaactgtcaccgcgcagcctggggatcctgtcggtgttcctggtgtccttcgccaacttctcttccatcggtatcgtggctggtgcgatcaagggcctgaacgaacatcagggcaacgtggtgtcgcgctttggcctgaagctggtgtacggctctacgctggtcagcatcctgtccgcttcgatcgcaggcctggtgctgggctaa

SEQ ID NO: 425009 - DNA, 1065 bp, Serratia marcescens
atgaaaaaaaataaaaatatcgcaattgtgggtggcggtggggtaactgcggcgatgacagcactggcttgcgccagaaaaggaatttccgtcgatttcttccttgatgacagagattatgacgacttcaaaacttcatttggaaatcattgtctgtggcgacgcattcatgaaaataaccaacgcctcagccgtttatgtactcagtcgcaatggatgtgggaaaagttcattctttcctccagcggtgagttcggcagaaaagaaaagatggttcgcatcgtcgaaagatctgaaatacctcacctcgcgagactctatgaacagcatgatctaccctatgaagtgaaaaacggcggagatgatgaatccatcaattttccctctttccttaactgtaaaaacaaatctgtttttgtgagttatgattccattttgctaaatacggcagaaattttttcatactttcaggatgagctagctttctttacctgtgtcaatgtctttagaaacaaaaatattgggggcttaaacagtatcgagagtggcgtgattttttttgatgaaaataaacgcatgtacgacacggtaataaagtttacaaatggctataatatcaatgagatagattcaccttccgaggtgtgtcctgccgttaatcgggtatttagagattattatctttcccactctgtgggaaatctgctttcgcctatgatgattacagaaagggagttcaatctgtggattgtcccttctgttgatggcaagatcgtcagagtaggaggagatattcatgtccctcagtctgcggagtttttgacgcgaagcttagatatcggtgcctacatcgatcgccgaaagttagatatcatttcggattcgttgtttaccattatctcttccttttcctatgtggaagggactttggcggtggttccatgttggactgcaagtgaagataacaagaagatcgtggtcgtggaaagtgttgattcttactataatgcgtcgccaattatttctgaggaaatcacagcgtttttaacggattcgagcagctaa

SEQ ID NO: 425010 - DNA, 537 bp, Serratia marcescens
atgaataagtacatgctgaactcattgctgcttgtcggtgttcctttggcgatgaccaccattaccaaggctgccgcggcggacggcaccattaatttcaccggcaatgtcaccgatcaaacctgcaccgtagtcgccggtagcgccaaccaaaccattccgatgggcaacatcagcgccaaagcatttaaaagtgctggcgataccgccctgccgacaaagttcagtattgctttaaccagctgccctgaaacggtgacaaaagcgtcggtaaaattcgacgggacatatgcacaaggcaactcgacattgttgtcactcaattcagaaagcggtgtggcaacgggtcttggcgtagccctctatgaggctgatggcaccacgcaaattcctatggcttcgttttctaatgcgcagagcgtgcagaaagacatcaacaacgtctttacctatgtcgccaaatatatggcgacatcggataaggtcacagtcgggccggctaatgccacgacacaatttagcatttcatataactga

SEQ ID NO: 425011 - DNA, 681 bp, Serratia marcescens
atgaagctaagtaaatattctttgctggcaatactctttttttcatgcggcgcatcggcaagcgtgacgctagccggtacacgtatcgtttatgaagaagataaaaaagaggcaaacatttccgtcaccaaccaggatcacaatagcccggtgcttattcaaacttgggtagaaagtttctcgcctgaagataaaaaagaggctccatttgttgtcactccgccattatttagactggaaccagaacaggataatattatcagagtcatttattctggaggaaatctgccacaacataaggaatcgatatattggctgagcgtaagatcaataccctcaaccaagaaatcaaaagaaaacaagttgctcattaccgtacaaaataaaataaagctattttatcgccctaaaaccctatcaagagatgaagccatagatgcctacaaaaaaattcatttctcattgaaaggaaagaccttagaggcaaaaaatccgtcaccgttttacgtctccttttactcagtaagcattgatggaaaagaggtaaaggaggtcgatatgatcgcgccacaaagcacgaaaaaatggctattgccacaggaaactcatggtaaagaaataaaatggcaagccatcaatgactatgggggagtgacccgtgcgataagcgcaccattatag

SEQ ID NO: 425012 - DNA, 2469 bp, Serratia marcescens
atgacgatgaataacaaggccaccaataaaacatcggtgctgtttttttgtgttctatcttcacctgcggttttagctgaagactactttgaaccctcagcactgaacagagattaccagaccataactgacttatcccactttaataattcgcgcagtcaattgcctggtgagtattgggttgatatctatttgaacaatgtgtttttcgctaataaaaaagtgtctttctattatgtggatggtactttgcagccccgaatctatcgcagcgctctggttaacctcggtgttcgcatggacaaactggaaataaacaatgacaccgaccttgcctcaacgcctatcagcaagattattcccggcagtcaggccaagtttgattttaatcgacaacgattggatttaaatatcccgcaggcttatatcgaaaatcttcctagagactgggttaaccccgcactttgggatgatggcattcgcgcatttttaatggattacaattttagtagtaccgagtcatggaaaacgaaaaataaaaaagataatggaaatcaatatttaaacttgcacagtggttttaactatgatgcctggcgcttcagaaactactctacctattcaaaccaaagcagtactaaatggaaaggtatcaacacctatgccgagcgcagctttcgggacagcaaaaacacgctgaccattggcgatagttcaacatcgggcgacgtttttgacagttttcaatttcgcggtctgaaattagcaagcgatcccagcatgtggcccgacagccagagagggtttgccccaacggttagaggtatagcgcaaagcaatgctgaggtcactataaaacaaaatggctatatcatttatcaaacacatgtaccagcggggaattttgaaataacggatatctaccccaccacctccagcggtgggctgcatgtgatcatcaaagaaaccgatggctcagaaaggagtttcttccagcctttttcctctgtccccatcatgctcagggagaacatgaaaagaaatgaattcacaatgggggaatatcgctctgcgcgaagcgctaaccaaaagtataagtttctacaggcatcgacgatttatggcattaaagatgataaaacactctatggtggcgccattatttctgaaaagcaccagggaatttctgccggcattggcagcagcctgggacatttcggctccgtctctgccgatgtcactcacaccaaaagccgattaaccacagggcaggatcgtaaaggacaacaataccgtatccagtacgcaaaaaatattgaaaaaacgggtaccaactttacgctggccggctatcaatactcgacgtctggctacttaagtttctcgcagctcagtgatattaatgccaacattgaaagaaactggctggcgcgcggcgtgaaaagaagccggctggttctcaatattaatcagcctatccgggatttcggcagtctatacatcaatggttaccaagaaaactattggcacaacggtgccgttgaacgaaattttctcatgggattttccacgaaccaatctggagtgagttacaatattggattgggctacaacagcggccgctatacggacaaacccgacaagatcgccacgcttaacgttcagattccgctaagcaaagggcaatcaaacaactggatgaactatacctcgagcaagagcagcaaaggcaaactcaatcagcaattaggactaagcggcaccgcactggaaaataaccagctcagttataacgtctctgcagctcaaagcggtacccgtgacggctattctggcaacagttcggcttattatcgcagtagatatggtgaaataggcgccggatacagctttgataaagatgtgcagcgaataaactacagtttgcgaggcggcgccgtggttcatcgcaacggcattacattatcccaatcgctgggtgacacaatcgctttagtcgaggtgccaaatgcaggcaacgttgaaatcatcaacagtaccggtgtcaccacagattggcgaggctatgccgtggtgccttatatcaacagttatcataagaatagaattaacttaaatccgcagtcctttgatgattcagtagaaatagagaacaacagccaaaccgttatcccgacgaaaggcgccattgttgtcgccaactttgcatctcacataggaaaccgaattattttcaaagtacatcatcgtgggacggagattcctttcggcgcagttgccacattgcgcagcgacccagggaaatcaggtatcgtcggcaacaataacgctgtctatatgagcggcatgccagacgctggaacaataacattgcgttggggagcgggaggaagctgccaaggaaattacagcatagagcctaacgattctgcctcaagagttaagcagattagcttgcaatgtgaataa

SEQ ID NO: 425013 - DNA, 981 bp, Serratia marcescens
atgactatatcaaggctattaacagccacacatatcgccaaagcggtcagcattctggcgctattattttccttttcagccaaggcagacggtgattgccgcgcaatatggcaccacccgctacggatcgtacaatccagcattaccgtcccggccagcgccaaaataggcgatcttatcggccagggagaatctaacttctcagtaaaactgttggaaaataacacaggattctccttgggtgaacgaggcgatttagtgatgcaaccctttaccgagatgagtgcgacaaacttctggtacaatgggatcaaagtttatcaaaccagttggccgggcgttggcatggccatgtcgctcaataacaaaccgggccttatcgagttttatggtccccgcgagacgcctatcggttacattctaaacgctaactttaaatattatctgataaagatcggtgatatacagccaggcaccataccctcgttcgcgcctttctttttcaactatgcctgtttaagagcctcaaatgccaggagattgggccacatttattatcctaccgtcaatattgccgtagagggctgccgtctgaacacgccgtctaaacaggtttttttagataaaattaatcgccgagcattttccgggccaggcagcgtagcgggaaaaacgcccttcagcatcgctctggagtgcaatgccaacacaaaaattgatttggaaatacgcggggaaatggctaatggccatcgacaggtcttagcgattacgccatcgaaagaggctgccaccggcgtcggcctacagattctgagcaacggcgttccctttgaactgggttccgcagccaacgtattaagcgagacattggtagggataaatgaaatcccactcagcgtacaatattaccaaacggaagaaaaaatcaggccgggcgaagtcaatgcagtggctcaattcaccgtgtcatatcgctag

SEQ ID NO: 425014 - DNA, 396 bp, Serratia marcescens
ttgtatagcgtgaaacagcaagtggcgccggtggacgattttatgcggctgcggcaggttgccggcctgtcggcgcggccgcgtgcgggcgccgaacgtgcgttgcccaacagcctgtacggcgtgcaaatcacgttgtcggggctggtggtcggcatggggcgtgtggtgggggatggcgggctgaatttcgagattgttgatgtggcggtcgatcccgaacaccaggggaaaggattggggcgccagatcatgagccatattatgggctatctggaacgggccgcaccgcagggtgcttatatcactctgatggccgacgtgccgtcgctgtatgaaaagtttggcttcaagctcagccgcccggccagcgaaggcatgtacctggttaagtag

SEQ ID NO: 425015 - DNA, 1416 bp, Serratia marcescens
atgaaaatcaaaacccgttttgcaccgagcccgaccggctatcttcacgtcggcggcgcgcgtaccgcactttattcctggttgttcagccgccatgcgggcggtgagttcgttctgcgtatcgaagataccgatctggaacgctccacccaggacgcgatcgacgcaattatggatggcatgaactggttgaacctggattgggatgaaggcccgtatttccagaccaagcgtttcgatcgttacaacgcggtcatcgacgagatgctggagcagggcactgcctataaatgctattgctccaaggaacgtctggaagcgctgcgcgagaagcagatggaaaacggcgagaagccgcgctacgacggccactgccgcgacagccagtgcagccacaccgacgacgagccgcacgtggtgcgcttccgcaacccgcaggaaggctcggtgatcttcgacgacaaaattcgcggcccgatcgaattcagcaaccaggagctggacgatctgatcatccgccgtaccgatggttcgccaacctataacttctgcgtcgtcgtcgatgactgggacatggaaatcacccacgtgatccgcggcgaagaccatatcaacaacaccccgcgccagatcaacattctcaaagcgctgggcgcgccggtgccggaatacgcgcacgtgtcgatgatcctcggcgacgatggtaaaaagctgtccaagcgtcacggcgccgtgggcgttatgcagtaccgcgacgacggctatctgccgcaggcgctgctgaactacctggtgcgtctgggctggtcccacggcgatcaggagatcttctccatcgatgagatgaaagagttcttcacgctggaagcgatcaacaaatccgccagcgcgttcaacaccgagaagctgcagtggctgaaccaccactacatcaaccatatgccggcggaagaagtggcggtgcatctggcgtggcacgttgagcaactgggccttgaaacccgcaacggcccggaactgaaagacatcgtcaagctgctgggcgagcgttgcaaaacgctgaaagaaatggcggagtcctgccgctacttctatgaagacttcagcgagttcgatgcagacgcggccaagaagcacctgcgcccggtggcgcgtcagccgctggaggcggtgcgcgccaagctggccgccatcaccgtctggacgccggaaaacgtgcacgacgccattcagggcactgcggatgagctgggtgtcggcatgggtaaagtcggcatgccgctgcgcgttgcggtgaccggcgccggtcagtcgccgggcatggacgtgaccgtgcatgctatcggccagaagcgttcgctgcagcgcatcgacatggcgctggcttacatcgccgagcgcgaagcgcaagcttga

SEQ ID NO: 425016 - DNA, 1008 bp, Serratia marcescens
atgaccctatccttacgccagctgttcattgcatttatcgccacttccagcctgctgctcagcggctgcggcccggacgaccagagcgacgggcagaaaccgtccgcccccgctgccgacagcagttggccgcgcaccatcgacagcgtcaaagggaaattcacgctggaaaaaccgccgcagcgcatcgtgtccaccagcgtcaccattaccggcacgctgctggctatcgacgcgccggtggtcgccagcgccgccaccagcccaaatcccctggtggccgataagcaaggcttctttacccagtggagcgaagtggccaaacagcgccacgtcgaacggctgtaccaggtggagcccaatgccgaagccgtcgccgccgccgcaccggatttgatcgtcgtcgccgccaccggcggtgattcggcgttgaagctgtatgaccagctgtccgccattgcgccgacgctggtgctcgactatggcgacaagagctggcagcagctggccagcgagctcggcgagatcaccggccatgaaaccggcgccaaacaggcggaggatcgtttcgaacagcgcgtggagcaagtgaagcaggcgatcacgctgccgccgcagccgaccactccgctggtgtatgccgacaacggccgcgaggccatgctgtggacgccgggttccgcccagggcaagctgctgacccagctcggcttccagctggccatcccgccggaaagcgccaaaggcaacaccagcatgggtaaacgccatgacatcatccagatctccggcgaaaaaatggccgagggcctgaacggcaaaacgctgatcctgttcgccaccaacgagcgcaaagtgcaagaggtgctgaccaacccgttcctcaaacatctggagccggtggaacagcggcacgtctatgccgtcggcaacgacaccttccgcctcgattactacagcgccaccaacatgctgaaccaaatcgaacggctgttcaaaaagccctga

SEQ ID NO: 425017 - DNA, 1056 bp, Serratia marcescens
gtgaacgtacccactccgactgagcggacgctttcgtccgcaccgcacgcagcttacgccagtggcttcaaacgcatcgccgggttcggtatcggcttggcgctgttgctgctgtgcatcattgccagcctgatgctgggttccaaagccatccccttccacaccgtctggctcagcctgcagggcgccgcgagcggttccgacagcaccatcattctcaacgcccgggtgccccgtacgctggcgggcatcttggccggcatggcgctcggcgccgccggcgcgctgattcaggccttgacgcgcaatccgttggccgatcccggcgtgctcggcatcaacgccggcgccagcttcgccgtggtcatcggcatcatgtttttcggcgccgccaccaccgaaagctatatggcctacgcctttgtcggcgccgccctcaccaccctgctggtctacctgatcggcacgctggcgggcgggcgcatcaacccggtgcggctgacgctggccggcgtggcgatcggcgcggtgctgctcggcatcaccaccgggctgtcgctgatcgatccgcaaaccttcgaccaactgcgcttctggcaggccggcacgctggatatccgcacgctgtccacgctgccggtcaccgcccccgccattttgctcggctgcctgctgacgctgctcatcgcccggccgctgaataccatcggcatgggggaagatctggctatcgcgctcggcgcgcgcgtggtgctgactcaggtcatcgcggtgatcgccatcacgctgctgtgcggcgcggcaaccgccaccgtcggcccaatcagctttatcggcctgatggtgccgcacatcgcccgctggtgggtcggccccgaccagcgctggatcctgccctactccatgttgctggcgccgattttactgctgtgcgccgacgtggtcggccgtctgctggcggccggtgagctgcgggtttccatcgtggcggccttcatcggcgcgccggtgctgatctggctggtgcgccgcaagaaaacgctgggggggctgtga

SEQ ID NO: 425018 - DNA, 1038 bp, Serratia marcescens
atgagtctgccccacacgttgcatatcggccgcccggacggcgtcatcaactggcgcatgccgctgcgcctgctgctggtcaacctttcgctgctggcgttgtgcctggcgatggccgttgccgcgctgtgctacggcacgctgcagctctcgctggagcaggtctttgccgcgctcagcggcgaggcgccgaaaaatctggtcaccgtggttacccaatggcgcttgccacgtatcgccatggcgctgctgttaggcgccgcgctcggcatgagcggcgccatcttccagtcgattatccgcaacccgctcggcagcccggacgtgattggctttaacatgggggcttacaccggcgcgctgatcgccatcaccctgttcaacggcggctattactacatcgccggcggcgcgctggccggcggcattctcgccgcgctggccatctacctgctggcctggcggcaaggcatcgccggcttccggctgatcatcgtcggcatcgccatcagcgcggtattggtctccaccaatacctggctgatcatcaccgcctcgctggagcgcgccatggacgccgccatgtggcaggccggttcgctcaacggcatgacctggcagaaagcccaacccgccacggcgttcatcgtgctggcggccgcggccgcgctgctgatgagcaaacggctgcagctgctggaaatgggcgacgatacggcgcgcgcgctgggcgtgaacgccgaaggcagccggctgtggctgatgctgttcggcgtcaccctcaccgccgccgtcaccgccaccgccgggccgatttcctttatcgcgctggcggcgccgcagatcgcccgccgcctggccggccaatcctcggtcaccctgacgtcctcggcgctgatgggtgcggcgctgctgctcggcgccgacgtagtgtcccaacatcttttcgcaccgatccaactgccggtcggggtcgtgaccgtctgcatcggcggcctgtacctgatttggctgctcatccgtgaggcccgcagataa

SEQ ID NO: 425019 - DNA, 825 bp, Serratia marcescens
atgaagaatgacaatgccatgagccaccgcctgcacgcctcgcatctgaagctgggctacgacaataaaatcatcgctgacgatctgagcgtggcgatccctgacggcgccttcacggtgatcgtcgggccgaacgcctgcggcaaatcgacgctgctgcgcgccctgtgccgcctgctgaaacccagcgccggcgaggtgatgctggacggcaagaacatcagcaacttcgccaccaaggcgctggcgcgcgagcttgggctgctgccgcaaacctcgatcgcaccggacagcattaccgtggcggatctggtgtcgcgcggccgctatccgcaccagagcctgctgaaacagtggacgcaggccgacaaacaggcggtagaagccgccatggcggccaccaacgtcggccagctggcggaccgcagcgtcgacgagctgtccggcgggcagcgccagcgcgtctgggtggcgatggcgttggcgcagcaaacgccgctgctgctgctggatgaaccgaccacctatctggacatcgcgcatcagatcgagctgctggatctgttccgccagctcaaccgcgagcacggccaaaccctcatcgcggtgctgcacgatctcaaccacgcctgccgctatgccgatcacatcatcgctatgcgcgacggcaagatcgtggcggaggggaaaccggcggagatcatcaccgccgagctggtggaacgggtattcggcatgccgtgcatgatcatcgacgatccgctgtcccacacgccgctggtgatcccgcgcggccgctaccactgcgacacgccgcaggcatga

SEQ ID NO: 425020 - DNA, 1284 bp, Serratia marcescens
atgcattcgcttcatgccgatggcctggtgctcaacctgctgcaaaggcccgatctcggcggagaagattggtggcgtcagctcgcggagttgggaacgccgctcgtcgaatcgctgcccgcagcgcaggtgcgcgttacctttttctggcgcgacccgtggggcgatgaacggcgctcgccgattaaaaaggtgtatgtcgatatcaactgcgtgaccgaccatcacagcccttcgccacagagtctggaacgccggccgggtagcgatatttggtggtggcagttcactgttcgcgaagattggcgaggcagttacagttttatacccattgagacggcgcaactgccgcccgcttttaccggcgatgcggctcagcgtcggcagcagcagcgtcagtggtggtgttcgttgtttccgttgatgcgccatgatccgctcaatccggtggcgccgcactgcagcagccgcggcttcccgttgtctgcgatacatttgccggcggcgccggatcaatcagcgtggcgggcgttggacgccgggcaagcattgcccgccgcgtctgggcgtttgcagcacttcttttggcacagcgaacgattggctaaccgacgcaacatctggctgtacgccaccggcgcaggggaagaccgcccgttagtcgtactgctggacgggcaattttggctgcatggcataccgattttttccgcactggacgccgagacgcttaacggaaggctgccgtcggcgctttatctgtttatcgacgtgatagacatggcgcggcgtgcggaagaattggcctgcaatgcggctttctggcgggcggtgcaagaggagctgctgccgcaggtggcggcgcgtgcgccttacagtgacgatccgcagcgcacggtggtggcggggcagagttacggcgggttggcggcgttgtatgccgggttgcattggccgcagcgtttcggctgcgtattgacccagtcgggttctttctggtggccgcacattgaagcgatgattaacccggctgaggagtatgacgccgacgtcggctggttgactgaacaggtgcggcggggcttatgcgccgcgacgccgctgcgcgtctttcaggaagccggtgaaggggagagggatattcatcaggtcaatcgccaaatgcatcgggcgctggtggaggcggggcatcgggtcgattatcgcgtgttcgccggcgggcatgatgccgtctgctggcgcggcggtttgctcgacggattgcgggcgctgttggctccctag

SEQ ID NO: 425021 - DNA, 2163 bp, Serratia marcescens
atgtcagaacacccccaaaataccgccaatcaacctctgcgtcacccagtcgccaagctcttgctgacctcagccatgctgctggcgccgggcgcacaggccgaaaccgacaacgttgagcgtgatatcaccgtcgtcgccggcgcacaggaaagcgtcaccgcgccgctgcagggcatcgtcgccaaagaaagcgcggcgggaaccaaaagcgccgcgccgttggtaaaaacgccgcaggccatcaccgtcgtcacgcgcgatcaaatggatcaacaggatgcggcttccgtcgcccaggcgctgcgatactccagcggcgtcgtggcggaataccgcggcacctctaaccgcagcgacgaagtgatcgtacgcggctttcgttacgccccaaaatatctggacggcctgagctatcaaagcggccagatcgacccctggctgcttgaacgcgttgaggtggtgcgcggcccggcttctgtgctgtacggccaggccaacccgggtgggctggtggcgatgaccagcaagcggcccgtcgcccaggctattcgcaaactgcaattgagcgcgggcaacctgcatcaaggagaggccgctttcgacttcggcggcgcattggacgaagatgccaaactgctgtatcgccttaacggcatcgccggcaccaaagagaccggtatcaaagatcacaaggaaaaacgcttcgccatcgcaccggcgctgacctatatcgccaatgaagacacgacgttcaccctgttgaccagctatcaaaaggaaccggagaacggctaccgcaacttcctgccgacctccggcgtggcgatcaaaagcagcgccggctatctgccgtatgatttcaacgtcagcgatcccggtttcaatcaggctcgccgcgaacaaacctcgttcggctatatcttcgagcactatattaacgacgttttctctttccagcagaacatgcgttacaccacggtggatgaacgttacaaatatctggtgttcatgtcgcaagccaaaaacagcacgctgctgcagcgccgtccgcaaaaagatatcgtcaaatcccatgaactggggttggataaccaactgaaagcgcaattcagcaccggcgacgtcgagcacagcgtgttgaccggccttgactacaagtggagcaaggtcaatacccaaaactggcgcggcgacagcgcgggctatttcctcgactggactcggccggtttacggcatgccggtcaacgaaagcgcattgccgaaggtcaccgataaccgcaaggtgctggaccaactcggcgtttatctgcaggaccagatgagctacggcggttggaatttgttgttgtcgctgcgcaacgactggaccgagctgcgcactcaggacatgttgagatccagcgacagtcagcaaaacgacaccaagctgactggccgcagcggcctgctgtacgcctttgacaacggcattgccccgtacatcagctacagcacatcgtttgaacccaacctcgataccggcgcgccgggcaccgatccgttcaagcccaccaccggtgaacaaaccgaaatcggcgtgaaattccagccgaagaacagcaacacgctgctgacgctggcgttgttcgatctgacgcagaaaaacgtcagctccaccaacccggtaaccaaatacaaggagcagatcggcaaagtgcgctccaaggggctggaagccgaagtgcattcacagctcaccccggccatcgcgctcatggcggcctacacctataccgacatcgttaccaaagaaacctatgtcgacgatcagcgcggcaagacgctggtgatggtgccgacgcacgccgcctccgcctggggaacctacagcttcctgcaagggccgctgaaaggcttctccaccggcgctggggtacgctacaacggcgccagccaaggcgatgcgaccaacacctacaaagtgccggcctttacgctgtatgactggatggcgcgctacgaattggcagaagtggctccgagcctggcaggcgccgcgctgcaggttaacgtcaacaacctgaccgacaagcattacgtttcgtcctgcggcggcgtggacgcctgtttctacggcagcggccgcaccgtcaccgccacggtcagctacagctggtaa

SEQ ID NO: 425022 - DNA, 1587 bp, Serratia marcescens
atgaaaagaaaagcaataacgatcgggctgctggcgttggcgattgccggcggcgcgcgggccaatacgctggtctactgttccgaaggctcgccggaaggcttcaacccgcagctgttcacctccggcaccacggtggacgccagttcggcggcgatctacaaccggctggtggacttcaaacccggcaccgtcgagctgcaacccagcctggcggaaagctgggaggtgagcgaggacggcaagcgctataccttccacctgcgcaagggcgtggcattccagagcaataaatattttacgcccacccgcgatttcaacgccgatgacgtcatcttctcgtttatgcggcaaaaggacgccaacaacccgtatcacaaggtctccaacggcgcctacaccaacttcgagtcgatggagttcggcacgctgatcgaccggatcgtcaaggtggacgacaacaccgtgcgctttgagctctcccgcgccgaggcgccgttcgtcgccgatctgggcatgtacttcgccaccatattatcggcggaatatgctgacgcgatgctgaaggccggcacgccgcagcgggtggacaacgatccgatcggcactgggccgttccaactggtgcagtatcagaaagacgcgaaaatcctctacaaggcgttcgatcgttactgggaaggcaaaccgaagatcgaccggctggtgttttcgatcacgccggatgcgacggtgcgttacgccaagctgcaaaagaacgagtgtcaggtgatgccgttccccaatccggcggatctggcgcgcatgcggcaggacggcaaccttcaggtgatggaaaaatccggcttgaatatcggcttcctggcgttcaacacccagaagaaaccgttggataacgtcaaggtgcgccaggcgttggcgctggcggtcaacaagccggcgatcatcgaggcggtgttccacggcgccggccagccggccaagaatctgctgccgccgacccagtggggcagcaacgcgcagcttgaagattacccgtattcgccggagcgggcgaagcagctgttgcaggaggccgggctggggcaggggttcgacatcgatctgtgggcgatgccggtgcagcggccctacaatcccaacgccaagcgtatggcggagatgatccaggccgactgggccaagatcggcgtacgcgccaaaatcgtcaccttcgagtggggcgaatatttgcagcggattaaaaacggcgagcatcagaccgcgctgatgggctggaccaccgccaacggcgatccggacaacttcttcgggccgctgttcacctgcgcttcgctcggcggttcgaactcggcgaaatggtgctataaaccgttcgaccagctgatcctgcaggcgcgcgaagagaacgatcacgccaagcgggtggcgatgtaccagcaggcgcaggtgatgatgcacgatcagatgccggcgctgatgatcgcgcactcgaccatcttcgaaccggtgcgcaaggaagtgaaaggctacgagattgacccgttcggcaaacacatcttcaagcaggtgtcgctggagaaataa

SEQ ID NO: 425023 - DNA, 1686 bp, Serratia marcescens
atggcacaggaaaaaacaggcaatgactggcaatgcggcgccgatttggtggtgaaaaacctggaagcgcagggcgtcaaacacgttttcggcattccgggcgccaagatcgaccgggtgttcgactcgctggaggacgcgccatcgattgaaacggtggtggtgcggcatgaggccaacgcggcctttatggcggcggcggtcggccgcttgaccggcaaggccggggtggcgctggtcacctccgggccgggcagctccaacctgatcaccgggctggccaccgccacttcggaaggggacgcggtggtggccttcggcggggcggtgaagcgcgccgacagcctgaaacagacgcaccagagcatggataccgtcagcatgttccggccggtgaccaagtattgcgccgaagtgcatgccggttcggcaatttccgaggtgatcgccaacgcctttcgccgcgccgagttcggccggccgggggcatcgttcgtcagcctgccgatggatatcgtcaatgaaccggtcagcgcgccggtgctggccggctgccgcttgccgcgcatgggggccgccgcggcggacgacattcaggcggcggtgaaactgatccgccaggccaaatgcccggtattgctgctcggcctgcaggccagccggccggagaacagcgaagcggtgcgccatctgctgtaccgcacccatatgccggtggtcggcacctatcaggcggcgggggtgatcgacgtcaaccacttcgcccgtttcgccggccgcgtcggcctgttcaacaaccagccggccgatcagctgttgcagaaggccgatctggtggtcagcgtcggctatgatccgatcgaatacgatccctgcatgtggaacagccacgggcggctgaaactggtgcacatcgacgtgctgccggcggatatcgacacctgctatcggccggacgtcgagctggtgggcaacatcagcgccacgctgaacatgatgaccgaaacgttcactgaggcggtctgcgtgccgccggaggtggagctgatcctcaccgatctcggccgccaacgcacggaactggcggagcgcgccgcgcgccgcggcggcatgccgatccacccgctgcgcatcgtcaaggagctgcaggacatcgtcagcgacgacgtaaccctgtgcgtggacatgggcagcttccatatctggatcgcccgctacctgtacagtttccgcgcccgtcagctgttgatctccaacggccagcaaaccatgggggtggcgttgccgtgggccatcggcgcggcgctggtgcgccctggcgataaagtggtgtctatctccggcgacggcgggttcatgcagtcgagcatggagctggagaccgcggtgcggctgaaaaacaacatcgtgcacgtcatctgggtcgataacgcctacaacatggtggagatgcaggaagtgaataaataccagcgcaaatccggcgtggagtttgggccgatcgacttcaaagcctacgcggaatcctgcggcgcggtcggtttcgccgtgcagtcggtggacgatctgcggccgatgctgcgcaaggcgatggcgatccaggggccggtggtggtggccattccggtcgactacgccgacaactataagctgatggcgcagatgaacttcagccagatgatttaa

SEQ ID NO: 425024 - DNA, 780 bp, Serratia marcescens
atgaacgaaaaacacgggtgtgcctgtgcgcgccatttggcgcagggttttgccaggcagtcgatcaacgccggggagggcgaaatctatcaaatctcgctgatgagcgcgctcatcgacggggtctacgagggtgaaaccaccattgccgagctgctcaagcacggcgatttcggcctcggcaccttcaatcacctggacggcgaactgatcgctttcgaccaggaaatacaccagctgcgcgccgacggcagcgcccggccggccggcctgcaacagcaaacccccttcgccgtcgtcacctttttccagcccagcgtcagccagcagttcgaccggccgatcaccaaggcgcagctgcaccagtgcatcgacgagcaggtcgcctcgccgaacctgttttgcgcggtgcgggtcgacggcgagttcagccacgtggaaacccgcaccgtgccgcgccaggagcggccctaccgcccgatgctggaggcgatagaagagcagccgaccttctcgttccatcagcggcgcggcacgctggttggtttccgctcgccggattacatgcagggcatcggcgtggccggctatcacgaacacttcgttaccgacgaccgcagcggcggcggccacgtgctggactaccagctcgatcatggtcgtctgcagttcggcgtcatcacgcgtctcaatcttcagttgccgcatgatgcggatttcttgcgcgccaacctctgcccagaggatttggatcgcgcgattcgttccgccgagggctaa

SEQ ID NO: 425025 - DNA, 903 bp, Serratia marcescens
atgaatgacgcccgctatgtagaacatctgccaatttttctcgacgtcgcccgcctgggcagcttttccgccgctgcgcgccggctgggcatggtgccctcctcgctggtgcgccacatcgatgccctggaaagcgcgctcggcgccgcgctgttcgtgcgctccacccgtggcctgctgctgaccgacgccggcgagctgctgctgacgcgcgccgccgcgctgatgacggaaatcaccggccttcgcgccgagctgagcgcgctgaacgaaacgccgcagggcacgctgcgcatcagctgcctgccaaccttcggcaaaacctatgtgctgccgctgctgccgacgctggcggaacgctacccgcagctgtcggtcgacctcgatctgaccgaacgccagaccgatccgacgcaggagcggctcgacgccgccctccgcatcggcgaacagaaggacagcgcgctgtatgccagccgcatcgccacccaacgctgggtgatgtgcgccagccccgcctacgtcgcccgctatggcctgccggccgatctggaagcgctgccgcagcatcggctgatcgcccgctaccacaagcagcagccggcctgctgggcgcagatcctcgacgcggcgctgatgaaccgctgcaccatggcgctgcgctgcgacgacttcaccgcgcagcgccaggccgcgctgctcgggctcggcatcgcctttctgcccaactgggtggtggggcctgacgtgcagcacgggcaactggtgcagatgctcgaagatccgcgccatgagcagcaaggcatctatctgctgcgcccgatggcgaaggtgtccgcccggctggcggccttcaccgccctgctgcagcaaaccctcggtcagccgcccaactgggggtaa

SEQ ID NO: 425026 - DNA, 792 bp, Serratia marcescens
atgagcaaaccggttcacgccaacagctgggacgcgctgcgcgcctttaccgatgcgcgcatcgcgctggggcgcaccggcgccagcctgccgactgacgaactgctgcgcttcggcctggctcatgcccaggcgcgcgacgcggtgcatcagcctttcgacagcgagcggctggcggcggatctgcacgatgccggttggcccacgctggcggtgcacagccaggccgccgaccgcgccgcctatctgcgccggccggatctggggcggcggttggcgtcggatagccgcagcctgctgctcggttcgccatcgcgccgcgtcgatctgctgctgatagtggcggacggcctctcctccaaggcggtgcaccgccaggcgctgccgctgctgcaggcgctgcggccctatctcgatacgctggggctgaccgttgcgccggtggtgctggcgcatcaggcgcgggtggcgctgggggatgagatcggcgaatgcctgcaggcccgggcggtggcggtgctgatcggcgaacggccggggctgtcgtcgccggacagcctgggtgtctatatgacctgggggccgaacgcgcacagaacggacgccgagcgcaattgcatctccaacgtgcgccccgaggggctggattacccgcaggcggcgttcaaattggcctggctgctggagcaggcgttccagcgccggctgaccggcgtcgaactgaaagacgagagtgacaacccggcgctgcgcggccgggtaacgccgctttacccccagttgggcggctga

SEQ ID NO: 425027 - DNA, 1386 bp, Serratia marcescens
atgtatcaggcaacggtgggccaacgcggctatcgcttcggcgatctgcgtcaactgatggcgaaggcttcgccggcgcgttccggcgattatctggcggaggtggcggcgcacagcgccgaagagcgcatggcggcgcgcatcgcgctggcggacttgccgctcaagacgttcctgcagcaggcgctggtgccgtacgaacaggacgaggtgacgcgcctgattatcgacggccacgatgccgccgccttcgagcccatctcgcacctcacggtcggcgattttcgcgactggctgttgagcgagcaggcggacagcgccatgctggcgcaggtggcggccggcatcacgccggagatggcggcggcggtgagcaagatcatgcgcaatcaggatctgattttggtggccaagaagtgccgggtggtgacgcgctttcgcaatacgattggcctgccgggccacctcagcgtgcggctgcagcccaatcacccgaccgacagcctgcagggcatcgccgccagcatgctggacggcctgttgtacggcagcggcgacgcggtggtcggcatcaatccggccagcgacagcctgccgctgctggaaaagctcaactacatgctggacgacgtgatccagcgctttgccattcccacccaatcctgcgtgctgacccacgtgaccaacacgctgcggctgatagagcgcggcgcgccggtggatctggtgtttcagtcgatcgccggtaccgaagcggccaatcgcggcttcggcattaatctggcgctgctggcggaggcgcagcaggcggcgctgagcctcaggcgcggcacgctgggcgacaacgtgatgtatttcgaaaccgggcagggcagctgcctgtcggccaacgcccatcacggcgtcgatcagcaaacctgcgaggcgcgcgcctatgcggtggcgcgccatttctcgccgctgctgatcaacaccgtggtagggtttatcggccccgaatacctgtatgacggcaagcaaattatccgcgccgggctggaggaccacttctgcggcaagctgctcgggctgccgctgggctgcgacgtctgctacaccaaccatgccgaagccgatcaggacgacatggacacgctgctgacgctgttggccgccgccgggttaacgttcctgatcggcgtgccgggcgcggacgacatcatgctcaactaccaaagcacgtcgttccatgacgcgctctatatccgcgagctgctggggctgaagcacgcgccagagttcgccgcctggctggcggcgatgaacatcaccgacgaacgcgggcggctgcgcgatgctgccgccaatcatccgctgttgctggcgctgcagggagaacgcacatga

SEQ ID NO: 425028 - DNA, 549 bp, Serratia marcescens
atggatccgcaacggcaaattatcgactggctgcaacaagatgacgcgcgcatggccgccctgcgcaccgtgcgccggctcggcctgaatgactggtgcctcggcgccggcttcgtacgcaatctggtgtgggatcggcgccacggctatgtggagcccacgccgctcaacgatatcgacgtgatccacttcgatgcggagcgtgcggacgccgagcgcgatcgcatgctggaggcgcggctgcagcaatggctgccgcagccgtggtcggtcaagaatcaggcgcgcatgcatctgcgcggcggccgggcgccttaccgcaacagcgaagaggccatcagcttctggaccgaagtggaaacggcgatcggcgcgcgcctgaacgccgacgacagcctcacgctggtggctcccttcgggctcgcggcgctgttcggcgacaccatcagcttcaacgtgaaaaacggcgatcgcgctgcctatgcccagcgcgtgctcgacaaaggctggctgcagcgctggccgcgcctgcggcaggtaaagatttag

SEQ ID NO: 425029 - DNA, 468 bp, Serratia marcescens
atgtcgaccagcatcaccatgatcgtaccgatcaaaaataccgttcccggcgtcagcaacgtcttcagcgcgccgggccatcagggcgaattgctgatggccaaaccggtcaacaaccagccggaaggcggcaaggcgaagaaaagcgaaggcgccaacggcaatgacgaaccggcaaatctcaacgaaagccgcgcctcggcgcgcatcaaggcgctgaaccggcagattcaggctctgcagcaaaagctggtggagctgaaggactccagcgccgatcccaaagagatcgagaagcagaaacagctgatcgaagcgcagatcaagatgctgcaggccgagatcgcgcgcatccagaaagaagaaatggaaaagcagcagcaggagcaaatggaaaaagccgcggcgcaagccggcgacggcgtaaaccgcccgacgccgctcaacgcggtggacgtctatatctga

SEQ ID NO: 425030 - DNA, 921 bp, Serratia marcescens
atgaattactcactcaaacagctgcgggtgttcgtcgctgtcacccgccacggcagcttcagccgcgccggcgaggcgatcggcctgacgcaatcggcggtcagccacagcgtgaaagagctggaggcggaggtcggcgtgcgcctgctggatcgcactacgcgtgaagtggtgttgaccgacgccggcctgcggctggccaaccgggtcgaaaggctgctggacgaactgcaggccgcgttgctggatgcgcgcagctttggcgtacagcgcagcggcacggtgcgggtggcgaccagccagaccatttccgcccatctgatgccgcagtgcatcgccgccggcgaacgcgaatacccggagatccgcatcatgctgcgcgatcaggcgcagcagcaggtactgcacagcgtgcgcaacgccgaggtggatttcggcatcgtggtcgatccggtgcaggcggtggatctggagtgcgaagcggtgctgcatgaaccgttcctgctgctgtgccgcgacgaccacccgtttgctgcgcagcaagaggtgcgttggtcggcgttaaacggctgccgcctggtgttgcaggattacgcgtcgggcagccggccgttgatcgacagcgcgctgaggcagcagggcgtcgaggcgcaggtggtgcaggaaatcggccatccggccacgctgttcccgatggtggcggaagggattggcatcagcatcttccctgcgttggcgctgccgctgccggaaggggggcggctccgggtgcggcggctggtgccggagatcaatcgcgcgctgatgctggtgcggcgtaaaaatcgctcgctgacgccggcggcggaggccatctggcaggtcgcgcgtcagcaggcggcgctgctgcaccagcgccggcaggaaaacgcggaatattga

SEQ ID NO: 425031 - DNA, 1050 bp, Serratia marcescens
atgctcacgcgggagaatagccccatcgattttctacccgagcgtatcgccatgagattcctgcccgatcgttttaccctgacgctgatcgccaccgtgctgctggcttctttcctgccggcgcgcggcgagttcgtcggctggctcaacgtcctgaccatcgccgccatcgccctgctgttcttcatgcacggcgccaagctgtcgcgcgaggccatcctggccggcagcaataactggcggctgcatctgtgggtgatgttcagcaccttcatcatttttccggcgctggggatgctgttcgcctggtgggcgccgatcgacgtcagccccgagctgtacgccggtttcatctacctgtgcattctgcccgccaccgtgcagtcggccatcgccttcacctcgctggcgggcggcaacgtggcggcggcggtgtgcagcgcctccgcctccagcctgctggggatcttcgtgtcgccgctgctggtcggcctgctgatgaacgtgcacggcgataccggcagcctgcggcaggtgggctcgatcgtgctgcagctgctggtgccgttcgtcgccggccacctgctgcggccgctgatcggcggctggatcgagcgtcatcgcccgctgatcggcaaaaccgaccagacctcgattctgctggtggtgtacgccgccttcagcgaggcggtcacacacggcatctggcatcaggtggggatcggttcgctggcgtttatcgtcggcggcagcatcgtgctgctgacgatcgtgctggtggtgaacacctatatggcgcgctggctgggattcagcaaggcggacgagatcaccatcgtgttctgcggttcgaagaaaagcctggcaaacggcattccgatggccaatatcctgttcccggcggcgacggtggggatcatggtgctgccgctgatggtgttccatcaggtgcagctgatgacctgtgcggtgctggcgaaaaggtatcagcgcaagcagcgggcgcaacaggcggtacccaacgccaacgcgcaggcgtcgcgcgggtaa

SEQ ID NO: 425032 - DNA, 216 bp, Serratia marcescens
atggaaaaggaaaacctgctggagatcgccaataccgtgatgccgttcggcaagtaccaggggcgggtgctgatcgatctgcccgaagagtacctgctgtggttcgcccgcaagggcgaattccccaaaggcaagctcggcatgctgatggagatgacgctggcgattaaaatcgaagggcttgaccacctggtcaagccgctgaagaaaagttga

SEQ ID NO: 425033 - DNA, 1980 bp, Serratia marcescens
ttgcgccatcatgaataccagtatcatgtgctggatgcgccggaagtgccggatgcggaatatgaccgcctgatgcgcgaactgcgcgagctggagagcgcgcatccggcgttgatcaccgccgattcgccgacccagcgcgtgggtgccgcaccgctggcggcgtttgaccaggtgcgccacgaagtgccgatgctgtcgctggacaacgtgttcgacgaagaaagcttcctggcgttttacaagcgcgtgcaggacaggctcaaaagcagcgatccgctgaccttctgctgcgagctgaagctggacggcctggcggtcagcctgctgtacgaagacggtgagctggtgcgcgcggcgacgcgcggcgacggcaccaccggcgaaaacatcacctccaacgtgcgcaccattcgcgccattccgctgcgcctgaccggcgacaacatcccgcgccggctggaagtgcgcggggaagtgttcatgccgcaggccggttttgaacagatgaacgaagaagcccggcgcaaagacggcaaggtgttcgccaacccgcgcaacgccgccgccggctcgctgcgccaactcgatccgcgcattaccgccaaacgcccgctgaccttcttctgctacggcgtcggcctgctggaaggcggcgaactgccgcgcagccactttgagcgcctgatgcagttcaaggcctggggcctgccagtcagcgatcgcgcccagcgccgcaccggcagcgaggaagtgctggcgttttatcgccaggtcgagcaggaccgcgcgcagctcggtttcgacatcgacggcgtggtgatcaagattgacgacatcgatctgcaggaaacgctgggcttcgtggcgcgtgcgccgcgctgggcgacggcgttcaaattcccggcgcaggagcagatcaccgtagtgcgcgaagtggagtttcaggttggccgcaccggcgcgattacgccggtggcgcgccttgagccggtgctggtggccggggtgaccgtcagcaacgccaccttgcacaacgccgatgaaattgagcgtttggggctgcgcatcggcgatacggtgatcgtgcgccgcgccggcgacgtgatcccgcaggtggtgggggtgctggaagaccgccggccacaggatgcgcgcgaagtggtgttcccgctgcactgcccggtgtgcggctccgacgttgagcgcgtggaaggcgaggcggtagcgcgctgcaccggtggtcttatctgcggcgcgcagcgcaaagaggcgttgaagcacttcgtttcccgccgcgcgctggacgttgaaggcatgggcgacaagatcatcgagcagctggtggacaaagagtacgtgaagaatccggccgatctgttccgcttgtccgccggcattctgaccggcctggatcgcatggggccgaaatcggcgcagaatctggtcaatgcgctggagaaatccaagcagaccaccttcgcccgtttcctgtatgcgctgggcattcgcgaggtcggcgaagcgaccgccgccaatctggcggcgcatttcggatcgctcgagaagctgttcgccgccgatatcgaggcgctgaaagaggtgccggacgtcggcgaagtggtggccaaacacacccgcaatttccttgatgaagcgctcaatcagcaggtgatcaacgagctggtgggcgccgagatcggcattcactggccggcaccggtggtggtggtcgccgaagagatagacagcccgttcgccggcaaaaccgtggtgctgaccggctcgctgagccagctgtcgcgcgacgaggccaaagatcgcctgacggcgctgggcgccaaggtcagcggcagcgtgtcgaagaaaaccgatttggtgatcgccggcgaagcggccggttccaagctggcgaaggcgcaggagctgggtatcgccgtgatcgacgaagcggagatgatccgcctgctgggtgactga

SEQ ID NO: 425034 - DNA, 1017 bp, Serratia marcescens
atgatgcaggatttgcgtctgatattaatcgttgttggcgcgatcgccataatagcgctgttattgcacggtctgtggaccagtcgcaaagaacggtcagcgctcttccgcgatcgcccagccaaacgttcccaaaaggaacgtgaacaaactccgatcgacgatcttgaagaaggcgtcggtgaggtgcgcgtacgcgccgctcacccgcaagacgagccgtcattcggccatttcgatgccgcacgcgaagaacccgtggccgcgccgaagcccgctccggcggctgcgccggcgccccgcgccgttcagccggctgcccatcagacgccgcctccgctgtctcagcggccggagtatgatgacatcctgctgaacaactacgcgccggacgaagaaccggccgaaccgcagcaaccgcaaccggccgcgcgccgtgagccgcgcgtcgacgatctgccgcatgaacatgaggcgccgcagggggcggaaccggcattccacgccgagccggctcctgtgcagccagcgccggaagtgaagcctgcgccggaacctgcaccgcagccggcggctgcgccaattcaggctaaactgaaagagaccgtgctggtgctgcacgtcgcggcccaccagggcggcgtgatcggcggcgaagtgctgctgcagagcgtgttgcaggccggtttccagtttggcgaaatgggcatcttccaccgtcatatcagcccggccggcagcggcccggtgctgttcagcctggcgaacatggtcaagccgggatcgttcgatcctgacatgatgtccgacttctccacgccgggcgtgtcgatgttcatgatggtgccgtcttacggcgacgccaatcagaacttcaagctgatgctgcagtcggcacagcgcatcgccgacgacgtgggcggcgtggtactggacgacgagcgccgcatgatgacgccgcagaagctggaaacctacaaagcgcgcatccgtgaagtgttggaaaacaacgcctga

SEQ ID NO: 425035 - DNA, 759 bp, Serratia marcescens
atgtcctatacgcagcccccttcccgttcgaccagcggcattcactatttcgccgagggttggcgcctgatttcgcgcccggggattaaacgctatgtggtcctgccgttgctggtcaacgtgctgctgatgggttccgctttctggtggctgttcagccaactcggcgactggatcccggcgatgatgagccacgttcccgactggctgcaatggttgagctacctgctgtggccgctggcggtcatttcggtgctgttggtgttcagctatctgttcagcaccatcaccaacctgatcgccgcgccgttctgcggcctgctggccgagcagctcgaaggcagcctgaccggcaaaccgctgccggacaccggcctgctcggcatcgccaaagatttgccgcgcatcatggcgcgcgaatggcgcaagttgatgtattacctgccacgcgcgctgctgctgctggcgctgtacttcgtgcccggcatcggccagacggtggcgccggtgctgtggttcctgttcagcgcctggatgctggcgatccagtattgtgactatccgttcgacaaccacaaggtgagctttgccgacatgcgccgcgccttgcgccagcacaaacccgctaacctgcagttcggcgcgctggtcagcctgttcaccatgatcccgatcctcaacctggtgatcctgccggtcgccgtctgcggcgccaccgccatgtgggtcgatcgctaccgctcacagttcgtccgataa

SEQ ID NO: 425036 - DNA, 969 bp, Serratia marcescens
atgagcaagatatatgaagacaactcattaacaatcggccatacgccgctggttcgtctgaaccgtatcggcaacggacgcattctggccaaggttgaatcacgcaacccgagcttcagcgtcaaatgccgcatcggtgccaatatgatttgggatgcggaacaacgcggcgtgttgaccgccggcaaagagctggtggagccgaccagcggcaacaccggcatcgcgctggccttcgttgccgccgcacgcggttacaagctgacgctgaccatgccggaaaccatgagcatcgagcgccgcaagctgctcaaggcgctgggtgccaatctggtactgaccgaaggggcgaaaggcatgaaaggcgccatcgccaaagcggaagagatcgtcgccaccgacccgaatcgttacctgatcctgcaacagttcagcaacccggccaacccggcgatccatgaaaaaaccaccggcccggaaatctgggaagacaccgacggcgacgtcgacgtattcatctccggcgtcggcaccggcggcacgctgaccggcgtcagccgctacatcaagaacaccaaaggcaaggccatcaccaccgtggcggtcgagccgaccgactcgccggtcatcagccaggcgctggccggtgaagagctgaaaccgggcccgcacaagatccagggcatcggcgccggcttcattccgggcaacctcgatctggatctggtggatcgcgtcgagaaagtctccaacgatgaggccatcagcatggcgcgccgcctgatggacgaagaaggcatcctggcgggcatttcctcaggcgcagcggtcgcggcggcggtgaaactggccgaagaaccggcgttcgccgacaagaccatcgtggtgatcctgccctcttccggcgaacgttacctgagcaccgcgctgttcgccgatctgttcaccgagcaggaattgcagcagtaa

SEQ ID NO: 425037 - DNA, 258 bp, Serratia marcescens
atgttccagcaagaagttactattaccgctccgaatggtctgcatactcgccctgccgctcagttcgttaaagaagccaaaggcttcgcgtctgacatcaccgtgacctccaacggcaaaagcgccagcgctaaaagcctgttcaaactgcaaactctggggctgactcaagggaccgtagtgacaatctccgctgaaggtgaagacgagcagaaagccgttgagcacttggtaaaactgatggcagagcttgagtaa

SEQ ID NO: 425038 - DNA, 1728 bp, Serratia marcescens
atgatttcaggcattttagtatcaccgggcatcgcttttggtaaggctctcttgctgaaagaagacgacatcgtcatcaaccggaagaaaatctctgctgatcaagtagagcaggaagtctcgcgttttctggccggccgcgcgaaagcgtccgaacagctggaagcgatcaagaccaaagctggcgaaaccttcggcgaagagaaggaagctatcttcgaaggccacatcatgttgctggaagacgaagagcttgagcaggaaatcatagccctaatcaaagacgatctggcctccgcagacgccgccgcctacaccgtgatcgaaggtcaggcgaaagcgctggaagagctggacgacgagtacctgaaagaacgcgccgccgacgtgcgcgacatcggtaagcgcctgctgcagaatattctgggcatgccgatcgtcgatctgggctccattcaggacgaagtgatcctggtggccaccgatctgactccgtcagagaccgcgcagctgaacctggacaaagtgctgggcttcattaccgatctcggcggccggacttcccacacctctatcatggcgcgctccctggagctgccggcgatcgtcggtaccagcgacgtgaccaagcaggtgaaaaacgacgactacctgattctggatgcggttaacaacaaaatttacgttaacccgaccgctgacgttatcgatcggctgaaagccgcccagaaccaatacatcaccgagaaaaacgatctggccaagctgaaggatctgccggcgattacgctggacggccatcaggttgaagtctgcgccaacatcggcaccgtgcgcgacgtcgcgggtgcagagcgcaacggcgcggaaggcgtcggcctgtatcgtaccgagttcctgttcatggaccgcgactcgctgccgaccgaagacgagcagttccaggcttataaagccgtggcggaagccatgggctcgcaggccgtgatcgtccgcaccatggacatcggcggcgacaaagacctgccgtacatgaacctgccgaaggaagagaacccgttcctcggctggcgcgccatccgcatcgcgatggaccgccgtgaaatcctgcacgcccagctgcgcgccatcctgcgcgcctcggcgttcggcaaactgcgcatcatgttcccgatgatcatctccgtggaagaagtgcgcgatctgaaaggcgaaatcgagacgctgaaggcgcagctgcgcgaagaaggcaaggcgtttgacgagagcatcgaagtgggcgtgatggtggaaacaccggctgcggcggtcatcgctcaccacctggcgaaagaagtcgacttctttagtattgggacaaacgatctaacccagtatactctggcggtagatcgcggcaacgagctgatttctcatctctataacccgatgtccccatcagtgctaggcctgatcaaacaggttattgatgcatctcacgcggaaggcaagtggaccggcatgtgcggcgaactggctggcgatgagcgtgctacactgttgttattgggcatggggctggatgagttcagcatgagtgcgatttcaatcccgcgcatcaagaaaattattcgtaacacgaatttcgaagatgtgaaggcgttggcagcgcaggccttggcacagccaacggcacaagacctgatgaattgcgtcaataaattcatcgaagaaaaaacgctctgctaa

SEQ ID NO: 425039 - DNA, 510 bp, Serratia marcescens
atgggtttgttcgataaactgaaatctctggtttctgatgacaagaaagacacgggcactatcgagatcgtcgctcccctttctggcgaaatcgtcaatatcgaagatgtgccggacgtagtgttcgctgaaaaaatcgttggcgacggtatcgccatcaaaccggccggcaacaaaatggttgctccggttgacggcaccatcggcaagattttcgaaaccaaccatgcattctctatcgaatccgacagcggcattgagctgttcgtccacttcggcatcgataccgtagaactgaaaggcgaaggcttcaaacgcatcgccgaagaaggccagcgcgtcaagaaaggtgacgtggttatcgagttcaacctgccactgctggaagagaaagccaagtctaccctgacgccggtcgttatctccaacatggacgagatcaaagagctgatcaaactgtccggcagcgtgaccgttggcgaaaccccgattatccgcatcaagaagtaa

SEQ ID NO: 425040 - DNA, 1326 bp, Serratia marcescens
atgcgcggaagactgttctggaaaattttactcggcttttggctgaccttcatcatcatgacacaggcgctgtgggtggcgttttctctctatggcgatcgctatgtgccgccggagaacgctatggcgcggcgggtgatcggcctgcagctggcctcggccgccacccagttgcgcagcggtggcatgccggcgctggaagccctgatgcgcgactggcccgaggacgacaggcgtttgctgtccgtgacgccgatgacccaaccgccgccgcccgcgccggaagagccggcgtttgaagggcggcggatgccgaaagagatctctgcctgggtgcagaccggggaagggcagggatactggctgagttataacgtgcgcgcgttgcgggaagagtatcggccggagcggcgttcccacttcttcaacattcctgcgccgatgctgtgggtcggcgggctgggcggtttgctgttcagcgccgtgctggcctggaacctgacccggccgatgcgtcagctgcgcggcggtctggatcgggtggcgcagggcgatctgtcggtgcggctgttcccgaagatgcggcgccgccatgacgagctgtccgacgtggcgcgcgatttcgacaccatggccgagcggctggaactgctggtcagcgcccgcgagcagctgttgcacgacgtttcgcacgagctgcgttcgccgctggcgcgcctgcagctggcgatcggcctggcgcggcagaatgccggcaacgttgaaacctcgctcaagcgcatcgaacacgaatcggggcggctggacaaaatgatcggcgagctgctggcgctgtcgcgtaccgaacacagcagcctgccggacgaggagtatttcgatctgtacggcctggtggatgcggtggtgagcgatgcgcgctacgaggcgcaggtgcccggcgtggatatcgtgctgcaggccgagtcggacgtggagtacaccgtcaagggcaatgcggagctgatgcggcgagcggtggacaacatcgtgcgtaatgcgctgcgcttttccagccacggccagcgggtgacggtggcgctcacgcgcgtcgataaccagtttcagatcgcggtcagcgatcaggggccgggggtcgaggaggcgaagctgtcgagcatcttcgatccgttcgtgcgcgtgaagtcggcgctgtcgggcaagggctacggcctggggctggcgattacccgcaaagtggtgctggcgcacggcggccaggttgaggcgcgcaacggcgataaagaggggcttgtcattaccctgcgcatcccgcgctggccgtcataa

SEQ ID NO: 425041 - DNA, 681 bp, Serratia marcescens
atgaaaattttactggtcgacgatgacctggagcttggcaccatgctgagcgaatacctgacgggcgaaggcttcgacgccacgctggtgctgaccggcaaggcgggagtagagggcgcgctgtcgggcgactataccgcgatgatcctcgatatcatgctgccggacatgagcggcatcgacgtgctgcgcgacgtgcgtaaaaagagccggctgccgatcatcatgctgaccgccaaaggcgacaacatcgatcgggtgattggcctggagatgggcgccgacgattacatgcccaagccgtgctacccgcgcgaactggtggcgcgtctgcgcgcggtgctgcgccggttcgaagagcggccgcaagaggcggacgacgaggccgccatcagcttcggcgagctgacgctgaacccttcaacccgcagcagcgaatggcgcggcaaggcgtttgatttgaccgcttcggaattcaatctgctggagctgttgctgcgcgcgccggatcgcgtggtgtcgaaggacgaactgtccgagaaggggctggggcgcccgcgcgaggcctatgaccgcagcgtggacgtgcacatcagcaatatccgccagaagctgagcgcgttggccggcagtaagctcattatcgagacggtgcgcagcatcggctatcgcattcggtaa

SEQ ID NO: 425042 - DNA, 882 bp, Serratia marcescens
gtgacaacgctcgaacaatgcatcgggaataccccgctggtacaactgcaacggctggccgcccaggcgggcagcgaggtatgggtcaaactggaaggcaataacccggcgggctcggtgaaggatcgagctgcgttggcgatgatccagcaggcggagctgcgcggcgagatcaagcccggcgacgtgctgatcgaggccaccagcggcaacaccggcattgcgctggcgatgatcgccgcgctcaaaggctatacgctgaagctgctgatgccggagaacatgagcctggagcggcaggcggcgatgcgcgcctacggcgccgagctgatcctggtcagccgtgagcagggaatggaaggggcgcgcgatctggcgctggagatgcagcgtcaggggcagggcaaggtgctggaccagttcaacaacctcgacaacccctacgcccacttcaccaccaccggcccggagatctggcgccagaccgaagggcgcatcacccactttgtttccagcatgggcaccaccggcaccattaccggcgtaggcggttacctgaagagccagaatccgcaggtgcagatcatcggcctgcagccggctgaaggcagcagcatccccggcattcgccgttgggcgcccgcttacctgccgggcattttccgcccggagctggtggatcaggtgctggatatcgagcagcgcgatgccgagcagaccatgcgccagctggcgcagcgtgaaggcatcttctgcggcgtcagctccggcggcgcggtggccggtgccctgcgcgtcgcgggggcccatcccggcagcgtcgtggtggcgatcgtctgcgatcgcggtgaccgttacctctccaccggcgtgttcgactga

SEQ ID NO: 425043 - DNA, 1089 bp, Serratia marcescens
atgagcattgagattaacggcatcaacaagtacttcggtcgcaccaaggtattgaacgatatctcgctcgatattgcttccggcgagatggtggcgctgctcgggccgtccggttccggcaagaccacgctgctgcgcattatcgccgggctggaaagccagagcggcggcaagctgggcttccacggcaccgacgtcagccacatgcacgcgcgcgacaggcgcgtgggcttcgtatttcagcactatgcgctgttccgccatatgacggtgttcgacaacatcgccttcggcctgaccgtgctgccgcgtcgcgagcggccgaacgccgcggcgatcaaacagaaagtcacccagctgctggaaatggtgcagctggcccacctggccaaccgctatccgtcgcagctgtccggcggccagaaacagcgcgtggcgttggcgcgcgccctggcggtggaaccgcaaattctgctgctggacgaaccgttcggcgcgctggatgcgcaggtgcgcaaagagctgcgccgctggctgcgtcagctgcacgaagagctgaagttcaccagcgtgttcgtcacccacgatcaggaagaggcgatggaagtggccgaccgcatcgtggtgatgagccagggcaatatcgaacaggtaggctcgccggaagagatcatgcgcgaaccggccagccgcttcgtgctggagttcatgggggaagtgaaccgcctgaacggcgagatccgcggctcccagctgttcgtcggcgcgcaccagtggccgctgtcgttccagccgatgcaccagggcagcgtcgatctgttcctgcgcccgtgggaaatggaagtggcgaccgaaagcagcgagcgctgcccgctgccggtgcaggtgctggaagtcagcccgcgtggccacttctggcagttgacggtgcagccaatcggctggcatcaggagccgatcggcgtggtgttgccggaaggcaacccaaccccggtgcgcggcggccgttattacgtcggcagcctcaatgcgcggctgtatgccggcgatcaactgctgcaacctgttgcgttagccaaaagcgcctga

SEQ ID NO: 425044 - DNA, 876 bp, Serratia marcescens
atggctgatgtctccgccttcaacggcgccgagcgcccgcgcgtcaactggggcaagtggacgctgatcgccatcggcgcgctgttctcggtgctgctgctggtggtgccgatgatatcgattttcgccgaggccttttccaaaggattcggagcgatgtggagcaacttgctcgatccggacatgctgcacgccatttggctgacggtgttgatcgcgctgatcaccgtgccgttcaacctggtgttcggcacgttgctggcgtggctggtgacgcgcttcactttccccggccgccagctgctgctgacgctgatcgatatcccgttcgccgtttcaccggtggtggcggggctgatttacctgctgttttacggcagcaacggcctgctgggcggctggctggatgcgcataacatccagatcatgttctcctggccgggcatggtgctggtgaccattttcgtcacctgccccttcgtggtgcgcgagctggtgccgatgatgctcagccagggcagccaggaagacgaggccgccattctgctgggggcgtccggctggcaaatgttccgccgcgtgacgctgcctaacattcgctgggcgctgctgtatggcgtggtgctgaccaacgcgcgcgccatcggcgagttcggcgcggtgtcggtggtgtccggttcgattcgcggcgaaacctacagcctgccgctgcaggtcgagctgttgcagcaggattacaacaccgtcggctcctttaccgccgccgcgctgttgaccctgatggcgatcgttaccctatttttgaagagcgcgctgcagtggcgtctggaacgtcaaaacgcgcgtctcgagcgggaggaaaatcatgagcattga

SEQ ID NO: 425045 - DNA, 840 bp, Serratia marcescens
atgttggcgttgtcgtccagtaagcgggtgctgcccggatttggcctcagcctcggcagcagcctgttttatacctgtttgatcctgctgctgccgctcaccgcgctggtgatgcagctggcgcagatgagcctggcgcaatactgggaagtgatttccaacccgcaggtggtggcggcgtataaagtgacgctgctggcggccggcgtcgccagcctgttcaacgcggtgttcggcatgctgatggcctggatcctgacgcgctaccgttttcccggccgctcgctgctggacggcctgatcgatctgccgttcgcgctgccgaccgcggtggccggcctgacgctggcggggctgttttccaccaccggctggtacggtcagtggctggcgcacttcgacatcaaggtcacctttacctggcttgggatcgcggtagcgatggcgttcaccagcctgccgtttgtggtgcgcaccgtgcagccggttctggaagagctggggccggaatacgaagaggcggccgagacgctgggcgccacgcgctggcagagcttccgccgcgtggtattgcctgaggtggcgccggcattgttggccggcaccgccatctcctttacccgcagcctgggcgagttcggcgcggtgattttcatcgccggcaacatcgcctggaagacggaagtgacctcgctgatgatttttgtgcgtttacaggagttcgattatccggcggccagcgccatcgcctcggtgatcctggcggcgtcgctgctgctgctgttcagcattaacgtcttgcaaagccgcttcggcagacgtttgggaggagggcactga

SEQ ID NO: 425046 - DNA, 1023 bp, Serratia marcescens
atgaaacaaaaccgggttaaaaatctcgtgctgaaaggttggctggcggctgcgctgttggcgagcggcgccgcgtcggcggcggaattgctgaacagctcttatgacgtttcccgtgaattgttcgtcgcgctgaatcccggctttgaacagcagtggaatcaacagcatccgaacgataagctgaccatcaaacaatcgcatgccggctcgtcgaagcaggcgctggcgatcctgcagggtttgcgcgccgacgtggtgacgtacaaccaggtcaccgacgtgcaaatcctgcacgatcgcgggcagctgatcccggcggactggcaggcgcgtctgccgaacaacagttcgccgttctattccaccatggcgtttctggtgcgcaaggacaacccgaagggcatccatacctggaacgatctggtgcgcgacgacgtgaagctggtgttcccgaacccgaaaacctccggcaacggccgttacacctatctggccgcctggggcgccgccagccaggccgacggcaacgacgcggccaagacccgcgccttcatgacccgcttcctgaaaaacgtgctggtgttcgataccggcggtcgcggcgcgaccaccaccttcgtcgagcgcggcttgggcgacgtgctgatcagcttcgagtccgaagtgaacaacatccgcaagcaatacggtgaagacaagtacgaagtgatcgtgccgccggtcgatattctggcggagttcccggtggcctggatcgacaaaaacgtcgagcgcaacggcaccgaacaggcggccaaagcctatctgaactatctctacagcccggcggcgcagcaggtgatcaccagtttctactatcgcgtgtatgaccagaaagcgatggcggcggcgaaggggcaattcccggacacccaactgttccgcgtggaagatcaattcggcggctggccgcaggtgatgaaaacccacttcgccaccggcggcgagctggatcagctgttagcggcagggcgcaagtaa

SEQ ID NO: 425047 - DNA, 900 bp, Serratia marcescens
atgacacaggttcagagcggcattctgctggagcactgccgtttcgccatttttatggaagccagcgtacagggcgaattcgccgacttgcgccagggctgcaagcagttttgtcagacgctgagcgagctgcagcagcagttccccgatgcgcgcctcggcgcggtgatcgctttcggctacgacgtttggcacgatctctccagcggccagggcgcgcaagagctgaagccgttcacgccgctcggcaaagggctggcgccggccacccagcgcgatatgctgatccacatccagtcgctgcgtcatgacgtcaacttcacgctggcgcaggccgcgctggcggcgtttggcaacgccatcaagattgaagaagaaacccacggtttccgctgggtggaagagcgcgatttgagcggcttcatcgacggcaccgaaaatccacagggcgagcagcgcccggcagtggcgacgatcgccgaaggcgaagaggacgcaggcggcagctacgtgctggtgcagcgctacgagcacaacctgcgccagtggcagcgctttaccaccgaacagcaggagcagatcatcggccgcaccaagcacgacagcgaagagctgccggccgatcagcgcccggatacctcgcacgtcagccgcgtcgatctgaaagagaacggcaaaggcctgaaaattctgcgccagagcctgccttacggcaccgccagcggcaagcatggcctgttcttcatcgcctattgcgcacgcctgcacaatattgagcagcagctgctgagcatgttcggcgatctggacggcaaacgcgacgcgatgctgcgtttcagccgtgcggtgaccggcagctactacttcgcgccatcgctgacgcgcctgctgtcactttga

SEQ ID NO: 425048 - DNA, 588 bp, Serratia marcescens
atgaatattcgccccctgctgttagggcttccgctgttactgaccggctgttcgagcatgtccaatttttcctggtccagcctgtcgccgttcaactggttcggcagcaacctggaggtcggcgccaagggcgtcggcaagctcaacgccggcacgccgatgtcggaaagcgccatcaacgacgggctggacggcaactaccgcctgcgcggcggcatggcgaccagcaacggccagatcgtctcttattaccaggcgctgtccggcgacgaggtgaagctggtgatcaccggcgaaccgaaagggcacctgcagcgggtagacgtgctggatccgcaagtggcgacggagtggggcaacaagctcggcacgccgttcggcgacatgtacagcaaggcgttcggttcctgtaaaccgggcagcggcgaagacgccggtaaagtggagtgcgtggcggagcagagcaagtacgtcacctacatcttcagcggcaagtgggccggggcgcaggatatcatcccgccggacgacaccctgaaaagctggacggtcagcaaaatcatctggcacgccaagccgcagcagtaa

SEQ ID NO: 425049 - DNA, 465 bp, Serratia marcescens
ttgaagccattctcaccccggttttccccggacgattacgaccagcacggcgcgctgcggttgccgctgggattttgggccgtgttgattttgcaggcgcgcacctggctgctgttcgtgatggccggcgcttcgcgcgagcagggcgaaagcttgctggcgctattttatccggatacccaacgtttttggtactgcatgctgctcggcctgccggcggcgctggcgtttttgctgagcggccgccgccaccaatggccgcggctgtggcgcggctggcgctgggggctggctgtctccctgctggcgtcgctcggcggctcgttgttcagcctgtggcaccaggacggcgatgcgccggggctggagctggcgttggcgctgctcgatgcgctggcgctaagctatctgttgctgaatgcgcgcctgaaagcctgctttgcgccggcggagcacgccgactaa

SEQ ID NO: 425050 - DNA, 399 bp, Serratia marcescens
atgaaaaaactgactctggccgctctgatcgcgctgtgcagcgcaccggtactggcgcaacaaggcgggttcctcgatccggccgcgccgcaggcccaaacgcaacccgctcctcagggcggtttctccggccccagcgcggcgctgaccaccgtggacaaggtgaaatcgctgagcgatgacacctgggtgatgctgcagggcaatatcgagcagcgcatcggcgacgacacctataccttccgcgatgccaccggcacgctgacggtcgaaatcgatcgcaagcgctggaacggccaaaccgttacgccgaaagacaaggtgcagttggaaggcaaagtggataaagactggagcagcgtcgaagtggacgtgaaaaccgtcaaaaagctgccttaa

SEQ ID NO: 425051 - DNA, 426 bp, Serratia marcescens
atggaaattcgcgtatttcgacaagacgactttgaagaagtcattaccctgtgggagcgctgcgatctgctgcggccctggaacgatccggaaatggacatcgagcgcaagctgaaccacgatccggagctgttcctggtggcggaagtcggcggcgaagtggtcggttcggtgatgggcggctatgacggccaccgcggctcggcgtattacctcggggtgcatcccgactatcgcgggcgcggcatcgccaatgcgttgatcaaccgtctggagaagaagttgatcgcccgtggctgcccgaaaatccagattatggtgcgcgaagacaacgacacggtggtcgagatgtacgagaagctcggctacgagatccagggcatcaccagcctgggcaagcggttgatcgaagatcaggaatattga

SEQ ID NO: 425052 - DNA, 882 bp, Serratia marcescens
atgaaaaagcagggtaaacccttcctcaattttaaaccgcttgccgtttccccgacgcgacgccaacttttgctttccggcctggcggtggcgctgctcggcgtgaaaagccaacgcgccagggcggaaggcctgctgcgcaatcaacacagcaagccggcggcgaaaccggccggagccaagaagttggtgatgatcgatcccggccacggcggcatcgactccggtgcggtcggccacgaaggctcgcaggaaaaacacatcgtgctggaaatcgccaaccacgtgcgccgtttcctgcatgagcacgatcacgtcgaggcgcgcctgacgcgcgaagaagacgagttcattccgctgttccagcgggtggagatcgcccaccagcaccaggccgacctgttcatttcgatccacgccgatggcttcaccagcccatcggcctccggcgcttcggtgttcgccctgtccaaccgcggcgccagcagcgccatggcgcgctacctctccaaccgtgaaaacgccgccgacgatgtggcgggcggtaaatacaaggatcaggacaactacctgcagcaggtgctgttcgatctggtgcaaaccgacaccatcaacaacagcctgacgctcggccgccacgtgctcggccagatccgcccagtacaccatctgcacagcgacagcaccgaacaggcggcgtttgcggtgttgaaatcgccgtccattccctcggtgctggtggaaacctcgttcatcaccaacccgaacgaagagcgcctgctgggcaccaccgcgtttcgcgagaagattgcccgcgccatcgcggacggcatcgttaacttcttcgactacttcgacgcccaccaacgcaaaccccgctga

SEQ ID NO: 425053 - DNA, 921 bp, Serratia marcescens
atgagtttacctaacatcgctgaagtaaaatccttcctgctggcgctgcaggatcacatctgcgcgcagctcgcccaggccggcgacggcgccgcgttcaccgaagaccaatggacgcgtgaagaaggcggcggtggccgcagccgcgtgttgaccaacggcgcggtgttcgaacaggcgggggtcaacttctcgcacgtctccggcgccaccctgccggcctcggcgaccgcgcaccgtcctgagctggccgggcgcagcttccaggcgatgggcgtctcattggttatccatccgctcagcccctacgtgcccactagccacgccaacgtgcgcttcttcatcgccgaaaagccgggcgaggcgccggtgtggtggttcggcggcggctttgatctgacgccgttctacggtttcgcagaggatgccgtgcattggcaccgcactgcggccgagctgtgcgcgccgttcggcgacgaggtctaccccaaatacaaacagtggtgcgacgattacttcttcatcaagcaccgcaacgaagcgcgcggcatcggcggcctgttctatgacgatctgaacaccccggacttcgaccactgctttgccttcacccgcgcggtgggccagggcttcctcgacgcctatctgccgatcgtggaaaaacgcaaggccttgacctggggcgagcgcgagcgtcagttccagctgtatcgccgcggccgctacgtggaattcaacctggtgtgggatcgcggcacgctgttcgggctgcaaaccggcgggcgcaccgagtccattctgatgtcgatgccgccgttggtgcgttgggaatataactaccagccagacgccgatagcccggaagcggcgctggcgcgcgattttctgccggtgcgcgactggctgcaggagccgaaatga

SEQ ID NO: 425054 - DNA, 459 bp, Serratia marcescens
atgatgcagatttgggtcgatgcagacgcctgtccgaacgtgatcaaagaggtgctgttccgcgccgccgatcgtaccgccatcaccgtaacgctggtggcgaaccagccgctgcgcacgccgccgtcgaagtacatccgttcgctgcaggtggcggccggcttcgacgtggccgacaacgagatcgtgcgccgctgcgcagcgggcgatctggtgatcaccgccgacattccgctggcggcggaggtgatagagaaaggcgcggtagcgctgaacccgcgcggcgaacgctatacgccggacaccatccgcgagcgcctcaacatgcgcgattttatggataccctgcgcgccagcggcatccagaccggcggcccgaacgccctgaaccagcgcgaccgccagcagttcgccaacgagctggacaaatggctgctgcaggcaaagcgggcgcagtga

SEQ ID NO: 425055 - DNA, 2250 bp, Serratia marcescens
atgatagcgagcctgatcggcgcgggactggcgctgtacgggtcggctgcggccgcgcaggaacaggcggaaaataataaaggcaacgtggcgttcagcccgctcaacgtctcggccgccgacagcggcaagagcagcgaaaaagacgcgttggcccggccgggtgcattcagctcgcgcgatgaaaacaaaaatctggagtcggtggacagcattctgcgcagcatgccgggcacctatacccagatcgatcccagtcagggggccgtcagcgtcaatatccgcggtctgagcggttttggccgggtcaataccatggtcgatggcattacccagaactattacggtacttccacgtctggtgtgatgtcacacggttcgaccaataaccaggcgggggtcttgatagatcccaattttatcgtcggagtggacgtggcgcgcggtgagaacagtggcggcagcggcgtaaatgcgttggcaggcagtgctaacttccgcacaatcggtgtcgatgatgtgatcttttctggcaatcctttcggggtgagaaccaaattctctgtcggcagcaacggcattggccgcagtggcatgatcgccgtcgccggtaaggggcaggcgtttaccgataccggcagcattggcgcgatggccgcgatcagtgggagctccatttactcgaacttcaacaatggcgacggtatcagcagcgaagattttgggtacgatgaatttatgaagcaaaatcccaagtcacagctgttcaaactggatatcaaaccgaacgagttcaatagcattgagttttccgccaggaactaccaaaaccgcttttctcggcgcgatatcgatagccatgacctctacctcaaatatcactatgcgccgttttcggagttggtggatttaaacctcaccgtcagcaccagtaaaggcaatcagaaatacgacggcggttcgctgttcaccttctttaacaccaacgcggaaaaccgctccgatgcgctggatatcaataacaccagccgattcagcctgctggataccgatgtagccttcagctatggcggcaaactgatgcgcaaccaataccgtaagcatgtagaatcggctatagagaattcgcagacggcgcaggaagcaatagaaaataataccttcgcgccatccggcgagcagcgaatcggcagtttatataccggcctgcagcttaaccgggatatctatcagctcgatctcaacctgaactacaccagcaacaagctgaccggttacaagcctgaatgcgattatcgcgtggagtgcttcccgcaaggggccgctagcatcaatttgaaagagcaagggttcaatccttcggtaatgctatcggcacaggtgacgccgtggttgcagccattcgtcagctacagcaagtcgatgcgtgcgccgaacattcaagaagtgttctattccaactcgggtggcgcatcgatgaacccgttcctcaaaggtgaacgagcggaaacctggcaggccggcttcaacgccaacgggcacgatttgctggtgaaggaagactctttacgcctcaaggtcgtgggctataccagtaaagtgcgcaattacatcttcagtgaatcttacatggtgtgccgcaatggacggaaatgcagctatcgcgaaaatctggaaaacgattgggccgatgcgagcgaagattactcggacaatatgtatatctacgtcaactctctgacgccggtgcgtatgcatggtgttgaggttgaagccaactatgatgccggacgagccttcgcgcgcgtctctttcagcaagcagcacaccgagcagccgacctccatcgccagcacttatttcggcgccggggatatcaatgaactgccggacatgtactttacgttggataccggggtgcgttttcttgatgaatcgctaaccgtcggcagcatcgtgaaatatacgggcaagacgcgtcgcctgtcgccggattacgagcagagtgaatcgaccggtgaaatcctcaagcaggaaatgccgaatattcctaccgttatcgacctgtacagcacttatcagatcaaccgcaacgtcatgctgaaattcagcgtgcaaaacgtgatgaacaagagctattccgaggcgttgaacaaactgaatatgttgccgatccagggggatgacgcgacggccgccaacaccgcccgtgggcgcacctatatcttcggcggggaggtgcgcttctaa

SEQ ID NO: 425056 - DNA, 2127 bp, Serratia marcescens
atgaatccgctgttattcaccccgcgccgtcgcatcgcggccgcgctctggctttctttaggcatcgccggcgccgcgctggcgcaaccgcagccgccattggcggaacgcgcgccgaaagcgctaacggcgcacggcgagacgcgcaccgacgattactactggctgcgcgacgacagccgaaaagagccgaaggtgctggactacctgaaggcggagaaccgctacaccgagcagatgatggcgccgtaccagaagctgcgcgccacgctgtatcaggagatgctgggccgcatgaaccctgacgatcgttcggtgccgtatcaactcaacggctatcgctatcaggaaagctacgccgccggtaaagatttcgcgctgtatcagcgccaggcgctcaccgccgacgcgccgtggcaaaccttgctggacgccaatcagcgcgcggccggccacgcctactaccgcctgggggcgatggacgtcagccaggacaaccgccggctggcggtggccgaagatctgcagggccgccgccaataccgcatctccctgcgtgagataggcagcgaacgctggtcgccggaaacgctggaaaacacctccggcaacatggtgtgggccaacgacaaccaaaccctgttctacgtgcgcaaccacccgcaaacgctgttgccataccaggtttatcgccatcagtacggtacgccgacggcggaagataagctggtgtaccaggaaaacgatccggcgttctacctcagcctcggccgctcgtcctcgcgcgattacctgattctgaccatcagcggtaacaccacctccgaggtgcgcctgatcgacgccaaccagccgcagcgcgagccgcagctgttcgccgcccggcagaacggccgcgagtattacctcgatcactaccgcggcgagttctacctgcgttctaaccatcaggatccgaactttggcctgtaccgcacggcggcggcgggcaaaccctggcagacgctgatcgcgccgcaggcgcagcacgaggtggagagcttcagcctgttccgcgactggctggtggtgcaggagcgcgccaacgggctggtgcagctgcggcaaatcagctgggacggcaaaaccgagcgcgccatcccgttcgatgacgccagctacatggcctggctgggctataaccccgagccggacagcgatcggttgcgctacggctattcggcgatgaccacgccgacccgcacctatgaatgggatttgaacaagggcgagcgcaccctgctgaagcagcaggaggtgaaaggcgtcgatccgagcctgtatcacagcgagcgcatctgggtcacggcgcgcgacggcgtgaaggtgccggtctcgctggtgtaccgcacatcgctgttcaaaaacgggcataacccgctgctggtgtacggctacggcgcttatggcatgagcatggatccggcgttcagcgccaaccgcatcagcctgctggatcgcggcttcgtctatgcgctgatccacgtgcgcggcggcggcgagctggggcagagctggtacaaacagggcaagctgacgcataaaccgaacagcttcaacgacttcatcgacgccacccaggcgctgatcaaagacggctatggccaaccggggcgcatctacgccatgggcggcagcgccggcggcttgctgatgggggcggtgatcaatcaggcgccgcagctgtacaacgcggtggtggcgcaggtgccgttcgtcgacgtggtgaccaccatgctggacgacagcattccgctgaccaccggggaatacgaggagtggggcaacccgcaccagccggccgcctatgcgctgatgaagtcctacagcccgtacgacaacgtgcgcaagcagcgttacccgaacctgctggttaccagcggcttgtacgactcccaggtgcagtattgggagccggccaaatgggtggcgaagctgcggcgcttcaagcagggcgattcgctgctgctgctctccaccgacatgaccgccggccacggcggcaaatcgggccgcctggcgcggctggaaaacggcgcgctggagtacgcctttattttggcggcggaccggcaggcgcagaaataa

SEQ ID NO: 425057 - DNA, 798 bp, Serratia marcescens
atgttaagtcagtcttactccctcccggcctttgaactgccgcagccgcgctgggcgcgcggcctgctgctcgccctggtggcgcacgcggcgttggtgctgctgttttactggccgcagacggcgctggagccggtggtactgccaccgccggcggtgatgatgagctgggcggcgcagattgaagcgccggaaagcaagccgctgccgctgggcgtgcagcaggcggaatccgccgcggcgcagcctgcggagcagcagcaacagccggatctgcccaagctggcgcgcgccgagaatgcgaaaatcgtgacggcgcagaagaagcgtgccgaacaccgccccccgcaaaaatcgcagccgaagccgcaggaacaggccaaagagacgcgcaatgccgccgcgtccagcgccgccgcgccgcaggcgcagacgctttcccatcagaccgccgcaccgatcaacagcgacgccaacagcaacgcgcaggccaaactgtcgtgggagagcctggtgaaaggcaaactgaaccgcatcaaggattaccctttggatgcccgcagccgccggcgcagcggcatgccgcaggtcagcttcagcgtcgacgcgcaggggcgggtctcgaacgtcatgctgcaggtgcgttccggcaccgcgtcgctggatcgggaagcggtggcggtggtgtcacgcgcccagccgttgccgccgccgccgccggagatgctgcagcagggagccgtcaaggtgacgatgccgatcgatttcaatctggcggagttgaatgcccgccgttaa

SEQ ID NO: 425058 - DNA, 843 bp, Serratia marcescens
atgatgagatacctgattttagtggcggcgttggcgcttggcgcctgcagccaggcgccggtgaaggcgccggccaacgacgtcgcgagtttggggagcatcaccgatctgcacagcggcgcgaccctgacgcctgagcagctgttgacgcggctggcgcagcagccgcgggtgatcctgggggagaagcatgataatccttaccaccatcagattgagcaatggctggtgcagcagctgccgctgcggcggccgcagggcagcgtgctgatggagatgatcaacccgaaccaacaggcgcaggtcgacaaggtcaagcagtggttgcagagcgatcccacggtgcgtgacggccgcgtagcggagctgatcgcctggcagccgggctggaagtgggagctgtatggcggggtgacgatggcggcgatgcgcgcgccttacccgctgtggtcggccaatctggatcgcagcgagattacggcgttctatcagcagccacagttcccggcggggcagctatcggcgcagccggcggtgcgcaaggcgctggaagagaccatccgcacttcgcacggcggcaagattgaggccgaccagctgcaggcgatgttggcgatccagcagcagcgcgaccggcgcatggcggaacgtctgctggcggcgccgacgcccgcgctgctgatcgccggtggctatcacgccgccaaatcggtgggggtgccgctgcacgtgcaggatctgcaaccggcggcggcgccgacggtgctgatgttggcggagccgggcgtacaggtcgatgcgaacaccgcagactacctgtggatcacaccatcagtgaaatga

SEQ ID NO: 425059 - DNA, 1410 bp, Serratia marcescens
atgcaaccatcggcacccgccgcaggacagttcaaacgcagcatgaaggcccggcacctggtgatgctgtcgctgggcggcgtgatcggcaccgggctgtttttcaacaccggctacatcatctccaccaccggggcgctcggcacgctgctggcctacctgatcggcgcgctggtggtgtatctggtgatgctgtgcctgggcgagctgtcggtggcgatgccggaaaccggcgcctttcacgtctatgcttcgcgctatctggggccggccaccggctataccgtcgcctggctgtattggctcacctggacggtggcgctcggctccagcctgaccgccgccggattctgcatgcagtactggttcccgcagtcgccggtgtggctgtggtgtttgatcttctgcgtggccattttcctgcttaacgtggtgaccacccgctttttcgccgaaagcgaattctggttttcgctgatcaaagtggtgaccattctggcatttatcattctgggcggcgccgccatgttcggcctgctgccgatgaaagacggcacgccggcgccgttcctgcataacctgaccgcttccggctggctgccgcacggtacgctgccgatcctgatgaccatggtggcggtgaacttcgccttctccggcacggagctgatcggcatcgccgccggtgaaaccgagaacccggaaaaagtcgtgccgctggcgatccgtactacggtgatccgcctgatgctgttctttatcggcacggtcttcgtgctggcagcgttgatcccgatggatcaggcggggatcgtcaaaagcccgtttgtgctggtgtttgaacgcatcggcgtgccttacgccgccgatatcttcaacttcgtgatcctgaccgccatcctgtcggcggccaactccggcctgtacgcctcggggcgcatgctgtggtcgctggcccatcagcgcaccctgccggcctactttgcgcgcgtcaatgcgcgcggcattccaatcaacgccctgaccttcagcatgctaggcggcgtgctggcgctgctgaccagcgtgatcgcgccggacacggtgttcgtcgccctgtcggcaatctccggttttgcggtggtggcggtgtggctgagcatctgcgcagcccactttgctttccgccgcgcctacttgcgcagcggccagccgataagcggcctgaaataccgcgcgcccggctacccgctgacgccgatcttcggctttgcgctgtgcctgctggcctgcatcgggctggcgttcgatccggagcagcgcattgcgctctactgcgggctgccgttcgtcgccctgtgctatctcacctatttcctgacccggcgcgccgggcaaaaaaccgctttgggagaacaacatgtcggttaa

SEQ ID NO: 425060 - DNA, 939 bp, Serratia marcescens
atgtcggttaacaaccccgtcgcccgcctgctggccgaacaccccacgctgatcctggacggcgcgctggccaccgagctggaagcgcgcggctgcgatctgaccgatccgctgtggtcggccaaggtgctgattgaaaatcccgagcttatctatcaggtgcatctcgattatttcaacgccggcgcccactgcgccatcaccgccagctatcaggccacgccgcagggcttcttgcgccgcggcctggatcaggagcaatcgctggcgttgatcgccaaaagcgtgcagctggcgcaacgcgcgcgccgcgattatctggccgcgcacccgcaggccgcgccgctgctgatcgccggctcggtaggcccgtacggcgcctatctggccgacggctcggaataccgcggcgactaccggctggcgcaggatgagatgattgctttccaccgcccgcgcctcgccgcactggccgccgccggcgtcgatctgctggcctgcgaaacgctaccgtcgttcgccgaactgcaggcgctgctgacgctgctgcaggaatttccgacgctcggcgcctggttcgccttcaccctgcgcgacagccaacacctcagcgacggcacgccgctgacggaggtcctgtccgcgctgcgcgacaacccgcaggtgttggccatcggcatcaactgcatcgcgctggacaaggtcgccccggcgctgcgccaactgggcgcgctggccgacaaaccgctgctggtctaccccaactccggcgagcactacgatgcggtgagcaaaacctggcacgcctgcggcggcgagcacggcagcctggccgatcaggcggtggagtggcgcgcgctcggcgcacaattgatcggcggctgttgccgcaccaccccgcaggatatccgcgccatcgctgcacgctgcaaggcataa

SEQ ID NO: 425061 - DNA, 2280 bp, Serratia marcescens
atggacgaacagctcaaacagagtgcccttgatttccatcagtttcctgtcccagggaagatccaggtttcccccaccaaaccgttggcgacccaacgcgatctggcgttggcctattcgccgggcgtcgccgcgccttgcctcgagatcgccgaagatccgttggcagcctacaaatacaccgcgcgcggcaacctggtggcggtgatttccaacggcacggcggtactgggtctgggcaatatcggcgcgttggccggtaagccggtgatggaaggcaagggcgttttgttcaagaagttttccggtatcgatgtgtttgatatcgaagtggatgagcataaccctgacaaattgatcgacattatcgccgcgctggaaccgaccttcggcggcatcaacctggaagacatcaaggcgccggagtgtttctacatcgaacagaaactgcgcgagcgcatgaagatcccggtgttccacgacgaccagcacggcacggcgatcatcaccactgcggcggtgcttaacggcctgcgcgtggtgaagaagaatatctccgacgtacgcctggtggtgtccggcgccggcgcggcctccatcgcctgcctgaacctgctggtggcgctggggctgcggcaacagaacatcaccgtttgcgactccaagggcgtcatctataaaggccgcgacgccaatatggagcagaccaaagccgcctacgccatcgaggataacggccagcgcacgctgggcgacgccatcccgaacgccgacatcttcctcggctgctccggcccgggcgtcttgacgcaggatatggtgaaaaccatggcgcgcgatccgctgatcatggcgctggccaacccggaaccggaaattctgccgccgctggccaaagcggtgcgcccggacgccatcatctgtaccggccgttccgattacccgaaccaggtgaacaacgtcctgtgcttcccgttcatcttccgcggcgcgctggacgtgggcgcgaccaccatcaacgaagagatgaagctggcctgcgtgcacgccatcgccgatctggcgctggcggagcagagcgacgtggtggcttccgcctatgacgatcaggatctctccttcgggccggaatacatcatcccgaaaccgttcgatccgcgcctgatcgtcaagatcgcgccggcggtagccaaggcggcgatggactccggcgtggcgacgcgcccgatcgaagacttcgacgcttacgtcgagaagctggcggagttcgtctacaaaaccaacctgttcatgaagccgatcttctcgcaggcgcgcaaagaggtgaagcgggtggtgctggcggaaggcgaggaagagcgcgtgctgcacgccacgcaggaactggtgtcacaggggctggccttcccgatcctggtcggccgcccgagcgtgatcgagatgcgcctgaaaaagctgggtctgcagctgacgccgggcaaggatttcgaagtggtaaacaacgagtcggatccgcgctttaacgaatactggggcgagtactaccagatcatgaaacgccgcggcgtctcgcaagagcaggcgcgccgtgcggtgatcggcaacccgacgctgatcgccgccatcatgctgcaccgcggcgaagcggacgcgatgatctgtggcaccatcggcagctaccacgagcattacgacgtggtgaagaacgtgttcggcttccgtgaaggcgcgcacgtcgccggcgcgatgaacgcgctgctgctgccgagcggcaacacctttatcgccgacacctacgtcaacgacgatccgaccccggaacagctggcggagatcaccctgatggcggcggaaaccgtgcgccgcttcggcatcgagccgaaggtggcgctgctgtctcactccagcttcggctcttccgactgcccggcggcgcgcaagatgcgcaaaacgctggaactggtgaacgagctggcgccggagctggagatcgacggcgaaatgcacggtgacgccgcgctggtggaaagcatccgtcacgatctgatgccggacagcccgctgaaaggctcggccaacctgctgatcatgccgaacatggaagcggcgcgcatcagctacaacctgctgcgcgtctcctgctcggaaggggtgaccgtcgggccggtgctgatgggggtcgccaagccggtgcacatcctgacgccgatcgcctcggtgcgccgcatcgtcaacatggtggcgctggcggtggtggaagcccagacccagccgctgtaa

SEQ ID NO: 425062 - DNA, 381 bp, Serratia marcescens
atgagcggctggctgcaaaaactgatgcagggcgggttgctgctgctgttgctggcggccatctgcctcggcggctacagctcgctgctgtcgcaccagttggcgtccgcgcgccaacaggcggcggagctacagaaaagcctggcgcagcaggccgggctgatcgccaccctgcagacccaggatgcgcaaaaccgcgcgctgatggcggcgcagcagcggcaggaacggcagctgcgccaacaacacgaggcttatcagaggaaataccgtgaagcgattaaaaacgatccctgcgccgctcagcctctgcctagcgctgtgcttgagctcctgcgcccggccgccggcgccgcaggccgtgccgctgttgccccctga

SEQ ID NO: 425063 - DNA, 402 bp, Serratia marcescens
atgttaaatgacatcgaagagattcgttttaccgcccgcagcgaagagaacctgcgcggcgtgcacccggatctggtgcgcgttattcgtctggcgctgcgttattcgctggtgccgttttccgtcagcgaggggctgcgcagcatggcgcgccaacgggaaatggtgcgcgccggcagcagccaaacgctgcgcagccgccatctgaccggccacgcggtggacgtggtggcgatgccggcgggtgtggtctcctgggagtgggattactacgcgcagattgcggtggcggtgcggcgcgcggcgcgtgaatgcggggtcaacgtcgaatggggcggcgagtggaaaaccctcaaggatggcccgcacttccagctggcgttccgggactatccggcatga

SEQ ID NO: 425064 - DNA, 327 bp, Serratia marcescens
atgtccagcatagagcctgacgctgttggcttaatagtccagcgagtatgtgaatatcttcagccggtattaaacgccattttggccggcgtcatggcgctattgcacggcgcttaccgcaacgtgggcattcggcgccgtttattgaatgcggcgatgtgcgcgttattggcctggacggtgcgcgatgcgctggcgctgatgggcctggaattaaagtgggcgaatttggccagcgtactgattggctttatgggggcagattacatcaacgccttaattaaaaagttcatcggcaaaaagacggggtttaaaaatgttaaatga

SEQ ID NO: 425065 - DNA, 1500 bp, Serratia marcescens
atgtccacacgcaaagccgttattgggtattattttattccgaccaaccaaatcaataattacaccgagtccgatacgtccgtcgtgccgttcccggtttccaacatcacgccggccaaagccaaacagctgacgcacatcaacttctcgttcctggatatcaacagcaacctggaatgcgcctgggatccggccaccaacgatgccaaggcgcgcgatgtggtcaaccgcctgaccgcgctcaaggcgcacaatcccagcctgcgcatcatgttctccatcggcggttggtactactccaacgatctgggcgtgtcgcacgccaactacgtcaacgcggtgaaaaccccggcctcgcgcaccaagtttgcccaatcctgcgtgcgcatcatgaaggattacggcttcgacggcgtggacatcgactgggagtacccgcaagcatcagaagtggacggtttcatcgccgcgctgcaagagatccgcaccctgctgaatcagcaaaccgtcgccgacggccgccaggcgctgccgtatcagttgactatcgccggcgccggcggcgccttcttcctgtcgcgctattacagcaagctggcgcagatcgtcgcgccgctcgattacatcaacctgatgacctacgatctggccggcccctgggagaagatcaccaaccaccaggcggcgctgttcggcgacgcggccgggccgaccttctacaacgcgctgcgcgaagccaatctgggctggagctgggaagagctgacccgcgccttccccagcccgttcagcctgacggtcgacgccgcggtgcagcaacacctgatgatggaaggcgtgccgagcgccaagatcgtgatgggcgtccccttctacggccgcgccttcaggggcgtcagcggcagcaacggcggccagtacagcagccacagcacgccgggcgaagatccgtatccgggtaccgattactggctggtgggctgcgaagagtgcgtgcgcgacaaggatccgcgcatcgcctcctatcgccagctggagcagatgctgcagggtaactacggctatcagcggttgtggaacgacaagaccaaaaccccttacctgtatcatgcgcagaacgggctgttcgtcacctatgacgatgccgaaagcttcaaatacaaagcgaagtacatcaagcagcagcagctgggcggcgtgatgttctggcatctggggcaagacaaccgcaacggcgatctgctggccgcgctggatcgctatttcaacgccgcggactacgacgacagccaactggatatgggcaccggcctgcgttacaccggcgtcggccccggcaacctgccgatcatgaccgcgccggcctacgtgccaggcaccacttacgcgcagggcgcgctggtgtcctatcagggttacgtctggcagaccaaatggggttacatcacctcggcgcccggctccgacagcgcctggctgaaggtgggccgcgtggcgtaa

SEQ ID NO: 425066 - DNA, 942 bp, Serratia marcescens
atgactagattatccctggacgcgattaaaataatcagcaccattaagagcaccggctctttctctatggcggcggaggcgctgcataaaacgccttcggcaatctcttatcgggtttccaatattgaaagcaaactctgcgtgaaactttttcatcgcaatggccccatgattaccctgacggatgaaggggaatttctcctgcaggagggcagctggatattaaatgcggtgcaggatctggaaagccgggtaagaaacatccccaagctggacaataatatccgcctggcggtggacaccttcttcccgttggaaaccctgacacaggatatccgcgactatattcagcattgcccgaacgccaatatctcggtgcagcgagaagcgctgaacggcacctgggatgcgctgaagaacaaccgggcggatctgatcatcgccatcggccaaatccccgacagcgtacaggccaaaaccctgatgcttggcaagctcaactttgtgctgtgcgtgtcgccctcgcatccgttcgcggcgcagaaaaagccggtgtgcaagaagcagcgcttgaacgacatcgtggttgcgatcgccgacagcagccatgaactgcccaaacgcaatcacggcacgttgcctttgcagcgccaactggtggtgtgcgacgtggaaagcaacctggcgttgctcaaacgcggcattggccacgcttttctgccgccgtcgctcatcgaaaaggaactggccagcggcgaactggtgacggtgccggtggagatgcaaaagggcgacgaaatgatttggctggcgtggcatccggccagcaagggcgccgggtttaactggtggcatgagcggctgacgcgcaaaagcgatgtttacagcctgatgggccgcgaagtggtgcgggatggcggctatccttggtgccacaactga

SEQ ID NO: 425067 - DNA, 594 bp, Serratia marcescens
atgaacaaaacttcccgtaccctattctctctgggcctgctgagcgcagccatgttcggcgtttcgcaacaggcgaatgctcacggttatgtcgaatcgccggccagccgcgcttatcagtgcaaactgcagctcaacacccagtgcggcagcgtgcagtatgaaccgcagagcgtcgaaggcctgaaaggcttcccgcaggccggcccggctgacggccacatcgccagcgccgacaagtccaccttcttcgaactggatcagcaaacgccgacgcgctggaacaagctcaacctgaaaaccggcccgaactcctttacctggaagctgaccgcgcgtcacagcaccaccagctggcgctatttcatcaccaagccgaactgggacgcttcgcagccgctgacccgcgcctcctttgatctgacgccgttctgccagttcaacgacggcggcgccatccctgccgcacaggttacccaccaatgcaatataccggcagatcgcagcggttcgcacgtgatccttgccgtgtgggatatagccgacaccgccaacgccttctatcaggcgatcgacgtcaacctgagcaaataa

SEQ ID NO: 425068 - DNA, 951 bp, Serratia marcescens
atgaatcaattagacgcactcaagcagctgaccacggtggtcgccgacagcggcgatatcgaatccatccgccagttcgaaccccaggacgctaccaccaacccttcgctgatcctgaaagccgccgcgctgccgcagtacaaggcgctgatcaccgaagcactggactatgcccgccgccagggcggcagcaaggaaacccagctgatcaacgccagcgataagctggcggtcaatatcggcgtcgagatcctcaaaagcgtgccgggccgcatctccaccgaagtggacgcccgcctgtcgttcgatcgcggcatgtgcgtcgccaaagcgcgcaagctgatcgccatgtatcaagaacagggcatcgacaaatcgcgcatcctgatcaaactggcttccacctgggaaggcatcaaagccgccgaggagctggaaaaagaaggcatcaacaccaacctgacgctgctgttctccttcgcccaggcccgcgcctgcgccgaagccggcgtgtatctgatctcgccgttcgtcggccgcatctatgactggtatcaggccaaacagcctgccgccgactacgatgccgagcaggatccgggcgtgaaatcggtgcgcaccatctatgaatactacaagcgtcatcgttaccagacggtgatcatgggcgccagcttccgcaaggttgagcagatcctggcgctggccggctgcgatcgcctgaccatcgcgccgaaccttttggaacagctgaaaaacagcgaccggccggtcgagcgcaagctgaccccgtccaccgagggcttccaccaaccggccccgctggccgaagcagagttccgctggctgcacaatcaggacgccatggcggtggagaaactcgccgaaggcattcgcctgttcgccgtcgaccagcagaagctggaagacatgctggccgctcaactgtaa

SEQ ID NO: 425069 - DNA, 930 bp, Serratia marcescens
atgccgattcgtgttcctgatgagttacctgcggtcaatttcttgcgcggtgagaatgtcttcgtgatgacatcctcgcgggcaaaaacacaggaaatcaggccactgaaagtgctgatcctcaacctgatgccaaagaagatcgaaacggaaaaccagtttctgcgcctgttgtccaactcgccgctgcagattgatatccagctgctgcgtatcgacagccgcgaatcgaagaacacgccggccgagcatctgaataacttctactgcgacttcgaggatatccagaacgagaacttcgatggtctgatcgtcaccggcgcgccgctggggctggtcgatttctgcgatgttgcctattggccacagatcgagcgcgtgatcgactgggccaagcaccacgttacctccacgctgttcgtgtgctgggcggtacaggcggcgttgaatattctgtatggcattcccaagatgacgcgcgaagtgaagctctccggcgtttacccgcaccaaacgctacagcagcatgcgttgctgacgcgcggcttcgacgaaagtttcctggcgccgcattcacgctatgccgatttcccgaccgaggtgattcgccaatataccgacctggatattctggccgaatccgaacaggcgggcgcctacctgttcgccagcagggataagcgcctggcgttcgtcaccggccatccggaatacgatacgctgaccctggcgggggagtattgtcgcgactacgaagctggcctcgatcccgccgttccgctcaactacttcccggatgacaaccccgcactgacaccgaaagccacctggcgcagccatggccatctgctgttttccaactggctcaactattacgtctaccagatcacgccgtacgatctgcgtcatatgaatccgacgctcgactga

SEQ ID NO: 425070 - DNA, 1599 bp, Serratia marcescens
atgacgcaacagatagcaggcacggagttaaggtttacgcagggtttcgccgcagcggagcgccaggtgttgaccgataaagcggttgaattcctggcggaactggtggggaaattcacgccgcggcgcaacgagctgctggcggcgcgtgtccgctggcagcaaaatatcgatcgcggcgaactgccggggtttatttcggaaaccacttccattcgtgaaggtgactggcagatccgcggcattccgcaagatctgcgtgaccgccgggtcgagatcaccggtccggtcgagcgcaagatggtgatcaatgcgcttaacgccaacgtaaaagtgtttatggcggacttcgaagactcgctggcgccaagctgggacaaagtcatcgacggccaaatcaacctgcacgatgcggttaacggcaccatttcctacaccaatgaagccggcaaaatctaccagctgaaaccgaacccggcggtattgatcgctcgcgtgcgcggcctgcatctgccggagaagcacgtgctgtggcgtgatgaagccattcccggcggcctgttcgatttcgcgctgtacttctaccacaactatcgccaactgttggccaagggcagcggcccgtatttctacctgccgaaaacccagtcctgggaagaagcggcctggtggagcgatgtcttcagctttaccgaggatcgtttcgatctgccgcgcggcaccatcaaagcgaccgtgctgatcgaaaccctgccggcggtgttccagatggacgaaatcctctaccacctgcgcgatcacatcgtgggtctgaactgcggccgctgggattacatcttcagctacatcaaaacgctgaagaatcacggcgatcgcgtgctgccggatcgtcagtcggtgaccatggagaaacctttcctcagcgcctattcgcgcctgctgatcaaaacctgtcataagcgcggcgcgttcgccatgggcggcatggcggcgtttatcccgagcaaagacgccgagaaaaacgcctgggtgctgaacaaggtgcgggcggacaaagagctggaggccagcaacggccacgacggcacctgggtggcgcacccggggctggcggacacggtgatggaagtgttcggcaaagcgctgggcgatcgccaaaaccagctggaggtgctgcgtgagcaagacgcgccgatcagcgccgcacagctgctggaaccgtgcgacggcgagcgtaccgaagcggggatgcgcgccaatatccgcgtggcggtgcagtacatcgaagcctggatctccggcaacggctgcgtgccgatttacggtttgatggaagatgcggccacggcggaaatctcccgtacgtctatctggcagtggatccaccacgagaagagcctgagcgacgggcgcccggtcaccaaggcgctgttccgccagatgctgcaagaagagatgttggtggtgcgtgaagaagtgggggaagcgcgctttaacgccggccggtacgaagaggcggcgcgcctgatggagcgcatcaccacgcaagatgagttaatcgatttcctgacgctgcccggctatgagctgctggcctga

SEQ ID NO: 425071 - DNA, 1308 bp, Serratia marcescens
atgtctacctctcgctctcaacagatccagcagctggaacaggaatggaaatcggcccgttgggaaggcatcacccgcccttacagcgccgaagacgtgatcaacctgcgcggttcggtcaacccggaatgcactctggcgcaaaacggtgccgccaaactgtgggcgttgctgaacggcaaggcgcgcaaaggctacgtgaactgcctgggcgcgctgaccggcggccaggcgctgcagcaggccaaggccggcgtcgaggctatctacctgtccggttggcaggtggcggcggacgccaacagcgcagcggccatgtaccctgaccagtcgctgtatccggtggactcggtgccgaaggtggtcgagcgcatcaacaataccttccgtcgcgccgatcagatccaatgggcgaaccagattgagccgggcagcaaaggctacaccgattatttcctgccgatcgtcgccgatgcggaagccggcttcggcggcgtgctgaacgccttcgagctgatgaaagcgatgatcaccgccggcgccgccggggtgcactttgaagaccagctggcggcggtgaagaaatgcggccatatgggcggcaaagtgttggtgccgacgcaagaagcgatccagaaactggtcgccgcgcgcctggcggccgacgtgctcggcgtgccgacgctggtgatcgcccgcaccgacgccgatgcggccgacctgctgacctccgattgcgatccgtatgacagcgccttcgtcaccggcgagcgcacggcggaaggcttcttccgcacccatgccggcgtcgagcaggcgatcagccgcggcctggcttatgccccttacgcggacatggtgtggtgcgaaacctcaacgccggatctggatgccgctcagcgcttcgccgacgccatccacgccaaatacccgggcaagctgctggcctacaactgctcgccgtcgttcaactggaagaagaacctcgacgaccagaccatcgcccgcttccagcaggcgctgtcggacatgggctacaagtatcagttcattacgctggcgggcatccacagcatgtggttcaacatgttcgacctggcgcacgcctatgcgcagggcgagggcatgaaacactacgtcgagaaggtgcagcaggcggagttcgccgcggtggatcgcggttacaccttcgcgtcgcaccagcaagaggtgggcaccggctacttcgacaaggtcaccaccattattcagggcggcgcctcttcggtcactgcgctgaccggttcgacggaagaacagcagttctga

SEQ ID NO: 425072 - DNA, 1788 bp, Serratia marcescens
atgcgcaggcttctttttctggcgggggtaaggatggcggcaaaactggagttgttgatcgcacagacgatcctgcaaggcttcgatgcgcagtacggccgctttctggaagtgaccgccggcgcgcagcagcgcttcgagcaggcggactggccggcggtgcagcgggcgatgaaaaagcgcatccatctgtatgaccatcacgtcggcctggtggtggagcagctcaaatgcatcaccgggcagaaatacttcgacgctgacttccccagccgggtcaaagcagtctatatcgacctgctgccggactacccgcgcttcgagatcgccgaaagcttctttaactcggtctactgccggctgttcaagcaccgcgatctgacgccggacaagctgttcgtgttcagttcgcagccggagcggcgctttcgcgacattccgcgtccgctggcgcgcgatttcacccccaatggcgatctgccggcgatgctgcgcagcgtgctgagcgatctgccgctgcggctgccgtgggaggatttgacgcgcgatattcactacatcactcaggcgctgcaacgcgccttcagcgcacagcagttggcgggggcaaccttccagatcgccaacgaactgttctatcgcaacaaggccgcctggctggtcggcaagctgcgtctggccgacggcgtttatccgttcttgctgcctatccaccacagcgagtcgggcgcgctgtttatcgacgcctgcctgaccggtaaggccgaggccagcatcgtcttcggcttcgcccgatcttattttatggtctatgcgccgctgccggcggcgatggtggagtggctgcgcgagatcctgccgggcaaaaccaccgccgagctgtacatggcgatcggctgccagaagcacggcaaaaccgaatgctatcgcgaatacctgacctttatggcgcagtcgcaggagcagttcattatcgcgccgggggtgaagggcatggtgatgctggtgttcaccctgccatccttcgatcgggtgtttaaagtgattaaagacgaattcgccccgcaaaaagaggtgacgcaggcacaggtgatggcctgctatcagctggtgaaagagcatgaccgcgtcgggcgcatggcggatacccaggagtacgagaatttcgtcgtcgacaaggcgcgcctcagcccggcgctgttggcggagctgcagcgtgaagtgccgggcaagctggaagatctcggcgatcgcatcgtgatcaaacatctgtatatggaacggcgcatgacgccgctgaacctgtatctggagcaggccaacgaccagcagatgcgcgatgcgatcgaagagtacggcaatgccatcaagcagctggccgccgccaatatcttccccggcgacatgctgttcaagaacttcggcgtgacgcgccacgggcgggtggtgttctacgactacgacgaaatttgctacatgaccgaggtcaacttccgcgacattccgccgccgcgctatccggaggacgagctggccagcgagccgtggtacagcatcgcgcccaacgacgtgttcccggaggagttccgccacttcctgtgcggcgatcggcgcattcggcaggtgtttgaagaattgcacagcgatctgtttaccgcggagtattggcgcgggttacagcagcgcatccgcgaggggcacgtggaagacgtgttcgcttaccgcaagaagcagcggttcagccagcgcagcggggcggcgctgccggccgccaccgctgcgatgtaa

SEQ ID NO: 425073 - DNA, 642 bp, Serratia marcescens
atgaacaagtggaaaacaagtgccgagcagatcctgacggcggggccggtggtgccggtgatcgtgatcaacaagctggaacatgcggtgccgttggcgaaagcgctggtcgccggcggcgtgcgggtgttggaagtgacgctgcgcaccgcctgcgccatggacgccattcgcgccatcgcccaagaagtgccggaagcgatcatcggcgccggtaccgtgatcaatccgcagcagctgcgtgaagtgaccgaggccggcgcgcagttcgccatcagcccggggctgaccgacgagctgctcaaggcggccaccgccgggtccattccgcttattccgggcatcagcaccgtttccgaactgatgctgggcatggattacggcctgcgcgagtttaaattcttcccggcggaagccaacggcggcgtaaaagcgctgcaggcgatcggcggcccgttcccgcaggtgcgcttctgcccgaccggcggcatctcgccggacaactaccgcagctatctggcgctgaaaagcgtgctgtgcatcggcggctcctggctggtgccggcggacgcgctggaaagcggcgactacgcgcgcatcaccgaactggcgcgcgccgccgtcgcgggcgcccaggcctga

SEQ ID NO: 425074 - DNA, 1815 bp, Serratia marcescens
atgattaacccaaccttgtcccgtgtcacgcagcgcatcatccaccgttcccaggccagccgcgccgcctatctggcgcgcatcgaggcggcccgttcccaaaccgtccaccgcgcgcagctggcctgcggcaacctggcccacggcttcgccgcctgtcagcccgatgacaagacggcgctgaaaaacatggtgcgcagcgatatcgccatcatcaccgcctacaacgacatgctgtcggcccaccagccgtacgaacactacccgcagcggctgaagcaggcgctgaaggcggtgggcgccgttggccaggtggccggcggcgtgccggcgatgtgcgacggcgtgacgcaggggcaggacggcatggaactgtcgctgatgagccgtgacgtgatcgccatgtcggccgccgtcggcctgtcgcacaatatgttcgacggcgcgctgttcctcggcatctgcgacaagatcgtgccggggctggtgatggccgccctctccttcggccacctgcccgcgctgttcgtgccggccggcccgatgagcagcggcctgccgaacaaggaaaaggtgcgcgtgcgccagctgtacgccgagggcaaggccgatcgtctggcgctgctggaagccgaggccgcctcctatcacggcatcggcacctgcaccttctacggcaccgccaacaccaaccagatggtgatggaagtgatgggcctgcacctgccgggcgcctctttcgtgcatccggatacgccgctgcgcgacgcgctgaacgacgccgctgcgcgccaggtgacgcgactgaccgacaccgccggcaactacctgccgatcggccgcctggtggacgagaaagtggtggtgaacggcatcgtctcgctgctggccacaggcggctccaccaacctgaccatgcatctggtggcgatggcgcgcgcagcgggcatcatcatcacctgggacgatttctcggagctgtcggaggcggtgccgctgctgtgccgcatctacccgaacggcccggccgacatcaaccagttccaggccgccggcggcgtgccgctggtggtgcgtgagctgttgcaacacgggctgctgcacgaagacgtgcacaccgtggccggtttcggcctgcaccgttacacccaggaaccctggctggataatggccagctggtgtggcgtgaaggcgtaaccggttcgctcgacgccagcgtaatcgccagcgtcgctcagccgtttgagcatcacggcggcaccaaagtgatggccggcaatctggggcgcgcggtgatgaaaacctcggcggtgcccgccgacaatcagatcattgaagccccggcggtggtgttcgacagccagcacgacatcgtgccggcgtttgaagccggcaagctggatcgcgattgcgtggtggtagtgcgcttccaggggccgcaggccaacggcatgccggagctgcacaaactgatgccgccgctgggcgtgctgatggatcgcggcttcaaagtggcgctggtgaccgacggccgcctgtcaggcgcctccggcaaggtgccttccgccatccacgtcaccccggaagcctataccggcggcctgctggcgaaagtgcgcgacggcgatccgatccgcgtcaacggccgcagcggcgagctgcaggtgctggtcgacgccgacgaactggcccagcgcacgccgtgccaacccgatctgagcgcagaacacatcggctgcggccgcgagctgttcggcgcactgcgcagccagctgtccggcgccgagcagggcgcctgctgcatcacattttaa

SEQ ID NO: 425075 - DNA, 1338 bp, Serratia marcescens
gtgagtaccgtaacgctggtcggtaccgcagtcggctcggtcttactgctgttattcctggtgatgaaggcgcgcatgcacgccttcgtcgcgctgatgctggtgtccatcgccgccggcatcttctccggcatgccgctggaccatattgccgacaccatgcaaaaaggcatgggcgacacgctgggcttcctggcgatcgtggtggcgctcggggcaatgttcggcaagatcctgcatgaggtcggcgcgctcgatcaaattgcggcgcaattgctgaaacgattcggacaaagcaaggcgcactacgcgctcggcatcgccggcctgatctgcgcgctgccgctgttcttcgacgtggcggtggtgctgctgatcggcatcgtgttcgccgtggcgcgccgcaccgacggcaatatcgtcaagctggccattccgctgttcgccggcgtggccgccgccgcctccttcctgctgccggggccggtgccgatgctgctggcttcgcagatgaaggccgacttcggctggatgatcgccatcggcctggtggcggcggtgatcggcatgctgatcgccggcccgctgtacggcagctttatcagccgcttcgtcaactggccgatgccaccggaagagaacgagccgacgttgaccaagggcaatctgccgtcgttcggcttcagcctggcgctggtgctgtgcccgctggtgctggtcggcatgaagaccatcggcgcgcggctggtcacccccggctcgcaactgcagcagtggctggagtttatcggccacccgttcaccgccattctgctggcctgcctgatcgtgatttacggcctggcgaagccgcgcggcatgagcaacgaacagacgctggccatctgctccgccgcggtgcaaccggccgggatcatcctgctgatgaccggcgccggcggggtgttcaaacagatcctggtggattccggcgtagggccggcgctgggtgacgcgatgatcggcgccggcctgccgatcgccgtggccgcctttgcgctctccgccatggtgcgggtgattcagggctcggccaccgtcgcctgtctgaccaccgtcggcctggtgctgccggtcaccagccagctcgggctgaacggcgggcagctggccgcgctggctatctgcatcgccggcggctccatcgtgctgagccacgtcaacgacgccggtttttggctgttcggcaaattcaccggcgccaacgaactgcaaacgctgaaaacctggacggtgatggaaacgattctgggcagcgtcggcggcgctatcggcatgattgcattcacgatgttttaa

SEQ ID NO: 425076 - DNA, 540 bp, Serratia marcescens
atgaccaacaatcaaaatcgcatttacgtcgttatgggcgtttccggcagcggcaagtccgccgtcgccgccgccgcggcccgccaactctccgccggcttcctcgacggcgacttcctgcatccgcgcagcaacatcctgaagatggccgccggcgaagcgttgaacgacgacgatcgcgccccgtggctggccgcgctcaacgacgccgccttcgccatgcagcgcaccaacaacgtgtcgatcatcgtctgctcggcgctgaaaaagcagtatcgcgaccgcctgcgcgccggcaacggcaacctgtcgttcatctatctgcacggcgagttcccggtgatcgaatcccgcctggcggcgcgtaacggccacttcttcaaaccgcagatgctggtcacccagttcgccgcgctggagcagccgggcgccgacgagaacgacgtgatggcgatcgacatcaaccagccgctggacgcggtgatcgccgataccgtgcgccatatccagagcttcctgccgcaggacgtgtgcgcgtga

SEQ ID NO: 425077 - DNA, 831 bp, Serratia marcescens
atggccacccctgctcccgccaaacgcggcaagaagccccgcgcagcagccccggccgccagtgcggcgaccggccaggtacaatcgttgacccgtggcctgaagctgttggagtacatttcggaagcccagggcaacgtggcgctgaccgatctggcccagcaggccggcctgccgaactccaccactcaccgcctgctcaccaccatgcagcagcagggattcgtgcgccaggtcggcgatctcggcctgtggaccatcggctcgcacgcctttgtggtcggcagcagcttcctgcaaagccgcaacctgctggcgatggtgcacccgacgctgcgccgcctgatggaagagtccggcgaaaccgtcaacctggcggtgctggataccagcgagtaccaggcgatcatcatcgatcaggtgcagtgtacggcgctgatgcgcatgtcggcgccgatcggcggcaaactgccgatgcacgcctccggcgccggcaaggcgttcctcgccaccctgccggacgatcaggtaaccaaactgctgcacaagaaaggcatgcacacctacacaccgcacaccctgacgccgcacaacctgaaagaggggctggcgcagatccgcaaacagggcttctcctttgacgacgaagaacacgcgctcggcctgcgctgcgtggcggcctgcatcttcgacgagcaccgcgaagccttcgccgccatctccatctccggcccggtgtcgcgcatcaccgacgatcgcgtgatcgaactgggggcgctggtgatccacgcggcgaaagagatcagcctggcctacggcggcgtgcgctga

SEQ ID NO: 425078 - DNA, 3696 bp, Serratia marcescens
atggaaggggttacagtgacgaatcgagtagaacaactgcgccgccagttagcgcagcgcattttggtgttggacggcggcatgggcaccatgatccagagctatcgtctggatgagcgcgatttccgcggtgagcgtttcgccgactggcgcagcgatctgaaaggcaataacgatctgctggtgctgaccaagccggaagtgatcgccgccattcattacgcctatctcgaggcgggcgccgatatccttgaaaccaataccttcaactccacctccatcgccatggccgactaccacatggagtcgctgtccgccgagattaattatcaggccgcctgcctggcgcgcacctgcgccgacgaatggacggcgcgcacgccggaaaaaccgcgctacgtcgccggggtgttggggccgaccaaccgcaccgcgtccatctcgccgaacgtcaacgatccggcgttccgcaacatctcgttcgacgagctggtgacggcttaccgcgaatcgacccgtgcgctggtggagggcggcgtcgatctgatcatgatcgaaaccatcttcgacaccctgaatgccaaggccgccgcctttgcggtggaaaccgaattcgaagcgctgggggtggaactgccgatcatgatttccggcaccatcaccgacgcctctggccgcaccctgtccggccaaaccaccgaagcgttttacaattcgctgcgccacgtcaagccgctgaccttcggcctgaactgcgctctgggcccggacgaactgcgtcagtacgtcgccgagctggcgcgcatctcggagacctacgtcaccgcgcacccgaacgccggtttgccgaacgccttcggcgagtacgatctggatgcggccgagatggcgcgccaggtcggggagtgggcgcaggccggcttcctcaatatcatcggcggctgctgcggcaccacgccggaacatatcgccgcgatggccaacgcggtcgagggcgtgccgccgcgccggctgccggagatcccggtcgcctgccgcctggcgggcctggagccgctgaccatcgatgccaacaccctgttcgtcaacgtcggcgagcgcaccaacgtcaccggttcggcgcgattcaaacggctgatcaaagaagagaaatacaacgaggcgctcgacgtggcgcgccagcaggtcgagagcggcgcgcagatcatcgacatcaacatggacgaggggatgctcgacgccgaagcggcgatggtgcgcttccttaacctgatcgccggcgagccggatatcgcccgggtgccgatcatgatcgactcctccaagtggtccgttatcgagaaaggcctgaaatgcatccagggcaagggcatcgtcaactcgatctcgatgaaggagggcgaagaggcctttatccatcacgccaaactggtgcgccgttatggcgccgcggtggtggtgatggcgttcgacgaagtggggcaggctgacacccgcgagcgcaagttcgagatctgccgccgcgcctataacattctgaccgagcgcgtcggcttcccgccggaagacatcattttcgacccgaacattttcgccgtcgctaccggtatcgaagagcacaacaactacgccgtcgactttatcgaagcctgtgccgacatcaaaacccacctgccgcacgcgatgatctccggcggcgtgtccaacgtgtcgttctcgttccgcggcaacgatccggtgcgtgaagcgatccacgcggtgttcctgtatcacgccattcgcaacggcatggacatgggcatcgtcaacgccgggcaactggcgatttatgacgatttaagcgccgagctgcgcgacgcggtggaggacgtgatcctcaaccgtcgcgaggacggcaccgaacgcctgctggagctggcggaaaagtaccgtggcagcaaagataatgacgtggcggtgcagcaggcggagtggcgcggctggccggtggagaaacggctggagtattcgctggtgaagggcatcaccgaatttatcgagctggacaccgaagaagcgcggcagcaggccgaacgcccgatcgaagtgatcgaagggccgctgatggcggggatgaacgtggtcggcgatctgttcggcgagggcaagatgttcctgccgcaggtggtgaaatccgcccgcgtgatgaagcaggcggtggcctacctggaaccctacatcgaggccagcaagcagcagggcacctccgcgggcaaaatcctgttggcgacggtgaagggcgacgtgcatgacatcggcaagaacatcgtcggcgtggtactgcagtgcaacaactatgaaatcgtcgatctgggcgtgatggtgccgacggagaaaatcctgcgcaccgcgcgcgaggagaacgtggatatcatcggcctgtcgggcctgatcacgccatcgctggacgagatggtcaacgtggccaaagagatggagcgccagggctttacgctgccgctgttgatcggcggcgccaccacctccaaggcgcacaccgcggtgaagatcgagcagaactacagcggcccgactacctacgtgcagaatgcttcgcgcaccgtgggcgtggtgtcggcgctgctgtccgccacccagcgcgacgagtttgtggcgcgcacccgcaaagagtatgaaacggtgcgcattcagcatgcgcgcaaaaagccgcgcacgccgccggtcgatttgcagaaggcgcgcgccaacgccatggcgctggactgggccgactatcagccgcctgtgccgcggcagctcggcgtgttcccggtggcggccggcatcgagacgctgcgccactacatcgactggacgccgttcttcatgacttggtcgctggcgggcaaatacccgcgcatcctggaagacgaggtggtgggggaagaggccaagcgcctgttccacgacgccaatcagatgctggatcggctggccgccgagcgcagcctcaacccgcgcggcgtttacggtctgttcccggccaaccgcgtcggcgatgacgtggaggtgtaccgcgacgaacggcgtgacgaggtgctggcggtgagccgccatctgcgccagcagacggaaaaaaccgacttcccgaactactgcctggcggactttgtggcgccgaaaagcagcggcaaggccgactacttcggcgccttcgcggtgaccggcgggctggaggaggacgcgctggcggcggcgtacgacgcgcagcacgacgattacaacaaaatcatggtcaaggcgctggcggatcgcctggcggaggccttcgccgaatacctgcatgagcaggtgcgcaagctgcactggggctatgccgccgacgagagcctgagcaacgaagagctgatccgcgaaaactatcagggcatccggccggcgccgggctacccggcctgcccggaacacaccgagaaagcgaccatttggcagctgctggacgtcaaccgccacaccagcatggagctgacggagtccttcgccatgtggccgggggcggcggtgtccggctggtacttcagccatcctgaaagcaagtacttcgcggtggcgcagatccagcgcgatcaggtggaagactacgcggcgcgtaaagggatgagcgtgagcgaggtcgaacgctggctggcgcctaacctcggctacgacgccgactga

SEQ ID NO: 425079 - DNA, 711 bp, Serratia marcescens
atgagtgaagcaccgacgaccgtagccaccatctgccaaacactgaacgcgcgcatcgccgcaggcgagttcgccgtgggcggcaagctgccctccgaacgcgccctgagcgaacagttcgccaccacccgcattaccttgcaggaggcgctcggccaactggaggcgcagggggtcatctaccgccaggtgcggcgcggctggttcatttcgcccccgcgtcttatctacaacccgctgcagcgcagccattttcacgccatggctcagcaacaggggcgcgccgcccataccgaggcgatcgacagcgcggtagtcacgctcgacgcgccgctggccggccgcctggcgctgccccccggcgccgaggcctatcgcattcgccggctgcgctacatcgacgggcgcgcggtgctgtactgcgagcactacctcaacccggcctacttccccggcatactggacgaagatctgacccagtcgctgaccgcgctgtacgccgcgcgctacggcattcactacggccgggtgcgtttcgacatgctgcccaccctgctgccgcagcaggccgccgccatgctgaaggtgacctacggcagcccggcgctgttcattacgcgggtgaaccgcgatcagcacgaccgggtgatcgattgcgacctggagtattggcgttacgatgcgctgcacatcgacgtggaagcgcagtaa

SEQ ID NO: 425080 - DNA, 1062 bp, Serratia marcescens
atgaaacgtttgtgcgcttctgtgttaaccagtgccatcgtgttatccagccagatgagctgggccgcggataccgatctggcggcgctggagcaggccgcgaagaaagaaggcgaagtcaacagcgtcggcatgccggacagctgggccaactggaaaggcacctggcaagatctgttgagcaaatatggcctgaagcatgtcgataccgacatgagctccgcgcaggagatcgccaaattcgatgcggaaaagaacaacgccacggcggacatcggtgacgtcggcgcggccttcggcccggtggcggtgcagaagggcgtgacgcagccgtacaaaccctctacctgggatcaggtgccggagtgggcgaaagaccaagacggccactgggcgctggcttacaccggcaccatcgccttcatcatcaataaacagcaggtgaaagacattccgcacagctgggccgatctgctgaagggcagctatcaggtcaccatcggcgacgtcggcaccgcgtcgcaggcggccagcggcgtgctggcggccacctacgccatgggcggcaacgagaaaaacctcaagccgggcctggaattcttcggcaagctggccaaggccggccgcctgagcctgagtaacccggtgatcgcatcgctggaaaaaggggaagtgcaggttggcgtggtgtgggacttcaacggcctgaattaccgcgatcagatcgacaaaacccgctttgaagtgctgatcccgtcggacggctcgatcacctccggctacaccaccatcatcaacaaatacgccaagcacccgaacgccgccaagctggcgcgcgaatacatcttctctgacgccggccagatcaacctggcgcgcggctatgcgcgcccgatccgcgccgagcatctgacgctgccggacgacgtcaaggccaagctgctgccggccgagcagtacaagaacgcgcacccgatcgccgatccggcggcctgggaacagagcgccaaagcgctgccgcgtctgtggcaggaaaacgtcattatgtttatgcagcagtga

SEQ ID NO: 425081 - DNA, 810 bp, Serratia marcescens
atgaaaacgatcctcgtgctgctggacggcctcaactaccgggtggcgcacgacgccatgggctatctgcaggccgaatgcgcggcgggacgcggacggttgtacctgttggagagcgagctgccctcgctctcccggccgctgtatgaatgcatcctcaccggcgtcacgccggtggagagcggcgtggtgcacaaccacgtctcgcgcctttctcatcaacaaagcgtgtttcattacgcgcgcgccgccgggttgaccaccgccgccgccgcttaccactggttcagtgaattgtataaccgcacgccgttcgacgccgcgcgcgaccgccataccgacgcccccgagctgccgatccagcacgggcatttctattacgacgacggctaccccgacagccatctgttcgacgacgccgaaagcctgcgcctgcggcatcagccggatttcctgctgatccacccgatgaacatcgacgacgccgggcaccgcttcggcctctcttcgccgcagtaccgcaacgcggcgcggcgcgccgacggctcgctgtcgcgctatctgcccgagtggctggcggccggttatcaggtgctggtcaccgccgatcacggcatgaacgacgatcgcagccacggcggcgtgttgccggaagagcgccaggtgccgctgttcgtgttcggctcgggcttcagccaggacgacgccgatccgcagcaaaccgagctgtgcggtacgatctgcgatctgctgcaggtgccgcatgacaagccgcgctgccgggcgctgctggcgcaggatgcgcgatga

SEQ ID NO: 425082 - DNA, 846 bp, Serratia marcescens
atgaacggcaaaaccaaatggatcgccgcgctgtgcctgttaccgtttatcgtgctgttcggcgcgtttcagatcgccccgctggtgtggatcgccgttcacagctttttcagcgagaccggcggctggggatggggcaactatgtcgatatcctcacctcgccgttctacctgcaggcctttcagttctcgctggagatctcgctgtggtcgagcgtctacggcttgctgattgcgttagtgggcagttactcgcttcgccagctcggccagacccgatttcatgacttcgtgatgtcgttcaccaacatgaccagcaacttcgccggggtgccgctggcgttcgccttcgtcattctgctggggctgaacggttgcctgacgctgttgctgcgcaaatacggtttgatggagagtttcaatctctattcgaagagcggcctgatcgtgctgtatacctatttccagatcccgctgggggtgctgttgctgtatccggcgttcgacgcgctgcgcgccgactggcgcgagtcggcggcgctgctcggcgccggcccctggcgctactggcggcatatcggcctgccggtgctggcgccggcgctgatgggcaccttcgtcatcctgctggccaacgcgctgggcgcctacgccacggtgtacgcgctgaccaccggcaacttcaacgtgatcccgatccgcatctcggcattggtggcgggggacatctccctcgatccgaacctggccagcgcgttggcgatgctgctggtggtgatgatggcgtttatcacggtgatccaccaatggatgttgcgcaggagctacctcaatgcgcgctcataa

SEQ ID NO: 425083 - DNA, 786 bp, Serratia marcescens
atgtcgcgtgctgaacgcctgtaccatcgcacggtgaccggcctgctgctgttgatcctgctgctgccgctggcggcgacgctgatttacgcgctggccacccagtggggcgccaccattttgccggacggttttaccctgaagtggctgacggcgctgtggagcgacccgcgctttttgcaggcgctgtggcactcgctgctgatctgcttcggcacgctgctgctgtcggtggtggtgatcctgccggcgatgtttgtgatcgcttactacttccccaaactggactcggtgatgaacgtgctgattctgctgccgttcgccgtgccgccggtggtgtcggcggtggggctgatgcagctgttcgccgccgatccgctgccgctgctcggcactccctggattttggtgggctgctatttcaccatcgcgctgccgtttatctaccgcgccatcagcaacaacatgcaggcgatcaacctgcgcgatctgatggacgccgcgcacctgcttggcgccagcacctggcaggcggcgctgtgggtggtgctgccgaacctgcgcaagggtggaacgatcgccgtgctgctgtcgttctcgttcctgatcggcgagttcgtgttcgccaacctgctggtgggcagccagtatgaaacgctgcaggtctacctgtacaacatgcgcaacggcagcgggcacttcaccagcgcgctggtcatctcctatttcgccgtggtgctgctcgtcacctggctggcgaacctgctgaataaaaacaagggttaa

SEQ ID NO: 425084 - DNA, 993 bp, Serratia marcescens
atggcttatctcaacgtcacccgcctgaacaaacactatggccagacccaagtgtttcaggatatcgatttcaccgccgaagagggggagttcgtcaccctgctggggccgagcggctgcggcaaatcgacgctgctgcgctgcctggccggcctgaccccggtcgacagcgggcaaatcttgttgcagggtcaggatctggtgccgctggcgccgcaaaagcgcggcatcggcatggtgttccaaagctatgcgctgtttcccaatatgacggtggaaggcaacgtggccttcgggctgaaaatgcagaagctggcggccgggcagatcggccagcgggtgcaggaggtgctggcgctggtggagctgagcgatctggcgaagcgctatccgcatcagctgtcgggcggccagtgtcagcgcgtggcgctggcgcgatcgctggtcactcgcccgcggctgctgctgctcgacgaaccgctgtcggcgctggacgcgcgcatccgcaaacacctgcgcgagcagatccggcgcattcaacgcgagctgaacctgacggcgatcttcgtcacccacgatcaggaagaggcgctgaccttgtcggatcgcatcgtgctgatgaacaaggggcagatcgtgcagagcggcgatgcggaaaccctgtatacccagccggcggatgccttcgccgccgggtttatcggcaactataatctgctgaccgccgaacaggccgcccagctgaccgggcgcagctatgtcggcaaggtggcgatccggcccgaatcgatcggcctgttgccggccgggcaggggatcggcggggggatcctgggccacagtttgctcgggaatgtggtacgctatcggattcaggttcgcggtgtagaattgctggttgacgtgctcaaccggtcggtggccgacctgcggcccgacggcgagcaaattgggctacacttggaacctgttgtattgcgggaagttgcatga

SEQ ID NO: 425085 - DNA, 1650 bp, Serratia marcescens
gtgctgacccttcttcacctgctttcctccgtggcgctgttggtgtggggcacccacatcgtgcgcaccgggatcatgcgggtttacggcgccaatctgcggcgcgtgttgagcgacagcgttgagaaaaagccgctggcgttcgtttccggcatcggcgtgaccgcgctggtacagagcagcaacgccacggcgctgctggtgacctctttcgttgcgcaggggctggtggggctggcgcctgcgctggtgatcatgctcggcgctgacgtcggcaccgcgctgatggcgcgcgtgctgaccttcgatctttcctggctgtcgccgctgctgatcctgatcggcgtcttcctgttcctcagccgcaagcagatgcggatcggccagatcgggcgcgtcctgatcggccttgggctgatcgtgctggcgctggagctgatcgtggccgccgccacgccgatcacccaggcggccggggtgaaagtgctgttctcgtcgctgaccggcgacgtgatgctggacgccctgaccggcgcgctgttcgccatcgtcagctattccagcctggcggcggtgctgctgaccgccaccctgaccgcatccggcgtgatttcgctgaaggtggcgctctgcctggtgatcggcgccaacctcggcagcggcctgttggcgatgatcaacgccagcggccagaacgccgccgggcggcgcgtggcgctcggcagcctgctgttcaagctggtgggctgtgtgctggtgctgccgttcgtttcctatctggcggatgtgatggctcagctgccgggcggcagcgaagagctggtgatctacttccacgtgttctacaacctgatccgttgtctggtgatgatcccgctggccgggccgatggcgacgctgtgcgagcggctgatcgtcgacgtggcggccgacgatccgcgcatgcggccgcgccatctggacgccagcgcgctggacacgccgacgctggcgttggccaatgcggcgcgcgaaacgttgcgcatgggcgacgtggtggaacacatgatgatcctgcagcgcgaagtgctgcacggcaagcaaggcgtggataaagaagtgcggcgcctcgacgatgacgtcgacgtgctgtacaccgccatcaagctgtatctggcgcagatccagaaggaagatctgggcgaggaagactcgcgccgctgggcggagatcatcgaaatggcgcttaacctggaacaggcgggcgacatcatcgagcgcatggccggcgacgtgggcgccaagtcgcacgccgcgcgccgcgccttctcggcggaaggattggcggaactggatgggctgcacgagcggctgatcggcaacctgcgcctggggctgtcggtgttcctgtccggcgacgtcaccagcgccaagcgcctgcgccgttccaagcatcgcttccgcattctggatcgccgctatgcgcacgcgcacgtcgatcgtttgcatcagcaaaacgtgcagagcatcgagaccagttcgttgcatttgggattgttgggggacatgaagcgtttgaactcgctgttctgcgccgtggcttacaacgtgttggatcaggatgccaaggacgacgatcgcgactgggaagacaccccgagcacgctgtaa

SEQ ID NO: 425086 - DNA, 4827 bp, Serratia marcescens
atgaaaaataataacttcaggctttcagcagcgggcaaactggccgccgcgctggcgattattctcgccgcttccgccggcgcctacgccgcggagatcgtggcggccaacggcgccaacggccccggcgtttccaccgccgcgaccggcgcgcaggtggtcgacatcgtcgcgccgaacggcaacgggctgtcgcacaaccaataccaggactttaacgtcaaccagcccggcgccgtgctgaacaactcccgcgaagcggggctgtcgcagctggccggtcaactgggcgccaaccccaatctgggcgggcgcgaagccagcgtgatcctcaatgaagtgatcggccgcaacccgtcgctgctgcacggccagcaagagatcttcggcatggtggccgattacgtgctggccaacccgaacggcatcagctgccagggctgcgggttcatcaacaccagccgctcctcgctggtggtcggcaacccgctggtggagaacggcctgctgcagggctacagcaccctggacaaccgcaataccctgagcctcaacggcgtcctgaacgccggcggcgtgctggatctgatcgcgccgaagatagacagccgcggcgacgtgatcgtgcaagacttcacccatcgcaacggcagcgtgacgccggcggcgatcaacgccatcagcggccataaccgggtggcgcgcgacggcaaggtgctggccagcgtacagccgaccacggcgctggacagctattacctcggcagcatgcaggccgggcgcatcaacatcatcaacaccgcgcagggcagcggcgtgaagctggccggcacgctggccgccggcgacgagctcaaggtgaaagcctacgatattcgcagcgaaagccgcgttgacgacgccagcagcaaccgcaacggcggcgacaactaccagaactaccgcggcggcatctacgtcaacgatcgcagcagcagtcagaagctgacccgcaccgagctgaaaggcaagaacatcagcctggtggcggataaccacgcgcacctcaccgccaccgatattcgcggcgaagacatcacgctgcagggcggcaagctgacgctcgacggccagcagttgaaacagacccagggtcacaccgacgaccgctggttctattcctggcaatacgacgtcacccgcgagcatgagcaacaacaacaggcgggcagcaccgtcgccgccagcggcaacgccacactcgtcagtacccgggaagacgtgaacctgttgggcgccaacgtcagcgccgatcgggcgctgagcgtcaaagcggcgcgcgacgtgcacctcgccgggctggtggagaaggataagtccaccgaacgcggctaccagcgcaatcacacttccagcctgcgcaccggcagttggagcagcagcgacgaaagcgagagcctgaaggccagcgaactgcgtagccagggcgaactgacgttgaaagccggccgcaatgtcactacccagggcgccaaggtccacgcccagcgcgatctgacgatcgacgcagacaaccagatccaggtcggggtgcagaaaaccgccaacgccaaagcggtacgcgatgacaaaacctcctggggcggcatcggcggcggcgacaacaaaaacaacagcaaccgccgcgagatcagccacgcctccgagctgaccagcgacggcaccctgcgcctgaacggccagcagggcgtcaccatcaccggcagcaaggcgcgcggcaaggaaggcggcctggtcaccgccacccagggcggcctgcgcatcgacaacgcgctgagcaccaccgtagacaaaatcgatgcgcgcaccggcaccgccttcaacatcaccagcagttcgcacaaggccgacaacagctaccagagcagcaccgccagcgagctgaagtctgacaccaacctgaagctggtcagccgtaaggataccgacgtcatcggcagtcaggtcaccagcggcggcgagctgagcgtgacgtcgcagaccggcaacatcaacgtcaaggccgccgaacagcagcaaaaaatcgatgagcagaagaccgcgcttaccgtcaacggctacgccaaagaagccggcgacaagcaataccgcgccggtttgcgcatcgaacacacccgcgacagcgagaaaaccacccgcaccgaaaaccgcgcctcgaccctcagcggcggcagcgtgaagctcgaggcggagaaggacgtgaccttcagcggctccaaactggtcgccgacaaaggcgacgccagcgtcagcggcaacaaggtttcgttcctggcggccgacgataaaaccacctcgaacaccgagcagaccaagatcggcggcggtttctattacaccggcggcatcgacaagctcggcagcggcgtggaagccggctacgagaacagcaaaacgcaggcgcagagcagcaaggcggtcacctccggcagcgacgtcaaaggcaacctgactgtcaacgcccgtgacaagctgacccagcaaggcgcgcagcacagcgtcggcggcgcctacaaagagaacgccgcgggcgtcgatcatttggccgccgccgacaccgccagcagcaccaccaccaaaaccgacgtcggcgtgaacatcggcgccaacgtcgattacagcgccgtgacccgcccggtcgagcgcgcggtcggcaaggcggccaagctggacgccaccggcgtcatcaacgacattggcggcatcggcgcgcctaacgtcggcctggatatcggcgcgcagggcggcagcagcgaaacacgcagcagcagctcgcaggcggtggtcagctcggtgaaagccggcagcatcgacatcaacgccaaaggcgaagtgcgcgatcagggcacgcagtatcaggcgagcaaaggcgcggtcacgctgacggcggacagccaccgcagcgaagccgcgacgaaccgccaggaagagcagaaccgcgatacccgcggcagcgccggcgtacgcgtctacacctccaccggcagcgatctgaccgtagacgccaagggcgaaggcggcacccagcgcagcaacagcaacgccagccaggcggtgaccggcacgatcgacgcggccaacggcatcaacgtcaacgtgaaacaagatgcggtctatcagggcaccgcgctgaacggcggcagcggtaaaaccaccgtcaacgccggcggcgatattcgcttcgatcaggccaacgataagcagagcgaaaaccacagcggtttcaacgtcaaagcctccgccaagggcggtttcaccgccgacagcaaaaacttcggcgccggcttcggcggcggcaccaacaacggcgaaagcaacagcagcaccgcgcaggtcggcaacgtcagcggccaacagggcgtggagctgaaggcgggccgcgatctgacgcttaaaggcaccaacgtcaagagccagggcgacgtcaccctgagcgcgggcaacaaggttgcgctgctggcagcggaatcgacccaaatgcgtaaggagaaccaactgtccggcaatatcgatctgggcgccggcagcagcgacagcaaggaaaaaaccggcggcagcctctccgtcggcggcgccttcgacatcgccaaggtgaatgagtccgcgaccgaacgccagggcgccacgctagcctcagacggcaaggtcaccctgtccgccggcggcaaaggcgatgacgcgctgcatctgcagggcgccaaggtcagcggcggcagcgccgcgctcgaggcgaaaaacggcggcatcctgctggagtccgccaagaacgagcagcacaaggacaactggagcctgggcatcaaagccaacgccaaaggcggccaaacgttcaacaaggacgccaacggcaaggtcgatccgaacaccggcaaagacacccatacgctgggtgccggtctgaaggtcggcgtggaacagcaggataaaaccacccacgccaacaccggcatcaccgcgggcgacgtggcgctcaacagcggcaaggatacccgcctcgccggggcacgcgtcgatgccgacagcgtacagggcaaggtgggcggcgatctgcgcgttgaaagccgcaaggacgtcgagaaaggcgtgaaggtggaggtggatgccggcctgagccacagcaacgatccgggcagcagcatcacctccaagctgtcgaaggtgggcacgccgcgctacgccgggaaagtgaaagagaaactggacgccggggtgaataaagtggccgacgccaccaccgacaagtacaacagcgtggcgcgtcgtctcgatccgcagcaggacaccaccggcgcggtcagcttcagcaaggccgacggcaaagtgacgctgccggcaacgccggccggcgagaagccgcagggcccgctgtgggatcgcggtgcacgcaccgtcggcggcgcggtgaaagacagcatcaccgggccggcgggtcgccaagggcagctcaaggtcaatgccgacgtggtgaacaacaacgcggtcggcgagcagtcggcgattaccggtaagcacggcgtggcgctgcaggtcggcggccaaacccaactgaccggcggcgagatccgcagccggcagggcaaggtggaactgagcggcagcaaggtcaaccagcaggacgtcagcggccaacgctatcagggcggcggccgcgtcgatgcggcggccacggtaggcgggctgttaggcggcgcggcgaagcaaagcgtcgacggcaacgtgccgttcgtcagcggccatgcttcgactcagcaggcggacgccaaagccggcgtgttcagcggcaaataa

SEQ ID NO: 425087 - DNA, 1680 bp, Serratia marcescens
atgataaaaaaaatcaccgctttgacgctgttggtcagcacggccctttccgccgaaaccctgccggacgcccacatgatgcgggatatgtcgatgggggagtcgcgccgcgcgctgcaagacagcacgcgtgaagtcaaccagttgattgagcaacgccgctaccagcagctgaagcagcaacgcttgctggcggagccggaaccggccgcgcccgccctgccgcagtccgcgcagtgcctgccgatcgccggcgtttatctgcagggcgtcaccctgctctcgccggccgatttatccgccctgagcgcgctgccggaaaactgtatcagcagcaacgatatcaatcgcctgacccgtgaattaacgcgcctttatgtgcaaaaaggctatatcaccgcgcgcgtgcaaattgttcgccctaattcacagggagaattgggattaagcgtcaccgaaggatttatcgagaaaatagaaggcggcgatcgctgggtcaacagccgtttattatttccagggctggaaggcaaaccgttgaaattaaccgagctcgaccagggattggatcaggccaaccgtttgcaatcgaataccaccaagctggatatattgcccggccgccaggttggcggttcggtcattcgtttgcgcaatcagcatgccaagccctggctgatgaccgtcggcacggataattacggccaaaaaagcaccggccagtggctggcgcgcgccaccgccacgctggacagcccgttcggcctgtcggacttcgtcagcctgaacgccaacagcacgctggaaaacccggctcatcgctataaccgcgcctataccctgctctattcgctgccgtacggcgcgttcaccttcagcgggttcgccagcttctcctcctatgagaaccaccagcagctgccgcacaacctggtcaaactgcacggccagacccagcagtacgggctgcgcagcgactacgtgttttaccgcgatcgcgaccagatagacagcctgagcggtcagttgacctacaagcgcatcgacaactacttcgaaagcgtgcgcctcgaggtcagcagccccaccctgaccctggccgaactgagcgccagccacctgcaaattctgcccaacggggtattcagcgccaacctcagcgtcgaacagggcctgccgtggctgggggccggtcgccacccaagctcggtgcacctcgacagccagttcaccaaaggcaagctgttcgccaacctcagccagcgccttcacctgggtgacgccacctatcagctcaacaacctgttctacggccagtacagccgcgacccgctgcccggcgtggagtggctgagccttaccgatcgcagcgccgtgcgcggcttcagccgcagcacccagtcaggcgacaacggctggtatctgcagaacacgctgtcgcgcagcttcaatctgggtgccaccacgctgacgccgcgcctcggcgccgacgtcggccgcattttgccgcgccaagacagctcggggtggcgcagcagcgccggcctgagcagcggcgccacgttgcgctatcggcaggcgctggtcgatctcgaggtcagccgcggctggatcttgtcgaatcacaccacgccggaagatcccgttcaggtactggcgcgcttttcttacaccttttaa

SEQ ID NO: 425088 - DNA, 918 bp, Serratia marcescens
atgttggcattactcacgcgtttattccccctgtgggcgatactgctgtccgtcgccgcctattacacgccgaccacctttaccggcatcggcccctacgtcagcccgctgctgatgctgatcatgttcgccatgggcgtcacgctgcggctggacgacttcaaacgcgtgctggcgcgccccggcccggtggcggccggcatcttcctgcactatctgatcatgccgctggcggcctggatcctggcgatgctgtttcgcatgccgccggatctgtccgccggcatggtgctggtgggcagcgtggccagcggcaccgcctccaacgtgatgatctatctggccaagggcgacgtggcgctgtcggtgaccatctctgcggtctcgacgctggtgggcgtgttcgccacgccgctgctgacccgtttgtacgtcgacgccgaaatcagcgtcgatatcatgggcatgctgctgagcattctgcagatcgtggtgatcccgatcggcctgggcctgatcgtccaccataccctgaccaaaacggtgaaacgcatcgagccgctgctgccggcgctgtcgatggtgtgcatcctggcgatcatcagcgcggtggtggcgggcagccaaagccatatcgcctcggtcggtctggtggtgatcgtcgcggtgatcctgcacaacggcatcggtctgctgagcggctattggggcggcaagctgttcggcttcgacgaatccacctgccgcacgctggcgatcgaagtcggcatgcagaactccgggctggcggccacgctgggcaaaatctacttctcgccgctggccgcgctgccgggcgcactgttctcggtctggcacaacctttccggttcgctgctggcgggttattggtccggccgccccatcaagaaaaaataa

SEQ ID NO: 425089 - DNA, 1368 bp, Serratia marcescens
atgaaccaagcagcaccccagaattccaccgtggtagccaaattcggcggcaccagcgtcgccgactttgaagccatgaaccgcagcgccgacgtcgtgctggccaacccgcaggtccgcctggtggtgttgtccgcctcggcgggcgtcaccaacctgttggtcgccctggccgagggttgcgaggccgacaagcgcaactaccggcttgatgagatccgccgcatccagtacgccatcctcgatcgcctcacggcgccggcggtgatccgcgaagagatcgaccgcctgctggaaaacatcgccatgctgtcggaagccgcgtcgctggccacctcgacggcgttgaccgacgaactggtcagccatggggagctgatgtccaccctgctgttcgttgaaatcctgcgcgcccgcaacgtgcaggccgaatggttcgacgtgcgcaaagtgatgcgcaccgacgatcacttcggccgcgccgtgccggacagcgccgcgctcagcgaactggcccgggcgcagttgcaaccgcggctgcaggaagcgctggtggtcacccagggctttatcggcagcgagccgaaaggccgcaccaccacgctcggccgcggcggtagcgactataccgccgcgctgctcggcgaggcgctcggcgttggccgggtggatatctggaccgacgtgccgggcatctacaccaccgatccacgcgtggtgccggcggccaagcgcatcgacaaaatcggtttcgaagaggcggcggaaatggccaccttcggcgccaaggtgctgcatccggccaccttgttgccggcggtgcgcagcgacattccggtgttcgtcggctccagcaaggatccggcggccggcggcacgctggtgtgcaacaccaccgagaatccgccgctgttccgcgcgctggcgctgcgtcgcaagcaaacgctgctgacgctgcacagcctgaacatgctgcacgcgcgcggcttcctggcggaggtgttcaacattctggcgcgccacaacgtctccgtcgatctgatcaccacctcggaggtcagcattgcgctgaccatggacaccaccggcgccacctccgttggcggcagcctgctgaccacctcgctgctgaccgagctgtcgtcgctgtgccgggtggaagtggaagaaaacctggcgctggtggcgatcatcggcaaccagctgtcgcgcgcctgcggcgtgggcaaagaggtgttcggcgtgctcgatccgttcaatatccgcctgatctgctacggcgccagcagctataacctgtgcttcctggtgccgggcgaagaagccgaacaggtggtgcgtaccctgcatcacaacctgttcgaataa

SEQ ID NO: 425090 - DNA, 1809 bp, Serratia marcescens
atggaattatctgccccgctcatgttggtgcttatcggcctggcgtcgctgctggcgcagtggttggcctggctgctgcgcctgccggccattttgccgctgttgctgttcggcatcgtgctcggcccgacggtgcatctggtgcagccggatctgctgttcggcgatctgctgtttccgctggtgtcgctgtcggtggcgatcatcctgttcgaaggggcgctgacgctgcgtttcgaggagatacgcggcctcggcggcgtggtgcgcaatctggtcaccgtcggcatgctggtcacctttctggtcatcagcctcgccagctggtggctgctggatttcccgccggagctggcggcgctgatcggcgcggtgacggtggtgaccgggccgacggtgatcgccccgctgatgcgcgtggtgcggccgaacgccaacattaaccaggtactgcgctgggaagggatcgtcatcgatccggtcggcgccatcttcaccctgctggtgttcgaattcatcgtgctgaaacagaatgcggagtcctatacccatctgttttggacgctgggcatgaccgccgccgtcggcctgattgccggcgcactgttcggctacctgctcggcctggcgctgcgccgcgtctggctgccgcgctacctgcagaacctggcggtgctggcgatcatgctgaccgccttcggcgtttccaacgccatcgccgacgaatccggcctgctgaccgtcacggtgatgggcatctggctggccaacatgcgcgacgtggacaccagcgatattctggcgttcaaagaggagctgtcggcgatcctgatctcggcgctgttcatcattctggcggcgcggctcgatatccaggcgctgtggaacatgggttggccgctgctcctgctgctgctggtggtgcagttcatcgcccggccgctgtgcatcgcggtgtcgacctggcgctcttccctgcactggcgcgatcggctgctgctgtgctggatcgccccgcgcggcatcgtcgccgcggcggtcagctcgctgttcgcgctgacgctgcagcgcagcggctaccagggcgccgaccggctggtgaccgtggtgttcgccatcatcatcggcaccgtggtgctgcaaagcctgaccagcgggatgatggcgcgctggctgcgggtgcagcagcaaaagccgcgcggcgtgctgatcgtcggcgccaacagcgtggcgcgcatgctggcgcaggcgctgatcaagctgaacgtgccggtaatcgtcaccgacagcagctgggaatactaccgccaggcgcgcatggaaggcatcccggcctactatggccacgcctactccgaacacgccgagaactatctcgatctgagcaatatcgcccaggtgctggcgctgtcgcccaatcgccaccagaacgcgctggcggtctaccacttcggtcatctcttcggcgaggatcacgtgtttgccatccgttcgggagcgccgctgaaagggcgcggcgccagcgcggaaagctcgcgtttccgccggcatgaaattttatttaatcaggaagccacctacggccgcctgagcagcctgctcgccaggggagccaccatcaaagcgaccaaattgaacgaaaatttcggttggctggagtatttggagaaacatcagggcgttattccgttattcagccaaaaggaagacggttctctgcaaccgattggcgccggttccacgcccgcgatgccctgtacgcttatcgcgctggtgcaagatgaaaatccctcaccgtctgtacgttga

SEQ ID NO: 425091 - DNA, 1647 bp, Serratia marcescens
atgaaaaatatcaatcctagtcaaaccgctgcttggcaagccctgcagcaacattatgcacagatgaaagacgtacggatcgccgacctgttcgcccaggacagcgatcgtttctccaggttctccgcgaccttcaacgaccaaatgttggtggactattccaagaaccgtatcacgcaggaaaccctggagaagctgcaggcgctggcgaaagaaaccgatctgcaaggcgccatcaaatcgatgttcgccggtgagaaaatcaaccgcaccgaagatcgcgcggtgctgcacattgccctgcgcaaccgcagcaacagcccgatcctggtcgacggcaaagacgtgatgccggaagtgaacgcggtgctggccaagatcaaacagttctgcgcgcgcgtcatcggcggcgagtggaaaggctacaccggcaaaccgatcaccgacgtggtgaacatcggcatcggcggttcggatctcggcccttacatggtgaccgaagcgctgcgcccgtataaaaaccacctgaacatgcacttcgtctccaacgtcgacggcacccatatcgccgaaacgctgcagccgctgaacccggaaaccacgctgttcctggtggcctccaaaaccttcaccactcaggaaaccatgaccaacgcccacagcgcgcgcgactggttcctgagcagcgccgccgatcaacaacacgtggccaagcacttcgccgcgctgtccaccaacggcaaagcggtggccgagttcggcatcgataccgacaacatgttcgaattctgggactgggtagggggccgttactccctgtggtcggcgatcggtctgtcgatcgcgctgtccatcggttatgacaacttcgagcagctgctgagcggcgcgcacgccatggacaagcacttcgccgaaacgccggcggagaagaacctgccggtgctgctggcgctgatcggtatctggtacaacaacttcttcggcgccgaaaccgaagccattctgccgtacgatcagtacatgcaccgttttgccgcttacttccagcagggcaacatggaatccaacggcaagtacgtcgatcgcaacggcaatccggtggattatcagaccggccctatcatttggggcgagccgggcaccaacggccagcatgcgttctaccagctgatccaccagggcaccaagctggtgccttgcgacttcatcgcgccggccatcagccataatccgctgggcgatcatcacgccaaactgctgtccaatttcttcgcccagaccgaagcgctggcgttcggcaagtcgctggacgtggtggaggccgagttcgcggcgcagggtaaaacccctgagcaggtcaagcacgtggcgccgttcaaagtgtttgaaggcaaccgcccgaccaactcgatcctgctgcgcgaaatcaccccgttcagcctgggcagcctgatcgcgctgtacgagcacaagatcttcacccagggcgcgatcctgaacatctttaccttcgatcagtggggcgtggagctgggtaaacagctggctaaccgcatcctgccggagctggcgggcagcgagaaaatcagcagccacgacagctcgaccaatgcgctgatcaaccgcttcaaggaatggcgctaa

SEQ ID NO: 425092 - DNA, 1434 bp, Serratia marcescens
atgcgcgctaaacttaacggactggtcgctgcgggcctgtttacctgtgcattgtccggccacgccgccggcctggtagcccctgacaacgatctgcgtaacgatctcgcctggctgtctgaccgcggcgtcatcaacgtcagcctgtccacctggccgctgagccaggaagagatcagctccgttatcgcgcaggccaagccggtgaccaacaccgagaaaaacgttatcgaccgcgtacaacgccgcgtcgatgccctgaaagccaacattcgcgtcagcggttacgcctcgaccgataaacccggcaccccgcagggcttcggccaaaacgaatacgccgacgatcgcctgaccatcggcgccggcgccaacggcgagttctgggacgtgcgtctgcagggctcggtggaaggcgatcagcgcgtcagcgacggctccaaattcaacatgaacggctcctacggcgcggtgaaaatctggaaccaatggctctccttcggcgaggtttcccagtggtggggcccgggctacgacggcagcctgatccgctccgacgccgcgcgcccggtggccggctttatgctgcagcgcgccgaccaatcgccgtttgaaaccccgtggctgtcgtggattggccgctggcaataccagttgtccgccggccaactgtcgcagtacgctgccgtgccggacaccaagctgatcggtggccgcctgaccatgatgccgaccgacttcctggagttgggcgcttcgcgcgtcatgatgtggggtggtgatggccgtccgcactcctggagttccttctgggatggcgtcaccggcaacgacaataccggcgatccgaaaaacgatccgggcaaccagttgggcggttttgacttcaaactcaagctgcagccgctcatcggcatgccggtcagcctgtatggccaggtcaccggtgaagatgaagcaggcatgttgccttcgcataacgcctacatgctggggcttgaaggccatccggaatggggcccgaccacgatcaactggcatatcgaaggtactgatacccgctctaacggcaacgccaacaacgtgatgtacaaccactacatctatcggggcggttactaccagcaaggttatccgctgggccatgcgatgggcggcgacggtcagatgctgtccggccgcgtggaaatggtgctggacgacggccagcgttggagcacccgcctggtgtacgccaaggtgaatccgaacaaccaaaccatcaaccgggcgttcccgcgttccgatacgctgaaaggcattcagctcggctggggttacagcttcgattctcaggttaaattcgataccagcctgtggtacaccaacagcgatcacagcaccgccgacgacgtgggtgccggcgtcagcttcgaagtgccgatcaacctgtaa

SEQ ID NO: 425093 - DNA, 408 bp, Serratia marcescens
atggcaaaaacgtcgcgttcgataatgatagcgaaggggctgcagcgggtgctgaacgtgggcttgctgctgctggcggccattctggtggtgtttctggtcaaggaaaccctccacctggcgaaggtgttatttatcaacagcgaagagtcgtcctcttacctgttgattgaaggcattgtgatttatttcctgtactttgaatttatcgccttgatcgtcaagtattttgagtcgggttatcatttcccgctgcgctattttatttacattggcattaccgcgattattcgtttgattatcgtagatcacaaaaaccccatcgataccctgatctacgccgcggcgatattggtgctggtggtgacgctttatctggcaaacaccgatcggctgaaacgggagtag

SEQ ID NO: 425094 - DNA, 891 bp, Serratia marcescens
atggccatggttcaacccaaatcccagcgcctgcgcctgtggatcacccatattttgatgctgtgctttatcgccctgatcatgttcccgctgctgatggtggtcgccatctcgctgcgctccggcaacttcgccaccggcagcctgataccggaaaccctctcctgggatcactggcggctggcgctcggcttcagcgtcacccacgccgacggcagcgtgacgccgccgccgttcccggtgctgctgtggctgtggaactcagtcaagatcgcggcgatcaccgccatcggcatcgtgacgctgtctaccacctgcgcctacgcctttgcccgcatgcgctttcgcggcaagagcacgctgctgaaaagcatgctgatcttccagatgttcccggcggtgctgtcgctggtggcgctgtacgccctgttcgatcgcctgggccagtacattccgtttatcggcctgaacacccacggcggcgtgatcttcgcctacatgggtggcatcgcgctgcacgtctggaccatcaagggctatttcgaaaccatcgacaactcgctggaagaggcggcggcgctggacggcgccacgccgtggcaggcgttccgtctggtgttgctgccgctgtcggtgccgattctggcggtggtattcattctgtcgtttatcgccgccatcaccgaagtgccggtggcgtcgctgctgctgcgcgatgtgaacagctacacgctggcggtggggatgcagcaatatctcaacccgcagaactacctgtggggcgacttcgccgccgccgcggtgctgtcggcgataccgatcaccgccgtgttcctgctggcgcagcgctggctggtgggcggcctgacggccggcggcgtgaaggggtaa

SEQ ID NO: 425095 - DNA, 1578 bp, Serratia marcescens
atgcaattcgctcacgccgggacgcctgcgcgtaaaaaatcgaagtggtggcaaagcgacgcgctgaaatggctggtagtcagcctgttcagcctggtgacctgctacctgattgtgttgatgtatgcacagggtgaatacctgttcgccatcctgacgctgatcctggtcagcgccgggctttacgtcttcgccaaccgccgcgcctacgcctggcgctatgtgtatcccggcgtcgccggcatggggctgttcgtcctgttcccgctgatttgcaccatcgccatcgccttcaccaactacagcagcaccaaccaactgaccttcgagcgcgcgcaatcggtgctgatgcagcgccagttccagagcggcaaaacctttaccttcggcctctacccggcggaaaaccagcagtggcgcctgcagctgacgccgccggacggcgaagcaccgctgatctccgagcctttccgcctcgacgccgccgcgccgcaaaccctgaaactgacggcacagagcgccgcgccgcagggcgagcgcgccacgctgcggatgatcacccagaaccggcaggcgctgagccagctggtggcgcagctgcccgacggcggtgaattgcgcatgagctccctgcgccagttctccggcacccgcccgctgtatgcgctggaccaagacggcagcacgctgaccaataaccagacccaggtgcgctaccggccgaacggcgacaccggcttctatcaggcgatcaacgccgacggcggctgggcgcaggaaaccctgagcccaggctataccgtcaccaccggctggaagaacttcctgcgggtgctgcaggacgagggcatcaagaaaccgttcgtgtcgatcttcatctggaccatcgtgttctcggtgatgacggtgatcctcaccgtggcggtcggcatggtgttggcctgcgtggtgcagtgggaggcgctgaaaggcaaggcgatctaccgtgtgctgctgatcctgccctatgcggtgccgtcattcatctcgatcctgatcttcaaaggtttgttcaaccagagcttcggcgagatcaacatgatgctcagccatctgttcggcatcaaaccggcctggttcagcgatccgctcaccgccaagagcatgatcctgatcgtcaacacctggctcggctacccgtacatgatgatcctgtgcatggggctgctgaaggcgatcccggacgatctgtacgaggcctcggcgatggacggcgccaacccgtggcaaaacttcttccgcatcaccttaccgctgctgatcaagccgctgacgccgctgatgatcgccagcttcgccttcaactttaacaacttcgtgctgatccagctgctgaccaacggcggcccggacatgatcggcaccaccacgccggccggctataccgatctgttggtcagctacacctaccgcatcgccttcgaaggcggcggcgggcaagacttcgggctggcggccgccatcgccacgctgatcttcctgttggtgggcgcgctggcgatcctgaatttgaaagccagcaagatgaacttcgattag

SEQ ID NO: 425096 - DNA, 1194 bp, Serratia marcescens
atgactcgcagcattaccctcgcccgcacgctggcgctctcggcactggccaccctggtgctctcttcttccgccttcgccaagatcgaggaaggcaaactggttatctggatcaacggcgacaagggctataacggcctggccgaagtcggcaagaaattcgaaaaagacaccggcatcaaggttaccgtcgaacacccggacaagctggaagaaaaatacccgcaggtggccgccaccggcgacggccctgacatcattttctgggcccacgaccgcttcggcggctatgcgcagtccggcctgctggccgaaatccacccgtccaaagccttccaggacaagctgtttccgttcacctgggacgccgtgcgttatgacggcaagctgatcggctacccgatcgccgtcgaggcgctgtcgctgatttacaacaaagacctggtcaaacagccgccgaagacctgggaagagatcccggcgctggacaagcagctgcgcgccaacggcaagagcgccatcatgtggaacctgcaggaaccctacttcacctggcctatcatcgccgccgacggcggttatgccttcaagtatgaaaacggtaaatacaacatcaaggatgtcggcgtcgccaacgccggttcgcaggcaggtctgcagttcatcgtcgatctggtgaaaaacaagcacatcaacgccgataccgattactcgatcgccgaagccgcgttcaacaaaggccagaccgcgatgaccatcaacgggccgtgggcctggaacaacatcgagcagagcaaaatcaactacggcgtgacgctgctgccgaccttcaaaggcaaaccgtccaagccgttcgtcggcgtgctgaccgccggcatcaacgccgccagcccgaataaagaactggcgaccgagttcctcgagaactacctgctgaccaacgaagggctggcggacgtcaacaaagacaagccgctgggcgcggtggcactgaagtcctaccaggaaacgctggccaaagatccgaagatcgccgccaccatgcagaactcgcaaaacggggaaatcatgccgaacatcccgcagatgagcgccttctggtacgccgaacgcagcgcggtgatcaacgccgtcagcggccgtcagacggtgaaagccgcgctggacgacgtgcagacccgcatcaccaagtaa

SEQ ID NO: 425097 - DNA, 972 bp, Serratia marcescens
atgtcgtcaatgcctatcgccactcagcccaccctgtaccggatccatccggccagtttccgtgacggaaacggggacggcgtgggcgacgcgcacggcatgctggcggcgctgccgtacctgaaagcgctgtcgatcgacggcctgttgctgccgcagacgctggcgccggaggccgaggcgacggtgacggccgaagggttgacgctgtggtacggcgatgaagccaaccgcgttcgcaatgccgtcgcgccgcagcggttcgtccacggcgcgctggcgctggacgtgatgccgttcagcgcggagaagctggtggcggtgctgcacgcccgccgcgccacgttggcggacagcctgtggagcaccggcgacgccgatcagccaagagtggtcagccgctgggggcagggcgacctgcgttccgccgccgcctttttgacgctgttggcgatgttgccggcgccgatctgcctgtaccagggcgaggagctggggctgccgcatgccgccgggctgcaggatccgcgcggcgcgcaaacgccgatgccgtggcatgaagcccccgaacaggtcaccgccggcgaaatcagctggtatcaacaggtggcgatcgaacaccgcgcattggccatcagccgccaacagcacgacagccactccaccttacgttactgccaggcgctgttggccctgcgccgttcgccgctcatccagcgcggcgaattgaacgcgatcagccagcgggacggcgtggtgcgcttacttattacccatcaggatcaatgccttgaagcgctgataaacctgcagccttatactcaggcggccgcgccgtctgaggcgaccttgccgttggcatggcagcacggcgcgcagcaagagggtcatcaatgggttttggcgggctttgcctccgccattttcacacgacatgttaactgcgaaagcaggggagtaacgcatggctag

SEQ ID NO: 425098 - DNA, 1110 bp, Serratia marcescens
atggctagcgtgacactgcgcagcgtttataaggccttcggtgaggccgtgatttccaaagacgtcaatctgaccatcgaagacggcgagtttgtggtgtttgtcgggccgtcgggctgcggtaaatcgacgctgctgcgcatgatcgccgggctggaggacatcacctccggcgacctgctgatcggcgagaaacgcatgaatgaggtgccgccttccgagcgcggcatcggcatggtgttccagtcctacgcgctgtatccgcacctgtcggtggcggacaacatgtcgttcggcctgaagctggccggcgccaggaaagcggaaatcaatcaacgggtgaatcaggtttccgaggtgctgcagctggcgcacctgctcgatcggcggccgaaggcgctgtccggcgggcagcgtcagcgcgtggcgatcggccgcacgctggtggccgagccggacgtgttcctgctcgacgaaccgctgtccaacctcgacgccgcgctacgggtgcagatgcgcatcgagatctcccgtctgcacaagcgcctgcagcgcaccatgatttacgtcacccacgatcaggtcgaagcgatgacgctggccgacaagatcgtggtgctcgacgccggtcgcgtggcgcaggtcggcaagccgctggagctgtatcactacccggccaaccgcttcgtcgccgggtttatcggctcgccgaagatgaacttcctgccggtcaaggtgaccgcggcgcagccgcaacaggtgcaggtcgaactgcccaaccgccagctggtctggctgccggtggaaggcgagggcgttcagcccggcgccaacctgtcactgggcattcgccctgaacatctgctgcccggcgaagcctcagaagtgcggcttaccggcgacgtacaggtggtggagcagctcggcaacgagacgcaaatccacatccaaatcccggccatccgtcaaaacctggtgtaccgccagaatgacgtggtgctggtagaagaaggtgccacattcgccatcggcctgccgcctcatcgttgccacctgttccgtgaagacggtacggcatgtaaacggctgcaccaggagccgggcgtttaa

SEQ ID NO: 425099 - DNA, 1290 bp, Serratia marcescens
atgactactctgcgcaaacttcctctggcactggctgtcgccgccggtgttctctctacccaggcgctggccgtggattttcacggttacgcccgttccggcatcggctggaccggcagcggcggtgagcaacagtgcttcaaggccaccggtgccgcgagcaaataccgtctcggcaacgaatgcgaaacctacgccgaactgaaactggggcaggaagtgtggaaagaaggcgacaagagcttctatttcgacaccaacctggcctattcggtctcgcaacgttccgactgggaagacgtgaccccgggcttccgcgaagtcaacgtgcagggtaaaaacctgatcgactggctgccgggctccacgctgtgggccggtaagcgcttctatcagcgtcatgacgttcacatgatcgacttctactactgggatatctccggcccgggcgccggtctggaaaacatcgatctgggcttcggcaagctgtccgccgccgtgacccgcaactccgaatccggcggctcttacggctacctggataacgaatggaaacagcgcccaaccgtcaacgacaccttcgacctgcgtctggccggcctggagctgaacccgggcggcaccctggagctgggcgtggactacggccgcgccaatgcgcaggataactatcgcctggccgacggcgccagcaaagacggctggatgttcactgcggaacacacgcagagcatcctgaacggctacaacaaattcgtgctgcagtacgccaccgactcgatgacctcgcagaacaacggccgcaacgaaggcgccaccatcgataacaacggcaagatgatccgcgtgctggatcacggcgccatcgacttcaacgatcaatgggcgctgatgtacgtcgccatgttccaggacatcgaccgcgataacaacaacggcaccacctggtacaccgtgggcgtgcgcccgatgtacaaatggacgccaatcatgagcaccctgctggaagccggctatgacaacgtcaaatcccagcgcaccggcgatcgcaacggccagtataaagtgaccctggcgcagcagtggcaggcgggcaacagcatctggtcgcgtccggccatccgtctgttcgccacctacgccaagtgggatgagaagtggggctacgccaccggtgacgacaccgggtataacaccggcaccgcttacaacgacaccagcatgcataccttcagccgcggcaaggatgacgaagtcaccttcggcgcccagatggaaatttggtggtaa

SEQ ID NO: 425100 - DNA, 906 bp, Serratia marcescens
atgaaaaagaatctgctgtcactctgcctgtcgctggcgctgaccgtcggcgcgcctttggcggccaacgccgacacgccggccaacgtttccgtcgcgccggccatcagcgccgccacgctgcaaagcctgccgtggcagccgctgcagccgccggtgtcgcaagaggtgaagctcgacgccgtcagcccgcagctcaatcagggcgaaattcagggggcgatcgccgcctatacgctgccggccgatcgcggttcgctggaagtgacgctgagcagcctcgccaaaaacaattcgctgtacgcgccgagcgtgctggtgctggatgagcatctgcgcccggcggcgtattacccgagcagctatttcccgtatcagccgccgggggcgatgtcctccgatcgcctcgaaggcacgctgaaactgacgccggcgctcggtcaaaaacagatttacctgctggtgtacaccacccgtcaggacttggcgaaaaccacgcagctgaccaacccggccaaggcctatgcgcagggcgtgggcaacgcggtgccggatatcccggatccgatcgccggccacgcgacgaccggcacgctgaagcttaaggtgaccgcggaacagggcaccggcaacgtgatgatcggcatgctgcagcctgcgccgaccgtggcgccggtggtggtgggctcgagcgcccctgccgccgtggcggcgcctgcgccagcgccggagaaaccggcggagccgatgctcaacgataccgaaagctacttcaataacggcatcaagcaggcggtgaaggcgggcgatatcgacaaggcgctgaagctgatgaatgaggccgagaaactgggctcgaccaccgcgcgtaaaacgtttatcagcagcgttaaaggcaaggggtaa

SEQ ID NO: 425101 - DNA, 984 bp, Serratia marcescens
atgcgtttaatcattgattgcgatcccggcaacggcgttcccggcgccaacgtcgacgacggcctggcgctagccctggcgctggcagccaaaccgcagctgcagctggagttgatcagcatcgtggccggcaacaccccgcgcgaagtgggcttcgccgtcgctaccgacctgctggcgcagagcggctatcaggtgccggtcgccctcggcgcggcgcgcgccctgagcgaaccgccggagccgtggcgcgcacacctggaccgcccgatcgccgatcctaagctggcggcgctgtggcgtgacctgcccgcgccctcgctggccaacgcgcccgcgccggacgccgccatcgccatcggcgaactgatctgccggcatcccggcgagatcacgctggcggcgatcggcccgctgaccaacgttgcgcacgccatgcagctttacccgcagatggcgcaggcggtgaaagagatcgtgatcatgggcggcgtgttcaacgttgagggatatatcaaggacaccaatttcggcctggatccggaagcggcgcggctggtgttgaacagcggcgccgctatcacgctggcgccgctggacgtcaccacccagaccatgctgacccaggcggatctggccgcgttgacccagccggataccccgctgtgccgctatttgcgcgccacgacgcagccgtggatcgactattcgcgccatacgcggcgcctgccgggctgctggatccatgatgcgctggtgatcgcctggctgctggcaccgcagctggtcaccaccgagatgtttcatgtggatgtggcgctggaaggggcgttgacgcgcggcagctcacgccgctggcggccggacagcctgcgcctgacggtcggcatgccggcgccgcagggcaagccggtgcgcgtcatgcagcaggtggacaacgcccgtctgctggcgttgatcggcgcaacgctggcccgcggatga

SEQ ID NO: 425102 - DNA, 1002 bp, Serratia marcescens
ttggataatcactccgcgcgacgcgttacccgcgccgacgtggcccgcgtagcgggcacctccgtcgccgtggtcagctacgtgatcaacaacggcccgcgcccggtggcggaagccacccggctgcgcgtgctggcggcgatcgagcagaccggctaccggccgaacgacatcgcgcgggcgctggcctccggcagcacgcaaacctacgggctggtggtgccggatatttccaacccgttcttcgccaccctggcgcgggcgctgcagcaggaagccttcagccgcggccgcgtgctgctgctgggcgatgccggcgacgatcgtcagcgcgagtatgagcttatcaacaacctgctgcgccgccaggtcgatggcctgctgtacaccagcgtcgatcgccacccgtggttcgatctgatccgcgcttccggcactccctgcgtgatgatagacaccatcgacagccaggccggcgtttgcgccatccgcgtcgacgagcgcgacgccgcttgccaggcgacccgccatctgctgcagcacggctatcgcgacatcggcatttttatcggtccgctgaccatgctcaacgcgcaggatcgcctgaacggctggcgcgatgcgctgctggaggcgggcatcgcgccacgcgacgcgtggattttcgaagcgccttacacccgccagggcggttaccaggccacccagcgcctggtgcaaggcccgcgcccgcgcgccgttttcacctccaacgagcagcaggcgctcggctgcctgtcggcgctggcggagcatgggctgcgcgcgccggacgatctggcgctgatctgttttaacggcacacagcaatccgaattcagcgtgccgccgctcagcgcggtcgagcagccgatcgacgccatggccaagcgggccatcgccatgctggccgccggcgccgcgcccgccgagctgcatgaattcgcttttcaactgcgcatccgccgttcgtgcggctgttag

SEQ ID NO: 425103 - DNA, 1383 bp, Serratia marcescens
atgagcgaaacaacgcttgccactccacagaccgccgacgccgcgctggcggccgatgaacgcctggcaaccaaagaggggcgcagccaattttggcgcgccaccttctcctgctggctcggcaccgccatggaatacgtcgacttcgcgctgtacggcctggcggccggcatggtgttcggcgatgtgttcttccccgaggccacgccgctggtcgctctgctggccagcttcgctacctactcagtcggtttcgtcgcgcggccgatcggcgcgctggtgttcggctggatcggcgatcgcaaaggccgccgcgtggtgctgatcaccaccgtggcgctgatgggcatttctaccacgctgatcggcctgatcccgtcctatgcgcaaatcggcgtctgggcgcccacctgcctggtgatcctgcgcttcgcgcagggattcggcgccggcgcggagctgtccggcggcgcggtgatgctggcggaatacgcgccggccaagcggcgcgggctggtggcctcgatcatcgccatcggctccaacagcggcaccctgctggcgtcgctggtatggctgctggtgctacaactcgacaaggaagatctgatgagctggggctggcgcattccgttcctcgccagcattctgatcgccggggtggcgctgtacctgcgccgtcacgtgcgcgaaacgccggtgttcgagcgcgagctgcaacaaaaccaccagcgcatgctggacgccgctcaggccgcgccggactcacgcagctacctgcagcgcaccaaagcgttctgggtgatgctcggcctgcgcatcggcgaaaacggcccctcctatctgtgccagggctttatcgtcggctacgtcgccaaggtgctgatggtcgataaatcggtgccggcgctggcggtgctgatcgcctcgctgtgcggttttctggtgatcccgctggccggctggctgtccgatcgcttcggccgccgcgtcacctaccgctggttctgcctgctgctggtgctgtacgccttcccggcgttctggctgctcgacagccgtgaaccggcgatcgtcatctcggtgatcgtggtcggcatgtgcatcgcatcgctggggatcttcggcgtgcaggcggcctacggcgtcgaactgttcggcgtgaagaaccgctactccaagatggcgttcgccaaggagctcggctcgatcctctccggcggcaccgcgccgctgatcgccaccgcgctgctctccggcttcggtcactggtggcctgtcgccgcctattttgttgtaatggcgggcatcggcttaatcaccaccttctttgctcccgaaacccgcggccgcgatctcaatctgccgcaggatgccgcgtag

SEQ ID NO: 425104 - DNA, 516 bp, Serratia marcescens
atgtctggcatcagggattccatcctgccgccgctggagtggttgtccgaacaggatcctccggcgcccgccgccgtcagcgactggctgatggagttaggctccatgacccgccgatttgaacgccattgcgcccaggtgcgcgtcgaaccgcagcgcgaatgcttcgtcacgcgcgaggcgctgggcgacgaggcgaagcacctgcccgacagcccgcgctactggctgcgcgaagtggtgctgctgggcgacgaccagccctggctgctggggcgcacggtgatcccggaaaatacgctgaccggccccgaccaggcgctggtggatctgggcacgctgccgctggggcgctacctgttcagcagcggcgagctgacccgcgactatattcatatcggccggcaggacgcgctgtgggcgcgccgttcacggctgcggctggcgggcaaaccgctgttgctgaccgaactgtttttaccggcttcgccgctgtattcagcggttcctgcataa

SEQ ID NO: 425105 - DNA, 873 bp, Serratia marcescens
ttggagggaagcgtgactcaaagtaaatggcgggcttacagccatttgatgcgcattgataaaccgatcggcacgctgttgctgctgtggccgacgctgtgggcgctgtggctggccggaaaaggcgtgccgccgctgtcgattttgctggtgttcgtgctcggcgtgttcctgatgcgcgccgccggttgcgtggtgaatgattacgccgatcgcgcggtggacggctacgtgaaacgcaccgccgggcggccgatgccgagcggccgggtgagcgcgaaagaggccaaggtgctgttcgtggtgctggtgctggtctcattctgcctggtgttgacgctcaatgcgatgaccatttggctgtcgctggcggcgctggcgctggcctgggcgtacccgttcatgaagcgggtgaccaacctgccgcagttcgtgctgggcgccgcgttcggctggggcattccgatgggctatgcggcggtcagcgaatcgctgccgctcagctgctggctgctgctgctggccaacatctgctggacggtggcctacgacacgctgtatgcgatggtcgaccgcgacgatgacctgaagatcggcatcaaatccaccgctatcctgttcggccgttatgacaagctgatcgtcgggctgctgcagttcgcgacgctgctgctgctggtgtgggtcggttatctggcgcagctcggcggggcgttttactggtcactgctgctggcgggtgcgctgttcattcaccagcagaaacagatcgccggccgcgagcgcgaggcctgcttcaaggccttcctgcagaacaactatgtagggctggtggtgttcatcggcatcgcgctgagctatctgccgacgtaa

SEQ ID NO: 425106 - DNA, 2466 bp, Serratia marcescens
atgtcaggttggcgtaaaatttattataaaatattgaatttaccacttaaattgttggtaagaagtaaggtcatcccttcagatccggttaccgagctagggttggatccctcacggccgattttgtatgttttaccttacaattccaaggcggatttgctgacgctgcgcacccaatgcctggcgcaggatctgcccgatccgctcaactcgctggagatcgacggcaccgtactgccgagctacgtgttcattcacgacggcccgcgcgtgttccgctattacaccccgaaagaagagtcggtaaagctgttccacgactatctggatctgcatcgcagcaatccggatctcgacattcagatgctgccggtttcggtgatgttcggccgctcgccgggccgcgaaggccacggtacgccgcacctgcgtctgttgaacggcgtgcagaaattcttcgccgtgctgtggctcggccgcgacagcttcgtgcgtttctccaacaccgtttcgctgcgccgcatggccaccgaacacggaacggataaaaccatcgcgcagaaactggcgcgcgtggcgcgcatgcacttctcgcgtcagcgcctggccgccgtgggcccgagcctgccggcccgtcaggatctgtttaacaagctgttggcgtccaaagcgatcgaaaaagcggtcgaggacgaagcgcgcagcaagaagatctcacacgagaaggcccagcaaaacgccatcgcgctgatggaagagatcgccgccgatttctcctacgaaaccgtgcgcctgtccgaccgcgtgctgagctggacctggaaccggctgtatcagggcatcaacgtcaccaacgccgagcgcgtgcgccagctggcgcaggacggccacgagatcgtctacgtgccctgccaccgcagccacatggactatctgctgctgtcctacgtgctgtatcaccagggcctggtgccgccacacatcgccgccggcatcaacctcaacttctggccggccggcccgatcttccgtcgcctgggcgcgttcttcatccgccgcaccttcaagggcaacaagctgtactcgacggtgttccgcgaatacctcggcgagctgttcacccgcggttactcggtggaatacttcgtggaaggcggccgttcccgcaccgggcgcctgctggagccgaagaccggcaccctgtcgatgaccatccaggcgatgctgcgcggcggcacccgtccgatcacgctggtgccgatttacatcggttacgagcacgtgatggaagtgggtacctatgccaaagagctgcgcggcgccaccaaggaaaaagagagcctgccgcagatgctgcgcggcctgcgcaagctgcgcaacctgggccagggttacgtcaacttcggcgaaccgctgccgttgacggcttacctcaaccagaacgtgccgcagtggcgcgagtcgatcgatccgatcgaagcccagcgcccaagctggctgacgccgacggtcaacgatctggccggccagatcatggtgcgcatcaacaacgccgccgcagccaacgccatgaacctgtgttccaccgcgctgctggcctcgcgtcagcgttcgctgacccgcgagcagctgatcgaacagctcgagtgctacctgcagctgatgcgcaacgcgccttacgcgcgtgacgtcaccgtgccgacgcaaacgccggacgagctgctggatcacgcgctgaacatgaacaagttcgaggtggagaaggacagcatcggcgacatcatcatcctgccgcgcgagcaggcggtgctgatgacctattaccgcaacaacatccaccacctgctggtgctgccgtcgctgatcgccagcatcgtgatgcatcaccgccgggtatcgcgcgccgagctgctgcgccaaatcggcatgatctatccgatgctgaaagccgagctgttcctgcataacgacaaggaacagctgccggaggtgctgcggccggtgatcgacgagctgatccgtcaacagctgatctgcgacaaaggcgacgagctggtgctgaacccggcgcgcattcgcccgctgcagctgctggccgccggggtgcgcgaaaccctgcaacgctacgccatcaccatgtcgatcctcagcgccaacccgagcatcaaccgcggcgcgctggagaaagagagccgcatcatggcgcagcgtctgtcggtgctgcacggcatcaacgcgccggaattcttcgacaaggcggtgttctccaccctggtggcaacgctgcgcgaagaaggctatatcaacgacagcggcgatgcgatccgcgagcacaccctcgaggtgtacaacatgctgagcgatctgatcacgccggagatcaagctgaccatcgaaagcgtcaacatgccggaagagaccaatgccctgccgcaatccgatgcggaagaagagaaagacgagtga

SEQ ID NO: 425107 - DNA, 369 bp, Serratia marcescens
atggcaaaccaagcaaccggcctgacccgcatcatcaaggccgccggctattcctataaagggctttccgccgcctggcagcacgaagcggcgttccgccaggaactggtggtcaccctcctggctatcatactggctgtctggctggatgtgggtgcgatagcgcgcattttattgatcggatcggtagcgctggtgatgatcgtcgagatcctgaacagcgcgatcgaggcggtggtggatcgcatcggcagcgaacatcacgagctgtccggccgggccaaggacatgggatcggcggcggtgtcgctggcgatcgtgctcgcgctgttcgtttggggcacggtcttatggcagcacttcggctga

SEQ ID NO: 425108 - DNA, 609 bp, Serratia marcescens
atgaaagcactaactaccagacagcaagaggtctacgacctgattcgcgagcacatttcgcaaacgggcatgccgccaacgcgtgccgagatcgcgatgcgtctggggttccgttcgcctaacgccgccgaagaacacctgaaggcgctggcacgcaaaggcgtgatcgaaatcgtctccggtgcttcgcgcggtatccgcctgctgatggaagaagaagaggggctgccgctgatcggccgcgtcgccgccggcgagccgctgctggcgcagcagcacatcgaagggcactaccaggtggatccttccctgtttaaaccgagcgccgatttcctgctgcgggtgaacggcatgtcgatgcgcgacatcggcattctggatggcgatctgctggcggtacacaaaacgcaagacgtgcgcaatggccaggtcgtggtggcgcgcatcgaagacgaagtgacggtcaagcgcctgaaaaagcacggcaacgtggttgaactgctgccagagaacaacgaattccaaccgatcgtggtcgatctgcgtcagcagaatttcactatcgaagggctggcggtcggcgtgatccgcaacggcgactggatttaa

SEQ ID NO: 425109 - DNA, 1338 bp, Serratia marcescens
atgcgcttgatttccgcctttaccagcgacaccgataaagctctgtggcgcctggccttgccgatgattttctccaatattaccgtgccgctgctcgggctggtggacaccgcggtgatcggccacctcgacagcccgatctatctggggggcgtggcgatcggcgcggtggcgaccagcttcctgttcatgctgctgttgttcctgcgcatgagcaccaccggcctggcggcgcaggcgctgggggctcagaacccgcaggcgctggcgcgcgcctttatgcaaccgctgctgttggcgctgctggccggagcggcgatcgtcctgctgcgttatccgctgatcgaactggcgctgcggatcgtcggtggcgatggcgaagtgctggaacaggcgcggcgttttcttgagatccgctggctcagcgccccggcggcgctggccaatctggtgctgctgggctggctgctcggcgtgcagtacgtgcgggcgccggtgatcctgctgatcgtcggcaacctgctgaatatcgtactggatatctggctggtgatgggcctgggctggaacgtgcgaggggcggcggcggccaccgccatcgccgaatacgccacgctgttgctcggcctgtggctggcgtggcgggtgatgcgcctgcgcggtattaccctgccgatgctgcgccaggcctggcgcggcgatctgcgtcgcctgctggcgctcaaccgcgatatcatgctgcgttcactgttgctgcaactgtgctttgcgtcgctgaccattttcggcgctcgcctggggagcgaggtggtggcggtcaatgcggtattgatgaatctgctgacgttcaccgcctatgcgctcgacggcttcgcttatgcggtggaggcccattcaggccacgcctacggcgcccgggacgatagccaactgcgtaaggtgtggcacgcggcctgcaggcaggcggggctggtcgcgttggtcttcggcctggcgtatgccgttaccggccagcagatcgtggcggcgttgacctccttgccggagctgcgtgcgttggctgcccattatttaccgtggcaggtcattctgccgctggtcggggtgtggtgctatttgctggacggcatgtttatcggcgccacgcgcggcgccgagatgcgtaacagcatggcggtagctgcggcagggtatggtctgacgctgttcagcgtgccgctgcttggcaaccacgggctttggctggcgctggcggtgtttctgacgttgcgcggcgtggcgttgggctggatttggcaccgccaccaggtgcgcggcagctggtttaccgcacattaa

SEQ ID NO: 425110 - DNA, 210 bp, Serratia marcescens
atgaataaagatcaagccgacggtaactggaagcagctgaaaggcaaagtgaaggaaaaatggggcaagctgaccgatgacgatctgacggtcatcgaagggaaacgcgaacagctggtcggcaaaatccaggagcgctacggttaccagaaagaggcggccgagaaagaggtgaaggcctgggaagaacacaccaaacaccgctggtaa

SEQ ID NO: 425111 - DNA, 513 bp, Serratia marcescens
atgaactcaaccacccaggaaaagctgctggcgcaggcggaacgcctctgccaacaacgcaatgtgcgattgacgccgcaacggctggaagtgctgcgtctgatgactcagcaacccggtgcaatcagcgcttatgacctgctcgatctgctgcgcgtcgccgaaccgcaggccaagccgccgacggtctatcgcgcgctggattttctgctggagcaagggtttatccatagagtggaatccgccaacagctacgtgctgtgccaccattttgaacagccgatgcacacgtccgcactgtttatctgcgaccgctgcggccaggtgaccgaacgcaccaccgaaggcgtagaggaaacgctgcagaagctggcgcaggaagccggatttgcgctgcgccacagcgtggtagaagcgcacggtctgtgcgccggctgcgtggaggttgaggcgtgcgacagcaagcatgactgcgccgaacacgatcacagcatcgccatcaagaagaagtaa

SEQ ID NO: 425112 - DNA, 573 bp, Serratia marcescens
atgacggaaagagagaagctgttaagcggccaggtgtacaacagccgcgatgaagaattgattgctatgtaccatcgggccagagcgttgaccaaaagcctgggcgagctggattcgcatcaggcggacgagaaaaaccgtctgctcggcgaactgttcggcgcctggggcgaggcgagctggatcgaaacgccgttctggtgcgactacgggcaacatgtccgcatcggcaagaactgttttatcaacgtcaatgcggtgttcctcgactgcaataccatcaccatcggcgacaacacgctgatcggccccaacgtgcaaatctacacgccgagtcatccgctgaaggccggtgaacgctttaccggtgacccggctttccctttccgcacctcggcgcagccggtgtccatcggcagcaatgtgtggatcggcggtaacgtggtgatcttgccgggcgtgaccatcggcgacggcaccactatcggcgcgggcagcatcgtgaccggtgacatcccggccaacgtgctggcgctggggcagccatgccgggttatccgcgcgttggaatag

SEQ ID NO: 425113 - DNA, 1011 bp, Serratia marcescens
atgacgaaagacaaccacgccccaacctacgccgccaatcgtttctccatcgcgccgatgctcgactggaccgatcgtcattgccgttacttccaccgcctgctgaccaaggaaacgctgctgtacaccgaaatggtgaccaccggcgcgatcatccacggcaaaggcgactacctggcctacagcgaagaagagcatccggtggcgctgcagctgggcggcagcgatccggccgcgctggcgcactgcgccaaactggcggagcagcgcggttacgacgagattaacctcaacgtcggctgcccgtccgatcgcgtgcaaaacggcatgttcggcgcctgtttgatggggcaggcgacgctggtcgccgactgcatcaaggcgatgcgcgacgtggtgtcgatcccggtgacggtgaagacccgcatcggcatcgacgatcaggacagctacgccttcctgtgcgattttatcgagaccgtcgccgggcgcggtgagtgcgacatgttcaccattcacgcgcgcaaggcctggctctccggccttagcccgaaagagaaccgcgaagtgccgccgctcgactacccgcgcgtttatcagctgaagcgggactttccggcactgaccatcgccatcaacggcggggtgaaaacgctggaggaggcgcggcagcacctgcagcatctggacggcgtgatgatggggcgcgaggcgtaccagaacccgggcatcctggcgcgggtcgacagcgaactgttcggcgcgcagaccgcagtgccggacagcgtggcgatcgtcgaagcgctgtatccgtatatcgagcgcgagctgtccaacggcacctatctcggccacatcacccgccacatcctcggtttgttccagggcgtgccgggcgcgcgccagtggcgtcgccacctgagcgagaacgcccacaagccgggcgccgatgcgcgggtggtggagcaggcgctggcgctggtgcgtcagccgcgtgtcgaaatggcgtaa

SEQ ID NO: 425114 - DNA, 219 bp, Serratia marcescens
atgttggaaatcttctttctcattggctttgtggtgatgctgatggtgaccggcatctcgctgctggggatcttcgctgcgctgttggcggcggcggcgttcatgctggtgggcgggttgttcgcggtggtcatcaagctgctgccgtggctgattttggcggtggtcggggtatggatttaccgttcgatgcagaaaccgcaggccaggcgttactga

SEQ ID NO: 425115 - DNA, 984 bp, Serratia marcescens
atggccaagcgcattcaattctccgccaccggcgggccggaagtcttgcaatacgttgattttacaccgctcgatccggctgccggggaagtgcagatcgagaacaaggcgatcggcatcaactacatcgacacctatgtgcgcagcgggctgtacgcgccggccagcctgccgagcggcctcggcaccgaggcggccggcgtggtggtcaaggtcggcgccggggtaagcgcgatcaaaccgggcgaccgggtggtgtatgcgcagtcgtcgctcggcgcctacagcgagatccacaacgtgccggaagaaaaagtggcgctgctgccgcacaacctcagctttgagcagggcgccgcctctttcctcaaagggctgacggtgcactacctgctgcgccagactcacgaagtgcagccgggtgaagtgttcctgttccatgccgccgccggcggggttggccttatcgcctgccaatgggccaaagcgctgggtgcgcgcctgatcggcagcgtcggctccgacgagaaggccgccctggcgaaacaggccggcgcctgggccaccatcaactaccacaaagaggatatcgcccagcgggtggccgagctgacgtacggcgagaaggttggcgtagtgtacgattcggtggggcaaagcacctggcaggcctcgctcaacagcctgaaacgccgcggcctgatggtcagcttcggcaatgcctccggcccggtgaccggcgtcgatctggcgctgctcaaccagaaaggatcgctgtacgtcacccgcccttccctcaacggctacgtcaccaaccgcgccgaactgcagtacgccagcaacgagctgttctcgctgatcggcagcggcgccattcgggtggaggtgagagacgagcagaaatttgcgctggccgacgcccagcgggcgcaccaggtgctggaaagccgcagcaccagcggctccagcctgctgatcccctga

SEQ ID NO: 425116 - DNA, 1356 bp, Serratia marcescens
atggaagggctgaagatgccgccgcactcgctggaggccgagcagtcggtgttgggcggtttgatgctggataacgagcgctgggacaacgtggcggagcgcgtggtcgccaacgatttcttcagccgcccgcaccgcctgatctttaccgagatgcagcgtctgctggagatgagcaagcctatcgacctcatcaccctgtccgaatcgctcgaacaaaagggcgaactggactcggtcggcggcttcgcctacctggccgagctgtcgaaaaacaccccgagcgccgccaacatcggcgcctacgccgacatcgtgcgcgagcgcgcggtggtgcgcgagatgatctcggtggctaacgagatcgccgacgccggctacgatccgcaggggcgcagcagcgaagacctgctcgatctggcggaatcccgcgtcttccaaatcgccgagaaccgcgccagcaaagacgaaggcccgaagggcatcgagcgcatcctggaagacaccgtgtcgcgcattgagcagctgtatcagcagccgcacgatggcgtgaccggggtcgataccggctatcaggatctcaacaagaaaaccgcgggcatgcaaaagtccgatctgatcatcgtcgccgcccgtccttcgatggggaaaactaccttcgccatgaacctgtgcgaaaacgccgcgatgacccaggaaaaaccggtgctgatcttcagcctggagatgcccggtgagcagatcatgatgcgtatgctggcgtcgctgtcgcgcgtggatcagacgcgcatccgtaccggccagctcgacgacgaggactgggcgcgcatttccagtaccatgggcattctgctggagaagcgcaacatgtacatcgacgactcctccggcctgacgccgaccgaagtgcgctcgcgcgcgcggcgcattttccgcgagcacgacgggcttagcctcatcatgatcgactacctgcagctgatgcgcgtgccggccctgtccgacaaccgtacgctggagatcgccgagatttcgcgctcgctgaaggcgctggcgaaagagctgcaggtgccggtggtggcgctgtcgcagctgaaccgaagcctggagcagcgcgccgataagcgcccggtcaactccgacctgcgtgaatccggctctatcgagcaggatgccgacctgattatgttcatctatcgtgatgaggtgtatcacgagaacagcgatctgaaagggatcgcggaaattattatcggtaagcagcgtaacggcccgatcggcaccgtgcgccttacctttaacggccagtggtcgcgtttcgataactacgcggggccacaatacgatgacgaataa

SEQ ID NO: 425117 - DNA, 1080 bp, Serratia marcescens
atgaaagcggcaaccgctgtaatcgaccgccgcgctctgcgacataatctgcaacaggtgcgccgccaggcgccgcaaagccgcctgattgccgttgtgaaagcaaacgcttatggacatggcctgctggaaacagcccacaccctgcaagacgccgactgctacggcgtggcgcgcatcggcgaggcgctgatgctgcgctccggcggcatcgtcaaaccgatcctgctgctggaaggtttcttctgtgccgaagatctgccggtgctggtggcgaacaacatcgaaaccgcggtacacagcatcgaacagctcgaagcgctggagcaggccgagctggcgcgcccggtgccggtgtggatgaagctcgataccggcatgcatcggctgggggtgcgccccgaacaggcggaagcgttttatcagcgcctgtgcgcctgccgcaacgtggcgcagccggtcaatatcatgagccacttcagccgcgccgatgagccggaatccgacgccaccctgaaacagatcgcctgcttcgagcagttcgcgcgcggcaaaccgggccagcgctcggtcgccgcgtccggcggcacgctgctgtggccggatgcccacaatgagtgggtgcgtcccggcatcattttgtacggcgtgtcgcctctggataacggcagcggcgccgagcatgggctgcagccggcgatgacgttgaaatccagcctgatcgcggtacgcgagcacaaggccggcgaagcggtcggctacggcggcacctgggtaagcccgcgcgatacccggctgggcgtggtggcgatgggatacggcgacggctacccgcgcagcgcgccgaccggtacgccgatccggatcaacggccgcgaagtgccgatcgtcggccgggtgtcgatggacatgatttcggtcgatctcgggccggacgccgccgataaggtgggggatgaagcggtgctgtggggccaggcgctgccggtcgagcgcatcgccgcctgcaccggcatcagcgcttacgaacttatcaccaagctcacgcagcgcgtggcgatggaatacatcggcgactga

SEQ ID NO: 425118 - DNA, 768 bp, Serratia marcescens
atgaaaaagctactccctctcgcgctgctgctcgccgccggcggcgctggcgcgcaatcccacctggacaaggtgctgcagcaaaagaccctggaggtctgcaccaccggcgactacaagccctataccttcctcaaggaagacggcggctatgaaggcatcgacatcgatatggcggagtcgctggccaagagcctgggcgccaaagtgaagtgggtgaaaaccagctggaaaaccctgacgccggacttcacctccggcaagtgcgatatcgcgatgggcggcatctccgtcacgctggagcgacaaaaacaggtgttcttcgccgacaagctggataccgacggcaaaatcccgctggtgcgctgcaccgacgtgaagaaataccgcactctcgagcagatcaacaaaccgtcggtgcgcctgctggagccggcgggcggcaccaacgaagccttcgtgcacgcctatctgccgaaggccaagctgacgctgacgcacgacaacatgagcattttccagcagttggtagaccgcaaggcggacgtgatgatcaccgacgcctccgaggcgctgtaccagcagaagcgctatccgaagctgtgcgcggtgaatccgagcaaaccgatgcagtacggcgagaaggcttacatgctgccgcgcgacgatctgagctggaaactgtatgtggatcagtggctgcacctggccaaggcgaccggcgagtatcagaagattatcgacaagtggttggcggtaaagaagtaa

SEQ ID NO: 425119 - DNA, 468 bp, Serratia marcescens
atgtacaacattgacgattttgatatgaaaatcctgacgctgttacaggccaacggccgtctgaccaatcaggaactgagcgagctggtcgggctctccgcctcccaatgttcgcggcggcgcatcagcctggagcaggcgcagctgatccgcggctaccacgcgcggctggcgccggaggcggtcggcctggggctggtggggctgattgaagtcagcctgatcacgcacgcgcaggagcagatcgacagctttcatcagatgctggaggaggtggacgcgatccttgacgcttacaagaccaccggcgacgccgattacctgctgaaagtggcggtggcggacctgccggcgctgagcgagttcatcagccagacgctgtcgccgcacaaaagcgtggcgcatatcaaaacggcggtggtgctcaatcgcatcaaggaaaacggtttgttgccggtggcgagataa

SEQ ID NO: 425120 - DNA, 1194 bp, Serratia marcescens
gtgttccagaacgttgacgcctatgccggcgatcccattctgtcgctgatggaaaaattcaaacaagacccgcgcgcgcacaaggtgaacctgagtatcggcctgtactacgatgcgcagggcatcatcccgcagatgcgggcggtcgccgcggcgcaagcgcagttgaacagcgtcgagcacggcgcctcggtatacctgccgatggaagggctgcaaccctaccgttccgccatccagcagctgctgttcggcgcgcagcacccgatgctgcagcaggggcgcatcgccaccgttcagaccgtcggcggttccggcgcgctgaaagtgggcgccgacttcctgaaaagctacttcccggattcgcaggtgtgggtcagcgatcccacctgggaaaaccacgtcgccatcttcagcggcgccggtttcaaggtgaatacctacccgtatttcgacagcgaaagcctgggcgtgaagttcgacgccatgctcgctgcgctgaaacagctgccgaagcacagcatcgcgctgctgcacccgtgctgccacaacccgaccggttccgacctgacccctgcccagtgggatgaggtggtcaaggtgatcgccgagcgtgaaatcattccgttcctcgacattgcctatcagggcttcggcggcggcatggagcaggatgcctacgccattcgcgccatcgcggcggccggcctgccgtgcctggtgagcaactcgttctcgaagatcttctcgctgtacggcgagcgcgtcggcggcctgtcggtggtgtgcgaaagcgaagaggcggccgggcgcgtgctgggccagctgaaggccaccgtgcgccgcaactactcgagcccgccgaacttcggcgcgcagctggtggccaaggtgctgaacgacgcccagctgaaaacccagtggctggacgaagtggagagcatgcgcacccgcattctcgagatgcgtcacgcgctggtggacaccctgaagagcgcgctgccgcagcgcaactttgattacctgctggcgcagcgcggcatgttcagctacaccggcttcagcgcggcgcaggtcgatcgcctgcgtgaagagttcggcgtctacctgatccacagcggccgcatgtgcgtggccggcctgaaccacaacaacgtgcgtcaggtggccgaggcgtttgccgcggtgcagtaa

SEQ ID NO: 425121 - DNA, 417 bp, Serratia marcescens
atgtggcatcagcaaacgctaatcctcagcgcaaaagcgcgtggctttcatctggttaccgacgagatcaccaaccagttaacccacttacaccgcctgcaaaccggcctgttgcatctgttgctgcagcatacctcggcctcgctgacgctcaacgagaactgcgatcccacggtgcgagccgatatggagcagcatttcctgcgtcaggtgccggaaaacgcaccctatcagcatgactacgaagggccggacgacatgccggcgcacatcaaatcctcgctgctgggcgcttccctgacgctgcccgtcaggcacgggcggctgatgttgggcacatggcagggcatctggctgggggagcaccgcatccacggcggagcacgccgtattgtggccacgttacagggggaataa

SEQ ID NO: 425122 - DNA, 354 bp, Serratia marcescens
atgaataacagtgcattgctggagtactgcatggcgaagccgggcgcggaacaaagcgaccagaaccagtggcaggccagccagatcaaggtgggcgacgtgatgttcgccatggtgtgcgaggtcgaagggcggccggcgctggcggtcaagtccagcccggagctggcggaaagcctgcgtgaacaccatccggagatcgtcgcctgcgacggcctgaacaaggcgcactggaacacggtgtttcttgacggcaacctgccgaactcgcagttttacacgctgatcgacagctcctatcagctggtggtggaaggcctgcccgaacacgtgcgccaggaactgcgcgcctga

SEQ ID NO: 425123 - DNA, 558 bp, Serratia marcescens
atggccatcagcgaagaaaagcgcaagatgatcgccggggaactgtacgacgccggcgatgacctgttgcgcagcgaacgtcggcgcgcgcgccagctgacgcatcgctataaccactcctcgccggaagagggcgagctgcgcaaacagtggctgggcgagctgctgggcggctatcagggcggcaccatcgagccgaccttccgctgtgactacggctataacatttatctgggcaagaacttctacgccaatttcgactgcgtgatcctcgacgtgtgcgaggtgcatatcggcgacaactgcctgctggcgccgggcgtgcatatctacaccgcgacccatccgctggacgccgagacccgcgtcggcggggcggagttcggcaagccggtcaggattggcggtaacgtgtggatcggcgggcgcgcggtgatcaatccgggggtgaccatcggcgacaatgcggtcgttgcctccggtgcggtggtaaccaaagacgtgccggccaattgcgtggtgggcggcaacccggccaggatcatcaagcagctataa

SEQ ID NO: 425124 - DNA, 1053 bp, Serratia marcescens
atgaacattacccatgcctatgccgcgcatgacgcgaagtctgcgctggtgcctttcgattacccaccgcgcgccctgcgcgaccacgatgtgcaaattcaggtgttgttctgcggcgtgtgccattcggatctgcaccaggcgcgcaatgaatggagcaataccatttacccggtggtgccgggccacgaaatcgtcggccgcgttagcgccgtcggcgaccacgtctcgcgttaccgggtcggcgatctggtcggcatcgggtgcatggtggattcctgccgcagctgcccgagctgcgatgaggggctggagcagtattgcgagaacggcttcaccggcacctataacggtcaggatcgccagaccggcgccgtgacctacggcggctactccaccgatctggtggtggatcaggacttcgtgctgcgagtgccggaaaatctcgatccggccggggtcgcgccgctgctgtgtgccggcatcaccacctattcgccgctgcgccagtggggcgcggggccaggcaaaaaggtcggcatcgtcgggctcggcgggctggggcacatgggcgtcaaactggcgcgggcgatgggcgcgcacgtggtgctgttcaccacctcgccgtcgaaaatcgaagacgccaagcgtcttggcgctcatgaagtggtgatttcgcgcaacccggaggagatggcgcagcacgtcaacagcttcgacttcatcctcaacacggtagcggcccagcacgatctgaatccgttcctcaacctgctgcgccgcgacggcaccctgacgctggtcggcgcgccggaacacgatcatccgtcgccgcaggtgttcaatctgatcatgaagcgccgccgcatcgccggttcgctgattggcggcatcgcggaaacgcaagagatgctggacttctgcggccaacacggcatcacgtcggatatcgagctgatcccgatgcagcagattaatgaagcctatgagcgcatgctgaaaagcgacgtgaagtaccgcttcgtggtggacatcgactccctgcgggtctga

SEQ ID NO: 425125 - DNA, 2829 bp, Serratia marcescens
atggacaatatcgaagttcgtggtgctcgaacccataatctgaaaaacatcaacctgatcatcccgcgtgacaaactgatcgtcgtcaccggcctgtccggttccggcaagtcatcgctggctttcgatacgctgtatgccgaagggcaacgccgctacgtcgaatcgctctccgcctatgcgcgccagttcctgtcgctgatggaaaaaccggacgtcgatcatatcgagggcctgtcgccggcgatctccatcgagcagaaatccacctcgcacaacccgcgatccacggtcggcaccatcaccgaaatccacgactacctgcgcctgctgttcgcccgcgtcggcgagccgcgctgcccggatcaccatgtgccgctggcggcgcaaaccgtcagccagatggtcgataacgtgctgagccagccggaaggcaagcgcctgatgctgctggcgccggtggtgaaagaccgcaagggcgagcacaccaaaacgctggaaaacctggccgcccagggctatatccgcgcgcgcatcgacggtgaagtgtgcgatctgtccgatccgccgaagctggagctgcagaagaaacacaccatcgaagtggtggtcgaccggttcaaggtgcgcgaggacatggcgcagcgcctggccgaatcgttcgaaaccgcgctggagctgtccggcggcaccgcggtggtggcggacatggacgacgagaaagcggacgagctgctgttctccgccaacttcgcctgcccgatctgcggctacagcatgcgcgagctggaaccgcgcctgttttccttcaacaacccggccggcgcctgcccaacctgcgacggcctgggcgtgcagcagttcttcgatccggatcgcgtggtgcaaaaccccgagctgtcgctggccggcggcgcgatccgcggctgggatcgccgcaacttctattacttccagatgctgcgctcgctggcggagcactatgagttcgacgtcgaagcgccgttcaacaccctgagcgccgacgtgcagaaggcggtgctgagcggctccggcaaagagtcgatcgaattcaaatacatcaacgatcgcggtgataccaccgtgcgccgtcatccgttcgaaggcgtgctgcacaacatggagcgccgctataaagagaccgaatccagcgcggtgcgcgaagaattggcgaagttcatcagcaatcgcccttgcgcctcgtgccacggcacccgcctgcgcgaagaagcgcgcaacgtgttcgtcgaagacaccacgctgccggagatttccgatctgagcatcggccatgcgatgaccttcttccagaacatgaagctcagcggccaacgcgccaagatcgccgaaaaagtgctgaaagagatcggcgatcgcctgaaattcctggtgaacgtcggcctgaactacctgtcgctgtcccgctcggcggagacgctctccggcggcgaagcgcagcgcatccgtctggccagccagatcggcgccggcctggtgggcgtgatgtacgtgctggatgagccgtcgatcggcctgcaccagcgcgacaacgagcgcctgctggaaacgctgatccacctgcgcaacctcggcaacacggtgatcgtggtggagcatgacgaagacgccatccgcgccgccgaccacgtgatcgacatcggccccggcgccggcgtacacggcggccaggtggtggcggaaggcaccgtcgacgacatcatggcgcagccggactcgctgaccggccagttcctcagcggcaagcgcgagatcgccattccggcgcagcgcgtgcaggccgatccgaccaaggtgctgaagctgagcggcgcgcgcggcaacaacctgaaggacgtgacgctgacgctgccggttggtctgtttacctgcatcaccggcgtgtccggctccggcaaatcgacgctgatcaacgatacgctgtttccgatcgctcagcgccagctcaacggcgccaccatcgccgaaccggcgccgttccgcgaagtgaccggcctggaacatttcgacaaggtgatcgacatcgatcagagcccgatcggccgcacgccgcgctccaacccggccacctacaccggcattttcaccccggtgcgcgagctgttcgccggcgtgccggaatcgcgcagccgcggttatacgccgggccgtttcagcttcaacgtcaagggcgggcgctgtgaagcctgccagggcgacggggtgatcaaggttgagatgcacttcctgccggacatctacgtgccgtgcgatcagtgcaagggcaagcgctataaccgcgaaacgctggaagtgaagtacaagggcaagagcatccacgaagtgctggagatgaccatcgaagaagcgcgcgagttcttcgacgcggtgccggcgctggcgcgcaagctgcagaccctgatggatgtcgggctgtcctacatccgcctcggccagtcggccaccacgctctccggcggtgaggcgcagcgcgtcaagctggcgcgcgagctgtcgaagcgcggcaccggccagacgctgtatatcctcgacgaaccgaccaccggcctgcacttcgccgatatccagcagctgttggcggtgctgcatcagctgcgcgatcagggcaacaccatcgtggtcatcgagcataacctggacgtgatcaagaccgccgactggatcgtcgatctggggccggaaggcggcagcggcggcggcgagatcctggtggccggcacgccggaaaccgtggccgagtgtgaaaaatcgcacaccgcacgcttcctgaaaccgctgttgaagccgtag

SEQ ID NO: 425126 - DNA, 531 bp, Serratia marcescens
atggccagcagaggcgtaaacaaagtaattctggtcgggaatctgggtcaggatccagaagtccgttacatgccgaacggcggcgcagtggccaacattaccctggcgacctccgaaagctggcgtgacaaggcgaccggcgaacagaaagagaagaccgagtggcaccgcgtcgtgctgttcggcaaactggccgaagtggcgggcgaatacctgcgtaaaggctctcaggtctacatcgaaggctccctgcagacccgtaaatggcaggatcagagcggccaggatcgctacaccaccgagatcgtggttaacgtcggcggcaccatgcagatgctgggcggccgtcagggcggcggcgcaccggccggtcaatctgccggcggccagggcggttggggccagcctcagcagccacagggcggcaaccagttcagcggcggccagcagcagtcgcgcccggcgcagaacagcgctccggcgaccagcaacgaaccgccaatggatttcgacgacgatatcccgttctga

SEQ ID NO: 425127 - DNA, 750 bp, Serratia marcescens
atgaccacagcacaccctctgcaaggcaaagtcgcgttcgttcaaggcggttcacgcggcatcggcgccgccatcgttaaacgtttggcgagtgaaggcgccgccgtcgcctttacctacgccgcctcggccgatcgcgccgaagcggtggcaagcgccgttaccgccgccggcggcaaagccctcgccatcaaggccgacagcgccgatgcggcggcgctgcagcaggcggtgcgccaggcggtcagccagttcggcaacctggatattctggtgaacaatgccggggtgtttacgctgggcagcaccgaggagctggcgctggacgatctggatcgcatgctggcggtcaacgtgcgcagcgtgttcgtcgccagccaggaagcggcgcgccacatgaacgacggcggccgcatcattcacatcggcagcaccaacgccgagcgcgtgccgttcggcggcgcggcggtgtatgcaatgagcaaatcggcgctggtcggcctgaccaaaggcatggcgcgcgatctcggctcgcgcggcatcaccgtcaataacgtgcagcccggcccggtagacaccgagatgaacccggacgccggtgagttcgccgagcagctcaagcagctgatggcgatcggccgctacggcaaagatgaagagatcgccggcttcgtcgcctacctcgccggcccgcaggcgggttatatcaccggcgccagcctgagcatcgacggcggcttctcggcgtaa

SEQ ID NO: 425128 - DNA, 918 bp, Serratia marcescens
atgctgggacacctggaatgcttcgtcagcagcgcggaaaacggcagcttttccgccgccggccgcaagctgggcctcagcccggcggcggtgggcaaaaacgtcacccggctggagacgctggttggcgtgcgcctgttccagcgcaacactcgccagttgatcctgaccgaagagggcgagcgttttttgcaggaagtcagcggtggcctgcagtcgattcagtgcgcgttgaagggcctgagcagcagcggcggcgtggcggccggcagcctgaggatcagcatgggcaccgctttcggtctgaatttcgtgttgccgatgttgccggattttttggcgcgttatccggcgatcgtgccggactggcatttcgataatcgccaggtggatctgatcggcgagcacttcgacgccgcgttgggcggcggcatcgaactggctcaggggatgattgcgcgcgagctggcgcccgcacacggcgtgttggtggcttcggcggattatctgcggcaacggccgccgctgcggcagccggaacagctggcgcaacacaccgggattttcatccgttcgccacagaccgggcgcatccgccatcagccgctgcgcaatgcggaaaacgagcagcatgcgccggcgatggcgatcggcatgacggtaaacgagccggaggcggcggcgcgggcggcggaaatgggcttgggcattgccttgatcgccatgccgaatgcggtgccctatctggaaaacggccgcctggtgcgggtgttgccgggttggtatgtcgatcgcggcagcatgcacctttattttcccaccaccaaattcttaccgaccaaaacccgggtttttgtcgatttcatcaccgagcagtttcgcctgcagaagctggcgacacgcttcgacgcccgctaa

SEQ ID NO: 425129 - DNA, 261 bp, Serratia marcescens
atgaaaaacgtcaaaatttttgctaccgctgcactgctggctaccgcttcttttgctaccttcgccgctgacctgccttccagccaacccgctgcagacgcccagaaaatcggcgtagtttccgttagcggcgccaccaacctgagcgcgctggaaagcgaactggccagcaaagccgccgcgtcgggcgccagctcataccgcatcgtcgccgccggcggccagaacaaactgtacggcaccgcagaaatcttcaactga

SEQ ID NO: 425130 - DNA, 444 bp, Serratia marcescens
atgacggtaaacgcgtttatcggcagttgggcgctggtgtcgtcggtgttcaaaaaccagaacggcgagctgaattacccgctgggcgagcaggtgctggggcgcatccactatgaggccaacggcacgatggcggcgcagctgtacagtgccgtgcggccgcgtttcgccgccgacgatttggcgcaggggtccgagcgggagatccgcgcggccttcatcaatatgatttgctacttcggccgctatcaggtggaggagagcgaacagcgggtggtgcatcaggtcgaaggctgttcgttccccaactgggtaggcagccgtcaggtgcgtttttacgctttcagcggcgatcggctgacgttgcgcacggtgcccttgcagctcggcaacggcgtgcaggtgggcgaactggtgtggcagcggacaggagcttctttatga

SEQ ID NO: 425131 - DNA, 669 bp, Serratia marcescens
atgatcattgttcatcatctcaatcactcgcggtcgcagcgcattctgtggtttctggaagagctgggcgtgccctatcaggtgcaacgctacgaacgcgatccgcagactatgctggcgccggcggcgctgaaaaagatccacccgctgggcaaatcgccggtgatcgtcgacggcgatctgacgctggcggaatccggcgccatcatcgaatacctgcaggaagcctatgacgcgcaagggatgttcatgccgaccgacttccacgcgcgccagcaataccgctactggctgcactacgccgaaggatcgctgatgccgctgttggtgatgaaactggtgttcagccgcctcggccagccgccgatcccctggctgctgcggccggtggccggcgcgatcggcaagggcgtgcagcgcgaatatctcgacaagcagatcgcgccgcactgcgagtatctcgagcagcacctgaacaagggcagctggttcgtcggcaacgacttcagcgcggcggacatacagatgagcttcccgctggaggcgatggcggcgcgcggcgcgttggatgattgcccgaaactgcgcggctttctgcagcgcattcacgcccggcccgcctaccagcgggcgttggagcagggcggcccttacgacctgctgagttaa

SEQ ID NO: 425132 - DNA, 408 bp, Serratia marcescens
atggctacgcaaatcttcgttaacctgcccgtacgcgatctgcccgcctcgatggcgtttttcacccgcctgggtttcactttcaacccgcaatttaccgatgacaccgccgcgtgcatggtggtcagcgacacgatttacgtgatgctgctgacccatgacaaattcagggtgtttaccccgaacccgatcggcgacgccaaacaggccaccgaagtgctggtgtgcctgtcgcagcccagccgggcggcggtggacgaactggtgcgcaaggcggtcgccggcggcggcaacacctaccacccgccgcgggactacggcgtgatgtacggccacggttttcaggatctggacggccatatctgggaattgatgtatatggatcccgcggcggcgcaggcgcaataa

SEQ ID NO: 425133 - DNA, 1362 bp, Serratia marcescens
atgtcgaactctcaagcgaaccacgccgcaaaaccaaccggcgggcttgatggctattttaaaatttccgcgcgcggcagcagcgtgcgccaggaggtggtggcggggctgaccaccttcctggcgatggtgtactcggtgatcgtggtgccgagcatgctgggcaaagcgggcttcccgccggcggcggtgtttgtctccacctgcctggtggccgggctgggctcgctgctgatggggctgtgggctaacctgccgatggccatcggctgtgcgatctcgttgaccgccttcaccgccttcagcctggtgctgggccagcacatcagcattccggtggcgctgggcgcggtgttcctgatgggcgtactgtttaccgtcatctcggtcaccggtatccgcgcctggatcctgcgcaacctgccgatgggcgtggcgcacggcaccggcatcggtatcggtctgttcctgctgctgatcgccgccaacggcgtcggcctggtggtgaagaatccgctggatggcctgccggtggcgctcggcgcgttcacctccttcccggtggtaatgacgctggtcggcctggcggtgatcttcggcctggaaaaactgcgcgtgcccggcggcattttgctggtgatcatcgccatttccatcatcggcctgatcttcgacccggcggtgaaataccaggggctgttcgccatgccgagcctggcggacgcggacggcaagtcgttgatcttcagcctggatatcatgggcgcgttgcagccggtggtgttgccgagcgtgctggcgttggtgatgaccgcggtgttcgacgccaccggcaccatccgcgcggtggccgggcaggccaacctgctggataaagacgggcagatcatcaacggcggcaaggcgctgacctcggattccctgagcagcatcttctccggcctggtgggcgccgcgcccgccgcggtctacatcgaatccgccgccggcaccgccgcgggcggcaagaccggcctgaccgccaccgtggtcggcattctgttcctgctgatcctgttcctgtcgccgctggcctatctggtgccggtctatgccaccgcaccggcgctgatgtacgtcggcctgctgatgctgagcaacgtcaccaagctggacttcaacgacttcgtcgacgcgatggccggcctgctgtgcgcggtgttcatcgtgctgacctgcaacatcgttaccggcatcatgctgggcttcagctcgctggtcatcggccgcatcttctccggcgaatggcgcaagctgaacatcggcaccgtgctgatcgccgtggcgctggtggcgttctacgccggcggctgggcgatctaa

SEQ ID NO: 425134 - DNA, 1650 bp, Serratia marcescens
atggaaatcttttttacaatcctcattttgatcctggtggtctccctgtccggggtggtgacgcgcatgttgccgttccaggtgccgctgccgctgatgcaaatcgccatcggggccctgttggcctggccgcatttcgggctgcacgtcgactttgatcccgaactgttcctggtgctgttcatcccgccgctgctgttcgccgacggctggaaaacgccgacgcgcgaattcctgcaccacgggcgtgaaattctcggcctggcgctggtgctggtgctgatcaccgtggtcggcgtcggctatctgatctacgccatggtgccgggcattccgctggtggcagccttcgcgctggcggcggtgctgtcgccgaccgatgccgtggcattgtccggcatcgtcggcaaagggcgcattcccaagccgatcatgggcgtgcttgaaggcgaggcgctgatgaacgacgcgtccggcctggtgtcgctcaagttcgccatcgcggtggcgatgggcaccatggtgttcaccgtgggcggcgcaaccctcgagttcctcaaagtggcgatcggcggcctgctggccggcgtggcggtcacctggacctacagtaaatcgctgcgggtgatgagccgctggagcggcgacgatccggcgacccagatcgtgttcctgctgctgctgccgttcgcttcttacctgatcgccgaacatatcggcgtttccggcatcctggcggcggtagcggcggggatgaccatcagccagtccggcgtgatccgcaacgcgccgctggcgatgcgcctgcgcgccaacagcgtgtgggcgatgctggaattcgtgttcaacggcatggtgttcatcatgttgggcctgcagctgccgggcattcttgagacctctatcctgcaggcggagctggatccgaccatccagacctggtacctgttcgccgacgtggccaccatctacgccgcgctgctggtgctgcgtttcacctggctgtgggtaatgaagaaggccagcaaccgctttatgaaaaagcgcccgctgcagttcggcgattacagcacgcgtgagctgtgggtggcgtcgttcgccggggtgcgcggggcgattaccctggccggtgtgctgtcgataccgctgttgctgagcgacggcaccgccttcccggcgcgctatcagctggtgtttatcgccgccggggtgatcctgctgtcgttgatcgtcggcgtgctggcgttgccgctgctgctgcgcggtgtgcaggtggccgacaagagcgccagcaagcaggaagaacgcatggcgatcgccatggcggccgaagtggcgatcgagagcgtgaataaaatggaagagcgcctggttgccgataccgaagagaacctcgatccgcaggtgttgaaagaggtcagctcgcgggtgacgggcatgctgcggcggcgtatcgcctcgaaagacgacatcgagaatgcgctggcgatggaaaacctcgagcggcgtttccgcctgacggcgctgcgcgccgagcgcggcgagctgtaccacctgcgcgccacgcagaaaatcagcaacgagacgctgcaaaaactgctgcacgatctcgacttgctcgaagcgctgctgatcgagcgcgaaggctaa

SEQ ID NO: 425135 - DNA, 888 bp, Serratia marcescens
gtggatgtccgcaccctgcgctacttcgttgaagtggtgcgccagcaaagcttcacccgcgccgcggaaaaactgttcgtcacccagcccaccatcagcaagatgctgcggcatctggaagaggagctggaatgcacgctgctgatccgcgaaggccgcaagctgcgcctgaccgacagcggccaggcggtgtatcagcgcggcctgacgatcctcgacgaattccgccagttggaggcggagctggaagacatcagctcggtgaaaaaaggcgtgctgcggctgggcattccgccgatggtgggcaggcagatcgccgatctgatccgccgctttcgccagacctatcccggcatcgaattgaaaatttccgagctgggcgggctgtcggtcgaacaggcggtgatgtccggcgaactggatctggcgatgacggtgctgcccttcgattcggaacagccgctgacctttctgccgctgctgggccacccgatgtgcgtggtggcgccgcgcacgccgcagtggctcaaccgcacccgcatcaatatcgccgaattggccgacagcccgatcctgatttataacgaagactttgcgctgtacaagatgctgatgaaggcgtttcgccaggccggttttgaaccgcaaatcgcggtgcgcagcggccaatgggactttctcgcctcgatggtgcaggccggcgtgggcatcgccatgctgccggagccggtctgccgctggctggacaaggaaaacctggtctggctgccgctggagccacgcatggagtggaaaatcgggctgatctggcgccagggcagctacctgtcgcacagcgcacaggcttggatcgcctgctgccgcgactactggccgccgctcaagtag

SEQ ID NO: 425136 - DNA, 423 bp, Serratia marcescens
atgtctctggcgttacgccgcgttgccccctccctgctgacccgtttgcaggtgccgattcaggtggcgttgtatgcggcgctgttcctgatcgccgatcgcctggtgcaacaattccacctgccgctccccgccaatatcgtcggcatgctgatgctgctggcgctgatcctgctgcgcattctgccgctgaactgggtcaaggccggttcccgctggctgctggcggaaatgctgctgttcttcgtgccggcggtggtggcggtggtcaactatgctcagttgctgatggtcgagggctggaagatctttctggtgatcgcggtcagcaccatgctgacgctgggcgctaccgggctggtggtggacagggtgtatcggctggagatttggctgcagcggcggaagcagcgccatgaatga

SEQ ID NO: 425137 - DNA, 690 bp, Serratia marcescens
atgaatgattttatcctcagcctggcctgctttttggcgacgctggcgctctacttcgccaacaagaagctgtaccgccgccgccgcacgttactgctgatgccgctggtgctgacgccgatgatcctggtgctgctgctggtggtcactcatatctcttatcaggactatatcggcgaaacccactggctgctgtggctattggggccggcgaccatcgccttcgcggtgccggtgtacgagaacctgcatatcatccgccgccactggctgtcgctggccgccggggtaacgacggcggtgctggtggcggtgtacagctcggtgtggctggcgcgcctgctgacgctgccggaagaggtgcagcgcagcctggcggtgcgttcgattaccacgccgttcgcgctggaggccgccaaacagatgggcgggcagccggatctggtggcgctgttcgtggtgatcaccggggtgttcggcatggcggtgggcgacattctgtttctgcggctggcggtgcgcagccgcctggcgaagggggccggatttggcgcctcgtcgcacggtgccggcaccgcccgcgcttatgaactggggccgcaggagggcgtggtgtcgagcctggtgatgatgttggccggcattatcacggtggtggccgcgccgctgatcggccggctgatgtggtaa

SEQ ID NO: 425138 - DNA, 11475 bp, Serratia marcescens
atgaacaaacaaactgatgtgaagagtggggaactccgtacgggtgctcaggccgcggcggagaaagtcgaactgcatgaaatgactatcgcccagcgtgaactctggctgggggaaaatatttccaaagagttgtcgttcaatatctggggctatgggcaggttgacgggcctctcgacgttaagctgctgcggcaagccatcgatgctatcgtcgaagaaacgccggctctgcaagcgcattttgtggaaaaagacggtgagctttatcaataccgcgcgccacgcacacatgagccgctgttcacactcgatctcagtaaggaacccgatcccctgcaggcggccagacgctggatggtggcggatgcggcgctgccgcgccgcgccacgggagaggaaccttttagtttttatgtgattacgctcgctccgcagcgctatgtcctctatcggcgtttccaccatatgatcaccgacggccgcagtgccgaggaagtgatgcggcgcatcgcggcttactataacgcgctggcgtccggcggcgtcatccctgaattcgccaactgcaatttctctctgctttatgaaaacgacatcaaataccgcgactcctcacgcttttcttccgatcaggctttttggcgggaatatactgccgctgcgccgcagagtttgtcgcgtagagccatattgaccccggacgccgcgatgaaccgcaacacgcagctgctggaaaaagaggcattggatcagctgcagcaacaagctgacaatatcggcgtacaccgcgcacatatattggccgccgccgtagcattatgtttctacagcctgaccggcagtgaatatcttaatttcagcatgccggtgaccggaacgagagaacgaaacagtattggtatgacctctaacgttgtccctttgattatcaaggttgaaccccagctgagtctggccgaatttatccaaaaggtcgcagccgaaatagcaaaagtggttcgtcatcaattatatcgtggggaggacattcggcgtgacaatggcgcgacggattccgcctggtttggcccttcaattaacattgtttctttcgaccacggagatcctttctggggatgccgcacccgttggtattatggcgggaatattccgtccggcgatctacagattatgctgtatgaagaccagcaggcgaatgagctggacgtcactttttctgacgccgattatgcaaattcattaggcgatctggatgttttgcagcgccgtttccagtttattttacgggcgctgaacgcatcaacggcggggacgatcgaggcgttggatcggcaagtggcggcgctggcggatgccgaggccggcggcagcttttacaccaaccgtcggcaaccgcctgctggcggcatcattcgttgggatcgccctgctgaggcgctgcagcgcctggtgagttcgctgagccatggcgcgggatgcgcggcgaaggtgctgttggcggagcgcgtgttgggcgtgacggcgctgcaggcggtgagcgatgagcggcaggccgaacccggtaccctgctgcacgtcgaggccgacggctgggtaattgccgcgaaccccggcgtggtgcgcgtcgggccgttcttgcgcgccgacggctcggctcagccaggcgatgcgctggcgcaggcctgcggcctgtctgtcggctcggtcttgccgacgattaacgctgccgaagcctcgctgttaggcgcggcgtatggcgccagcgccgatagcgccgctttttggcaaccgcgcctgacgcgttattatccggcgccgttcccgccggggcctggccgccaggcggatcttcccgcacgctggcaggcgacggcctggcagcgcctggaaaaaattgccggcgagcaggtgctggcggccgcaaccctttatctggcgcgcatgtgcaatgaaaccgattttcagctggggtggatcaccccggacgatcggaattgggggcgttgggctcacctgagcgcgcgcgtgctgccgctgcaggtctctgttgatcacaccggcaatttccagcaggcgttggccgcgctggaacaggaatatagccagctgcgcgctcatgccgattatcatcccgcgttgctgacgcgcgatgcggacctgcgagcgtctcagacttggccgacggcggtatcgatcgtcagccggcgctcggcgcaggggttgcagcctgaagaagagggggttgccgccatcatggcttccggctcgcgcgcggtattgcaaatctgcaaggctgacggcgctttccgttgggtctacgacgccgcctccgtggctgacgagcagatgttgcgggcgacgcaacatctgctgatgctgctcaacgacgcggtgagggcgggttctcatcgtcgcaccgtcggcgaactcagtctggtttccgaggaagaacgcgcgcagttgctgcagggcctcaaccacaccgtcgcttcacattcgccgacggcctgtctgcaccggttgttcgaagcacaggtcaaacggacgccggaggcgatcgcggtgacgtatggcgatgacagcctgacctacgcggaattgaatacccaggcgaaccgttgggcccatcggctggtacagcttggcgtgcagccggacagcctggtggcgctgtgtgccgggcgcgggctgccgatgctggtcgggctgctggggatcctcaaagccggcggcgcctatgtgccgctggatcccgcctatagcggcgagcggctacagtacatcctggcggactcagcgccggtgctgctgttggcggatgagctcggccgacaagcgctgggtggctgcgaggtgccggtgctggcgctggaacagccactgacgggggaaagcggcgatctgcaggacgtcggggtgcgcccggcgcacctggcatatgtgatttatacctccggctcgaccggcaaacccaaaggggtgatggtggagcaccggcaggtcgcgcggttgttcagcgcgacgaacgcctggttcaacttcagcgccgccgacaggtggtgcctgttccactcattcgccttcgacttctcggtctgggagatctggggcgcctggctgtatggcggccagctgttcatcgtaccgcaggcgatcgcccgctcggcgccggatttttatcatttcgtctgccgcagcggcatcacggtattgaaccagacgccgagcgccttcaaagcctttatccaggctcaggcgcacagcgaagcgcgccagcagctacgcgagatcgtgttcggtggcgaaatgctgaagccttgcgatcttgcgccgtggtttgctcgtccagagaaccggcagacacggttgatcaacatgtacggtatcaccgagaccacggtgcatgtgacttatcgaccgctgtcggcgcaggatacggcgatcaccaccagtccgatcggcagccgcatcccggatttgcgcttgtatctgctgggcgccgacggcgaaccggtgccaatgggggcgatcggcgaactgtacgtcggcggcgaaggggtggcgcggggttacctgaaccggcccgaattgacggcggaacgttttctcgatgatcctttcaaccgggcgccgggtgcgcgcatgtatcgtaccggcgatctggcgcgctatctgccgggtggcgatatcgaatacctggggcgcaatgaccagcaggtaaaaatccgcggtttccgcatcgaatgcggcgaggtggaggctcagctgagtaccgatccgcgcgtgcgcagcgtagccgtggacgcgattgacgatggcgacgggggcaagcgactggtggcgtgggtggttccggcaccggaagccgaacgcgttacgctggcgaccgggctgcgtcagcatctgcaggcgcggctgccggattatatggtgccggtggcttacgtttggctggaggcgttgccgctgaccggcaacggcaaattggacaagcgggctctgccggtgccgcaggtcgacgcctatgtgcgtgaagcctatgcgccgccgcagggcgaggcagaaaacctgctggcggcaatctggcgcgagctgctgggcgtagagcgcgtcggtcgctatgaccactttttcgaactgggcgggcattcgctgatggcggtgcgcctggctaaccgcgtgcaacaggccggatggcagttaccgttgcaggcgctgttcgccagcccggtactgcacgtgctggcgcaggcgctggaagttgcgccggctcaggaaccgctgccgatactgccggtggcgcgcgacggcgaattgcccctgtcgttcgcccagcaacgcctgtggttcctgacccagttggaagggatgagcgaaacctaccatatccctctggcgctgcggctgcacggccggttggaccggcaggcgctgcaacatagtctggatgcgctctatgcgcgtcacgaatcgctgcgtagccggttcatcacccgggaagatcggccacaggtgcagattttgccggcaaacgggctgccgcttgcgttccacgatctgcgacgtcaccccgcgcaagccgacacgctgtgccgtcaggcggccactcaaccgtttgatttgacgcaggggccgctggtgcgcgccgcgctgatccgcctggcggatgaggagcacctgttcctgctcacctgtcatcacatcgtctccgacggttggtcgaccggcattctgctgcgtgaactgggggcgttgtacggcgcattgcgtcgcggcgatgccgatccgctgccgccgctgacgctgcaatacccggattacgccgcctggcagcgtcgctatctgacgccggagcggctggcggcgcaggcgcaatactggcgcgaaacgctgatcggtgcgccggcgctgctgacgctgccgactgaccggccgcgtccgacggtgcagtctttcagcggcggggaggtgccgatcgcgatcgacgccgagctgacgcaggcgctgcggcagttcagccggcagcatggcggcacgttgttcatgacggtgctggcggcctggagcctggtgctggcgcgcatggccgggcagcaggaactggtgatcggtacgccggaggccaaccgtggccggctggaaaccgaatcgctggtcggtttcttcgtcagcacgctggcgctgcgcatcgatcttcgcgacgatccggatctgccgacgctgatcgcgcggatccgccacacggtgctgacggcgcaggaaaatcgcgatctgccgttcgagcaggtggtggagctggtcaatccgccgcgccacctgggttataccccgctgttccaggtgatgttggcctggcaggacggctcggtgcgcgatatctcgctgcctgggctgcaggccgagagtgccgagttgggctatcagatcgccaagtatgatttgacgctcgatctggcggagcgcgacgagcaaatcagcgggacgctgaacttcgccacggcgctgttcgaccgcactaccgccgagcgttacggcgtttacctggtgcaggtgctgcgggcgatggcgacaaatgctacgcagcctgcgtcgcatctcgatctgctgccggctgccgagcgcgaactgttgttgtacggctggaaccgaaccgcggaagtttatccggcgcagagctgtgcccacgtcctgtttgaacagtgggcgcagcgcacgccggacgccgttgcggtggtgaacgatcgggacagcctgagctacgcccaattgaacgcccacgccaaccaactggcgcaccaactcatcgcgcagggcgtgcgcccgggcgatcgcgtggccacgtcgcttgaacgcagcgtttctctggtcatcgcccagctggcgatcctcaaggcgggggccgcttatgtgccgctcgatccgcacctgcccgttgcgcggcaggcgtggatcatcggcgacagcggggcgtcgttgatcctgtgcgatcgcgatatcgaccgcgagatagccggcgagatcgcctgcctgcgtatcgatcggctgcggcagaatccgacccacgatccggcggtgcctcgcgccggcgacgcgccggcctacatcatgtatacctcgggctcgaccggtacgcctaaaggcgtcatggtgacgcaccaaggcatcctccggctggcgatcaacaatcgttttgcgtcgtttgaacgcggcgatcgcttcgctttcgccgccaatccggcgtttgacgccagcacgctggaaatgtggggagccctgttgaatggcgccagtctggcgatcattgcgccggaagtgttgacggaagccgaggcgttggcggcggcgctggtgcggcaagggattaacgtcttgttcctgaccacctcgttgtttaaccaatatgcccatagcatcgccgcgacgctggcgcagttgaaatatctgctgagcggcggtgaagcggcggatccgcacgcctttgcccgcatgctgaaagaggctgggccggtacggctgatcaacgcttatgggccgaccgagtgtacggtgttcgccacgacggccacgatcgagcgagtggatccctggcagcgtttgcctatcgggcggccgatcggcaatacccggatttatctgctggatgagcacgggcaaccggtgccgctcggcgcgaccggcgagatctacatcgccggccccggggtggcgctgggttatctcaaccgcgcagagttaacggcagagcgattcctggcggatccgtttaacccaggcgagcggatgtatcgcaccggcgatctggcgcgctatctggcggacggcaatatcgactacctgggacgcaacgatcggcaggtgaaaattcgcggcttccgcatcgaatgcggtgagatcgaggcgcgagtggccggtcatccggcggtgcgcgaagcggtggtggatgtcctcggcgaagcggacaataagcgactggtagcctgggtggtgccggaggctgacgcggatcgccagacgttggcggtgacgctgcgacagtatctggcggggatgttgccggagtttatgctgccggcggcctgggtggcgctggatacgctaccgctgacgccgaacggcaaactggatcggcgcgcgctgcctgagccgcaggaggacgcctacgtgcgtgaggtttacgccgaacctgaaggcgaactggaaacgctgctggcggggatctggcgcgagctgctgggcattgagcgggtcgggcgccacgataacttcttcgaattgggcggccactcgctgctggcggtgaagttgatggcgcagctgcgccgtgtcgggctgagcgccggggtgcaaacgctgttcaccgcgccgacgctgtcaacgctggcgcagacgttggtcacgcagcaggaagtgagcgtgccggccaacggtatcctgccgggctgcgtagccattacgccggagatgttgccgctggcgacgctgagccagccggagatcgacgcggtggtggcgcaggtgccgggcggcgtggccaacgtacaggatatctacgccttgtcgccgctgcaggaggggattttgttccaccatctgctggcggaacggggcgacccgtaccagctgtccgcggtgctgcgtttcgacagccgtgcgcgcctggacgcctggctggcggcgatgcagcaggtgatcgatcgccatgacattctgcgcaccgcgttcatcacgcagggcgtgtcatcaccggtgcaggtggtgtggcgcaaggccgagttgtcgctgcgagaactgcggctcaatccggcagagggcgagatcggttcgcggctgacggcgttgtttgatccgcgccgcgtgcggcctgatctgacgcgcgcaccgttgctgagctttgtcgccgcacagggggaagaaggcagttggtgcgtgctccagcaatggcatcacctgatcggcgaccactcgaccctggcggtgatgcaggaggagatcaacctgatcctggccgggcgcggggacgaactggccaaggcaccgccgttccgcaacgcggtggcgcaggcaaggctcggcgtcagcaaggcagaacacgaacggttcttccgcactatgctggcggatatcgatgaaccgtcgctgccgttcggcctgagcgacgtgcatggcgaagggcgggatatctcgacggcgcacctggccttaccgcctgcgctcaaccaacagctgcggcggcaggcgcggcggctgggcgtcagcctggccagcctgtgccacctggcctgggcgcaggtgttggcgcgcgctaccggccgcgatgaggtggtattcggcaccgtattgttgggccgcatgcaggccggagacggggcggaacgggcgctcggattgtttatcaatacgttgccgctgcggctggatgtcaacgaggtcggcgcggaatcggcggtgttgcaggcgcacatccggctgagcgggctgttggcccatgagcatgcgccgctggcgttggcgcagcgctgcagcggcgtcgccgcgggcacgccgctgttcagtgccctgctgaactaccggcataacagcggcgaggacaccgcattgccgaccggcgtgacgctgctcgatagccaggaacgcaccaactatccgttcgtgctgtcagtcgaggacggcggtgattcgctgggcctgacggcgcaggtcaggcagccgattgaagcgcagcgcgtgtgtggctatatggcgcaggcgttgagcgcattggcgcaggcattggagcaggcgcctcagacaccggtctgtgaactggaggtgatgccggatgaagagtatgcgctgcagctgtgccgctggaatcatacggcggaagcttacccggcggatacctgcgtgcacgaactgtttgaacagcaggcgcggctgacgccgcaggccatcgctttgatccaggatgcgcaacggctcagctacgcacagttgaatgcgcgcgccaaccggttggcgcatcggctgattgagcgcggcgtacaaccgggcgaccgggtcgcggtgcggctggcgcgcagcatcgaactggtctgcgcccaattggcggtaatcaaggccggggcggcgtatgtgcccatcgatccgcaactgccggccgcgcgtcaggcgtggatcgccgatgacagcggcgcctgcctgatgctgacggacgccatcggcgacgaggagatcccgcagctgacggtcgaggatcgcgaagctgaagatcataacggtaacccggcgttgcgcgtgtcgagcggcgcgacggcctacatcatgtatacctccggctcgaccggtacgccgaaaggcgtcatgacgccgcaccaggggatcacgcgtttggtgcgcaacaaccgctacgccgcttttgacgccgacgaccgcattgcctttgccgccaatccggcatttgatgccagcacgatggaggtttgggccgccctgttgaatggcggtgcgctggtggtgatcgcgccggaggtgatgatggaggccgagcgtctggcggccgaactgcaacgccatcgcatcaccacgctgttcttgaccactgcgctgttcaatcagtatgtgcacagcatcagtggcgcactggcgcagttgaaatatctgattagcggaggggagaaagaggatccgggcgcttatgcgcggttgttgcaagagcgggggccggtgcacctgatccatgcctatgggccgacggagaccaccacctttgcgacaacggcacgtatcgagcgggctgaaggggaggcgcgcttgccgattgggaaaccgatcggcaatacccgcgcttacttgctggacgcccgcgggcgcccggtgccgatgggggcggtgggggaattgcatatcggcggcgtgggggtggcgttgggctacctgaaccgaccggaactgacggcacagcgcttcctgagcgatccgttcaatccggtcggcggcggccgcatgtatcgcaccggcgatctggcgcgttatttaccggacggcagtcttgaataccaggggcgatgcgatcagcagatcaagctgcgcgggttccgcatcgaaccgggcgagattgaggtgcagctggcggcgagcccgtgggtgcgggaagcggtggtgcaggtttgttcgacggaacatcatccgcgcctggtcgcctggatcgtaccgacggccgacgttgaccgcagcgcgttgcagggacagctacgggcctatctgagcgaacgtttgccggagtacatggtgccgtcggcttatgtctggctggatgcgctgccgttgaccgccaacggcaagctggatcggcgtgccttgccggagccggagcgcgcggcagtcggcactcgggagtatgcggcgcctcagggggagaccgaaacgacgctggcgcgggtatggtgtgagctgctcgagattggccagatagggcgccacgacaatttcttcgagctcggtggccattcgctgctggcggtacgtctttccagccagctgcgtcagcaaggcatcaccttgccggtacaggcgatcttcaaccatccgatattggccgagctggccgagcggatagatcgtcgcaccgcagaggctccgatgcgcaaggcggtgccggctcgcagcagcggcagccggccgccgctattcttcgttccgaccggctttggcgaccactcctacgtgtttgaattggccaaggagatcgacaagaccttcccggtctacgccgtgccgtggccggcgatggaggagaagccggccaccatgtccgatatggccgccagcgccgtggcgttgattcgcgaagtgcagccgcaggggccataccatctggcggggtactcttccggcggggtgttggcctatgccatcgccgagcagctgcaatcggccggggaagcggtcgccttcctggggttgatcgacacgttgcggccggtggaggcgatgcacagcccggtccagctgttgctgaactgggtggagtcaacgcaggaaaggccggatccccagttctgtcagcagttggccgagctgccgttgccggaggcgatcgcggccgtgcaacgcgccgggatcaagactcagcgtgaggaagtggccgacgaggcggcgctctggcagcagcggcaccactacgccaaactggtggaagcgaccctggtgcagcccgcatcgctgaaaatccatctgttcaaggcgaagcaggagcaggtttccgtcaattcgcagaacgcacagttccaggcgtattggcagaggatcaagcaggcgggatattgccgcgaagacgcttccgcgttgggatgggataagctgctgccgccggcgaccgtccgcgtcagccaggtcaacggcgaccatgtgtcgatgatggagcatccggttcatcggcgtgaactggggcaacacttcaacctggcgttgcgcgagctcggacaggcgtaa

SEQ ID NO: 425139 - DNA, 699 bp, Serratia marcescens
atgatgaaagctcaagttcgcattgctctggtcggtgattacaacccgcaagccgtggcccatcaggctatccccgtggcgctccagctcaccgccgcccatctcgacatcgacgtgcagccccaatggctaccgacagaaaccctgacctcccccgacgtgctgcaaaatttcgacgccatctgggtggtgccgggcagcccgtatcgttacgacgacggcgcctttatggcgatccgccatgcgcgggaaaacgacgtgccgttcctcggctcatgcggcggttttcaatacgccatcgtcgagtacgcccgcaacgtgatgggctggcacgacgccggccatgcggaaaccgacagcggcggccgattggtgatcgccccgctgagctgttcgctggtggaaaaaaccggcgacatcgcttttcagcctgacacccgcgtcgcgcaggcctacggtagcctgaacacccatgaaggctaccactgcaacttcggcgtaaatccggagttcgtcgccgatcttgagcgcttcccgctgatcgtcagcggccacgacaccgaaggcgacgtgcgcgccatcgaactgccgggccggcgtttttacgtcgccacgctgttccagtcggaacgcgccgcgctgcgcggcgagctttcaccgctggtggtggaactcgtcaaaaccgccgccaacgggtaa

SEQ ID NO: 425140 - DNA, 921 bp, Serratia marcescens
atgaaacgccaaaagagatttcaactttccttgctgcacccgcgctactggctgacctggttcggcctggccctgctgttcctgctggtacagctcccttacccgttgctcaatcggctgggggtgtggatggggcgcacttcgatgcgttttcttaagcgtcgcgtcaccattacccgccgcaacctcgaactgtgcttccccgagatggacgaagcgcagcgcgaacgtaaagtggtgggcaacttcgaatcgctcggcatgggcctgctggaaaccggcatggcctggttctggtcggataaacgcgtcaagcgctggttcaacgtctccggcatcaaccacctcaaaatggcgcagcgcgacgatcgcggcgtgctggtgatcggcgtgcactttatgtcgctggagctgggcggccgggcgatgggcctgtgccaaccgatgatggcgatgtaccgcccgcacaacaacaaggcgatggagtgggcgcagaccaagggccgcatgcgctccaacaaggcgatgatcgatcgcaaggatctgcgcggcatggtgcacgcgctcaagcgcggcgaggcggtatggttcgcgccggatcaggactacggcccgcgcggcagcgtattcgcgccgctgttcgccgtcgatcaggccgccaccaccagcggcaccttcatgctggcgcgcatggccaacccggcattggtgccggtggtgctgatccgccgcgaaggcggccgcggctacgacctgctgattcaaccggccctggaagactacccgctcagcgacgaacaggcggcggcggcttacatgaacaaagtgatcgagaaagagatcatgcgggcgccggagcaatacatgtggctgcaccgccgcttcaaaacccgaccggccggcgcgccctcgctgtactga

SEQ ID NO: 425141 - DNA, 906 bp, Serratia marcescens
atggttgccgtcatcattataggcgtttttatcgtcagcttcctttacgcacactcccgcggcaaggagaaacaaaagcttacccgccaactgttcgatcactccacctttatggggccgatcaatatgtttatgaccggtttctcccgtttgcccgccaggcagccctatttcgacgaaaaagttttcccggagctgcagacgctgaccgacaactggcaggtgatccgcgaggaagcggtgcgcttgcagcatcacatcaaaaaggcgcagtcgcacaacgatgcggggttcaacaccttcttcaaacgcggctggaaacgtttctatctgaagtggtacagcgacagccacccttcggcgcagacgctgtgcccaaaaaccgtcgagctgctcaaccgcatcccgtcggtcaaggccgcgatgttcgccgagctgccgcccggcagccatttgggtaaacaccgcgatccttacgccggctcggtgcgctatcacctggggttgatgacgcccaacgacgatcgctgcttcatcgaggtggacggcgagcagcacagctggcgcgacggcgaggcggtgatcttcgacgaaacctacgtgcactgggcgcagaacgccaccgatcagacgcgcatcattctgttttgcgacgtcgagcggccgatgaaatggcgctgggcgcaggcggtcaaccactgggtcggcaccacgctgatgtcggcggccagctcgccaaacgacgatcaggaccgcaccggcggcatcaaccgcatcttcaaatacgtcaacgcggtgcgcgatgccggccagcgcctgaaggcgcgcaaccgccgcggttactacctgctgaaatggctggtgatcgctgcgattttcgccgcgattatcattcccagcctataa

SEQ ID NO: 425142 - DNA, 342 bp, Serratia marcescens
atgaagaaatcaatcattgccttgtctgcactgctgctcgcttccccggtgttcgccgctgagaccgcgaccgacaccgccgctcacgccagcaacgaggtcgttgccgaagcgcacaaaggagcggataccgccaaagaaaagctgcaccagtctcaggacaagggtgaagagctgaagctgaaagccaagcacgccgccgaaggcaagagcgacagcgtcggcagcaaagtgagcgaaggctcgcaaaaggcctggcactccaccaagcaaggttcagagaaggcttgggacaagaccaagcaaggggcggaaagcctcaagaacaaagtgaccgaataa

SEQ ID NO: 425143 - DNA, 297 bp, Serratia marcescens
atgttcgaacaacgcgtaaattctgacgtactgaccgtttctaccgttaactcacaagatcaggtgactcaaaagcctctgcgtgactcggttaaacaagcactgaagaactattttgctcaactgaacggtcaagacgtaaatgacctgtatgagctggtactggctgaagttgaacagccactgttggacatggtgatgcaatacacccgtggcaaccagacccgcgcagccctgatgatgggcatcaaccgcggcacgctgcgcaagaagctgaaaaaatacggcatgaactga

SEQ ID NO: 425144 - DNA, 885 bp, Serratia marcescens
atgctctcctccaacccggaggtgtggcggacggataagtcgcgtctgcgtatggtgcatagcgatgaaccagggatccgctccgtgcagattgccggatgcgatcctgatgatatggccgccgccgcgcgtatcaacgtggccagcggcgcgcagatcatcgacatcaatatgggatgcccggccaaaaaagtgaaccggaagcttgccgggtccgccttgttgcagtacccggatctggttaaacggatcctccacgcggtggttgacgcggtggatgtgccggtaacgctgaagattcgcaccggctgggcgccagagcatcgtaactgtgtagagattgcccaactggccgaagactgtggtattcaggccctgacgattcacggccgaacccgcgcctgtctgtttaacggcgacgcggaatacgacagcattcgggcagttaagcagagtgtttccattccgattatcgcgaatggggatattactgacccgcataaagccagagcagtgctcgactacaccggggccgatgccctgatgataggccgcgctgctcaggggagaccctggatcttccgggaaatccagcattatctggacactggggagttgctgccgccgctgccgcttggcgaggtgaagcgcttgttgattgggcacattcgggaattgcacggcttctatggccaaggcaagggattccggattgctcgtaagcacgtgtcctggtatctccaggaacacgctccgaatgaccagtttcggcgcacattcaacgccatagaggatgccagcgaacagctggaggcgttggaggcatatttcgaaaatcttagcgtaaaaaaagagctgacagaactatgttcgaacaacgcgtaa

SEQ ID NO: 425145 - DNA, 1446 bp, Serratia marcescens
atgcaaactgaagtgatcctgccgctggtcgcctacctgctgctggtattcggcctgtcggtatacgcctatcgccgccgtcagaatggaaatttcctcagcgaatatttcctcggcaaccgctcgatgggcggctttgtgctggcgatgaccctgaccgccacctacatcagcgccagttcgtttatcggcggccccggcgccgcctacaaatacggcctgggctgggtgctgctggcgatgatccagctgccggcggtgtggctgtcgctcggcgtgctgggcaagaaattcgccatcctggcgcggcgctacaacgctatcaccctcaatgacatgctgtatggccgctaccaaagccgcctgctggtgtggctggccagcctcagcctgctggtggcgttcctcggtgccatgacggtgcagtttatcggcggcgcacgcctgctggaaaccgccgccggcattccttacgacaccggcctgctgatcttcggcatcagcatcgcactgtacaccgccttcggcggcttccgcgccagcgtgctgaacgacgccatgcaggggctggtgatgctgctcggcaccgtgctgctgctggtggcggtaatccatgccgccggcggactggacagcgcagtcagcaaactgcagcagatcgatccggcgctggtgtcgccgcagggcggcgatcagatcctcagcctgccgtttatggcgtcgttctggatcctggtgtgcttcggggtgatcggcctgccgcacaccgccgtgcgctgtatctcctacaaggacagcaaggcggtgcaccgcggcattctgctcggcacagtggtggtggcggtgctgatgttcggcatgcacctggccggcgcgctcggccgcgcggtgttgccggatctcaagatccccgatcaggtgatcccgacgctgatgatcaccgtgctgccgccgtacgccgccgggattttcttggcggcgccgatggcggcgatcatgtcgaccatcaacgcccaactgctgcaatcctccgccaccatcatcaaggatctctaccttggcgtacgcccacagcagatccacaacgagcggctgatcaagcgcttctccagcctgaccacgctgatcctcggcctgttggtgctgttggcggcctggcggccgccggagatgatcatctggctcaacctgctggctttcggcgggctggaggcggtgttcctgtggccgctggtgctgggcctgtactgggaacgcgccaatgctcagggagcgcttagctcaatggtgtcgggtgcggtatgctatacgctattggccagcttcaacctgcagccggcggggctgcaccctatcgtgccttcgctgttgctcagcctgttggcgttttatctcggtaacgtcgtcggcgaaaagcgccggacggcgtcatcattaccctcttga

SEQ ID NO: 425146 - DNA, 243 bp, Serratia marcescens
atggacaaacgctttattcaggcgcaccgcgaagcgcgctgggcgctggggctgacgctgctctacctgctggcctgggggctggcggcctatctgccggacagcgccgtcggcgtcaccggcctgccgcactggttcgaaatggcctgcctgctggtgccgctgctgttcatcggcctgtgctggctgatggtgcgcacggtgttccgcgacatttcgctggaggacagcgatgcaaactga

SEQ ID NO: 425147 - DNA, 1350 bp, Serratia marcescens
atgcttgataaaattgttatcgccaaccgcggcgagatcgcgcttcgcatcctgcgtgcctgtaaagaactgggcatcaagaccgttgcggttcactccgcggccgaccgcgatctgaaacacgtgctgctggccgacgagaccgtctgcatcggtcctgcgccatcggtaaaaagctacctgaacatcccggccatcatctcggcggcggaaatcaccggcgcggtggcgatccacccgggctacggcttcctgtccgagaacgccgacttcgccgagcaggttgaacgctccggcttcatcttcatcggccctaaagccgagaccatccgcctgatgggcgacaaggtttccgcgatcaacgccatgaagaaagccggcgtgccgtgcgtacctggctccgacggcccgctgaccgacgacatggataaaaaccgtgccttcgccaagcgcatcggttatccggtgatcatcaaggcctccggcggcggcggcggtcgcggcatgcgcgtggtgcgcagcgacaaagaccttgagcagtccatcaacatgacgaaagcggaagccaaagcggctttcaacaacgacatggtgtacatggaaaaatacctggagaatccgcgccacatcgagattcaggtattggccgacggccagggcaacgccatctatctggccgagcgcgactgctccatgcagcgccgccaccagaaagtggtcgaagaagcgccggcgccgggcatcaccagcgaaatgcgccgttacatcggcgagcgctgctcgaaagcctgcgtggaaatcggctaccgcggcgcgggcaccttcgagttcctgtatgaaaacggcgagttctatttcatcgaaatgaacacccgtattcaggtagagcacccggttaccgaaatgatcaccggcgtggatctgatcaaagagcagctgcgcatcgctgccggtcagccgctgtcgatcaaacaggaagaagtgaagatccacggccacgcggtagaatgccgcatcaacgccgaagatccgaacaccttcctgccgagcccgggcaagatcacccgcttccacgcgccaggcggtttcggcgtgcgttgggaatctcatatctacgccggttataccgtaccgccgtactatgactccatgatcggcaaactgatcaccttcggcgaaaaccgtgacgtggcgattgcccgcatgaaaaacgccctggctgaactgatcatcgacggcatcaaaaccaacgttgagctgcagcagaagatcatgaacgacgaaaacttccagcacggtggcaccaacatccactatctggagaagaagctgggtctgcaggaaacctaa

SEQ ID NO: 425148 - DNA, 468 bp, Serratia marcescens
atggatattcgtaaaatcaagaaactgatcgaactggttgaagaatcaggcatttctgaactggaaatctctgaaggcgaagaatcggttcgcatcagccgtgccgcaccggcgcaggcttatcccgtcatgcagcaggcctacgcgatgccggcacagcagcagccagccctggctaacgccgttgccaccgcgcctgcggcagaaacccctgcagcaccggcggccgtgagtggccacgtcgttcgttccccaatggtaggcaccttctaccgcaccccaagcccggacgcgaaagccttcgtggaagtgggccagaaagtgaacgccggcgataccctgtgcatcgttgaagccatgaaaatgatgaaccagatcgaagcggacaagtccggcgtcgtgaaagccatcctggtggaaaacggccagccggtcgaatatgacgagccgctggtcgtcatcgaataa

SEQ ID NO: 425149 - DNA, 453 bp, Serratia marcescens
atggcggataagtttcacattttgcttctgaacggccccaatctcaatctgctggggacgcgtgagccggagaagtacggcagcacgacgctgacagagattgttaacggattggaaaaccaggcatccgcattggatattaccctgagccatctgcagtccaacgccgagcatcagctgatcgatcgcatccatcaggcgcgcggcaacaccgatttcattctgataaatccggcggcgttcacgcacaccagcgtggcgctgcgcgatgcgttgctggcggtgcagatcccgttcatcgagatccacctgtccaacgtgcacgcccgcgaacctttccgccatcactcttatctctcggacgtagcggtaggcgtgatttgcggcctcggcgcggatggctacgctttcgctttacaggcagcggttaaccgtctgtcgaaaacccactaa

SEQ ID NO: 425150 - DNA, 600 bp, Serratia marcescens
gtgcgactgacgcctgttcatatcaaatggctgaaagccgccctgcatctggtggcgtttctgccctttctctggctggtgctggcggtggatcaaggctggttcagcgccgatccgtccaaggacatccagcattttaccggcaggatgacgctgaaactgctgctggccacgctggctatcgccccgctggcgcgctacgcccgccagccgctgctgatccgctgccgccgcctggtggggctgtggtgctttgcctggggcacgctgcacctgataagctactccacgctggaactggggctaagcaacctcggcctgctgggcagcgagctggtgaaccgcccttatctgacgctcggcatcctcacctggctgatcctgctggcgctggcggccacctcaacgctgtgggcgatgcgcaaactgggcgccaaatggcaactgttgcacaacttcgtctatctggcggcgatcctcgcccctatccactacctgtggtcggtcaaaacgttttccccccagccgttcatctacgcgctgctggcggtggcgctgttgggcctacgttacaagaaattccgcgcctggtggcgctga

SEQ ID NO: 425151 - DNA, 1002 bp, Serratia marcescens
atgaacaaacacccgaaattgaccgaggccgacgtcacgccggagagcgtattccaccagcggcgcaaggtgctgcaggcgctcggtatcaccgccgcttcgctggcgctgcccactggcgcacaggcggacctgctgtcgtggttcaagggcaacgatcgccccaaggcaccgccgggcaaagcgctggaattcagcaaaccggccgcctggcaggcgcagctggcgatgacgccggaagacaaggtcaccggctacaacaacttctatgagttcggcctcgacaaggccgatccggccgccaacgccggcgggctgaaaaccgaaggctggaaagtgcgcatcgacggcgaagtggcgaagccgataacgctggatatcgacgatctgatgaagcgtttcccgctggaacagcgcatttaccgcatgcgctgcgtcgaggcctggtcgatggtggtgccgtggatcggtttcgagctgggcaagcttctcaagctggccgagccgaacggcaacgcgcgctacgtggccttccagacgctgtacgatccggagcagatgcccggccagaaagatcgctttatcggcggcggcctgaaatacccctacgtcgaagggctgcggctggacgaggcgatgcatccgctggcgctgctgaccgtcggcgtgtacggcaaaaccctgccgccgcaaaacggcgcgccgctgcggctgatcacgccgtggaaatacggcttcaaaggcatcaaatcgatcgtgcatatccgtttggtgcgcgatcggccgccgaccacctggaaccaatccgcgccgaacgagtacggtttttacgccaacgtgaatccgcacgtcgatcatccgcgctggtcgcaggccaccgagcgtttcatcggctccggcggcattctcgacgtcaaacgccagccgacgctgctgttcaacggctatgccgaccaggtggcgtcgctgtatcgcggcatggatctgcgggagaatttctaa

SEQ ID NO: 425152 - DNA, 978 bp, Serratia marcescens
atgcgtgcactgttattggaacaacaagacgaccaaactctggctcatatcaaagatatcgacagcgatcggttgccggaaggcgatgtcaccgtcgacatcaactggtccagcctgaactacaaggacgcgctggcgatcaccggcaaaggcaagatcgtgcgcaacttcccgatggtgccgggcatcgacttcgccggcaccgtgcgccacagccgcgacgatcgcttcaaagaggggcaaagcgtggtgctcaccggctggggcgtgggcgaacaccactggggcgggttggccgagcaggcgcgcgtctccggtgagtggctggtgccgctgccgaacggcctggatgagcgcaaggcgatgatcatcggcaccgccggctttaccgccatgctgtgcgtgatggcgctggaggaaggcggtgtgcacccggacgacggcgatatcctggtcaccggcgccagcggtggcgtgggcagcaccgccatcgccctgctggcggcgctgggttaccgggtgaccgccatcagcggccgcgacagcaataccgactacctgaaagcgctcggcgccaaagaggtgatgccgcgcgatggctatatcgacatgccgcgcccgctggagaaacagctgtgggccggcgcggtggacaccgtcggcgacaaactgttggcgcgggtgctggcgcagatgaactataacggcaccgtcgccgcctgcggcctggcgggcggttatcagctgccgaccaccgtgatgccgttcattctgcgcaacgtgcgcctgcagggcgtggattcggtgcatacgccgctgcatcgccgccaaaccgcctgggaacggctggccggcattctgccggacagcttctatcagcaggccacgcacgaaatctccctcgagcaggcgccggccaccgctgccgcgctgttgaacaaccaaatcaccggccgcaccctggtgaaaatccgctga

SEQ ID NO: 425153 - DNA, 1935 bp, Serratia marcescens
atgcgatttaccaccaaactctctgcattgatcactctgttggtcgcgctggcgatgtttttgatgctgatgggatgctcatacagcttcttttacgttacccaggatcgccaggagcgccgcttggattcgctggtcaccactctcgatcaagccatgctgagcgagccgccgcaggagcaggaaaaatggttgccgatcgtcatgcgcacgctcggcatcgtgtcgatccgcatagaggccggtagcagccaactgctcgactatcaattgcccacgcaggaaaaagagcactgggatgcgctgaacggctatcgtcaggtctcgcgtcccctgttgcagcatccgggcagcacgctgcacatcacctaccgcgaccccttcgccagcgacgtgcgcacgctgcaatccaccgccgccgtcacgctgtcgatcgtcgtgatggtggtggttttgctgttcagcctgcgctggctgcgtgagcaggccgacggcgaagatcgtctggaacgccgcgcacggcgcattctgaacggcgaacgcgaaaacgtcatgcagggcgacgtgcgtgagtggccggccaatgtcagcggcgcgctcgaccgcctgctggccgatctggcggaagcgcgggaagagcgcagccgggtcgatacgctgatccgcgcctttgccgcgcaggacgccaaaaccgggctgaataatcgcctgttcttcgataaccagttgaccactcagctggaagacgaaggctcgcacggcatcgtgatgatggtgcggctgcccgatttcgagaccctgcgcgagacgcacggcagcgtggcggtgcaggagctgatgtattcgctggtcaatctgctgtctaccttcgtgatgcgctatccgtcggcgctgctggcgcgctacttccacagcgattttaccgtgttgttgccgcatcgaaccctgaaggaggccgacggcatcgcctcacagctggtcaacgccatcgatgccttgccttccacggcgctgatcgaccgcgaggccttcctgcacatcggcatcgtggcgtaccgcagcggtcaaaccaccgagcaggtgatcgattatgcggagcaggcgacgcgccacgctacgctgcagggcgaaaacgggtggtatgtgtacgacagccaggtgccggaaaaggggcgcggcagcgtcaaatggcgcacgctgctggaacaggtgctggcgcgcggcggcccgcggctgtatcagaaaccggcggtgaccgtggggggcgaggtgcaccatcgcgagatcatgagccggatctatgacggcacccaggaattgctgccggcggaatatatgccgctggtgcagcagctcgggctggcggaaagttacgatcgccaacaggtgagccgcatcattcccttgttgacgcagtggcccgaggaaacgctggcgtttccgctgtgcgtggactcgattttgcagcgctctttccagcgctggctgcgtgatacattgctgcagtgcgaaaaaagtcaacgtcggcgaattctgattgaacttgcggaggcagatgtgtgtcaacatatcgaccgtttgcgtccggtgctgaggctgttgtcagggctgggctgccgcctcgcggtgtccaaagcgggtttaaccgtggtcagtacgtcctatatcaagtcgctgcaggtggagatcgtcaagctccacccggggttggtgcggagcatcgataagcgggacgaaaaccagctgttcgtgcagagcctgaccggcgcctgcgcgggcacgcgcgcgcaggtgttcgccgccggcgtacgcacgcgcaacgagtggcagacgctgaaagagcgcgggatccacggcgggcagggcgactttttcgcgccgccggaaccgatcgacgcggggcgtaaaaaatattcacgtcgttatcgcgtttaa

SEQ ID NO: 425154 - DNA, 1044 bp, Serratia marcescens
atgtttaagaaatttcgtggcatgttttccaacgacttgtccatcgacttgggtaccgccaataccctgatttatgttaaagggcaaggcatcgtactgaatgaaccttcggtggttgccattcgtcaggatcgtgccggctccccaaagagcgtcgcggccgtcggtcatgacgccaaacagatgctgggccgcacccccggcaacatcgcggctattcgcccgatgaaagacggcgtgatcgccgatttcttcgtgaccgaaaaaatgctgcagcactttatcaaacaggttcacagcaacagtttcatgcgcccaagcccgcgcgtgctggtctgtgtgccggtcggcgcgacccaggttgaacgccgcgctatccgcgagtccgcccaaggggccggcgcgcgtgaagtgttcctgattgaagagccgatggcggcggcgatcggcgctggtctgccggtctccgaagcgaccggttccatggtggtggatatcggtggcggtaccactgaagtggcggtgatctcgctgaacggcgtggtgtactcctcttccgtacgcatcggcggcgaccgtttcgatgaagccatcatcaattatgtgcgccgcaactacggctcgctgatcggcgaagcgaccgccgagcgcatcaagcacgaaatcggttctgcctatccgggcgatgaagtgcgcgaaatcgaagtccgcggccgtaacctggccgaaggcgtaccgcgcggctttaccctgaactccaatgaaatcctcgaagccctgcaagagccgctgaccggcatcgtcagcgcggtgatggttgcgctggagcagtgcccgccagaattggcctccgacatttccgaacgcggcatggtattgaccggcggcggcgcgctgctgcgcaacctcgatcgcctgctgatggaagaaaccggcatcccggtcgtggtggcggaagatccgctgacctgcgtggcacgcggcggcggcaaggcgttggaaatgatcgacatgcacggcggcgatttgttcagcgaagaatag

SEQ ID NO: 425155 - DNA, 1026 bp, Serratia marcescens
atgaagccgatttttagcagggggccttccctgcaactgcgactttttttggcggtgattgcggccattggcctgatcgttgccgacagccggctcggcacgttcgtgaagatacgcaactacatggacaccgcagtcagccctttctattttctggccaatgggccgcgtaaagttttggacagcgtgtcagaaacgctggccacccgccaacagctggagctggaaaaccgcgctctgcggcaggaactgctgctgaaaaacagcgatattcttcttcttggccaattcaagcaggaaaacgcccgcttgcgcgagctgctgggttctccgctgcgccaggacgaacacaagatggtcacccaggtgatctccaccggctccgatccttacagcgatcaggtggtgatcgacaaagggtcggacaacggcgtctatgaaggccagccggtgatcagcgacaagggcgtggtcggccaggtggtggcggtggcgaaagtcaccagccgcgtgctgctgatctgcgacgcctcgcacgcgctgccgatccaggtgctgcgcaacgacattcgggtgatcgccgcgggcagcggctgcgccgacgatctgcagctggagcacctgccgaacaacaccgacatccgcgttggcgacgtgctggtcacctccggcctcggcggccgcttcccggaaggctatccggtggcggtggtttcctcggtcaaggtcgataaccagcgcgcttacaccgtgattcaggcgcggccgaccgccggtctgcagcgcttgcgctacctgctgctgctgtggggcgccgatcgcaacggcgacatgccgctgccgccggacgaagtgcaccgcgtggccaatgaacgcctgatgcagatgatgccgcaggtgctgccgcctgccggctccgtcgggccgcagctgccggctccggccaccggggtggcgccgcaaaccgcggctccggcctctgtccagccccaagctcagcctgccgcggcgggagtggtgccatga

SEQ ID NO: 425156 - DNA, 489 bp, Serratia marcescens
atgaacagctaccgcagccacgggcgctggatcatctggctgtcgttcctggtggcgttggtgctgcaaatcatgccgtggccggagcagatctacatgttccggccctcatggctggtgctgatcctgatctactgggtgatggccttgccgcaccgggtcaacgtcggcaccggcttcgtgctggggctgatcatggatcttatcctcggctctacgctgggcgtgcgcgcgctggcgctgggcatcatcgcctatctggtggcgttcaaattccaactgttccgcaatatggcgctgtggcaacaggcgctgatcgtcgtgctgctgtcgctgtcgatggacgtggtggtgttctgggctgagtttttagtgatcaacgtctctttccgcccagaggtgttctggagtagtgtggtaaacggcattttgtggccgtggttattcctgttgatgcgcaaaatccgccgtcagttcgccgtacagtaa

SEQ ID NO: 425157 - DNA, 585 bp, Serratia marcescens
atgacttcgctttatctggcctccggctccccacgtcgacgtgaactgctgaccctgctcggcgtgtcgttcgacattttgctgacgcataccgaagagcagcgccgggaaggcgaagccgccgaagcctatgtgcgccgcctggcgcaggacaaggccaaagccggcgtagcgctggcgcaggaagatcggccggtgctgggcgccgacaccatcgtggtgctcaacggccgggtgctggagaagccgcgcgacgaagcccatgcggcggacatgctggcggcgctgtccggcaagcagcatcaggtgatgacggcggtggcgatcgccgatcgccacgacgtgcgctgccagctggtggtgaccgacgtgacgttccgcagcctgtcacaacaggatatccgcgactatattgctacgggcgaaccgatggataaggcgggcgcctatggaattcaaggaaagggtggttgtttcgtcagaacgataaccgggagttatcacgcggtggttggtctgccgctggtcgaaacacatgagctgctcagtaattttgtcgcattacgtgatgtaagaaccggttga

SEQ ID NO: 425158 - DNA, 1470 bp, Serratia marcescens
atgacagctgagctactggttaatatcacaccgtctgaaacgcgggtcgcctatatcgatggcggcattctgcaagagatccatatcgaacgcgaatccaaacgcggcatcgtcggcaacatctataaagggcgcgtcagccgcgtcctgccggggatgcaggcggcgttcgtcgacatcggcctggacaaggccgccttcctgcacgcctccgacatcatgccgcataccgaatgcgtcgccggcgacgagcggaaaaacttccacgtgcgcgacatcgccgagctggtgcgccaggggcaagacctgatggtgcaggtggtgaaagatccgctcggcaccaagggcgcgcgcctgaccaccgacatcacgctgccttcgcgctatctggtcttcatgccgggcgcggcgcacgtcggcgtttcgcagcgcattgaaagcgaagccgagcgcgagcgcctgaaagccatcgttgcgccgcactgcgacgagctgggcggttttatcatccgcaccgcggcggaaggcatcggcgaggaagagctggcgcaggacgccgcgttcctcaaacgcctgtggaccaaggtgatggagcgcaagaagcgcaaccagaccaaatacaagctgtacggcgagctggcgctggcgcagcgcatcctgcgcgatttcgccggcgcggcgttggatcgcatccgcgtcgattcgcggctgacgcacgatctgctggtggagtttaccggcgagtacattccggacatcaccaacaagctcgaactctataccggcagccagccgattttcgatctgtacgatgtggaaaacgagatccagcgcgcgctggagcgcaaggtggagctgaagtccggcggctatctgatcatcgatcagaccgaggcgatgaccaccgttgacatcaacaccggcgccttcgtcggccaccgtaacctcgacgaaaccatcttcaataccaacatcgaggcgacgcaggccatcgcgcgccagctgcggctgcgtaacctgggcggcatcatcatcatcgactttatcgatatgaacaacgaagagcatcgccgccgggtgctgcactcgctggagcaggcgttgagtaaagatcgggtaaaaaccacgatcaacggcttctctcagctaggcttagttgaaatgacgcgtaaacgcacgcgtgaaagcattgaacatgtgctctgtcacgattgtcctacttgcaatgggcgcggcaccgtgaaaacggtggaaaccgtgtgctacgagatcttgcgcgagattgtgcgcgtgcaccatgcttacgattccgatcgcttcctggtgtacgcctccgcggcggtcggcgaagcgttgaagagcgaagagtcgcatgcgctggccgaagtggagatcttcgtcggcaaacaggtgaaggtgcagatcgaaccgttgtacagccaggagcagttcgacgtcgtcatgatgtag

SEQ ID NO: 425159 - DNA, 3804 bp, Serratia marcescens
gtgaggcgactgcctgggattctgttagcaacaggcgccaccctaatcgtgattgtggcgctgctgatcagcgggctgcgcctgatgctgccgaagctgaacgactaccgtccccaactgctggcgcaggtggagaggctttccggcgtgcccgtgcagatggatttcctgcagggcagctgggaaacgttcggcccacagcttgaaatgcgcaacctgagcgctacgctgcccaaaagcgatgtgcatatcgaacgcgtgacgctggcgctggacgtgtggcaatcgctgctgcactggcgctggcagttccgcgatctgaccttctatcaattccgcctcgatctgaacgccacgctgggcggcgaccggcagggcgaaggccttgagccgggcaaaatcggcgatctgatgctgcgtcagctcgaccatttcgatctgcgcgacagccgtatctcattcctgacgcctgccggcgcgcgcgccgaattcgacattccccaactgacctggcttaacggccgcgagcgccaccgcgccgaggggcagatcagcctgtcgacgctgaacggccagcacggcgtggtgcagctgcgcatggacctgcgcgataatcagggcctgctggacaccggcacggtctatctgcaggccgataacatcgacatgaaaccctggtttacccgctggctgcgcgccaacaccgggctggaaagcgccgacttcagcctggcggcctggctgcaggtgcagaacggcgagattgccggcggccatgcgttgctcaagcagggggcggccaactgggataccggcgccgcgcagcaccggctggacgtggacaatctggcgctgtcgctgcgccgccagggcaccggttggcagctcgacgtgccgcagctgcggttgagcaccgacggccaggcctggccgcagggcgcgctatccgcgctgtggctgccggaaaacaccgaattcatggggccggcgcagaatgaagagctgcgggtgcgcgcgactaaccttcagctggagcgcctgtcggcgctgctgccgaccttctcgttcctcagcccggacgtgctcgatcgctggaacgatctgcagccgcaggggacgatggaggccctggcgctggacatcccgctgaagcagccggaaaagagccgtttccaggcgctgtggcgcgatgttagctggcagcgttgggagctgctgcccggcgtcaaccacttctccggcgcgttgagcggcggggtggagaacggccgcctgacgctggggctggcaggcagcaccctgccttacggcgatatgttccgtgcgccgctggaaatcagcagcgcgcgcggcgcgctgacctggcgttacaacgatcaaggttgggaactggcgagccaggggctggacgtcaaggcgaagtcgctgtgggtcaacggcgatttccgctatcagcagccggccaagggcgatccgtggctgaacattctggcgggcatccgcctgtatgacggcgccgaggcctggcgctatttcccggaaccgctgatgggcaagcatctggtggactacctgagcggcgccattcagggcggccgggtggataacgccacgctgatttattccggcgatccgcagcacttcccgtaccgtaagaacgaagggcagttcgaagtcttcgtgccgctgcgccacgccaccttccagttccaaccgggctggccggcgctgaccgatttggcgatcgacctcgacttcgccaacgagggattgtggatgcatgcgccgcaaacccggctgggcaaggtggcgggcaaaaatatcagcgcggtgatcccggattacctgaaagagcggctgctgatcgacgccgaagtcgcgggtgcgggcagcgacgtgcacgactacttcatgcagacgccgctgcacgattcgctgggggcggcgctggatcagctgcagattggcggtgatgtcagtgggcgcttacatctcgatattcccctggacggcgagcaggtcagagccaccggtgaagtggcgctgaacaacaactcgttgctgatcaagccgctggacagcgaactgcaaaagctcagcggcaagttccgcttcgacaacggcaacctgcagagcgaccccctgtcggccacctggttcgggcagccggtggcggtcaacttcaccactcaggaaggcgagcgtgactacaaggtcaacgtcggcctgaagggcgactggcagccgggcaagttccccggcctgccgaaagaggccgccgatgcgctccgcggcagtgcgccctggcagagccaggtggccatcacgctgccgcatcagggctcggccagctacgatatcggccttgacgcagatctgaagaaagtgagcagtcacttaccttcaccgttggacaaggcgccgggcgaagccttgccggtgaacgtcaaggtcaaaggcggtctgaacggcttcatgttgaccggcagtgcgggcaagcagaaccgcttcaacagtgaatggagcttcgacaaaaaacaggtgaatctggcgcgcgccgcctggcgaaccaacggtggcggcacgccaccgctgccggccggcaagtcgatgacgctgaacctgccggcgctggacggcgagcaatggctggcgctgctggcgccggcgctgaaacagggcggcggcagcggtcaggtgggcggtttcagcttccccaccaccgtggcgctgaccacgccgcagctgctgttgggcggccaggcttggcataagctgacgctgtcggccgaaaaacagctgggcgccaccgtggtgagcgccaagagcgatgaagtggacggcagcctgcgggtggccgatcgcgggccgtggcgcgccgatatcaactacctgtactacaacccgcagttcgccgaaacgaaaagcgcggcgggttcgccgccaccgccgccggagaaagtcagcttccgcgactggccttcgctgatgctgcgctgcaagtcgtgctgggtgctggggcagaacctcggcaaggtcgaggcggatctgagcaatcggggcgatactctgacgctggatcacggcctggtcgataccggcaaagggcgcatgagcgccaccggtctgtggaagcagaacgcgcaggaagagcgcagctcgctgaaaggcaagctgctcggcggcaagatcgatgaaaccgccgccttcttcggcatcaccatcccgctgaaaggcgcgccttacgacgtggacttcgatttgtactggcgcggcgcgccgtggcagccgcaggtcaatacgctgagcggtgcgctgcaggtcaaaatgggcaagggagaaatcgacagcatgggcggcggccgcgccggccagctgctgcgactggtcagcttcgacgccttgctgcgcaagctgcagttcgatttcagcgataccttcggtaaaggcttctactttgattccatccgcagcaccgcctggctgaaagatggcataatgcatactgataatctattgatcgacggcctggcggcggatatcgccatgagtggccagatcgatctggcgcgccgccgcatcgatatggaagcggtggtggcgccggcgatttcggcgacggtcggcgtggccactgcgtttgtcgttaacccgatcgtcggcgcggcggtgttcgccgcctcgcaggtgctggggccgctgtggagcaagatttcgctgattcgttaccatatcagcggcgatctcgaccagccgaagatcaatgaggtacttcgtaaggcaaaggaggataaggcgtcatga

SEQ ID NO: 425160 - DNA, 861 bp, Serratia marcescens
atgaggaatgctaacgttgcgttgttgcagttgtgcagtggcgatcaggtgcgcgataacctggcccagattgaacagcagatcaagcagctcaatgccggggtaaaactggtcatgacgccggagaacgcgctgctgttcgccaactccgcagcctatcgccaacaggcggaaaaacagggcgatggcccgctgcagaacgcggtgcgcgaactggcgcgccgctatggcgtgtggttgctggtgggctcgatgcccttgatcagccgcgaaaacccggagcttatcaccaccagcagcctgttgttcgacgatcagggcgagatccgcgcccgctacgacaagctgcacatgttcgatgtggacatcaacgacgcgcacgcccactaccgcgagtcggatacctaccagcacgggcagcatctgacggtggtggatacgccggtcgggcgtttgggcatgaccatatgctacgatctgcgcttccccgcgctgttccaggcgctgcgggcgcagggcgctgaactgatttcggtgccggcggcctttacccgggtcaccggtgaagcgcattgggaaatcctgctgcgcgcccgggcgatcgaaaaccagtgcatgatcctggcgccggcgcaggtggggcgccacgggccgacccgccgcacgtggggccacacgctggctgtcgacggctggggcaaggtgctggccgagaacccggacgccgtggcggcgctgaaggtgcgcgtggacaccacaagcctgcagcccctgcggcaacagatgccggtgctgcagcacaaccgattccagacgtcgctgacggcgccgtctgacacgttatcctccaatcaagagtga

SEQ ID NO: 425161 - DNA, 1446 bp, Serratia marcescens
atgagcctgacgtttgtcagtgagcagttactcgctaccaacaagctgagtcatcaagacctgtaccaggtactgggtcaactggcagaacgccgtatcgactacgccgatctctatttccagtccagctatcacgaagcctgggtgatcgaggacggcatcatcaaggatggctcttacaatatcgaccagggcgtcggcgtgcgcgccgtcagcggcgagaagaccggtttcgcctatgccgatcagatcaccctgaatgcgctgcagcagagcgcccaggcggcgcgcagcatcgtgcgcgagcagggcgacgggcgggcgcacaccctgggcgaaatcggttaccgggcgctgtacccgctgctcgatccgctgcaaagcctgccgcgcgaagagaaaatcgccctgttgcaccgcgtcgataaagtggcgcgcgccgccgatgcgcgggtgcaggaagtgaacgccagcatcaccggcgtttacgagcaggtgttggtggctgccaccgacggcacgctggcggcggacgttcgcccgctggtgcggctctccgtcagcgtgctggtggagcaggacggcaagcgtgagcgcggctccagcggcggcggcggccgtttcggttacgactatttcctggaaagcgtcgacggtgacgtgcgcgccgatgcctatgccaaagaagcggtgcgcatggcgctggtcaatctcggagcggtggcggcgccggccggcaatatgccggtggtgctgggggccggctggcctggggtgctgctgcacgaggcggtgggccacggcctggaaggcgatttcaaccggcgcggcacctcggtgttcagcggccatatgggcgagctggtggcttccgagctgtgcaccgtggtggatgacggcaccctgcaagggcgccgcggctcgctggcgatcgacgacgaaggcgtaccgggccagtacaacgtgctgatcgaaaacggcgtgctgaaaggctacatgcaggacaaactcaacgcgcggttgatgggcgtcgcgccgaccggcaacggccgccgcgagtcctacgcgcatctgccgatgccgcgcatgaccaatacctacatgctggcgggccaatcgacgccggaagagatcatcgccagcgtcgagtacggcctgtacgcgccgaactttggcggcggccaggtggacatcacctccggcaagttcgtgttctccaccaccgaagcctacctgatcgagaagggccgcatcaccaaaccggtgaaaggggcgacgctgatcggctccggcatcgaggcgatgcagcagatctcgatggtcggcaacgatctggcgctcgataaaggcgtgggcgtgtgcggcaaggaaggccagagcgtgccggtgggcgtcggccaaccgacgctgaaactggatacgctgaccgtcggcggcacggcgtaa

SEQ ID NO: 425162 - DNA, 786 bp, Serratia marcescens
atgatgccgagaaagatgacgatggcgtgctttggtgtctctatccagcgttggctgctgttactgggcgttttgtccctgacgggctgcgcccgttccgatgcgctgtggggcgtggtcgataagctctgcatggccaactatcagcaaaagcgagatccggccccgtgtgagcagatttatatgccgcaggggaaagcgcagggctttagcgtgctgcaaaacccgcgttatccctatcatttcattctggtgccgacggcgccgctttccggcattgaaagcccgctgctgctggccggagaacgaacggactattttggctatgcatggctgatgcgttaccggctggccgccgagtatggcgggccggtgccggacgacaggctgggcatggcgatcaactccgcttacggccgcagccagaaccaattgcacattcacctgacctgtctgcgcgaggatgtgcggcgccagctgcaggcggaacgcccctacatacaggaacaatggcgccccttgccggataagctgctgcgccacacctactatgcccgccgcgtgatgcagccggccgcgatgggcatctacccgattagggatcttgcggattattttcatctgtcgccgccgcagctggcggagtatggcgtggccgtcgtcccgaccacgtttgccggccaacggggttttatcttgctggcctcgaagcgcggctgggacgtcggcaaccgcgcctcggtagaatcgctgctggataaaacgtgcgcgattttgccgcgttaa

SEQ ID NO: 425163 - DNA, 1683 bp, Serratia marcescens
atgaccgataaaaccgccattaacgcgccggctatcgccgtgctgcccctgctgctgatctggatggcggcgatcctgccgttttatcaccccaacatgggcggcggcggcctggcgctgccgcaaaatattctggcttggggcgccatggcactcaccacgctgatagtgaccttcagcgtttgcctcggccacgcccgtctttcgctgactcctaccgcacacctgttattgctcggcatcgccgtgctggcgctgccactgctgtatacccgccccgaatggcgcgaagataccctgtggcgctgcgccggtttgttcggcggttggctgttctatgttgcctgcctgcagctgcgcctaactccccggcagcgcgagctgttgctgtacggcctgctgttcgccgtcggcgttcaggcgctattggcagctctgcagctgttcgccccaattttggcctgggtggcccccaatggcagccgcgtttacggcgtcttccagcaaccgaacgtgctgggcagctttatcgccaccggtctggctttggcgctgtggctgctgcttgcccctctctctgcgccaacgtggcgtcggcagctcccgttgctcgcgctactggtcgctttctccgctctgctggtgctgatccagtcgcgcgccgcctggctgggcggcgccttggcggcggcgctgctgctgtggcgctttgcccgccagcgcccggccgcaagctgctgggccggcggcgcgctgctgttgggcgtggcgatcggcaccacggtgttgttcaccggtttcggcctggatggccgcgcgggtctaatcggtcgggaactttccaatagtgcgcgcctcagcatgctgcatgacgtcggcgccatgatcttggccaaaccgctgctgggctggggctacggtggctttgaatacagcttcgcgcacttccgtctgcaggcaatgccctggcgagaagtgctggaagtcgccgggcatccgcacaatgaaatcctgctgtggtgggttgagggcggcctgccggcgctggcggggatcgttatcgtcctcgtcgccggcgcgctgctgctgaaacgcgcctggcaacgggatcgcgagcaaccggccggtgcccgcgtcggcctgttcctggtgctgctgccgatgctggtgcacacccagttggaataccctttctatctgtctacgccgcactggctggcgtttctgctgctgctggcgctgctggacggccaaaccggcgagccgcgccccctgccgttcgctaaagccctgagcctgccggtggcgatggcggcagtcggcgtgttggcgatggcggtcttcacctggcaagggcgcatggcgctcacccaatcggagcgcaccatgctggccaccatcgacagcatcgagcagatgccgccgccggccgcctggatctaccgggagcgcaaaacgttcgacgagcaatctcacgcgctgctggtctataaccaaacgcgtgatgatgccctgttgaccggctatcggcagtgggccaacgcctatctgcaacgccgcatcgatgccaacgtctacgccacgctaatcatgatcttgcgctatcagggggctcaggcggaagccgacgctcgcctgcgggaggccgctttcctgtttgcgcgggatgcgcgattcagatag

SEQ ID NO: 425164 - DNA, 942 bp, Serratia marcescens
atgaaaaaaatcatactggactgtgacccggggcatgacgacgccatcgccctgctgctggcctggggcaatccgcagatcgacctgctggcggtcaccaccgtggtgggcaatcagacgctggacaaagtgacgcgcaacgcgctggcggtggcgcgcatcgccaatatcaccggcgtgcccttcgccgccggctgcccgcgcccgctggtgcgcaatatcgaagtggcgcccgatatccacggcgattccggcctcgatggcccggtgctaccggaaccccacctgcagctggactcgcgccacgcggtggatctgatcatcgatacggtgatggcccacccgcccggcagcgtaacgctggtgccgaccggcggcctgaccaatatcgccatggcggtgcgcaaagagccgcgcattgccgagcgggtcaaggaagtggtgctgatgggcggcggctaccatgtgggcaactggagcgcggtggcggagttcaatatcaaaatcgatcccgaggcggcgcacatcgtgtttaacgaaaaatggccgctgaccatggtcgggctggatcttacccaccaggctttggccacgccggcagtctgcgcgcgcatcgccgccctcggcacccggccggccgccttcgtcggcgaactgctggcattctttggccgtatgtaccaacaggcgcagggcttcagcgccccgccggtacacgatccttgcgcagtcgcctacgtgatcgatccgagcgtcatgacggtgcgcaaagcgccggtggatatcgaactcaccggcaccctgacgctgggcatgacggtcgcggacttccgcgcgccgccgccgccggactgccacacccaggtcgcggtcaaactggatcaggataaattctgggatctggtggtggatgcgctggaacggattagcgaagtggagtga

SEQ ID NO: 425165 - DNA, 276 bp, Serratia marcescens
atgagcttactgaaaaggttgttggggcaaggcggtattaaccgcggtcatcagcgcgcgggccacggcggcgggcatcatggcaaccgctataaccagcatggcgagccggggccgcagtgtccggaatgccgggcggtgaataaatcgggcgcgcgttattgccaccgctgcggtcagccgtttgccgcgctgagcgccacctgcggccagtgcgccgcgccgctgccgccgggcagccgcttttgcccgcagtgcggcggcggtgtgccgtga

SEQ ID NO: 425166 - DNA, 345 bp, Serratia marcescens
gtgaaccggggcggttggacgctagcgttgctgctgggcgccatggcgctatggacgctgctggcctggggcgtagccggcgtgctggcctggctcccggcgttggcggaagcggccggcggcgtatcgctgccggtgaacagcgcgctgagcctggtgccgcaggcagtgctggacgcctggctgccgtggctgaaacagctgggcagcgggctggcgagctattttcctctgctgctgaactgggccggctacgccgtctggctgctgtggggcctcggcatgctggcgctgatgctgctgggcgcgctggcgcaccgctatttgagcgccgctcagcgatag

SEQ ID NO: 425167 - DNA, 912 bp, Serratia marcescens
atggaaagattaaaacggatgtcggtattcgccaaagtggttgagttcgggtcgtttaccgcggccgcgcgccaactcggcatgagcgtttcatcgatcagccaaaccgtctcgaaactggaaaatgagctgcaggtcaagctgttgaaccgcagcacgcgcagtatcggcctgaccgaggccggcaaaatctactatcagggttgccgacgcatgctgcaggaagtcagcgaagtgcatgagcagctgtacgcatttaacaatacccccgccggcacgctgcgcatcggcagctcatccaccatggcgcaaaacgtgctggcgaacatgaccgccgagatgatgaaagagtaccctggcctgacggtcaacctggtgaccggcattccggcgccggatctgatcaccgacgggctggatctggtgatccgcaccggcgcgctgcaggactccagcctgttctcccgccgcctggggcagatgccgatggtggtgtgcgccgccaaaagctacctcagccagcacggcacaccgcagaagccgagcgacatggtcaacttttcctggctcgagtacagcgtgcggcccgacagcgaatttgaactgatgtcgccggagggcatcaccacgcgcatttctccgcaggggcgcttcgtcaccaacgactcctccaccatgatccgttggctgaaaaacggcgccggcatcgcctacgccccgctgatgtgggtgatcgaagagatcaagcgcggcgagatcgagatcctgttcaaaagctaccattcggatccgcggccgatctacgcgctctataccgagaaggacaaactgccgctgaaggtgcaggtgtgcatcaactacctaaccgactatttcgaacgcgtggcggcggtctatcagggctatcgctga

SEQ ID NO: 425168 - DNA, 204 bp, Serratia marcescens
atgagtttgcttccggttatggtcatcttcggactgtcgtttccgccggtgtttttcgagctgctggtgtcgctggcgctgtttttcctcttgcgccgcctgctgcagccgacggggatttacgattttgtctggcatccggcgctgtttaacaccgcgctgtattgctgcttgttttatctgatttcatgtctttttgtttga

SEQ ID NO: 425169 - DNA, 936 bp, Serratia marcescens
gtgaaaaatttttcgataaaaataacccgaatcgcgatcactttgattcttgtgctgctgggcatcgtcgcggtattcaaggcctgggtgttttacaccgagtcgccgtggacgcgtgacgccaagttcaccgccgacgtggtggcgatcgcgccggacgtcagcggcctgctgaccgacgtgccggtggtggacaaccaattggtgaagaaagggcaggtgctgttcgtggtcgatcggccgcgctatgagcaggcgctggcgcaagccagtgccgacgtcgcctactatcagacgctggcggcggaaaagcggcgcgaggccggccgccgcgtgaagctgggcgtgcaggcgatgtcgcaggaagaaatcgaccagtcgaacaactcgctgcagaccgtgcaacaccagctggcgaaggccgtggcgacgcgtgagctggcgcagctggatctggaacgcaccacggtgcgcgctccggccgatggctggatcaccaacctcaacgtacacgccggcgaatacatcacccgcggttcggtggcggtggcgctggtgaagaaagactccttctacatcctggcctatctggaagaaaccaagctgaacggcctgaataagggcgatcgtgcggagatcaccccgctcggcagcaaccgcatcatgcatggcaccgtcgacagcgtggcggcggcggtgaacaacagcagcagcacggtgaacaacaaaggattagcctcgatcgacagcaacctggagtgggtgcgcctggcgcagcgcgtgccggtgaagatcctgctggacgccaaggaccaacagcatccgtacccggccggcaccaccgccaccgtggtgatcgtcggcaagaacgatcgcaatgccgacagcggctcgccttttgtgcgcctgatgcaccggctgcgtgagttcggctaa

SEQ ID NO: 425170 - DNA, 1968 bp, Serratia marcescens
atgaacagcccaacctttatccggctgagattcgccttcaagctcagcttcgcgattgtgtttgcgctgttcgtcggcttccatctcaatctggaaaccccgcgctggtcggcgatgactgccgccatcgtcgccgccggcccggcctttgccgccggcggtgaacccttctccggcgccatccgccaccgcggctggctgcgcatcatcggcacctttatcggctgcttcgtcggcctgctcattatcatcaccaccgcccgcgcgccggtggtgatgctgctgttgtgctgcatctgggccggtttctgcacctggctctcttcactgatcaaggtcgagaactcctacgcctggggcctggccggctataccgcgctgatcatcatcgtgacggtcgccaccagcgaggcccatctgctggaagcgccgcagttcgccatcgagcgttgcagcgagatcgtgctgggcatcgtcagcgccgtattggcggatctgctgttctcgccgcgttcgatcaagcaggatatcgatcgggcggtggatcagctgctggtggatcaatatcgcctgatgcagatgtgcatcagcaacgccgacaaagaagacatcgaccgcgcctggagcaatctggtgaagagcaccacggcgctggacggcatgcgcaacaacctgatgatggagtcttcgcgctggcagaaggtcaatcgccgggtgaaggcgctgcataccctgtcgctgacgctgattacccaggcttgcgaaacctacctgatcctgttgaatcacccggacgcgctgcaagcgagcctgcgggaacagctgatggtgccggcggaaaccccgcaggagatccacaggcgcatgaagctgttgcgccaggtgctgaccacgcatcgctccgaagaaacgctgccgaccctcactggctgggtcggcgcggcaacgcgctacctgctgctgtcgaagggcgtacacaccaacggcagcatcagcgcggtggaagaggacgtgttgagcaatgaaacggtggtcaagccgacctcggcggaagggcatcatgcgatgatcaacggcctgcgcacctttgtggccacggcgttcggctgcctgctgtggctgtggaccggctggacgtccggcagcggctttatggtgatcattgcggtaatcacctcgctggcgatgcgcaccccggcgccgcgcatggtggcgatggatttcgtgctgggcatgctggcggcgatcccggtcggctccctgttcttcatggtgatcctgccggcgacacagcagagcattttgctgctgtgcctcagcctcggcctgctggcgtttttcatcggcatcgaggtgcagaagcggcggctcggttcgctggggctgctggcagggaccatcaacattctggtgctgagcaacccgatggagttcaacgtcacccagtttctcgacggagcgctcggccagttcctcggcagctgcgtcgggctgatggtgctgctgttgatccgcgacaattcgcgcgaacgcaccggccgcacgttgctcaaccagttcgtcagcagcgcggtgtcggcgctgaccaccaaggcggcgcgccgtcggcagaaccacctgcctgcgctgtatcagcagcttaatcaactgctgatgatgttcccgaacgacatcgccaagtatcgtctggcgctgaacctgatcatcgcccaccagcgcatgcagcgggcggagattccggtcagcgaagagctgtcggccttccaccgccagatccgcagcaccgccgatcgggtggtctcggccaaaaacgacgtcaagcgcgcctattactacgatcgcttgctgggtgaaatgaacgagtaccagcagaagctggtggacaatcaggcgccgctcagcgtcaccgggccggtgaagcgcctggccgacatgctgcatcgctatcgccacgccttgatcgattga

SEQ ID NO: 425171 - DNA, 468 bp, Serratia marcescens
atgaacaagcggattctgttggcgattgtcatcgccgtggtcatcgccgtcttcagcgcgctgcgcggcaacgagcaccgtgcgatcgacggcaacccggcggtggcccaagcgccggcgggacagcagcagagcatcgatcggctcacgcagcagcaaacggtggtgagttacctgcagcagcatcagcggctgccgggctattacgtcaccaagaagcaggcgcgcgagcagggctgggatccgcgttcaggcaacctctgtgcggtattgccgggcaaggcgattggcggcgatcggttctctaaccgtgaagggcaactgccgagcgccggcggccgggtctggcgcgaagcggacatcaattatcagtgtggccggcgcggcgccgatcgcctgctgtattcgagcgacggtctgatcttcgtcacgcgcgaccattacaaaaacttcattcgtgtggagtga

SEQ ID NO: 425172 - DNA, 300 bp, Serratia marcescens
atggcaaaagtagagtttgatttcgaacagatccaggatgtgccgaccttctaccgcgatttcgcgcacaagtttgcgctggacgaggggtttggcgccaacctcgacgcgctgtgggacgtggtgaccggcgatatcggcctgccggtggaaatcgagttcactcacctgaatgcccgcagcaagcgtcgtttcggcgcgatcattctgctgtttgaagaggcggaagaagagctggaaggcagcctgcgtttcaatatccgcgaaagcagcggcgaaccggcccatcaccggggatga

SEQ ID NO: 425173 - DNA, 549 bp, Serratia marcescens
atgaacaaacagcctgaagactggctcgacgatgtcccggagaatgaaaacgaggacgatgacgagattatctgggtcagtaaaagtgagattaaacgtgatgccgaagcgctgaaagacctgggggccgaaatggtcgatctgggcaaaaacgcgctggatcgcatcccgttggacgaagatttgcgcgccgccatcgagctggcgcagaagatcaagaaagagggccgtcgccgtcagctgcagctgatcggcaagatgctgcgcgcccgcgatatcgagccgatccagaccgcgctcgacaagctgaaaaaccgccacaaccagcaggtttcgctgttccacaagctggaagcgctgcgcgaccgtctggtggaagaaggcgatgacgtgattccgtcgatcctggatctgtatccggccgccgatcgccaacagctgcgttcactggtgcgcaacgcacagaaagagaaggccgccaacaagccgcctaaggcttaccgccagatcttccaatacctgcgcgagctggccgaagcggccgactaa

SEQ ID NO: 425174 - DNA, 363 bp, Serratia marcescens
atggatgatggcatcgagaaagccattgattggcgtggctcatcgctagaggatttgctggccttcccaatcgatgcgcgaaaagcggcaggatttgaactgagtaaagtgcaaagaggtctggaacccggtaattggaaaccgatggccaactgcggaagcggcgttatcgaaatccgtttatatgccatcggtggggtattcagggtggtctatgtggcaaagttcagcgaagcgatctatgtcttgcacagctttcagaagaaggcggagaaaaccagccgccacgatattcagataatcaaagcgcgttatgacgcggtcattaatgagcggagtaaaggtcatgaccaagccgattga

SEQ ID NO: 425175 - DNA, 339 bp, Serratia marcescens
atgaccaagccgattgatagcgattcgcgccacgttacgcccgcaggcggcaatgtgtttgcggatctgggattttccgccgacgaggctcggcaattgcaagcgcagtccaatgcggaaattgcgcagcttatcgcactgaaaaaacagctgatgggtgagatcagcgcgtggattgaggaagaaggttatcgccaggaggaggcggcgcgttatctgcacacttcccggccgcgcgtgtccgacgtggtgaatcagaaaaccgagaagttcacgctggatgcgttggtcaacatgatggcgaatattggcaagtcggtaaaactgatcgtcgagtga

SEQ ID NO: 425176 - DNA, 1341 bp, Serratia marcescens
atgaaagtagtcactcaagttgcagaacagcgcaaggcgctggaacaggccgtttctcaggcgctggagctggcccgcgccggttccgacgcggcggaagtcgcggtcaccaaatcgaccggcatcagcgtcagtacccgcttcggcgaggtggaaaacgtcgagttcaacagcgatggcgcgctgggcatcaccgtgtatcaccgccagcgcaaaggcagcgcctcttccaccgatctcagcccggacgccatcgcccgcaccgtacaggcggcgctggatatcgcgcgctacacctctgaggatccttgcgccggcccggcggagaaagatctgctggcgttcgaggcgccggatctcgatctattccacccgatcgagctggaagccgagcgcggcatcgagctggcggcgcgcgccgagcaggcttcgctggcggcggataagcgcatcaccaacaccgaaggcggcagcttcaacagccactacggcatcaaggtgttcggcaacagccacggcatgctgcaaagctactgttccagccgccactcgctgtccagctgcgtcattgctgagcaggacggcgatatggagcgggattacgcttacaccatcggccgtgcgatgggcgatctgcaaagccccgagtgggtggggcaggagtgcgcccgccgcacgctggcgcgtctcgcgccgcgcaaactgtcgaccatgaaggcgccggtgctgttcgcctccgaggtggccaccgggctgttcggtcatctggtgggcgccatcagcggcagcagcgtttaccgcaaatcgaccttcctgctggactcgctcggcaagcagatcctgccggcgtggctgaccgtcgaagagcatccgcacctgctgaaagggctggcgtcgacgccgttcgacagcgagggcgtgcgcacccagcggcgcgatatcgtcaaggacggcgtgctgcaaacctggctgatgaccagctactcggcgcgcaagctgggcctgcatagcaccggccatgccggcggcatccataactggcgcattgccgggcagggcgccgacttcgccggcatgctgaaacagcttggcaccggcctggtggtcaccgagctgatgggccagggcgtcagcggcgtcaccggcgattactcgcgcggcgccgccggtttctgggtggaaaacggcgagatccaatatccggtcagcgagatcaccatcgccggcaacctgaaagacatgctgcgcaacatcgtcagcgtcggcagcgatatcgaaacccgcagcaatatccagtgcggttcggtgctgctgccggaaatgaagatcgccggtcagtga

SEQ ID NO: 425177 - DNA, 387 bp, Serratia marcescens
atgcagaataccctgaaagcgctggcggcgttgacgctgctggcagccagctcgctggcggtcgccgccgatctgggcgacgatatggacaccctggcggaaaactataaaacggtgctgaataccaattcggccgctaccctcacacagagcctgcaaaacatgcgcgccgccgcgcaggatgccaagcagggcaccccgccgaagctggaagacaaagccgccgacagcccggagatgaaagattttcgcagcgggttggataccctgatcggccagatcgatcaggcgttggcgctggccaaccagggcaaagtcgccgaagcgaagcagctggcgcagggcttcaagcaaacccgcgacgccaaccacaagaaattccgctaa

SEQ ID NO: 425178 - DNA, 783 bp, Serratia marcescens
atgcgcaacgtccgcattgatgacatcgaccacgtaacgcgcgcggtgatcgccatcggcaccgattatccgccggggcacctgctgccgatgcacagccaccggcgcgcgcagttgttgtacggcgccaccggcgtcatgcacgttttcacgcagcaaggcaattgggtcgtcccgccgcagcacgcggtgtggctgccgccgcagatgccgcacgcggtgaggatggtcggcgtcaccacccgcagcctttatctcgaacccggcgcgttgcccgccgaacggccgcaggtctgtcaggtggtcagcgtcaccccgctgatgcgccagctgttgatggcggcggtggatatgccgctggagtatgcacaagaggggcgtgacggagcgctggcgacgctgttgctgcatgagctggctcggctgcagcccttgcccctgcacattccgctgcccgccgatccccggctgggcgagctgtgccgcgcctttttgcagcaccccgacgcccacgactccgcgcagcggtgggcccctcgtctgtacatgagcattcgcaccttcagccgcttctttcgcgcgcagaccggcctgccgttttcgcaatggcgccagcgcgcctgcgtggtgctggcgttggcgctgctggccgaagggcgcagcgtaacgcaggtggcgatggagatgggatatgacagcagcgcggcgttttcaaccatgtttcgccgcgtgctggggcaggcgccctcctcctatctgacggaagacgggcgcgacggttga

SEQ ID NO: 425179 - DNA, 1455 bp, Serratia marcescens
atgtataagttcggtgtggttggcggcggagccgccgggatcgcttttgcgtataactttataaaaaataagtcggttaatcattgcaaaaggccgctttccctgacggtgttcgacaagcagggcttcaagggcggtatggcatacagcagcgattttgacagccatatattaaatatgacgccggaaaatatgtcggcggatattttcgacgatgcgcacttcgtcgattggatcgccatgcatttcccacagttttgccaggatcgttatccgccgcgctggctgtatcgtgaatatctcgattttattcgcgacatgacgatttatatggcggcggacagcaacgtagcgctgaatttcgtgaccgccgaagtgaatgccatcgcgccgctggaagccggctaccggctgaccaccacctgtggcggcgccgaacagatgaacgcgctggtgctgtgttcggggcacaacccgccggaatgtctctatccggtggatggggtgatcgcttatcaggcccaccaggatctgccgccgatcaacccttattcgagcatcggcgtgatcggctgcagcctgacggcgattgacgccatcgttgagctgatggagcgcctgggggcgaccgacatctgcgccctgtcgcgctcgggcctgttccccagcgtgcagccggcgctgatgcgtccgccgccggaggcgtttgtggagggggttcggcgctttgtcgccggccgcgatttcattgacgcgcaccagctggtgcatgcgatcaacgccgcgctggcgcgccactatccggggccggagcggttgacggtgctctcggcgctgggggaaaggcgcgattgttaccgcgatctggcggaaagcctcgatcgcgcgcgttttgcccgggagcatatctgcagctatctggcggcgatccacccggcggtgtgcgccgcctgggtcaagatggatgccaacaaccggcaggtcttcatgcgcttttacaactcctcctggatgcgcaatcggcacgccatgccgatcaagaacgccaacaagatcgtagcggcgctggagagccaacgcctgcgcgcctgtggcggcctggcggatatcagcaagggaacggacgggtttatccttcgttgtcatgaggcgcgggtgcatgcgcagtatctgttcaactgcaccacgccgtcctatcaactgccgcccaaccggctgagccagcaactgctgcaagacgggctggtgcaagagaacctgttcggcggcgtgaagtgcaacccgcacacgctgaaaatcgccgaccggcgcggccgcgagcagcatctctactcgctcggcgcgcctgccaagggcgatcttttttacacctcggcgatggagtccatcacgcgggatatcagcaagatcgtgttcaacaaccctattttcaacgcaaagaaggctgaagtatga

SEQ ID NO: 425180 - DNA, 882 bp, Serratia marcescens
atgaaaaacgtagcgctctttgtcggcaacgacattttctcctggctggtgtgtcaggatctgatcgccaccttgaagggcgagtgtgcctttacggtgtatttccccctggcgaaaagcgccgggcgcacgcaggagccggcggttcgccgcctggggctgtatgagcgcgaagtgctgaacgatttcgtgttcccgttcgttggccgcaacgccgccgcctgcgagggggcctatcaaccgccggccctgttcctggcggccgccggggtcaaagcgcatcgcgttctcgacatcaacgacaccgcgtttatcagcagcctggggcatatggatggggtgatctccctgcgctgttatcagaaattctccgccgactatgtgcgcgccttcagccgacgcggcaagctgctgtggaacctgcatccgggggacttgccgcgttatcgcggggtgatgacgctgttccgcgcgttgatgaacggtgacagggactgttcggtaacgctgcatgaaatggatgagcactgggacgccggcccggttatcgcccgcctgcccgccgagctgcggcacgatctgtcgttcctggaaaacatgatgctgttgggcgtgcagagtggctctttcctggcgcgccagctgatgttggcggagcacagcgaagcgatcgcggcggaaaagcagggcgattcgcgctattggggcttcccggacgcgcagacgctggcgcaggcggaacaggcgggcattgagctggtggaccatgacgccgtgcgcgagcagtatctggggctgttcgtcggcgatcgtttccacccgctggcggggcagttctgcgccgggttcgacgacttcgtgcgggcgcacggccatgattga

SEQ ID NO: 425181 - DNA, 789 bp, Serratia marcescens
atgattgaaaccttgattgtactgggtgccggttttctgaccggcatcaccaccattctgttcggcttcggcggcggctttgtggtggtgcctttcgtctatcacctgatctccacatcgggcgagcagcccggccaggcgatgcatatcgcggtggcgacctcgacggcggtgatgatcctcaacgcgagttacgccacgctgaccaactggcgcagcggcaacctgctgcgcgaaaccatcgtgccgctgatctttttcatcggcatcggtgcggcgctgggcgcgttcgcctcttcgctgctggcggacggcgtgatccgcgggctgtttgtggtctatatggcagtgactatcgccgactgtctgttccgccggggtttcctggtcaaaccggcgcgcgccgaactgtctcccgccacgctgtggggcggcgggccgctgatcggcggcatcgccaccctgctgggggtgggcggcagcgtgatgacggtgccgctgctgcgccgccatggctacgacatgaagtattgcgtcagcgccgccaacccgctgtcgatcccggtggcggtgatcggcgcgctgatgtatatcgtgttggggtggcgcgagatgagcgggccgcagtatctgggctacgtcaatctgaacgttctggggctgctggtggtggcggggattgcggggatcgtatttgccaggcgctgtttgcctaaggtgagcgatgcgctgcatgccaaaatctacgtgctgctgctgatcgccgtgctgatcgctatctgcgtctga

SEQ ID NO: 425182 - DNA, 411 bp, Serratia marcescens
atgaccaaacccatcattactattaatgagctggatgcggaacgcctggatgcgctattggaacaaccggcctttgccaacaccgacgtcgccgccgcgctgaacgacgagttggatcgcgcggaaatcctgccgccggagaaaatgccggccaacgtggtgaccatgaacagccgcgtgcgttttcgcgatctgcacaccgatgaagagcacgtgcgcacgctggtttacccggcatcgctgaaagacagccacgatcagctgtcggtgatggcgccgctgggcgcagcgctgctcggcatgcacgtcggcaagcagatttcctggcaattgccgaacggtgaagaagcgcggattgaagtgctggaattgctgtaccagccggaagcggcgggcgaataccaccgttaa

SEQ ID NO: 425183 - DNA, 252 bp, Serratia marcescens
atgctgaatgctgaaaatatttataccaatgcggtgcagcaacagatgctggaatcgcatattcgcgccatggtgcagcgttcaataaccggcgagccgttgccggaggtggataaatcgttgttcgacgaaatctccgccgaatccatgcaaatggcggagcgcgtggtgaatcagtttggcacattgcctatcgaagaagcctatttattgtcagtgcacttcgaagtggcgaaagataataacgcatag

SEQ ID NO: 425184 - DNA, 366 bp, Serratia marcescens
atgggtcaaattaccgtagtgatcggcgatcgtttgggtaaagggcaaaaagtcggccagggcgttgaaaacgcaggcggaaaagcggtggttatccccggcgtggcggcggatatgaagctgggtgacgtcatgaaagcggaaaacgcgcagctgggcatctctttttgcggcagcggcggcgccggcgcgattaccgcgcaaaccaaacacggctacaaagctaaatacggcatgcgttcggtggaagagggcgtgacggcaattaacgaaggctgcaacgtgctgggcttcggctttatggataaagaagagttgggccagaaattggtggaagcctacatcaaaaaacatggcaatccataa

SEQ ID NO: 425185 - DNA, 297 bp, Serratia marcescens
atgaaagagcaatataccacatcggtaaaggtggagggtaaaggcgacagcaaagcgaaagcttttgcttccgccttggctaatgtgcagggtgcggtattaaagtccaccaacaatattctgctgcgtatcgagccgcaggacgtcagtgtcgtgagagcggaagagaaaataactaaagagaaatttcttttcttctttttgccgcgtgaaagaaagagctatgccgtttctctggaaataaccgtgagcgtaaccattatcaataccgagaaggttgtcttcgtcacgaaataa

SEQ ID NO: 425186 - DNA, 777 bp, Serratia marcescens
atgtttttaatcatcttatttaaatcgattattatcggtgggctggtgggggtcggcgtaggggccggcgccgcacgcatgttccacgcgccgacaacacagggcatgggggcgtttcgcaccctgggcgagctgaattcctgcgagggcgatccggcttcccacttctcattcggtctgggcttcttcttcaacgcctgggcgtcttccgtggcggcgggttccttcacgcaggacgtcgaccaccgcatcatcccgcactggggcgcggcggccctgatggtcaagaaccgcaatctggcgcaaacgctgcacgatccgaaaaaaatggccatcgcctgcggcatcatcggcatgctggtggtggccttcctcaataccaccgcttccgccgtgccggccgcgctgcaggtcaccgcgatcaaggtgctggtgccggcggccaacctgctggtgaacaccgtgatgccagtgatcttctggctggcggcgatcgacgccgggcgccgttccggcttctggggcaccatcttcggcggcctggcgcagctgatcatgggcaacgccgtgccgggcctggtgctgggcattctgatcggcaaaggcgtggaagagagcggctggaacaagatcaccaagatcatgatggcggtgatcgtgctgctgttcgtgctgagcggcttcttccgcggcttcgacatgaaagttctcgagtccttcagcctcggcgtgccgggctggctggacgccattcacaacaccctgagcggtaaataa

SEQ ID NO: 425187 - DNA, 651 bp, Serratia marcescens
atggaagagcaaacccaaaaaggcttctggtacgccgactggtcattcccgatttttgttggcctgctgtcctccggcgtgttcgccgggacgcacatgtattacctgtacggcatcggcgcctttaacgaagtggcgttcgtttccatgctgcgggcggggatggataccggcgtatacggcgcggtggcggcgttcggcgccagcttcctgttcgcgcgcatcatcgaaggctcgctggtgggcatcctggacatcggcggcgcgatccagaccggcgttgggctgggcgtgccggcgctgctgctgggagccggcatcgtgttcccggtcgccaacttcgccgcttcgctggtgaccggcctggtcatcggcctggcgatcggttacgtgatcatcctggcgcgcaaattcaccatcaatcagagcaactccacctacggggcggacgtgatgatgggcgcgggcaactcgtcgggccgtttcctcgggccgttgatcatcctgtcggcgatgaccgcctcgatcccgatcggcatcggttcgctgctcggcgcgctgctgttctatatctggggtaaaccgatcaccggcggagcgatcctcggcgcgatgatcctgggggcgatcttcccggtagccatttcttga

SEQ ID NO: 425188 - DNA, 1140 bp, Serratia marcescens
atgtatgacttagtaatcagaggcgccagactggcggacgacacgctgatcgatctggcggtgaaagacggcaaaatcgcctcggtggggcggctggcggcggacgtcagcgccgttcgccaactggatctggcgggcaactgccgcctgagcgccggttggatcgatgcgcacgtgcactgctatcccgactcgccgatttaccatgatgagccggatcgggtcggcgtcgccagcggcgtcaccagcgtggtcgatgccggcagcaccggcgccgacgatatcgacgccttttatcagctgacgcgcagcgccaaaaccaacgtgttcgccttcctcaacatctcgcgcatcggcctgctgcggcagaacgagctggcggagttgacggacatcgacaagcgcgaggctggccaggccatcgccaaccatcccggtttcattatcggcatcaaggcgcgcatgagcagcagcgtggtgggcaagaacggcacccggccgctggtgttggccaaagagatccagcgggaaaaccgccagctgccgctgatggtgcatatcggcaacaacccgccgaatctggacgagatcgccgatctgctgacccgtggcgacatcatcacccactgctacaacggcaaaccgaaccgcattctgacgccggcgggcacgctgcgcgagtcgatccagcgcgcgctgcggcgcggcgtgttgctcgacgtggggcacggcaccgccagcttcagcttcgaggtggcgcgccaggcgatcaagctgggcattttgccgcacaccatcagctccgatatttactgccgcaaccgcataaacgggccggtgcacagcctggcgacggtgatgtccaaatttttcagcgtcggcctgatgctgccgcaggtgatcgcctgcgtgacggagaacgccgcgtcggcgctgcagctcagcggcaaagggcggctggagccgggctatgacgccgatttcacgctgtttgaactgcgccgcgaaccgcaggtgttcgccgacgccgaagggcaaaccgccgagggcgaacagctgttggtgccgctggccgcggtggtggccggggaaatcctattaaccgaacaaggggaggcaagccatgtcttcgatttatga

SEQ ID NO: 425189 - DNA, 1119 bp, Serratia marcescens
atgtcttcgatttatgaaaaatacggtttgaagcaggtgatcaacacctccggccgcatgaccattctcggcgtttccacgccgcgccaggatgtgatcgacgccgttgactacggcctgaatcactatttcgaaatcaaggatctggtcaacaagaccggcgcctacatcgccgatctgctcaacgtggaggacgcggtgatcgtttcctgcgcctcggcgggcatcgcccagtcggtggcggcggtgatcgtcaaagataacgccaatctgctggtgaacctgcactcggcgccgatcgccgtgccgcgtgagatcgtgttgccgcgcggccacaacgtcaacttcggcgcgccggtggacaccatggtggcgctgggcggcggcaaggtggtggaagcgggctacgccaacgaatgttcgccggagcagattgaagcctgcatcacgccgcagacggcggcgatcctgtacgtcaaatcgcaccactgcgtgcagaaaagcattctgtccgtcgaacaggcggcggtggtggcgcgcaagcataacctgccgctgatcgtcgacgccgcggcggaagaagatctgatgtgttactaccagatgggagccgatctggtgatctacagtggcgccaaagccatcgaggggccgaccagcggcctggttatcggcaagaaacagtacgtcgagtgggtgaagctgcagtccggcggcatcggccgggcgatgaaggtcggcaaagagggcatcctcggcctgacgcaggcgatcgaaagctatctgacgcttgagaaaaccaccgggcaacagatggtggcgcggatgacgccgttcctcgacagcctcaacaccctgaccggcgtcagcgccagaaccgtctgggacagcgccggccgcgatatcgcccgcgccgagatcgccttcgacgaagcggtgctggggcggtcgacctatgacatcgtccaggcgctgaaaaccggcgacatcgccatctacttccgcggctacaaggccaacgagggcaagattgaggtcgacgtgcgcagcgtcgatgagcaacagctgatgaccgtctttacctgtatcaaaaacctgtttacggagaaacaagcatga

SEQ ID NO: 425190 - DNA, 741 bp, Serratia marcescens
atgaagctgcagcctaactactatcgcgaccgcgtctgcctgaacgtgctggccggctccaaagccaatgcgcaggacatctacgccgcggcggaaggccatgtgctggtgggcgtgctctccaagaactacccggacgtcgacagcgcggtgaccgacatgctgcgctatgcgcgcctgatcgaaaacgcgctctcggtcggactgggcgccggcgatccgaagcagtcggcgatggtcagcctgatcgctcagcaggtgcagccgcagcacgtcaaccaggtgtttaccggcgttggcgccagccgcgcgctgctgggccagaacgacagcgtggtcaacggcctggtgtcgccaaccggccgcgttggctgggtgaagatctctaccggcccattgagcgccgcggcgccggacggcatcgtgccggtggaaaccgccatcgccctgctgaaagacatgggcggcagctccatcaagtatttcccgatgggcggcctgaagtgcaaggacgaatatcagtacgtagccaaggcctgcgccgagcatgactttatgctggagccgaccggcggcatcgatctggagaactacgagccgatcgtcgagatcgcgctggcggccggcgtgaaacgcgtgatcccgcatatctacagttcgatcatcgacgccgccagcggcgatacgcgcccacaggacgtgaaaactctgctggcgatgaccaaaaagctggtgggctga

SEQ ID NO: 425191 - DNA, 1215 bp, Serratia marcescens
atgcgaaactggcaggctccaacccgacgcaccgcgttgttcctggcgctgctggccgtgaccggcccggcgctgcatgctgaggatgcaatgaattccacgtcatctcatttcgcctatatcggcacctacaatcccaacggcgaaggcgtttaccgggtgcaggtcgatccggccagcggcgcgctgagtcacactacgctggtcagcaaagtgccgaatccggcgcagctgacgctgggcgccgatggcaagacgctgtatgtcgccagcgaagtggccgatttcaacggcggcaagcacggcggcatcaccgcttaccgggtcaatccggccgacggcggcctgacgcagctcaaccaggtggattcgcagggagcggggccggtgtatctctcatcgacgccggacgggcgccatctgctggtggcgaactatgtcagcggcagcgtggcggctttcccgatcgaagcggacggcagcctgggcgtcgccagctcggtgcagcaacagcagggccccgcgggcgcggccaaaccggcggcggcggtgaacggcagcttcgccatcagcgatcacaacggcccgcatgcccatatgatcgccagcgatccgagcggcaagttcgtgttctccaccgatctggggttggatcgcatctaccaatggcgctttgacgccgcgagcggccggctgacgccgaacgatccgccgtggatcgccgcctcttccgccggcgcgggtccgcgtcactttgtgttccatccggacggcgaaaccgtgctgctggtgaacgaagaggcctcgacgttgaccagctaccgttttgatcgccaaaaaggtactctgaaacaactgcatgcggtttccgcgctgcccgccgactatcagggcaccagcttcgcttcggggctggcgctcagcaagaacggcgacacgctgtacgtcgccaaccggctgcataacagcattgcccagttcagcgtgggcgccggcggtgagttgaagccggtggcggaaacctggacgcgcggcgattacccgcgttcgctggcgctgagcccggatggccgctatctgtatgcgttgaaccagcgcagcgataacatcacccgcttcagcgtaaacccgacggacggcaaactcagcgttgtgggcggctatctgccgatcggcagcccctcgcaaatggcgtttctgccgccgccgaagtaa

SEQ ID NO: 425192 - DNA, 1917 bp, Serratia marcescens
atggtgcgatttccttacccgcgtttggcttacttgttcgatgctttgcaaaccgagactttgccgcaggatgagctggcgaagcgtttcgccgtgtccacccgcacggtgcgggcggacatcaccgcgctgaacgagattctggacaaatacggcgcgcgtttcgtgcataaccgcggggccggctatcgcctgcaggtcgataacgccgcgctgttcagcgccctgcagcatcaggagcgccgcaagcatgccaccccgcgcagcgcgcaggagcgtgtgcattatctgctggtgcgttttttgacctcagccttctcccttaaactggaagatctggccgacgagtggttcgtcagccgcggtacgttgcaaaacgacatggctgaggtgagagagcgtctggcgcactatcaattgacgattgaaaccaagccgcgttacggcatgaagctgttcggcacggagatggcgatccgcgcctgcctgaccgatctgctgttccaactgcagctggccgacgccgagaacccgctgctcaacaacgagatcctgctgcagccgcaggtagcggcgttcgccggattgctgcacccgctgctgtcgcaatacgccattcgcctgaccgacgagggcgagcagtacctgatcttctactgcgcggtggcgctgcggcgcatcaacgacggctatccgctgccggacttcgaggtggaagacggcgacgacgcggtgcgccaggtatcgacccgcctggcggcggaactgcgttcggcctccggcaaagagatctcgatggccgaagaggcctatctgcgggtcaatatcgccgcgcggcgcgtgcaggacgtgcagccgaccgagatcaacgccgacgatgaagaagcgctggtggactacatcctgtcctacatcaacgcacactataactacaacctgcagggcgacgagcagctgcgggccgatctgctcacccatatcaagaccatgattacgcgggtgaaataccagatcaatatccccaatccgctgttggccaacatcaagcagcactatccgatggcttacgacgtgacgctggcggcggtctccagctggggcaaatacaccccctataccctgagcgagaatgagataggctacctggtgctgcacatcggcgtggggctggagcggcattacaacatcggttatgaacgccacccgcaggtgatgctggtgtgcgataccggcaactcgacggtgcgcatgatccaggcgcagattgcgcgtaagtatccgcagttggtgatgacgcgcatcgtctcgctgcgcgattacgagatgcttgcgcatatcgacgaagacttcgtgatttccaacgcccgcatcggcgaaaagaacaagccggtggtggtgatgtcgccgttcccaaccgattaccagctggagcagctgggcaagctggtgctggtggatcgcacccgaccgtacatgctggagaagtttttcgacgccgagcatttcatggtgctcaacgagccgctgacgcaggcggaactgttcagccgggtgtgcggccagctggagcgggaagggtacgtcggcgcggacttttatccgtcggtggtcgaacgcgaggcgatcgtctccaccttgctgggcgagggcatcgcgctgccgcactcgctggggctgctggccaaaaagaccgtggtggtgacgctgctggcgccgcagggcgtcgcctggggagaaggcgaggtcgcgcacgtgattttcctgctggcgatcagcaagagcgactatgaagaggcgatggcgatctacgagctgtttgtcaccttcgtgcgtgaacgctcaatgagccgcctgctgagcagcgacagcttcgacagctttaaagcggtggcgctggactgcctgagccggagctga

SEQ ID NO: 425193 - DNA, 273 bp, Serratia marcescens
atgacggtcaaacagacggttgaaatcaaaaacaagctgggcatgcacgcgcgcccggcgatgaaactgttcgagctggtgcaaagcttcgacgccgaagtgatgctgcgcaacgaaagcggcaccgaagccgaggccagcagcgtcatcgcgctgctgatgctggactccgcccagggccggcatatcgaagtcgaagcgaccggccccgacgaagtcaacgcactggaggcggtcgtcgagctgttcaactccgggtttgatgaagattag

SEQ ID NO: 425194 - DNA, 855 bp, Serratia marcescens
atggtgctgatgattgtcagcggccgttccggttccggaaaatccgtcgccttgcgggcgctggaagacatgggtttttactgcgttgacaacctgccggtggtgctgctgccgcagctcgccaatacgctggcggaacgcaatatctccgcggcggtcagcatcgacgtgcgcaacatgccggaatcgccggaagtgttcgaatacgcgatgactcagctgccggacagcttctcgccgcagctgctgttcctcgacgccgatcgcaacacgctgatccgccgttacagcgacacccgccgcctgcacccgctctccagcaaaaacctgtcgctggaaagcgccatcgacgaagagagcgatctgctcgaaccgctgcgctcgcgggctgacctgattatcgacacctcggaaatgtcggtgcacgagctggccgaaatgctgcgcacccgcctgctgggcaagcgtgagcgcgagctgaccatggtgttcgaatccttcggcttcaagcacggcatcccgatcgacgccgactacgtgttcgacgtgcgcttcctgccgaacccgcactgggatccgaagctgcggccgatgaccggtctggataagccggtcgcgtcgttcctcgatcgccataccgaagtgcacaacttcatctaccagacccgcagctacctggagcaatggctgccgatgctggaaaccaacaaccgcagctacctgacggtcgccatcggctgtaccggcggcaagcaccgctcggtgtacgtggcggaacagctggccgattacttccgctcgcgcggcaagaacgtgcagtcgcgccaccgcacgctggaaaagcgcaaacaatga

SEQ ID NO: 425195 - DNA, 447 bp, Serratia marcescens
atgcaattaagctcggtgttaaacatcgagtgcaccaaaagctcggtacactgcaccagcaagaagcgggctttggaaattatcagcgaactggccgccaaacagctcaatctgccttcgcaggtggtgtttgacgcggttctcacccgggagcgcatgggcagcaccggtatcggcaacggtatcgccattccccacggcaaactggaagaggacacactgcgggccgttggcgtgtttatccgtctcgaccaacccatcgctttcgacgctatcgacaaccagccggtcgacctgctgttcgcgctgctggtgcctgccgatcagtgcaaaacccatttgcataccctgtcgctggtcgccaaacgcctggccgacaaaaccgtatgccgccgcctgcgcgccgcgcaaagcgacgaagaactttaccaaatcatcaccgagtaa

SEQ ID NO: 425196 - DNA, 288 bp, Serratia marcescens
atgcagctcaacattaccggacaccacatcgaaatcaccgatccgttgcgcgagttcgtgaacaacaagttcgccaaactcgaacagtattttgatcgcatcaatcaggtgtatgttgtattaagtgtggaaaaagtgcagcaaattgcggaagcaacggtgcacgtgaatggaggcgagttgcacgccacctcggaagacgagaatatgtatgccgcaattgatacgctgatcgacaaattggcacgtcaattgaacaaacataaagacaaattgaagcaacactga

SEQ ID NO: 425197 - DNA, 1434 bp, Serratia marcescens
atgaagcaaggtttgcaactcaggctcagccaacagctggccatgactcctcagctccagcaggcgatccgcctgctgcagttgtccacgcttgagcttcagcaagaaatccagctggcgctggagagcaatccgctgcttgaacaaaccgatctgcacgacgaaatcgacgccaaagaaacccaggagaccgaggggctcgatacccgcgaggcgctggaacagaaagacatgccggaagagctgccgctggacgccacctgggatgagatctacaccgccggcacgccgtccggcaccggcaccgactacagcgacgacgaactgccggtctatcagggcgagaccacccaaacgctgcaggattacctgatgtggcaggtggatctgacgccgttctccgataccgacgccgccatcgccacctccatcgtcgacgcggtggacgacaccggctatctcaccgtgccgctggaagacattctggaaagcctgggcgacgagaacgtgaccctcgaggaagtcgaggcggtattgaagcgcgtgcagcgtttcgatccgatcggcgtcgccgcgcgcgatctgcgcgattgcctgctggtgcagctctcccaatacgccaaagacaccccttacctggccgaagcgcggctgatcatcagcgaccatctggatctgttggccaaccacgactttcgcagcctgatgcgatcaacccggctaaaagaagatacactgaaagaagcgatgctgctgattcagtcgctcgatccgcgcccggggcagtcgatcaataccggcgagtcggaatacgtgatcccggacgtgctggtgcgcaagacgcagaacaaatggacggtcgagctcaacggcgacagcgtgccgcgtttgaagatcaatcagcagtacgccgcgctgggcaacagcgcccgcagcgaagccgacggccagtttatccgcagcaacctgcaggaagccaagtggctgattaaaagcctggagagccgcaacgagacgctgctgaaggtcacccgctgcatcgtcagccaacagcaggcgttcttcgagcaaggcgaagagtttatgaaacccatggtgctggcggatatcgcccaggccgtggagatgcatgaatcgacgatctcgcgcgtcaccacgcagaagtttctgcacagcccgcgcggcatttttgaattgaagtatttcttctccagccacgtgaataccgacagcggcggcgaagcctcctcgacggcgatccgcgcgttggtgaagaaattgattgcggcggaaaaccccgccaagccactcagcgacagcaagctagccaccctgctcgccgatcaggggatcatcgtggcgcggcgcaccgtcgccaagtaccgagagtctttgtccatcccgccgtcgaaccagcgtaaacagttggtttga

SEQ ID NO: 425198 - DNA, 726 bp, Serratia marcescens
atggcaacactcatcgcagaaaacctggcgaaagcctacaagggccgtaaagttgtcgaagacgtcagcctgaaagtgaaatccggcgagatcgtcggcctgctcgggccgaacggcgccggtaaaaccaccaccttctacatggtggtcggcatcgtgccacgcgacgccgggcgcatcgtgatcgacgaagaagacatcagtctgctgccgctgcacgcccgcgcgcgccgcggcatcggttacctgccgcaggaagcctcgatcttccgccgcctgagcgtgtacgacaacctgatggcggtgctggagattcgccccgacctcaccagcgaacagcgcgaagaccgcgccaaggagctgatggaagagttccatatctcccatctgcgcgacagcctcggccaggcgctgtccggcggtgagcgtcgccgcgtcgaaatcgcccgcgcgctggcggccaacccgaaattcatactgctggacgaacccttcgccggggtggatccgatttccgttatcgatatcaagaaaatcatcgagcacctgcgtgacagcggcctgggcgtgctgatcaccgaccacaacgtgcgcgagacgctggacgtgtgtgaacgcgcctacatcgtcagccagggcaaactgattgcccacggcacgccggatgctattctggccgacgagcaggttaaacgcgtttatctgggcgaagagttccgcctctaa

SEQ ID NO: 425199 - DNA, 540 bp, Serratia marcescens
atgaaattcagaaccaaaaaccaactccgtaacctgttgctcggcagcttagttttggccgccagcgcccccgctctggcgctgaaatccgactccagccagccggtcagcatcgactcgctcaagcagtcgttggacatgcagagcaacgtcagcaccttcaccgacaacgtggtgatcaagcaaggcaccatcgatattcgcgccgacaaggtggtggtcacccgcccgggcggagatcagaataagacctatattgaagcgttcggcaacccggtaaccttctaccagatgcaggacagcggcaagccggtcaaaggccacgcgcagaaagtgcgttacgacgtggcgacccagctggtgaccctgacgggcaacgcctatctggagcagctcgacagcaacgtgaaaggcgatcgcatcacctatctggtgcaacagcagcaaatgcaggcgtttagcgacaaaggcaaacgcgtgacaacggttctggtaccgtcgcagttgcaagacaaaaacgagcagaaaaagagtaactaa

SEQ ID NO: 425200 - DNA, 579 bp, Serratia marcescens
atgagtaaaaccaaactgtggatcaccatcctgttgacggtgatcgttctggcgctgatcggctggaacatgacggattttagcgacgacacggcccctggcccggtcaacgataaggatccgacctaccagagccagcacacggtcaccgtggtgtacaacccggccggcaagctgaattacaaactggtggcggaagacgcgaagtattacaccgccggcgagctgagctggttcacccagccggtgatgacgctgttcgatgagaatgcggtggccacctggtcagttcgcgccgatcgcgccaaactgactaaagaccggatgctgtatctgtatggtcacgtcgaggtaaacagcctgaccaccacctcgcagctggaaaaaattaagacggacaacgctcaggtaaacctggtcacccaggacgtcacctccgatgacgaagtcacgatttacgggaccaattttacctctaacggcatgaaaatgcgtgggaacctgcggaccaaaaccgctgagctgattgataaggttaagaccaactatgaaattcagaaccaaaaaccaactccgtaa

SEQ ID NO: 425201 - DNA, 555 bp, Serratia marcescens
atgggtatggtagaaacctgctacgggccggtagaacaagaggttatggcgcgtgccgggaacatccgcctgttgatttgcgacgttgacggcgtgctgtcggacggcctgatcttcatgggcaacaacggtgaagaattgaaagcgttcaacgtgcgcgacggctacggcatccgctgcttgaaaacctcggacatcgaggtggcgatcatcaccggtcgctccgccaagctgctggaagaccgcgcgcagacgctcggtatcacccatctgtatcaggggcaatccgataagcttttggccttccgcgaactgttggataaactgtcgttaacggcggatcaggtcgcctatatcggcgatgacctgatcgactggccggtaatggcgcaggtcggcctggcggtcgcggtggcggacgcccacccgctgctgacgccgcgcgcccactacgtcacccgcattgccggcggccgcggcgcggtgcgcgaactgtgcgacatcattcttttggctcaaaataagctggaggacgccaaagggctgtcgatatga

SEQ ID NO: 425202 - DNA, 987 bp, Serratia marcescens
atgtcgaacattgagttgcaaccgggcttcgattttcagcaggccggcaaagaagtgcttcagatagagcgtgaagggctggctcagctcgacagctacatcaacgcagacttcacccgcgcctgcgaaacgatcgccgcctgcggcggcaaagtggtggtgatgggcatgggcaaatccggccatatcggctgcaagatcgccgcgaccttcgccagcaccggcaccccctcattcttcgttcacccggcggaggccagccatggcgatttgggcatggtcaccccacaggacatcgtgctcgccatctccaactccggcgagtccagcgagatcctggcgctgatcccggtattgaaacgccagcagatcaccctcatctgtatgaccaacaatccggaaagctcgatgggcaaggcggcggatatccacctgtgcatcaaggtgccgcaggaagcctgcccgctggggctggcgccgaccaccagcaccaccgccacgctggtgatgggcgatgcgctggccgtcgcgctgctgaaagcgcgcggtttcacgcaggaagatttcgcgctgtcgcatccgggcggcgcactcggccgcaaactgctgctgcgggttagcgatatcatgcacagcggcgacgaaatgccccacgtcagtgccgacgcctcgttgcgcgacgcgctgctggaaattacccgcaaaaatctgggcctgacggttgtctgcgacgatttgatgaaaatcgccggcatcttcaccgacggcgacctgcgccgggtattcgacatgggcatcaacctgcacgaggcgaagatcgccgatgtcatgacgccgggcggcgtacgggtgcgccccaacatcctggcggtcgatgcattgaacctgatgcaacaacgccacatcaccgcgctgctggttgccgatggcgaccagttgctgggtgtggtacatatgcatgacatgctgcgcgccggcgtcgtttaa

SEQ ID NO: 425203 - DNA, 978 bp, Serratia marcescens
atgtttctcgcgatagcattattaatcgttggtttatttctactggtgtatggtgcagaccgcttagtttatggtgctgccgtgatttcccgctcgctcggcgtcccgccgttgatcatcggcatgaccatcgtcggcatcggcacttcgctgccggagctgatcgtgtccaccaccgccgcgctgaacgggcagatagatatggccgttggcaacgtattaggttccaacatcaccaacatcttattgatcctgggtgtggcggcgctgattcacccgctggccgcgcgttccgagatactgcggcgcgaactgccgttgatgttagcggtcacagtattgtgcggtttcgtgttgatggacggcaccctgagcaggctggacggcgtgctgctgctggccgccgccgccggcttcatcctgctgatgctgaaaatcgcccggctggcgcagcgcgagggcagcgacagcctgaccatggagcagatcgccgagctgccgcaggacagcagcaacaccgtggcggtgctgtggctggtgctggcgtttatcattctgccgctctcttccagaatggtggtcgataacgcgacggtgattgcgcactatttcggcctgagcgaactggtggtcggcttgaccattatcgccatcggcaccagcctgcccgaattggctacctccatcgccggggcgctgaagggcgaggatgatatggcgattggaaatatcatcggctccaatattttcaacacggtgatcgtgctgggcgtccccgccctgctgtcgccgggcagcgtagacgccgccgccttccagcgcgattactgggtgatgctggcggccagcgtgctgctgagcgtactgtgcatcggccgcaagcatcgcatcggtcacctggcgggcgctctgttattatgtggctttattgcgtatcttgcggtgctgttctttaaccctttcagtactttcggctaa

SEQ ID NO: 425204 - DNA, 816 bp, Serratia marcescens
atgctccaaaaggcagataatttggtcgaagtgcgcgacatgagcttctcgcgcggcgaccgacggatatttgaagacatcaacctgacggtgcctcgcggtaaggtcacggcgatcatggggccatcgggcatcggcaaaaccacgctgctgcgcctgataggcggccagctggcgccggacagcggggagatttggttcgacggcgacaacattcccgcgttgtcccgccgtcagttatatgacgcgcgcaaaaagatgagcatgctgttccagtcgggcgcactgttcaccgatttgaccgtgttcgaaaacgtggcctacccgctgcgcgagcacagcaacctgcctgaacccctgctgcgcagcacggtgctgatgaagctggaagcggtggggctgcgcggcgcggcccagctgatgcccaatgagctttccggcggcatggcgcgccgggcggcgttggcgcgcgcgatcgcgctggaccctgagatgatcatgttcgacgaacctttcgtcggccaggatccgatcaccatgggggtgctggtcaagctgatcgatgagctgaaccatgcgctgggcattacctgcatcgtggtgtcgcacgacgtgccggaggtgctgagcatcgccgactacgcctatatcgtggccgatcaccgggtgatcgccgaaggcaccacgcagcaattgcagaacaatcctgatgcgcgcgtgcgccagtttctggatggtatagcggatgggccggtgccgttccgctatccggccggggattatcagaccgaactgctaggcttagggagtaaataa

SEQ ID NO: 425205 - DNA, 783 bp, Serratia marcescens
atgttattaagagcgttagcgtcgttggggcgcagtggcatcaacaccagcgccagcttcggccgcgccgggttgatgctgttcaacgcgttgattggccggccggaacccggcaagcagtggccgctgttgttgaaacagctctacagcgtcggcgtgcagtcgctgctgatcatcatggtctccgggctgttcatcggcatggtgctgggcctgcagggctatatcgtgctcaccacctacagcgccgaggccagcctcggcatgatggtagcgctgtcgctgctgcgcgagctggggccggtggtgacggcgctgctgttcgccggccgcgccggttccgcgctgacggcggaaatcggcctgatgaaggcgacggagcagatctccagcctggaaatgatggcggtcgatccgctgcggcgcatcgtggcgccgcgcttttgggcggggctgatcagcatgccgctgttgaccatcattttcgtggcgatcggcatctggggcggctcggtggtcggcgtggactggaagggcatcgacagcggcttcttctggtcggcgatgcagggcgccgtagagtggaaaaaagatctgttcaactgcctgatcaaaagcgtggtattcgccattaccgtaacctggattgccattttcaacgggtacgacgccgtgcctacctctgaagggattagccgggcgacgacgcgtaccgtggtgcattcgtcactggcggtgttgggattggatttcgtgctgacagcactgatgtttgggaattga

SEQ ID NO: 425206 - DNA, 549 bp, Serratia marcescens
atgcaaacgaagaagagtgaaatctgggttggggcatttatgctgatcgcgctgtgcgccatcgtgtttatctgcctgcaggtggcgaaccttaaatcgatcggcagcgagccgacctaccgcatttacgcgacgttcgacaacatcggcggcctgaaaccgcgttcgccggtgaagattggcggcgtggtgatcggccgcgtggcggacatcgaactcgattcgaaaacctacacgccgcgcgtggcgctggatatccagaaaaagtacgaccaaatcccggataccagctcgctggcgatccgcacctccggcctgctgggcgagcaatatctggcgcttaacgtgggcttcgaagatcctgatatgggcaccgccatcctgaaagacggtggcaccattcaggacaccaaatcagccatggttctggaagacctgatcggccagttcctgtataaaagcggcggtcaggacagcgccaaaccgggagacgcggccgctgagccggctgccggcgccgcaccgcaacccgctgttccaaatcattaa

SEQ ID NO: 425207 - DNA, 630 bp, Serratia marcescens
atgtttaaacgtttactgatggtggctctgctggtggttgcaccgctggcgagcgcagccgaccaaaccaatccttacagcatgatgcaagaagcggcgcagaagaccttcagccgtttgaagaatgaacagccgaagatcaagcaggacccgaactacctgcgctccatcgtgcatcaggaactgatgccgttcgtgcaggtgaaatacgccggcgcgctggtgctggggcgctactacaaagaggcgacgcctgcgcagcgcgaagcttacttcaccgccttccaggcttacctggagcaggcttacggccaggcgctggcgatgtatcacggccagacttaccagatcgcgcctgaacagccgctgggcaatgccgacatcgtggccattcgcgtcaccatcatcgacaacggcggccgcccgccggtgcgtctggatttccaatggcgcaagaacagcaaaaccggctattggcaggcctatgacatgatcgccgaaggcgtcagcatgatcaccaccaagcagaacgagtgggcgtccacgctgcgtactcagggcatcgacggcctgaccaaacagctgcaggccgccgccgcgcagcctatcacgctggacaagaaaaactga

SEQ ID NO: 425208 - DNA, 303 bp, Serratia marcescens
atgtcggcagcgctcagcttcgaatcagagcagcagacgctgatcctgcgcggtgaactggaccgggaaacgctgcagccgctgtggcggcagcgcgacgcgctgatggcggataaaaccgcgatcgacgtggcgcaactgcagcgcgtagactccgccgggctggcgctgttgctgcatctgcaggaagagcagcgcgagcgcggcgtcgcgctgaaaattttcggcgccaccgaacgcctgaaaacgctgattgcgctctacaacctgcaggcgataatgcctgtcgataccgccggttag

SEQ ID NO: 425209 - DNA, 255 bp, Serratia marcescens
atggaaaccaacgagattaaagacgtgctgatgcaggcattggcactggatgaagtacatgtgacgggcgacggcagccattttcaggcgatcgtggtcggcgaattgttcgccggcatgagccgcgtcaaaaaacagcagacggtttacgcaccgctgatggaatacattgcggacaaccgcattcatgccttgtctatcaaggcgtacacccctgaagagtggcagcgagaccgcaaactcaacggattttaa

SEQ ID NO: 425210 - DNA, 1260 bp, Serratia marcescens
atggataaatttcgtgtgcagggtcggacccgcctgagcggtgaagtgtctatttccggggccaaaaacgccgccctgccgatcctgttcgccgccctgttggcggaagagccggtcgagctgcagaatgtccccaaactgaaggacatcgacaccaccattaaactactcaaccagttgggtaccaagattgagcgcaacggttcggtcttcgtggacgccagcggcgtgaacgagttctgcgccccttacgatctggtgaaaaccatgcgtgcttccatctgggcgctggggccgctggtggcgcgtttcggccgcggtcaggtttccctgccgggcggctgtgcgatcggcgcgcgtccggtcgatctgcacatcaccggcctcgagcagctgggtgccgagatcaagctggaagaaggctacgtcaaggcgtccgtcgagggccgcctgaagggcgcacacatcgtcatggacaaggtgagcgtgggcgcgaccgtaaccatcatgagcgccgcgaccctggcgaccggcaccaccgttatcgagaacgccgcgcgtgagccggaaattgtcgataccgccaacttcctcaatacgctgggcgcgaagatcagcggcgccggcagcgacaagatcaccatcgagggcgtcgagcgtctgggcggcggcgtgtaccgcgtgctgcctgaccgcatcgagaccggcaccttcctgatcgccgccgcggtttccggcggcaaagtgatgtgccgcaacactcgtccggacacgctggacgcggtgctggccaagctgcgcgaagccggtgccgatatcgaagtgggcgaagactggatcagcctggacatgcacggcaaacgcccgaaagcggtcaccgtgcgcaccgcgccgcacccgggcttcccgaccgacatgcaggcccagttcagcctgctgaacctggtggcggaaggcaccggcgtcatcaccgagaccatcttcgaaaaccgcttcatgcacgtgccggaactgatccgcatgggcgcgcacgcggaaatcgagagcaacaccgtgatctgccacggcgttgagcagctgtccggcgctcaggtgatggcgaccgatctgcgcgcttccgccagcctggtgatcgccggctgcatcgccgacggcgtgaccgtcgtcgatcgcatctaccacatcgatcgcggctatgagcgtattgaagacaagctgcgcgcgctgggtgctaacatcgagcgcgtgaaaggcgagtaa

SEQ ID NO: 425211 - DNA, 1059 bp, Serratia marcescens
atgtttgctaagctcttgcgttctgtcgttatcggtctcatcgttgccggcctgctgttggccgctctgcccgtgctgcgctcttccaacggcctgtttgcagagaagaccgagaataccagcgacgaaacgccggtgagctacaacaaagcggtgcgccgcgccgcgcccgccgtggtgaacatctacaaccgcaacctgaacggcgccgccaacgtgctgtcgctcggttccggcgtgatcatgaacgaacgcggctatatcatcaccaaccgccacgtgatcaaagacgctcagcagatcaccgtggtgttgcaggatggccgccgctacgaagcgctgctggtcggctccgacggcctgaccgatttggcggtgctgaagatcgatcccggcaacctgccggtgatcccgaccaataaaaatcgcgttgcccacgtcggcgacgtggtgctggcaatcggcaacccgtacaacctggggcagaccgtgactcagggcatcctcagcgccaccgggcgcatcagtatgagcaccaccggccggcagacattcctgcagaccgatgcctcaatcaaccgcggcaactccggcggcgcgctggtcaactcgctgggcgagctgatcggcatcaataccctgacctatgacaaaatcaccgacggcgaaacgccggagggcctcggcttcgccattccgatcgaactggctaccaaaatcatggacaagctgatccgcgacggccgcgttatccgcggctatttcggcattcagggtaaggagatcattccgctgcgttcctccaattccggcatcgatcgcctgcagggcatcatcgtgaccgaaatcacgccgaacggcccggcgagcagcgccggtttccagatcaacgacatcatcatcaacgtggataacaaaccggcggtgtccgtgctggagaccatggatcaggtggcggagatcaggccgggcaccgagataccggttatcgtgctgcgcgacggcaaacgcattacgttgaaaatgacggtgggcgaattcccggaagacaataattaa

SEQ ID NO: 425212 - DNA, 1371 bp, Serratia marcescens
atgaagaaaaagtcgttaattcttagtgcattggcaatgagcctcggcctggcgctcagcgccgcaccggtggccaacgcggccctgcccgtcgccgttcaggggcagccgctgccgagcctggcgccgatgctggaaaaagtcttgcccgccgtcgtgagcgtgcatgtcgccggcacccaggtgcagcgtcaacagctgccggaagagttcagacgcttcttcggccccaatttccccggtcagcagcagagctctcgcccgtttgaagggctgggctccggcgtcatcatcgacgctgccaaaggctacgtgctgaccaacaaccacgtcatcaacaacgccgataaaatccgcgtgcagttgaacgacggccgcgaactggacgccaaactggtcggccgtgatgagcaatccgacatcgccctgctgcagctcagcgacaccaaaaacctgaccgccatcaagatggccgattccgatcagctgcgcgtcggcgacttcgccgtggcggtcggcaacccgtttggcctgggccaaaccgccacctccggcatcatctcggccttgggccgcaccggcctgaatctggaagggctggaaaacttcattcagaccgacgcctcgatcaaccgcggcaactccggcggcgcgttggttaacctgaacggcgagctaatcggcatcaataccgccattctggcgccgagcggcggcaacgtcggcatcggcttcgccattccgagcaatatggcgcagaacctgagccagcagctgatcgaattcggcgaagtgaaacgcggcctgctcggcatcaagggcagtgaaatgaccccggacatggccaaagccttcaacaccgacgcgcagcgcggcgccttcgtcagcgaagtgctgccgaaatccgccgccgccaaggccggcatcaaagccggggatattctggtttccgtcgacggcaagccggtgaacagcttcgccgaactgcgcgccaaggtcggcaccaccgcgccgggcaaaaccctcaaggtgggcctgctgcgcgacggcaaaccgcaggaagtctcggtcacgctggacaacagcgagagcgcctcgaccaatgccgaaacgctgtctccggcgctgcagggggtttccctcagcaacggcgcgctgccgagcggcgacaagggcgtgaaggtggagaacgtggataaaggctcgacggcggcgcaaatcggcctgcaaaaaggcgacgtgatcatcggcgtcaaccgccagcgcgtggacagcatcaccgcgctgcgcaaggtgctggaagccaaaccgccggtgatggcgctcaatatcgtgcgcggtaacgaaaccatttatctgctgctgcgttaa

SEQ ID NO: 425213 - DNA, 402 bp, Serratia marcescens
atgacctgggagtatgcgctgattggtttggtcgtcggtatcgtgattggtgcggtggcgatgcgttttggcaaccgtaaattacgtcaacaacaagtcctgcagaacgagctggacaagagcaaaaccgagctggaagagtaccgtcaggagctggtcggccactttgcccgcagcgccgagctgctggacaacatggcgcgcgattatcgtcagctgtatcagcatatggcgaaaagctccaacaacctgctgccggatctgccgatgcaggagaacccgttccgctatcgcctgaccgaagcggaagcggacaacgatcaggcgccggtggaaatgccgcgcgactattctgaaggggcctccggcctgctgcgcggccaaagcgcgcgccgcgactga

SEQ ID NO: 425214 - DNA, 1128 bp, Serratia marcescens
atgcaggcactatcaccgttatctcgctaccagcaggcgctggaggcgggggaatatcaggccgatgaggttcaacgccgggccgtcactcaactggatcgcatttatcaggccttgctgcaaaaaccggcggcgagcgcgccggccggcgggctgcgcggcaagctcagccgtttgctgggcaaaggcggcgaaacggcgccgcagcgcccggtgcaggggctgtatatgtggggcggcgtcgggcgcggcaaaacctggttgatggacatgttcttccacagcctgccgggcgatcgcaaaatgcgtctgcacttccaccgcttcatgctgcgggtgcatgaagagctgaccgaactgcaagggcgggaaaacccactggacatcgtcgccgacggcttcaaggccgaaaccgacgtattatgcttcgacgaattcttcgtgtctgacatcaccgacgccatgttgctggccacgctgctgcaggcgctgttcgcccgcggcatcacgctggtggccacgtcgaacatcccgccggacgatctgtatcgcaacggcctgcagcgggcgcgtttcctgccggctatcgatctgatcaacgagttctgcgacgtgatgaacgtcgacgccggcatcgactatcgtctgcgcaccctgacccaggctcacctctatctgacgccgctgaacgaccagacgcgcgcgaccctggatcggatgttcgtcaaactggcgggcaaggcgggggaggaggcgccggtgctgcagatcaaccatcggccgctgcaggccattcgttcggtggacggcgtgctggcggtggatttccacacgctgtgcgaagaggcgcgcagccagctggattacattgcgttgtcgcgactgtatcacagcgtgatcctgtataatgtgcaggtgatggggccgctgaaagagaataccgcgcgccgtttcctggcgctggtggacgaattctacgagcggcacgtcaagctggtgatcggcgccgaggcgtcgatgttcgagatctaccagggggaacggcttaagttcgagtaccagcgctgcctgtcgcgcctgcaggaaatgcagagcgaagagtacctcaagctgccgcatctgccctga

SEQ ID NO: 425215 - DNA, 429 bp, Serratia marcescens
atgaaaacttttacagctaaaccagaaaccgtaaaacgcgactggtacgttgttgatgcagatggtaaaactttaggccgtctcgctactgaactggctcgtcgcctgcgcggcaagcataaagcggaatacaccccgcacgtggataccggtgattacatcatcgttctgaacgctgacaaagttgctgtaaccggcaacaagcgtacagacaaagtgtactaccaccacaccggccacatcggtggtatcaagcaagcgacctttgaagagatgattgcccgccgtcctgagcgcgtgattgaaatcgcggttaaaggcatgctgccaaagggcccgctgggtcgtgctatgttccgtaaactgaaagtttacgcgggcaccgagcacaatcacgcggcacagcaaccgcaagttctggacatttaa

SEQ ID NO: 425216 - DNA, 393 bp, Serratia marcescens
atggctgaaaatcaatactacggcactggtcgccgcaaaagctccgccgctcgcgtcttcatcaagccgggcaacggtaacatcgttatcaaccagcgcagcctggaacagtacttcggtcgcgaaactgcccgcatggtagttcgtcagccgcttgaactggtcgacatggttggcaaactggatctgtacatcaccgttaaaggtggtggtatctccggtcaagctggcgctatccgtcacggtatcacccgtgcactgatggaatacgatgagactctgcgttctgaactgcgtaaagctggcttcgtcacccgtgacgctcgtcaggttgaacgtaagaaagtcggtctgcgtaaagcacgtcgtcgtccgcagttctccaagcgttaa

SEQ ID NO: 425217 - DNA, 642 bp, Serratia marcescens
atggctgtcgctgccaacaaacgttcggtaatgacgctgttctctggcccgaccgacatttttagccatcaagtacgtatcgtactggcggagaaaggtgtcagcgtcgagatcgagcaggtcgaaatggataacctgccgcaagatctgattgacctcaacccttaccagacggtgcctacgctggtcgatcgcgaactgaccctgtatgaatcccgcatcatcatggaatacctggatgagcgtttcccgcacccgccgctgatgccggtttacccggttgcccgtggcgagagccgtctgatgatgctgcgcatcgagaagaactggtactcgctgatggacaagatcgagaagagcagcggccaggaagcggaatctgcccgtcgccaactgcgtgaagagctgctggcgatcgcgccgatctttggtcagacgccgtatttcatgagcgaagagttcagcctggtggattgctacctggcgccgctgttgtggcgtctgccgcagctgggcatcgaattgagcggtgccggctccaaagagctgaaaggctacatgacccgcgtcttcgaacgcgacgccttcctggcttccctgaccgaagccgagcgtgaaatgcgcctgcagacccggggctaa

SEQ ID NO: 425218 - DNA, 486 bp, Serratia marcescens
atgacgccgcgtcgcccgtatctgctgcgggcgttctacgactggctgctggataaccagctgacgccgcacctggtggtcgacgtgactcgcccggacgtgcaggtgccgatggagttcgcgcgtgacggccagatcgtgctgaatatcgcgccgcgggcggtaggcaacctggcgttgggtaacgaagacgtgcagttcaacgcgcgcttcggcggcgtgccgcgtcaggtttcggtgccgatggccgccgtgttggcgatctatgcgcgtgaaaacggtgccggcacgatgttcgaaccggaagccgcctacgacgagagcgaaggcgtgttcgaaggcctggacaatgagacgatcccttcggaaacgctgatgtccgtgatcgacggcgatcgcccggacaccgcggaagacaacggcccggacgacgaaccgccgcagccgccgcgcggtggccgcccggcgctgcgcgtggtgaaataa

SEQ ID NO: 425219 - DNA, 480 bp, Serratia marcescens
atgaaatgctccatttccctgttggccggcgcgctgctggccgtcagtttcagcgcttcagccatggcgctggattcgcaggaggttggttacaatatcgaagcgcgcggagcgcggccggtcgtggctcagttaggcaaggccgggcagttcaacgccgtggaaaacagcatccggctgggggacgacaattggattgccctggcgcccaagctggccggcggcggcaatgccggctttaccgccggcatcaaatcggccctctccgccgccctgatctacaatccggcggcggtgttgcaggcgctcaacaaaggcaacgatctgccgctcaatgacatttgcaccgcgccgccggaagtgcaaggcgacaccgccgtcaccagtttccgccagcgcgcaacccgcgccttgtccaccgtgcgcgtaggcgatctcagcgcgccgcgcgatgcctgcattgccgccttgaaaggctga

SEQ ID NO: 425220 - DNA, 1419 bp, Serratia marcescens
atgagccagaacgtttatcaatttatcgacctgcagcgtgttgatccgccaaagaaaccgctgaagatccgcaaaatcgagttcgtcgagatctacgaaccgttttcggaaacccaggccaaggcccaggctgaccgctgtctgtcctgcggcaacccgtattgcgagtggaagtgcccggtgcacaactacatcccgaactggctgaagctggccaacgaaggccgcatcatggaagcggcggacctggcgcatcagaccaacagcctgccggaagtgtgcggccgcgtgtgcccgcaggatcgcctgtgcgaaggctcctgcaccctgaacgacgagttcggcgcggtcaccatcggtaatatcgagcgctacatcagcgataaggccatcgaaatgggctggaagccggacatgtcacacgtgcagccgaccggcaagcgcgtggcgatcgtcggcgctggccccgccgggctggcctgcgccgacgtgctgacccgcaacggcgtcaaggcggtggtgtatgaccgtcatcctgagatcggcggcctgctgaccttcggtatcccggccttcaagctggaaaaggaagtgatggtcaaacgccgcggcattttcagcgagatgggcatcgagttccagctgaacaccgaagtgggcaaagacgtcagcatggagaccttgctgagcgagtacgatgcggtattcctcggcgtcggcacctatcagtcgatgcgcggcggcctggagaacgaggaagcgcagggcgtgtacgacgcgctgccgttcctgatcgccaacaccaagcagctgatggggtatgaagccgatcagcacgagccttacgtcagcatggaaggcaagcgggtggtggtgctgggcggcggcgataccgccatggactgcgtgcgcacctcggtgcgccagggcgcgacgcaggtcatctgcgcctaccgccgcgacgaagccaacatgcctggctccaagcgcgaagtgaagaacgcccgggaagaaggggtggacttccagttcaacctgcagccgctgagcatcgaactgaacagcgccggccgcgtggccggggtgaaaatggtgcgtacccagctgggcgcgccggatgccaacggccgtcaggcggcggagcaggtaccgggttccgaacacgtgatcgacgcggacgcggtggtgatggcgttcggcttccgcccgcaccgcatggactggctggcggcgcacgacgtgcagctcgataaacagggccgcatcctggcgccggaaggtagcgacaacgcgttccagaccagcaacccgaaaattttcgccggcggtgacgcggtgcgcggctccgacctggtggtgacagcgattgccgaaggccgcaaagcggcagatggcatcatgaactacctggaagtgtaa

SEQ ID NO: 425221 - DNA, 4461 bp, Serratia marcescens
atgttgtacgataaatcccaagagagggacaactgtggtttcggcctgatcgcccacatagaaggcgaacctagccacaaggtggtgcgcaccgccattcacgcgctggcccgcatgcagcaccgcggcgcgatcctggccgacggcaagaccggcgacggctgcggtctgttgctgcaaaaacccgatcgcttcttccgcatggtggcggaagagcgcggctggcgtttggccaagaactacgccgtcggcatgatgttcctcagccagaatgaagaggaagcgcgcctcagccgccgcatcgtggaagaagagctgcaaaacgaaacgctgtcgatcgtcggctggcgcgaagtgccgaccaacccggacgtgctgggtgaaatcgccctctcctccctgccgcgcatcgagcaaatcttcgttaacgccccggccggctggcgcccgcgcgatatggagcgccgcctgttcgtggcgcgccgccgcatcgagaaacgcgtgcaggacaacagcttctacgtctgcagcttctccaatctggtgacgatctataaaggcctgtgcatgcctgcggatctaccgcgcttctatctcgatctggcggacctgcgcctggaatcggccatttgcctgttccaccagcgcttctccaccaacaccgtgccgcgctggccgctggcgcagccgttccgctacctggcgcacaacggcgaaatcaacaccatcaccggcaaccgccaatgggcgcgtgcccgtacctacaaattccaaacgccgctgatcccggatctgcaggccgctgcgccgttcgtcaacgaaaccggctccgactccagttcgctggacaacatgctggagctgctgctggcgggtgggatggatctcatccgcgccatgcgcctgctggtgccgccggcctggcagaacaacccggacatggacggcgatctgcgcgccttcttcgacttcaactcgatgcacatggagccgtgggacggcccggccggcatcgtgatgtccgacggccgctacgccgcctgtaacctcgatcgcaacggcctgcgcccggcgcgctatgtgatcaccaaagacaagctgatcacctgcgcctccgaagtcggcatctgggattaccagccggatgaagtggtggaaaaaggccgcgtcggccccggcgagctgatggtgatcgacacccgcagcggccgcattctgcactcggcggaaaccgacaacgatctgaaaagccgccacccgtataaagagtggatggagaaaaacgtcaaacgtctggtgccgttcgaagatctgccggacgatcaggtcggcagccgcgaactcgacgacgcacagctcgaaacctaccagaaacagttcggctacagcagcgaagagctggatcaggtgatccgcgtgctgggcgagatcggccaggaagccaccggttcgatgggcgacgataccccgttcgccgtgctctccagccggccgcgcatcgtttacgactatttccgccagcagttcgcgcaggtcaccaacccgccgatcgatccgctgcgcgaagcgcacgtcatgtcgctggccaccagcatcggccgtgaaatgaacgtgttctgcgaagccgaaggccaggcgcaccgcctgagcttcaaatcgccgatcctgctgtactccgatttcaaacagctcaccacgctggaaggcgaatactatcgcgccgagacgctcgatctgaccttcgatccgcagcaacaggatctggagcagaccattcgcgccctgtgcgacgaagcggaacgcaaggtgcgcgaaggcgcggtgctgttggtgctgtccgaccgcgccatcgcgcccggccgcctgccggtcccggccccgatggccgttggcgccgtgcaaacccgcctggtggagaaaagcctgcgctgcgacgccaacctgatcgttgaaaccgccagcgcccgcgatccgcaccacttcgccgtgctgctcggcttcggcgcgaccgccatctacccgtacctggcctatgaaaccctggccaagctggtggacagccaggcgatcgacaagaaataccgcgacgtgatgctgaactaccgcaacggcatcaataaaggcctgtacaagatcatgtccaaaatgggcatctcgaccatcgcctcttaccgctgctccaagctgttcgaagcggtcggcctgcatcgcgatctggcggatctgtgcttccagggcgtggtcagccgcatcggcggcgccagcttcagcgacttccagcaggatctgcagaacctttccaagcgcgcctggctgaaacgcaaaccgctggagcaaggcggcctgctgaagttcgtgcacggcggcgaataccacgcctacaacccggacgtggtgaactcgctgcaaaaagcggtgcacagcggggaatatagcgactatcaggcctacgccaagctggtgaacgagcggccggtcgccatgctgcgcgatctgctggccatcacgccgaaaggcgaaccgatcccggtcgatcaggttgaaccggcggagtcgctgttcaaacgcttcgacaccgcggcgatgtcgatcggcgcactgagcccggaagcgcacgagtcgctggcgatcgccatgaacggcctcggcggcttctccaactccggcgaaggcggcgaagatccggcgcgctaccgcaccgacaaggtgtcgcgcatcaaacaggtggcctccggccgcttcggcgtgacgccggcctacctggtgaacgccgacgtgatccagattaaggtggcgcagggcgccaaaccgggcgaaggcggccagctgccgggcgacaaggtcactccgtacatcgccagactgcgttactcggtgccgggcgtaacgctgatctccccgccgccgcaccacgacatctactcaatcgaagatctggcacagctgatcttcgacctgaagcaggtcaacccgaaagcggtgatctcggtgaaactggtttccgagccgggcgtcggcaccatcgccaccggcgtggcgaaagcctatgccgatctgatcaccatcgccggttacgacggcggcaccggcgccagcccgctgtcctcggtgaaatacgccggctgtccgtgggagctgggcctggtggaaacccagcaggcgctggtggccaacggcctgcgccacaagatccgcctgcaggtggacggcggcctgaaaaccggcgtcgacatcgtcaaggcggcgatcctgggcgcggaaagcttcggcttcggcaccgggccgatggtggcgctgggctgcaaatacctgcgcatctgccacctcaacaactgcgcgaccggcgtcgcgactcaggacgacaagctgcgccgcgatcactaccacggcctgccggaacgcgtgacgaattacttccagtttatcgcgcgtgaaacccgcgagatcatggcacagctgggcgtgagccagctggtggatctgatcggccgcaccgagttcctgaccgagctggacggcatctccgccaagcagaacaagctggatctgtcgccgctgctgaaaaccgccacgccgcatccgggcaaagcggtgtactgcaccgaaagcagcaacccggcgttcgacaagggcctgctgaacaaagagctgctggcgcaggcgcagccgcatatcgaagcgaagcagggtaaaaccttctacttcgacattcgcaacaccgaccgctccgtgggcgccatgctgtccggcgcaatcgccgacgtgcacggcgatcagggcatggcggccgatccgatcaaggcgcacttctccggcaccgccgggcagagcttcggcgtctggaacgccggcggcgtcgagctgaccctgaccggcgacgccaacgactatgtcggcaaaggcatggccggcggcagcatcgcggtgcgtccgccgatcggctccgccttccgcagccatgaagccagcatcgtcggcaacacctgcctgtacggcgccaccggcggcaaactgttcgccgccggccgcgcgggcgaacgcttcgcggtgcgcaactccggcgccatcaccgtggtggaaggcatcggcgacaacggctgcgaatacatgaccggcggcatcgtctgcgtgctgggtaaaaccggcatcaacttcggcgccggcatgaccggcggcttcgcctacgtgctggacgaagacggcgagttccgcaagcgcgtgaacccggagctggtggaagtgctggatgtcgatcagttggcgatccatgaggagcacctgcgcggcctgatcaccgaacacgtgcaggcgaccggctcttcccgcgcggaagagatcctggccaactggccggaatgggcgccgaagttcgccctggtcaaaccgaagtccagcgatgtcaaagcgctgttgggtcaccgtagccgttccgcagccgagctgcgggtgcaggcgcagtaa

SEQ ID NO: 425222 - DNA, 933 bp, Serratia marcescens
atgcagttgccgcaattagtcaatatgtttggcgcggatctccagcgccgccatggcgaaaagatccataaactcacgctgcatggcggattcaactgccctaaccgcgacggcacgttggggcgcggcggctgtacgttttgcaacgtcgcttcattcgccgatgaggcgatgcagcggcaaagtatcgccgaacagctggcgcagcaggccgcgcgggtcgaccgggcgcggcgctatctggcctattttcaggcctataccagcacctatgcggaggtcgaactgctggcgtcgatgtatcggcaggcgttggcgcagagcgacatggtcggcctgtgcgtcggcactcgcccggactgcgtgccgcccgccgcattggatctgctgacggggtatcgcgaagagggttatgaagtgtggctggagctggggctgcagacggcgcacgataaaacgctcaaacgcatcaaccgcggccatgatttccgctgctatcagcagaccgcgcaacgggctcggcagcgcgggctgaaggtgtgctgccatctgatcgtcgggctgccgggagaaacccagcgcgatcatctgctcacgctgcagcgggtggtggagagcggcgtggatggcatcaagctgcatccgctgcacgtcgttaccggtagcaccctggcccgcgcgtggcgcgccgggcgcttgcccgaactggcgctggaagattacgccgtcagcgccggggagatgatccgccacacgccgggcgaggtggtgtatcaccgcctgtccgccagcgcccgtcggcctacgctgctggcgccgctgtggtgcgaaaaccgctggcgcggcatgcaggcggtgggtgcttatctgcagcaatacggcgggcagggcagcgcgctggatgccgccctgcattattcaccgacgttataa

SEQ ID NO: 425223 - DNA, 708 bp, Serratia marcescens
atgttaaccatctatcgcactaccctgttcgtcctgtctttgaccgttattttgcccctgaaggccgccactgccgtgaccggctatctgagtgcagagcaacggcaaatcgccacgctgttgccgccgccgccttcaacggatacgccgcagaatcgggcggatctgcaggcggtgctggccattcaggctaaccgcacggcggaacaaatcgccaaagccaagcgggacgaccacctggaagacgccgccttccccttcgcccgcgagatcttcggcccgacctttaccgtcgatcgccatccgctcaccgccgccctgttccgccgggtctatcaggactttgaacaaagcctgatgcccgccaaggccttctatggccgcccgcgcccctatgaggccgacagccgcgtgaaaccgctgctgccgccgccggaaggcgattcctaccctagcggacacgcgatggacagctacctgacggcactcctgttggcgcagatggtgccggaaaaacgcagcgcgctgtttgagcgggcggcaagcaatgcgcaaagccgggtgattgccggcgttcactacccgagcgatctggaaggcggcaagttggcggcgacggcgctcgccgcacgactgctggcgaatccgcagctgcaggccgatctgcagcgcgcccgcgtggaggtgcgcgccaacctgcagttataa

SEQ ID NO: 425224 - DNA, 2340 bp, Serratia marcescens
atgaagcaaatccgggtgttggcccagtactacgttgatttaatggtgaaactggggttggtgcgcttctcgctgctgctggcctcggcgctggtggtgctggcgatggtggtgcagatggcggtgaccatgctgctgcgcggcgaagtggaaagcatcgacgtggtgcgttcaatcttcttcggcctgttgatcaccccgtgggcggtctacttcctctcggtggtggtggagcagctggaggagtcgcgccaacggctggcgcggctggtggacaagctggaagagatgcgccaccgcgatctggagctcaatcagcagctcaaagacaatatcagccagctgaatcaggagatcgccgatcgcatcaaggcggaagaagagcgcctgcaggtgatggagaagctgacggaagagatggaacagcgcgagctggcgcagattgagctgggccagcagtcggcgctgctgcgttccttcctcgacgcctcgccggacctggtctactaccgcaacgaagacaaagagttctccggctgcaaccgcgcgatggagctgctgaccggcaagagcgagaagcagctgatcggcctgacgccgttcgacgtctacggccaggagatcgccgaaaaggtcattgagaccgacgagaaggtgttccgccacaacgtttcgctgacctacgaacaatggctggtgtatcccgacggccgcaaggcctgtttcgaactgcgcaaggtgccgttttacgaccgggtgggcaaacgccacgggctgatgggcttcggccgcgatattaccgagcgtaagcgctaccaggacgcgctggagaacgccagccgggagaagaccacctttatctccaccatcagccacgagctgcgtacgccgcttaacggcatcgtcggcctgagccgcatcctgctcgataccgagctgaacgacgagcagctgaaatacctgaagaccattcacgtcagcgccatcaccctcggcaatatcttcaacgacattatcgaaatggacaagctcgagcggcgcaaggtgcagctcgacaaccagccggtggacttcaccggtttcctggcggatctggagaatctctccggcctgctggcgcagccgaaagggctgcagttcatcatggagccgcagacgccgctgccgcagcagatcgtgaccgacggtacgcgcctgcggcagattttgtggaacctgatcggcaacgcggtgaaattcacccagcaggggcaaatcgtggtgcgcgtgcggcgcgaggcgcaggagaagctggtgttcgaggtggaagactcgggcatgggcatcccgcaggacgagcaggacaagatcttcgccatgtattaccaggtgaaagatcagcgcggcggccgcccggccaccggcaccggcatcgggctggcggtctccaagcgactggcgcagagcatgggcggcgacatcaccgtgcgcagcgaacaggggcacggttcttgcttcactctgaccatccaggcgccggcggtgcaggaagccgtcagcgcggcgccggaggaagaggagctgccgttgccggcgctgcacatcctgctggtggaggatatcgagctgaatgtgatcgtggcgcgctcggtgctggagaaactgggcaacagcgtcgaggtggcgatgaacggccacgacgcgctggcgatgttcgatccggacgagttcgatctggtgctgctggacattcaactgccggacatgaccgggctggacatcgctcgggcgctgcgtgagcgctatgccgggcaggcgctgccgccgctggttgcgctgaccgccaacgtgctgaaagacaaaaaagagtatctcgaggcgggtatggacgatgtgctgagcaagccgttgtcggtgccggcgttgacccaggtcatcaaacactattgggatcatcaaccttctcacacttcaaagaaaacggagcacaaggcgatgcagattaatgagtcgttactcgataccgcgatgctggagcagtacatggatttggttggcccgcagctgatccaccaaagcctggagatgttcgaacagatgatgccgggctacctggcggtactggactccaacatgacggcgcgcgatcagaaaggcatcaccgaggaagggcacaagatcaaaggcgccgctggttcggtcggtctgcgtcacctgcagcagctggcgcaacagattcaaacgccgacgctgccggcctggtgggataacgtgcaggattgggtggatgagttgaagcaagagtggcgcaacgacgtgcaggtactgcgggcttgggtagagaacgctgaaaaaaaatga

SEQ ID NO: 425225 - DNA, 654 bp, Serratia marcescens
atgaaaaaggtgggtgtcgtcctcagcggcagcggcgtttatgacggtacggagatccatgaagcggtgctgacgctgctggcgttggatcgtgccggcgcgcaggcggtgtgctttgcgcctgataaaccacaacgccatgttattaatcatttatctggtgaggagatggcggagtcgcgcaatgtcctgattgagtcggcgcgcattgcccgcggcgcggtgcagccgctggcgctggcggaggccgcgcagctggatgcgctgatcgtgcccggcggctttggcgccgccaagaacctcagcaatttcgccgaagccggcgcggaatgttgggtcgatgaagatttggcgcgcctgacgcgcgagatgcataaggccaacaaaccaattggcctgatgtgcatcgcgccggcgctgttgccgaaactgctggatcaacaagcgcggctgaccattggcaacgatccggacctgggagaagtgattgacgccatgggcggcgaaccggtgatttgcccggtggacgacatcgtggtggacagcgatcacaagatcgtgaccacgccggcctatatgctggcgccgtcgatcgcgcaggcggccctcggcatcgataagctggtggcgcgggtgctggaactggctgaatga

SEQ ID NO: 425226 - DNA, 732 bp, Serratia marcescens
atgagaaaatcgctcggcggatggcggcggctgcgcccgtggtattggctgaagcgcggcgtcatcgcgatcctcggcctgtgggcgttgggcattgtgctcttcgccttcctaccggtgccgttttccgccgtgatggtggagaggcaagtcagcgcctggctgagcggcgacttcggctacgtcgcccattcggactgggtgtcgatggacgacatctcgccgcaaatggcgctggcggtgatggcggcggaggatcagaagtttccagaccattggggcttcgacgtggcggccattgaaaaggcgctcagccacaacgagaagcgcccgacgcgtatccgcggcgcctccacgctgtcgcagcaaaccgccaagaacctgtttctgtgggatggccgcagctggctgcgcaaagggctggaggccggattgacgtcgggtatcgagctggtgtggaccaaacggcgcattctgacggtgtatctgaacatcgtcgagttcggcgacggggtattcggcgtggaggaggcttcacagcgctttttccataagccggctaaacgtctgagcgcggccgaagcggcgctgctggcggcggtattgccgaatccgcatcgtttcagggccgatgcgccgtccggctatgtggtgcagcgtcaacagtggatcatgcgccagatgcggcagctgggcggggaagcgtttttacgtgagaactcgctggattaa

SEQ ID NO: 425227 - DNA, 576 bp, Serratia marcescens
atgaagctaaaagccacatttgcagtgctgtccagcgccctgctgttgcaaggctgtatcgccggcgtcgtcgtcggcagtgcggccgtcgccaccaaaaccgccaccgacccgcgcagcgtagggacccaggtggatgacggcacgctggaagccagggtcgaaaacgccctgagcaaagaccagcagttgaagaaagatgcccgagtggtcgccaccgcctatcagggcaaggtgctgttgaccggccagtcgcctaacgccgatctcaccgcgcgcgccaagcagatcgccatgggcgtggaaggcacgagcgaagtgtataacgaaatccgtcagggcacgccggtcagcctcagcaccgcgtcctccgacacctggatcaccaccaaggtgcgttcgcagctgctcaccagcgatacggtgaaatcgtccaacgtgaaggtcactaccgaaaacggcgaagtgttcttgctgggcctggtcacgcagcaggaagggcagtcggcggcgcagatcgccagccaggtcagcggcgtgaagcacgtcaccaccgcctttacctatgtgaaataa

SEQ ID NO: 425228 - DNA, 591 bp, Serratia marcescens
gtgctggatagaattaaagtctgttttaccgaaagcatccaaacccagatcgcggcggcggaagcattgccggacgccatttcccgcgctgcgatgacgctggttcaatccttactcaacggcaacaaaatcctgtgctgcggcaacggcacctcggcggctaacgctcagcacttcgccgccagcatgatcaaccgttttgaaaccgagcgccccagcctgccggccatcgccctcaacgccgacaacgtggtgctgacggcgatcagcaacgatcggctgcacgacgaagtgtacgccaagcaggtgcgcgcgctcgggcacaccggcgacgtgctgctggcgatctccacccgcggcaacagccgtgatattgtgaaagcggtcgaggcggccgtcacgcgcgatatgaccatcgtcgcgctcaccggctacgacggcggcgagctggccgggctgctcggccagcaggacgtcgagatccgcatcccgtcgcaccgcagctcacgcattcaggaaatgcatatgctgaccgtaaactgcctgtgcgacctgatagacaacacgttattcccccaccaggacgattaa

SEQ ID NO: 425229 - DNA, 354 bp, Serratia marcescens
ttgaacccacgcgcctcaggggcgggctatgagttactggcccgccgtcacctggaacacgccgggctcaccttctgcgccgccaacgtcgcggtgcgcggtggtgagctcgacctcatcatgcgcgacggcgctacctgggtattcgtcgaagtgcgctaccgccgcaacgacgccttcggcggcgcggccgccagcgtcacctttcgcaaacaacggcggttgctgcacgccgccgccgtctggctggcggggcgcggagccagttttgacacatcatcttgccgttttgatgttttggccattaccggtagccagttagaatggatacccaacgccttcaatgcggattaa

SEQ ID NO: 425230 - DNA, 2037 bp, Serratia marcescens
atgctttcctcaacattcgttcgtaccaaagcagggcgttccaagcctgtccgacttaccgcagtcatcgcggccgcccttttcctggcaggctgtccaagtcgggccccgcaaacgccgcccgccaatatacaggacgaagcgagcgccagctccgattactacctgcagcagttgcagcaaagcagcgatgataacaaggctgactggcaattacttgctattcgcgccttgctgcgtgaaggaaaactgccgcaggccggcgaccagttgaatcagctgccgaaaaacctcagcggcgcgcagcagactgaacgccagttgctgaccgccgaactgcagatcgccaacaagagctacgtcagcgcccgcagcacgctgggccacctggacagcggttcgctgtcgccgaatcagaaggtgcgctactaccaggcgcagatcgccgccaatcagggcaaagcgtcgctgccgttgatccgcgcctatatcgctcaggagccgttgctgaccggcaaaccgcatcaggacaacctggatcagacctggcaggcgctgctgcagctgacgccgcaggagatgaacagcctggtgatcaacgccgacgagaacgtgctgcaaggctggctggatctgctgcgcgtctatcaggacaacaagcaggatcccgatctgctgaaggccggcatcaaagactggcagaaccgttatccgaagaacccggcggccaaaacgctgccggctcgcctgaaccaggtgctgaacttcacccaggcctccacctcgaaaatcgccctgctgctgccgttgaacggccaagcgaaagtgttcgccgacgccatccagcaaggcttcgaagcggcgaaaaacggcggttccatgccggcgccgcagcctcaagccgcgccaccggccagcgcaccggcccaaacggcgccggccaatcaggccgccacgggtgacatcaacgccaacggcgcggtcagcccttcggcgcaagagagccagcctgccgtgaccgccgcgcaacccgctgcgccgtccagcgcgccgataacgccgccgcaggccgccaacgcgcaggtcaaagtgtacgacaccaccagccagccgctggccgccttgctgagccaagcgcagcaggatggcgccaccctggtggtcgggccgctactgaaagagaacgtcgatcagctgtccgccagcaccactacgctgaacgtgctggcgctcaaccagccggaaacgccgaaggacaacctgaacatctgttacttcgccctgtcgccggaagatgaagcgcgcgacgccgctcgccacatctgggaacagcagaagcgtcaaccgctgctgctggtgccgcgcggcgccttcggcgatcgcgtcgccaaggcctttaaccaggaatggcagaagcaaggcgggcaaaccgtgctgcgtcaggacatcggctccgccggcgagctgcgccagatggtgaacagcggcggcatccgcatgaccggcacgccgatgtcgagcgccccggcgccgcagagcgtgaccatcgccgggctgaccattccggcgccgccgagcgacgtgcccgccgcaaccggcggcgtcgacgcggtgtatatcgtcgccacgcagtctcagctgacgctgatcaaaccgatgatcgacatggccaccagctcgcgcggcaagccggcgatgtacgccagctcgcgcagctaccaggcaggcgccggcccggacttccgtctggaaatggaaggcctgcagtttagcgatatcccgctgctggccggttcaaaccctcagctgttgcagcaggccagcgcgcgcttccgcaacgactactcgctggtgcgcctgtatgcgatggggatggatgcctggacattggccaaccactttgctgaaatgcgccagctgccgggcttccaggtttccggcaccaccggtatgctgagcgcgtcgccgaactgcgtgatcaaccgtaagctgccttggctgcaataccgtcagggcacggtcgttccggtctcttga

SEQ ID NO: 425231 - DNA, 864 bp, Serratia marcescens
atgaatcaacaccaacaatcagtcatttctgcatcaacgctgtatgtggtgcccaccccaatcggcaatctgggcgatatcacccaccgtgcgttagaggtactgaaaagcgttgatctgatcgcggcggaagacacgcgccataccggattgctgctgcaacacttcgcgatcaacgcgcgtctgttcgcgctgcatgatcacaacgaacagcaaaaggccgatcaattgctggcgaaactgcaggagggccagagcatcgcgctggtgtccgacgccggcacgccgctgatcaacgatcccggttatcacctggtgcgccgctgccgcgaggccggcattcgcgtggtgccgctgccgggcgcctgcgccgccaccaccgcgctgtgcgccgcgggcgtcgcttccgaccgtttctgctacgagggcttcctaccggcgaaaaccaaggggcgcaaggatacgctgatggcgctggcggaggaaccgcgcacgctgattttctacgagtccactcaccgcctgctggaaagcctgcaggacatggttaccgtctgggggccgcagcgctatgtggtgctggcgcgcgagctgaccaaaacctgggaatccatccacggcgcgccggtgggcgagctgctggcgtgggtgcaggaagacgaagtgcgccgccgcggcgagatggtgctgatcgtcgaaggccacaaggcgcaggaggatgcgctgccgcttgaggcgctgcgcacgctggcgctgctgcaaaaagagctgccgctgaaaaaggcggcggcgctggcggcggaaatccacggcgtgaagaaaaatgcgctgtataagcacgcgctggagcaacaacagccgtaa

SEQ ID NO: 425232 - DNA, 702 bp, Serratia marcescens
atgatcacatgcagaacagcacaacaatgcgggcaagctgactttggttggctgcaggctcgctacaccttttcctttggtcactacttcgatcccaaactgatgggctacgcgtcgctgcgggtgctgaatcaggaggtgctggcgccgggcgcgtcgttccagccgcgcacctatcccagcgtggatatcctgaacctgatcctgcagggcgaggcggaataccgcgacagcgacggcaacaccgcgcgcgccaaagccggtgaagcgctgctgctggccacccagccgagcctgagctacagcgaacagaacgtcagcagcgatacgccgctgactcgcctgcagctgtggctggacgcctgcccggaacgcaacaacgagcgggtgcagcgcctgacgctgccggcggcgggcaacctgctgctggcctcgccggacggcgcgcagggcagcctgcagctacgccagcaggtttggatccaccatctcgatctgcagccgggcgaagaacaaacgctgacgattaacgggccgcgcgcctatttgcagtcgattcacggcaccatcgccgccaccggcgagcgccacgaagaacaacgcctgacctgcggcgacggcgccttcgtgcgtgaggaaaatcgcctgacgatccgcgccgagacgccgctgcgcgcgctgctgattgacctgccggtgtaa

SEQ ID NO: 425233 - DNA, 897 bp, Serratia marcescens
atggccagagatcgggcgctcacgcttgaggcgctgagagtgatggacgcgatcgaccggcgcggcagcttcgccgcggccgccgacgaattgggccgggtgccgtcggcgctcagctacaccatgcaaaaattggaagaagaattggacgtggtgctgttcgaccgttcgggccaccgcaccaagttcaccaacgtggggcgcatgttgctggagcgcgggcgggtgctgctggaagcggccgacaagctgaccaccgacgccgaagcgctggcgcgcggttgggaaacccacctgaccatcgtcagcgaagcgctgtcgccgccgagcctgctgtttccgctggtggacaagctggcgctgaaggccaacacccaggtgtcgattttcaccgaggtgctggcgggcgcctgggaacggctggagcaggggcgcgccgacatcgtgatcgcgccggacatgcacttccgcgcgtcgtcggagatcaacacccgcaaactgtacaaggtgatgagcgtttatgtcgccgcgccggatcacccgatccatcaggagccggagccgttgtccgaggtgacccgcgtgaagtaccgcggcatcgcggtggcggataccgcccgcgagcgcccggtgttgaccgtacagctgctggataaacaacagcgcctgacggtgagcaccatcgaagacaaacgcctggcgctgctggccgggctgggggtggcgaccatgccctacccgatggtggagaaagatatcgaagccgggcggctgcgcgtggtggggccggaatacagccgcgaagccgatatcatcatggcctggcggcgcgacagcatgggggaggcgaaggcctggttcctgcgcgaaattccgcgcctgttcgcacagcgttaa

SEQ ID NO: 425234 - DNA, 987 bp, Serratia marcescens
atgggacaactcgtcgatggcgtttggcaagacatctggtatgacaccaaatctaccggcggccgtttcaaacgttcaaccgctcagtttcgcaattgggtgaccgccgacggtcagccgggcgaacacggcgcaggcggcttccaggccgaagcgggccgttatcacctgtacgtttctctcgcctgcccctgggcgcaccgcacgctgctgatgcgcaaactgaaagggctggagcagatcattccggtctcggtggtgcacccgctgatgctggaaaacggctggaccttcggccaggattttcctgaaaccaccggcgatccgctgtatcacgccgacttcctgtatcagatctacctgcaggccgatccgcactacagcgggcgcgtgaccgtgccggtgctgtgggataaacagcggcaaaccatcgtcagcaacgaatccgccgacatcatccgcatgttcaacagcgcgtttgacggcgtgggcgcccgcgcgggcgattactacccggccgagctgcgcggcaaaatcgatgagctgaacggttggatttacgatcaagtgaacaacggcgtgtacaaggccggtttcgccaccagccaggaagcgtatgacgaagcggtcagcggggtcttcagcgcgctcgaacgcctggagcagatcctggggcagcaccgctacctgaccggcgatcggctgaccgaagccgacctgcgcctgtggaccacgctggtgcgcttcgatccggtgtacgtcacccacttcaagtgcgacaaacaccgcatcagcgactacctgaacctgtacggtttcctgcgcgacatctaccagatgccgggcatcgccgagacggtcagcctgccgcacattcgcaaccactactaccgcagccacgccaccatcaacccgcacggcatcatttccatcgggccggcgcaggatctggacgagccgcacggccgcgaccagcgcttcggctaa

SEQ ID NO: 425235 - DNA, 396 bp, Serratia marcescens
atgaaaaaattagaagatacaggtttgttggttgctcgtattctgatgccaatcctgtttatcgtggcaggctacggcaaaatgggtgacgcttatgccggtacccaacagtacatgcaatcgatgggcgtgcctggcttcttgctgccactgaccatcctgctggaatttggcggcggtctggcgatcctgttcggcttcctgacccgcaccgtggcgctgttcactgccggtttcaccattctgaccgcgctgctgttccacactgactttgcggaaggcgtaaaccagctgatgttcatgaaaaacctgaccatcgccggcggcttcatcgtgttggcggtcgcaggccctggcggcttcagcatcgaccgtcttctgaacaagaaatggtaa

SEQ ID NO: 425236 - DNA, 288 bp, Serratia marcescens
atgagccgccgccgctatctggaatggaaaaaagagaggctgattcgccagatccagcaacagcgtctggatctggccgaacacaagtctttatggctggaaaagaccgaacgcatcgaccgcggctggcagacggtgtttggcctgcgccgctatctggtgctcggttccagcgtcatggcgctgtacggcatccgccaccccagcaagatgatccgctggtcgcgccgcgctttcggcgcctggagcgctatccgactgtttaaaaagaccttctccgccaagtaa

SEQ ID NO: 425237 - DNA, 402 bp, Serratia marcescens
atggctgaacaaccgcaagtgcgcgcgcagggccccgctaaaggggtcctggatatcggtcagcgcatcatcacgatcctggtcggcatggtggaaacccgtgtccggctggcggtggtcgagctggaagaggagaaagccaacctcattcagctgctgatcatggccggtatgacgctgctgtttaccgccttcggtttgatgagcctgctgatcctgatcttctgggccatcgatccggtctatcggctgatggcgctgggtgccacgaccggcgtgctgctgttcctggccgtggttggcaccatttggacgctggtcaaggcccgtcgcaccacgctgctcggcgccacgcgcaagcagctggaactcgatcgtgccgaactggagcgcgagccatga

SEQ ID NO: 425238 - DNA, 306 bp, Serratia marcescens
atggcacatgattcaaatgcagaaaacttacgcgctgaactgaagtccttagccgatacgctggaggaagtgctgaactcctctaccgacaagccgaaagccgagctggagaagctgcgctcgaaggcggaaggcgcgctgaaagagacccgcgctcgcctgagcgacgccggtgacaagctggcttcgcaaaccaagcagatcgccggccaggccgacgactatgtgcgcgacaacccgtggaccggcatcggcatcggcgcggcggtcggcgtggtgttgggcgtgctgctcgcgcgtcgttaa

SEQ ID NO: 425239 - DNA, 372 bp, Serratia marcescens
atgaaattacgccattcactgttactgctgttgccactctgcacgctgccggccctcgcttcggccgctgagggcggctgcgccgccaaagcgcaagacatccagcagcaaatcgactatgccacccagcacggcaacacccaccgcgtggacgggctgaaaaaagcactgagcgaagtgcagactcactgtaccgaagccggcctgcaggccgaacgccaggaaaatatcgcagagaaacagcgcaaggtcgacgaacgccggcaggagctgaaagaagcgcagcaaaccggcaagctggacaaggtcgccaagaagcagcagaagctggcggaagcgcaggctgagctgaaacgcgctcaggcggaataa

SEQ ID NO: 425240 - DNA, 375 bp, Serratia marcescens
gtgacagcaaagcgcccgcgctggcaatacgtcctgatgatcgcgctcgccctgctggcgttggcgacgctgttggtgccctgcatggtgcgcaccgagagcgagctgcgcattcgcgccagccagcaagggctgtcgctgcccgacggtttttacgtctaccagcgcctggatgagcgcggcatccgcatcaaaagcatcacgccggaaggcgatggcctggtcatccgtctggattcgccggagcagcagttgctggcgcgcgaagcgctgcaaaccatcctgccgcccggttaccacatcgcgttgagcgaatcccccgtgccgtcgcattgggtacgcgaatttgcgcgttccccactcaatctgggataa

SEQ ID NO: 425241 - DNA, 681 bp, Serratia marcescens
atggacatcattaaagaactgatacatgccctgtggcagcaggattttgagacgctggcgaacccttcgttggtgtggaccctctacatcctgctgttcatgattctgtttttggaaaacggcctgctgccggccgctttcctgccgggtgacagcctgctgatcctggtcggcgtgctgatcgccaaaggcaccatgggcttcccgctgaccatcgtcatactgaccgtcgccgccagcctgggatgctgggtcagctacatacagggccggtggctcggcaatacgcgaacggtgcaaggctggctttcgcacctgccggcccactaccatcaacgcgctcacaacctgttccaccgccacgggctttccgccctgctggtcggccgcttcctggccttcgtgcgcaccctgctgccgaccatcgccggcctgtccggcctgagcaacgcgcgcttccagttcttcaactggatgagcggcctgctgtgggtcttgatcctgacaacgctgggcttcgcgctgggcaaaaccccggtgttccgcaagtatgaagatcagctgatgttctgcctgatgatgttgccgctggtattgctggtggtcgggttgatcggctcgttgatcgtgctgtggcgcaagaaacgcgccagcggccagaacccggggaaaggggcgtga

SEQ ID NO: 425242 - DNA, 447 bp, Serratia marcescens
atgcgctggttgtttgccatgctgattgctgttttttgctggaccggttcggtctccggccaacagctatgcgtggcgtcacccaagccaacccccagcgcgctgagcagcctgccgctgctggcggagccggcgctttccccctatgatcatgtgtatcgggcaccggccgaagcgcgccgcaaagcccccggcaagttgccgctgctgctgcccagagcgcactctttccccggttcgctgctcgcatcctccctgccggcgccggtctataccttggccgcagagccgggctaccgaattcgcttcccccgccaggacactccggctcccaaccggcttgcccaggtcgactggatgctggactcctccaggcaacagagtcggcaggccggctggaaagaaagtaacatgcagtaccgtggcacgctgacttatcacctatga

SEQ ID NO: 425243 - DNA, 777 bp, Serratia marcescens
atggaattcactgaaaccagacgcctgtatcagcaactggccgccgagcttaaacaacgcatcgaaagcggccgctacccggtgggcgacaagctgccggccgagcgatacatcgccgaagagatgaatgtcagccgcaccgtggtgcgcgaagcgatcatcatgctggaagtggaaggctatgtggacgtgcgcaagggatccgggatccacgtggtgtccaaccagcaaaaacacctggtggtgccgggcgacagcatcgagttcgccaccgccggcccgtttgagctgctgcaggcgcgccagctgatcgaaagcaacatcgccgaattcgccgccacccaggtgaccaagcaagatatcgtgcagctgatggagatccaggagcacgcccgcaaagaggatcgctttcgcgactcgcagtgggatctgaagttccacgtgcaggtggcgctggccacccagaacaccgccatggccaccatcgtggaaaaaatgtgggtgcagcgggtcaacaacccttactggaagaaactgcacgaacatatcgacgaacgttcgatcgccagctggtgcgacgatcacgatcagatcctcaaggcgctgatgcgcaaagatccttacgccgccaaactggcgatgtggcaacacctggaaaacaccaagcagatgctgttcaacgccaccagcgacgatttcgaatacaatgccgaccgctatctgttcgccgagaatccggtggtgcatctggatggcgtgagccacgaaccgaaatag

SEQ ID NO: 425244 - DNA, 1299 bp, Serratia marcescens
atgcgtaaaattaaagggttacgctggtacatgatcgggctggtgaccgtcggcaccgtgctgggttacctgacccgcaacgccatcgccgtggcggcgccgacgctggaagatacgctgcacatcaccacccaacagtattcctacatcgtcgccgcctactccgcctgctacaccgtgatgcagccggtggcgggctatgtgctggacgtgctgggcaccaaggtcggctacgccatgttcgccattctgtgggcgctgttctgcatgggcaccgcgctggccaacagctggggcggcctggcgctggcgcgcggcgcggtcggcatggccgaggcggcgatgatccccgccgggctgaaggccagcagcgagtggtttccggccaaagagcgttcgatcgccgtcggctatttcaacgtcggttcgtcgatcggcggcatgatcgccccgccgctggtggtgtgggccatcgtggcgcacagctgggagatggcgttcatcatcaccggcgtgctgagcctgatctgggccatctgctggctgctgttctacaaacacccaaaagatcagaagaaactgagccaggaagaacgccgttacatcctcgaaggccaggaggcgcagcaccagacctctaacgccaaaaaaatgtccgcctggcagatcgtgcgcaaccgccagttctggggcatcgcgctgccgcgctttctggcggagccggcctggggcaccttcaacgcctggatcccgctgttcatgttcaaggcctacggttttaacctgaaagagatcgccatgttcgcctggatgccgatgctgttcgccgatctcggctgcatcgtcggcggctacctgccgccgctgttccagaagtatttcaaggtcaatctgatcgtctcgcgcaagctggtggtgacgatgggggcggtgttgatgatcggccccggcatgattggcctgttcaccagcccttacgcggctattgcgctgttgtgcgtcggcggcttcgcccatcaggcgctgtccggcgcgctgatcaccctctcttccgacgtgttcggccgcaatgaggtggcgaccgccaacggcctgaccggcatggcggcctggaccgccagcacgctgttcgcgctggtggtcggcgccctggcggacactctcggcttcagcccgctgttcgccgcgctgtcggtcttcgatattctcggcgccatcgtcatctggacggtgctgcaaaaccgcccggccgccgaagcgcaaccggccgcgctgcagccgtctccggcgcgcagctga

SEQ ID NO: 425245 - DNA, 1413 bp, Serratia marcescens
atggcgacgtttttgagcgaagatttcctgctggacagcgaatttgcccggcgtttgtatcatgactacgcggcggaccagccgattttcgattaccactgccatttgccgccgcagcagatcgcggagaatacccgcttcagcaacctgtacgatatctggctgcggggcgatcactataaatggcgggcgatgcgcaccaacggcgtggcggagcggctgtgcaccggcgatgcgggcgatcgcgagaaattcgacgcctgggccgccacggtgccgcacaccatcggcaatccgctctatcactggacgcatctggagctgcgtcggccgttcggcatcacaggaacgctgctgtcgccggccacggcggatgagatctggcagcgcggcaatgcgctgctggcgcaggatgagtttcgcgcgcgcggcatcatgcggcagatgaacgtgaaaatggtcggcaccaccgacgatccgatcgacgatctgcgccatcatcgggcgatcgccgacgatcacagcttcgatatcaaggtgttgccgagttggcggccggacaaggccttcgccatcgatgcgcctggcttcaacgactatctgcggcagctggaggcagcggcggacaccgccatcggccgcttcagcgcgctgtgcgacgcgctgtacaagcgcatggatcacttcgccgcccacggttgcaaggtggccgatcatgcgctggacgtggtggtgttcggcgaggccgacgaagcggcgctggatgcgatcctgctgcgccgcctgaacggcgagctgccgaccccggaacagagcgcccagttcaaaagcgcagtgctgctgttcctggccggcgaataccggcgccgcggctgggtgcagcagtaccatatcggcgcgctgcgcaataacaacagccgcatgctggccgccgtcgggccggatatcggtttcgactcgatcaacgatcggccgctggcggagccgctgtcgcggctgctggatgcccaggcgcggcagggcggcctgccgaaaaccattctctattgcctcaacccgcgcgataacgaagtgatcggcaccatgatcggcaatttccagggggaaggcacgccgggcaagatgcagttcggctctggctggtggttcaacgatcagaaggacggcatgcagcgccaaatgacgcagctggcgcagctcgggttgctgagccgcttcgtcggcatgctgaccgacagtcgcagcttcctgtcgtatacgcggcatgaatacttccgccgcattctttgccagatgatcggccgctgggtgacggacggcgaagcgccggcggatctcgcgctgctgggcgagatggtgaaaaacatctgtttcgacaacgccaaaaactatttcgccattgaactggcgtag

SEQ ID NO: 425246 - DNA, 1488 bp, Serratia marcescens
atgcaaagtacgataaagattcacgagcaggataacgtggcggtggcgctgcgcgatctggccgccggagaaacggttgagctggacggggagcgcgttcaactggcgcagccggtggcgcgcgggcacaagtttgcgctcggcccgatcgcaaagggcgaggacatcatcaaatatggccagccgatcggccacgcgctcgcggccatcgggcctggggaacatatccattcgcaaaacgccaaaaccaacctgagcgatctggacagctaccgttaccagccgcagttcccggcgttgccgccgcaggcggcggatcgcgaggtgcagctgtaccgccgggccggcggcgacgtggggatccgcaacgaactgtggatcgtgccgaccgtcggctgcgtcaacggcatcgcccgccagatccagcagcactttttgcagcaaacgcaggcggaggggatcgacggcgtgcatttgttcagccatccgttcggttgctcgcagctgggacaggatcatgccaacacccgcatcatgctgcaaaacatggcgcgccatcccaacgccggcgcggtgctggtgatcgggctggggtgcgagaacaatcaggtggaggcctttcgcgccacgctggggatggcggacgagcggcggctgcgctttatggtgtgccaacagcaggacgacgaggtggaggccgggctggggctgctgcacgagctgtaccgtgagatgcgccacgatcgccgcgagccgggccgcctgagcgagctgaagttcggccttgagtgcggcggttcggacggattgtcgggcattaccgccaacccgctgctgggacggttttccgattatgtgatcgccaatggcggcaccacggtgctgaccgaagtgccggagatgttcggcgccgagcgcatcctgatgagccgctgccgcgatggggagactttcgacaaaaccgtcgacatgatcaacgatttcaaacgctatttcatcgcccatcaacagccgatttatgagaacccgtcgccgggcaacaaggccggcggcattaccacgctggaagagaaatcgctcggctgcacccaaaaagcgggcctgagccaggtggtggacgtgctgaaatacggcgagcggctgcgcgtgccggggttgaatctgctcagcgcgccgggcaacgacgcggtggcgaccagcgcgctggccggcgccggctgccatatggtgctgttcagcaccgggcgcggcacgccgtacggcggctttgtgccgacggtgaagctggccaccaacagcgaactggcggcgaagaaaccgcactggatcgatttcgacgccggcggtctggttcacggcgtggcgatggagaccttgctcagccgcttcgtcgatctgatcgtcgagatcgccaacggccgtccggcgcgcaatgaagccaacgatttccgcgagctggcgatctttaaaagcggagtgacgctgtaa

SEQ ID NO: 425247 - DNA, 1236 bp, Serratia marcescens
atgcaaaaattactacaaaagatcacgcagggtagcctggtcaaacaaatcatggtcggcctggtggccggcattctgttggcgctggtttcgccggcggcggcctccgccgttggcctgctcggttccctgttcgtcggcgcgctgaaggcggtggcgccggtgctggtgctggtgctggtgatggcctcgatcgccaaccataaacaggggcagaagaccaacattcgcccgatcctgttcctctacctgttgggcaccttcgccgcggcgctggtggcggtcgtcgtcagctttatcttcccttccacgctggcgctgagcaccggcgcgacggacattaccccgccgggcggcattgtggaggtgatgaagggcctgttgatgagcgtggtggccaacccgttccatgcgctgattaacgccaactacatcggtattctggcgtgggccgtcgggctggggctggcgctgcgccacgcttccgaaaccaccaaggggctgatcaacgacatgtcccatgcggtcacgctggtggtgcgcgcggtgatccgctgtgcgccgctcggcatcttcggcctggtggcttccacgctggcggaaaccggtttcggcgcgctgtggggctacgcccaattgctgatggtgttaatcggctgcatgctgctggtggcgctggtgctcaacccgctgatcgtttactggaagatccgccgcaatccgtatccgctggtgttcgcctgcctgcgcgagagcggcgtaaccgccttcttcacccgcagctcggccgccaacatcccggtgaacatggagctgtgcaagaagctgaacctgaatgaggacacctactcggtttccatcccgttgggcgcaaccatcaatatggccggcgcggcgatcaccatcaccgtactgacgctggcggcggtaaacacgctgggcatcgcggtggacgttccgaccgccctgctgctgagcgtggtggccgccctctgcgcctgcggcgcgtccggcgtggccggcggctcgctgctgctgatcccgctggcgtgcaacatgttcggcattccgaacgacgtggcgatgcaggtggtagcggtcggctttatcatcggcgtgctgcaggattcggcggaaacggccctcaactcctccaccgacgtgctgttcaccgccgcggcctgccaggcggaagaccagcggctggcgaacgaagacccgctgaaggtgcgttaa

SEQ ID NO: 425248 - DNA, 975 bp, Serratia marcescens
atgatgaattccgttggcacaccgtggttatggggcagcttcgccgccgtcatagtcgtgatgctcgcaatcgatctcctgttgcagggccgtaaaggcgcgcacaccatgtctatgaagcaggccgccagctggtcgctggtgtgggtcagcctctccctgctgttcaatttcggtttctggtactacctgaatgaaaccgccgggcgcgccgtcgccgatacccaggcgttggccttcctcaccggctacctgatcgaaaaagcgctggcggtggataacgtgttcgtctggctgatgctgttcagctacttcgccgtgccggccaacctgcagcggcgggtgctgatctacggcgtgctgggggcgatcgtgctgcgtactatcatgatcttcgccggcagctggctggtcagccaattccagtggctgctgtatctgttcggcgccttcctgctgttcaccggtatcaaaatggcgctggcgaaggaagatgactcggcgatcggcgacaagccgctggtgaaatggctgcgcagccacctgcgcatgaccgacaacctggaaggcgagcgcttcttcgtgcgccgcaacggcatcctgttcgccaccccgctggtgctggtgctgatcctggtagagctgagcgacgtgatcttcgcggtggacagcattccggcgatcttcgccgtgaccactgacccgttcatcgtcctgacctccaacctgttcgccatcatgggcctgcgcgccatgtacttcctgctggccaacgtggcggagcgtttctcgatgctgaaatacggcctgtcggtgatcctggtgtttatcggcatcaagatgctgattatcgacttcttccacatcccgatcggcgtatcgctgggcgtggtggcgggcatcctgacgctcaccttgctgattaacgcctgggtcaatcgccgcaacgatcgcctggcgaataaacaaccataa

SEQ ID NO: 425249 - DNA, 732 bp, Serratia marcescens
atgaaaccgctgctcgtgatgcaaaccggcgacgcgccgcaggccattcgtcaggaattggccaactttgatagcatgttcctgcaacagggcaacatcgacgccgaacgcgcgcacatcgtgcatctgcccgccggcgaccggccgttgccgccggccgcctattgcggcgtggtcatcaccggctcgccggcgatggtgaccgaacggctgccgtggagcgaggaggccgccgaatggctgcgtcaggcgatggcgatcaaactgccgctgttcggcgtctgctacggccaccaactgttggcctacgcgctcggcggcgaagtgggctatcacccgcagggcatggaggtcggcacgctggagatcgaactgctgcccgccgcggccgacgatcggcggctcaccctgctgccgccgcgattcaaggccaatcttatccactcgcagagcgtgctgacgccgcccgccggcgcgcagacgctggcgcgttcgcagcaggacgcgcaccagatcctgcgctatggtgatcacgccctgaccacccagttccacccggaattcaacggcgcggtaatgagccagtatctgcagtggctcggcgaactgcatcctgagcagcaagcccgctatcaacagcaacaacaacaggttagcgacacgccgttcagccgcctgctgctgcagggattcgtcgtcagcctcggcgcgcaaaaagcgatggccggctaa

SEQ ID NO: 425250 - DNA, 981 bp, Serratia marcescens
atgattcgctttgccgtcgtcggcaccaactggattacggaacgttttatcgatgccgcccatgaaagcggcaaactcaagctgagcgccgtgtattcacgctcgctggaacaggcgcaggcgtttggcgccaactatcaggtcacgcagtttttcgactcgctcgaggcgatggcgcagtctgacgccatagacgcggtgtatatcgccagccccaactccctgcactgcccgcaatcgctgctgttcctgcgccataaaaagcacgtgatctgcgaaaaaccgctggcctccaaccagcgtgaagcggaacagctggtcgcctgcgcgcgggaaaaccaggtggtgctgttcgaggcgttcaaaagcgcctatctgccgaatttcctggcgctgcagcaggcattgcctaaagtcggccggctgcgcaaagcctttatcaactattgccaatactcttcgcgctatccgcgctatctcgccggcgagaatcccaatacctttaacccccagttctccaacggctcgatcatggacatcggctactactgcctggccagcgcggtggcgctgttcggcccgccgcagtcggtgctggccagcgccacgctgctggataccggcgtggacgcccacggcaccgtctgcctgaactacggcgatttcgacgtcacgctttcccattccaaagtcagcgactcggcgatccccagcgagatccaaggggaagaaggcacgctgattatcgacaagatttccgagtgccagcgcgtggcgctgacgccgcgcggcggcaaccggcaggacctgagccagactcagcacatcaacaccatgctgtatgaagcgctggccttcgccgagcgggttgagcagcgtcaggtggaacatccggggctggaaaattctctgatcgtcgcccgcctgctgaccgacatccgccgccagaccggcgtcgtcttccccgccgacggagaatga

SEQ ID NO: 425251 - DNA, 507 bp, Serratia marcescens
atgtctgaattgacctacctgcaaggctacccaacgcatctgcaaagtcaggtgcagcaactaatccatcagaatcggctgggagacgtgctgctgcagcgctatccgcaggtgcacggctgcaccaccgacaagtcgctgtatcagtttaccgtcgatctgaaaaaccagtatctgcgcaacgcccagccgctgagcaaggtggcctacgacagcaagatccacgtcatgaagcacgcgcttggcctgcacaccgccatctcgcgcgtgcagggcggcaaactgaaggccaaggcggaaatccgcgtggcgacggtgttcaaggtcgcgcccgaaccctttttgcgcatgatcgtggtgcatgagctggcgcacctgaaagagaaagatcacaacaaggcgttctacagcctgtgctgccatatggaaccggattaccaccagctggagttcgatacccggctgtatctgacgcacctttcgctgtttggcgagctgtatgcatag

SEQ ID NO: 425252 - DNA, 1140 bp, Serratia marcescens
atgagccaactcgatctgggaacacagcaacttgagctggagcgttatccccaacaagaagaatccacccaactgcaggcgtgggaagcggcggacgaatatctgctgcaacagcttgaaaacgtagatatcggcgggcgcccggtgctgattttcaacgataacttcggcaccctggcctgtgcgttgcacgcgcatcgcccttacagcgtcagcgactcctacatgagccagctggcgacgcgccacaacctcaagctcaacgggctggatcccgagcaggttacgctgctggacagcctggccgagctgccggcggcgccggcggtggtgttgattcgcgtgccaaaggcgctggcgctgctggagcagcagctgcgcgcgctgcgccacgtcgtgaccgaagacacgctgatcgtcgccggcgccaaggcgcgcgacgtgcacacctcgacgatgcagctgtttgaaaaggtgctgggcccgacgcgcaccagcctggcgtggaagaaagcgcgcctgatcttctgccaggcggcggacatcgtcccgccggcagcggcggaaaccaccgactggccgctggacggcaccgattggcttatccataaccacgccaacgtcttctcgcgcggcagcctggatatcggcgcgcgcctgtttatggagcatctgccgcgcggcctgaacggccatatcgtcgatctgggctgcggcaacggcgtgattggcctgacggcgctggcgcaaaacccggaagcgcaggtgaccttcgtcgatgaatcttacatggcggtggcctccagcgaactgaacgtggagcacaacctgccgcaagagctggatcgctgccagtttgaggtgaacaacgcgctggcgggcatcgagcgcgaaagcgtgcaggcggtgctgtgcaacccgccgttccaccagcagcacgccattaccgatcacaccgcctggcagatgttctgcgacgccaagcgctgtctgcaggtgggcggcgaattgcgcatcgtcggcaaccgccacctcgactatcaccagaagctcaagcgtctgttcggcaactgcacgctggtggcctcgaacaagaagttcgtgatcttgagagcggtgaaatccggcgcgcgtcgctga

SEQ ID NO: 425253 - DNA, 2022 bp, Serratia marcescens
atgagcaattaccctcacctgctggcgccgctggatctcggcttcactaccctgaaaaaccgggtgctgatgggatcgatgcataccggcctggaagagctgcccgacggcccgcagcgcctggccgcgttctatgccgagcgcgccgccgccggcgtggcgctgatcgtcaccggcggcatcgccccgaacgaacagggcgtggtttttcgcggcggttcgatcctcaacagcgaggagcaattgcctcaccaccgcccggtgaccgaagccgtccaccgggcgggcggcaaaattgcgctgcagatcctgcacaccggccgctacagctatcaacccaagctggtcgccccttccgccctgcaggcgccgatcaacccgtttacgccgagcgcgctcagcgaagcggagatcgagcagaccatcgccgacttcgcccgctgcgcggcgctggcgcagcaggccggctacgacggcgtggaagtgatgggatccgaaggctatctgatcaaccaattcttgacgacgcgcaccaatcagcgcgacgaccaatggggcggcagcttcaccaaccgcatgcgcttcgccgtcgagaccgtcagggcggtgcgccaggcggtgggcgcggagttcattctgatctaccggctgtcgatgctcgatctggtggaagacggctccagctggcaggagatcgagcagctggcgctggcggttgaacaggcgggcgccacgatcatcaataccggcatcggctggcacgaagcgcgtattccgactatcgccaccatggtgccgcgcgccgggttcagttgggtgacccgcaagctgatgggcaaggtcggcatcccgctgatcaccaccaaccgcatcaacgatccggcggtggccgagcaggtgctggcggacggctgcgccgacatggtgtcgatggcgcgtccgttcctcgccgacgccgcctttgtgcagaaagccgccgaggggcgcgccgacgagatcaatacctgcatcggctgcaaccaggcctgtctcgaccagatttttgaaggcaagctgacttcctgcctggtcaacccgcgcgcctgccgcgaaaccgaaatgccgctgacaatggcggagaaaccgaaaaaactggcggtgatcggcgccggccccgccgggctggccttcgccaccaccgccgccagccgaggccatcaggtgacgctgttcgacgccgccgagcagatcggcggccagttcaacatcgccaagcagatccccggcaaggaagaattccatgaaaccctgcgttacttccgccgccagctggcgctgcgcgaagtgacggtcaggctgggcgtcaaggtcgaggcggcagatttaagcgaattcgacgaagtgatcctcgcctgcggcatcgtgccgcgcaccccggacatccccggcatcggccacgccaaggtgctgagctatctggacgtgctgcgcgataaaaaaccggtcggccagcgggtggcgatcgtcggcgccggcggcatcggcttcgacaccgccgagtacctcagccagcacggcgtgtccagcagcctggatcaggcggaattcaaccgcgaatggggcatcgacggccgccttgagcagcgcggcgggctggcggcgcaagggccacaggcaccgcgcgccgcgcggcaaatctacctgttgcagcgcaaaaccagcaaagtgggtgaaggcctggggaaaaccaccggttggatccatcgcgccagcctggcgatgcgcggcgtgaaaatgctcaacagcgtcagctatcggctgatcgacgacgaagggctgcacatcacccgcgccgagcaggacagctgtctgccggtggacacggtggtcatctgcgccgggcaggaaccgcgccgcgagctgcagcagccgctgctggcgatggggaaaaccgtgcatctgatcggcggcgccgacgtggccgccgagctggacgcacgccgcgcgatcgatcaggggacgcggctggcgatggcgctgtaa

SEQ ID NO: 425254 - DNA, 1620 bp, Serratia marcescens
atggctcattttgcgcagtccccttatttcgttttacatcaactgacctgccaatttgctgacggcgaaacgctgttcggcccgctggatctcgctttcgatcggcagcgctgcggcctggtaggacgtaacggcgtcggcaaaacccagttgctgcgcctgatcgccgggcgggatcggccgggcaacgggcacgtcgaatcccatgccgcattggcttacgttgcgcagcagccggagatcgcggccgacaccacgctggcgcagctgctgggctacggcgaggtgttcgccgcgctggcgcgcatcgagcaggggcggccgttggcggacgacatcgatcgtctggaagggcgctgggatctcaacgatcgcctgcaaagcgccttcgccgccgccgggctgccggccttcgatccgttgcgatccgcatgcgatttgagcggcggcgaacggatgcgcgcggcgctgtgcggcgcttttctgggggaggcggattatctgctgctggacgaaccgaccaaccacctcgacagcgccgggcgcgcctggctgtatcagcagctggagcggtggcagggcgggctgctgatcgccagccatgaccggcaactgctggggcgtatggagcgcatcgtcgaactgacgcccggcgcgctgcgcagctacggcggcaactacgacgactaccgccgccagcgcgacacggagcagcaggcggcgcgcgccgatctggagcatgcgcgcgaggagcgccgccgtactcgcgcgcgtcagcagaaagagcacgacatgagccagcggcgctcggcgcaaacgctgcgcgtcgtcgatacgctgaatatcgcctctttcgagcgggtggcctacaaatcggcggcgaaggagagcctcggcacgctgcgcaaacagcatcaggaccagcgcgacagcctcgatgcggcggtgcgcgaggcctatcagcgggtggaagaggaacagccggtgttgctggcgctgccgggcagcgaagtgagcgcgaacaagcaggtgctggtgctcgaacagctgcagctgccgttcgtcagcgcgccgccgctggatctgcggatcgacggtccgatgcgcgtggcgttgaccggccctaacggctgcggcaagtccaccttgctgaagaccgttctcggccagctggcgccgcttgccggccattgtcattgtccgttgtcgacggcctatctcgatcaaaccctgtcgcagctcgacccgagcctgtcggtgatggagcatctcgggctgcaggattcgccgctggtggaaggcgcgttgcgcacccggctggcgcagttgcagcttggcgccgatcgcatcgcgctgccgctgggttcgctgagcggtggcgaacggctgaaggcggcgctggcctgcgcactgtggcggcggcaaccggcgcagctgctgttgctggacgaaccgaccaaccacctggatctggcgtcgtcgctggcgatcgaaaccgccctggcggatttccccggcgcgatgctggtggtgtcgcacgacgaagacttcctgcaggcgctgcggccgacgcaccgtctgcatcggcaggcggacggttggcggcttcaggcctggtaa

SEQ ID NO: 425255 - DNA, 1491 bp, Serratia marcescens
ttgcgctcattgagtggtgatctgttgctgcagcgcctcggcgagcagcccgatgacaagctgcacaagcggctttacaacgcgatccgcaccagtattctcgacggcagcctgccgccctccagccgcttgcccgcctcgcgcgatctggcgcaggagctcagcctgtctcgaaacaccgtattaaccgtttatgaacaactgttggcggaaggctacgtatcggcgcgcgccggcagcggcaccttcgtcgccgacacggtgccggacagctgcctctccaccggcggcgcgccggccgacggcagcgggcaaccgcggcgcgtcgagctgtccgagcgcggcaccacgctgctgcaccacgccagcgccagccccaaacagtggggggcgttcattcccggcgtgcccgacgtcaacgcctttccccatcagctgttcagcaagatccaggcgcgcctcagccgccgcccggcgccgcagcggctgacctacagcaatcaaggcggcagcccggagctgcagcatgcgttggtggagtatttacgggtggcgcgctcggtgcgttgttcgccggaacagatcctgatcaccgaaggcatccatcaggcgatcgatctggtgacgcgcatgctatgcaatccgggggatgacgcctggatcgaagagccgggctattgggggatccgcaatatcctgcgcatcaatgcgctgaacatctgcccgctggcggtggacgaagccgggctggtgccgccggagcagccgaccacctcgccccgcctgattttcgtcactccgtcgcaccagtatccgctcggctcggtgatgagcctggcgcgccgccaacggctgctggcgctggcgcgcaacgccggcggctggatcgtcgaggacgattacgacagtgaattccgcttttccggccaaccgatcccggcgctgcaagggctggaggccgacgcgccggtgatttatatcggcaccttcagcaaaacgctctatccggcgctgcgcctcggctatgtggtgttgccgccgccgctggtgcaggcgctgaaaaccgcccacgccgagctgtaccgcggcgggcacctgctgatccagagcgcgctggcggagtttattcaggcaggacactacaccgcacatatccgccgcatgcggctactgtatgcccggcggcgtgccttcctgaccggattgatcgaacagcacctcggcaaacaggcgctcagcgaattcaacagcaacgccggattgcacctgatcctcaacctgccggacgaggccgacgacgtggcgatcgccgccgccgccggcgcgcagggggtgctggtgcggccgctgtcgcgctactacatgctgcccaaccgccggcgcggcctgctgatggggtttgcctgcgtgccggaagagcagatggccgcggccttcacccagctgctggcgtgcatcaacgcgcccgaaatgaaaaaggcggctccttag

SEQ ID NO: 425256 - DNA, 1266 bp, Serratia marcescens
atgaaaaacgcagaattgaaccaacgccgtcaggacgccaccccgcgcggagtgggcgtgatgtgtggtttttacgccgagcgcgcagagaacgccacgctgtgggatgtggaaggcaaagaagtgatcgatttcgcctcggggatcgccgtgctgaacaccggccaccgccacccgaaggtgatcgccgcgattgaaaagcagctgcaggccttcacccacaccgcctatcagatcgttccttacgaaagctatgtctcgctggcggagcgcatcaaccagcgcgcgccgatcgccggcccgtgtaaaaccgccttcttcaccaccggcgcggaggcggtggaaaacgcggtgaagatcgcccgcgcttacaccggccgtccgggcttgatcaccttcggcggcggtttccacggccgcacctatatgaccatggcgctgaccggcaaagtggcgccttacaaactgggcttcgggccgttccccggctcggtgttccacggccagtacccgaatgcgctgtacggcgtgaccaccgaagacgcgatgaacagcctggatcgcttgtttaaagcggatatcgatcccaagcaggtggcggcgatcgtgctggagccggtgcagggcgaaggcggtttcaacgtggcgccggccgactttatgcaggcgttgcgcgcgctgtgcgaccagcacggcattcttctcattgccgacgaagtacagaccggcttcgcccgtaccggcaagctgttcgccatggagcactacagcgttaaaccggatctgatcaccatggcgaaaagcctggcgggcggcatgccactgtcggcggtggcgggccgcgccgaggtgatggacgcgccggcgccgggcgggctgggcggcacctatgccggcaacccgctggcggtggccgcggcgcacgcggtgctggacgtgatcgacgaagagcagctgtgccagcgcgcccagcgtttggggcagcacctggtggaagtgctgcagcaggcgcgcaaaaccagcccggcgatcgcggatgtgcgggcgcaaggttcgatggtggcggtggagttcaacgatccggccaccggtaaaccatctgccgatatcacccgtcaggttcagcagaaggcgatggaagaagggctgctgctgctgagctgcggcgtgaacggcaacgtgatccgcttcctgtatccgctgaccatcccggacgatcagttcaccaaggcgatgggcatcctgtcccgcgcgctggctcactaa

SEQ ID NO: 425257 - DNA, 1455 bp, Serratia marcescens
atgaaattgaacaatcccgagctgttgcgcagccagtgtctgatcaacggtgaatggtgcgatgccctgagcggcaagcgcgaagcggtgatcaacccggccaccggcgccgaactggccagcattccgctggtcagcgaagaggaaacccagcaggcgatcgcggcggcgcagcgggcgcaaaacgactggaaacagctgaccgccaagcagcgttctgtgctgctgttggcctgggccgacaaggtgctggccgcacaggaagatctggcgcagctgatgaccgccgagcagggcaaatcgctggcggaagcgcgcggcgaagtggcctacgccgcgtcgttcatcacctggttcgccgaagaagccaagcgggtggacggcgcggtattgcaggcgccgcaggcttcgcagcgcctggtggtggtgaagcagccgatcggcgtgtgcgcggccatcaccccgtggaacttcccggcggcgatgatcacccgcaaggtggcgccggcgctggcggcgggctgcaccatcatcgtcaaacctgccgagcaaacgccgttgaccgcgctggcgctggccaagctggcgcaggacgccggcattcccgccggcgtgttgcagatggtgactggggaagcggcgcaggtgggcaaggtgctgtgcgacagcccgatggtgcgcaagctgagctttaccggttcgaccgaggtcggccgcatcctgatggcgcagtgcgcgccgagcatcaagaagctgtcgctggagctgggcggcaatgcgccggtcatcgtgttcgacgacgccaatctggacgcggcggtggcgggcatcatggcctccaagttccgcaacagcggccagacctgcgtctgtgccaaccgcatctacgtgcaggacggcatctacgagcggctggcggagaaactggtggcggcggtcgagcagttgaaagtcggcgacggcagccaggaaggcaccacccaggggccgctgatcgacagcgatgcggtagcgaaggtgcagagccatatcgacgacgcgctgatcaaaggggcgcagatcgccaccggcggccagccgcacgcgctgggcggcaccttcttccagccgacggtggtgaccggcgtgacgcagaaaatgcgcttcgccaaagaagagaccttcgggccggtggcgccgctgttccgcttccatgacgaggcggaagccatcgccatggccaacgacaccgaattcggcctggccgcctacctgttcacgcagaacgccgcgcgccagtggcgcgtgccggaagcgctggagtacggcatggtcggcatcaacaccgggctgatttccaacgaagtggcgccgttcggcggcgtgaaacagtcagggctcgggcgtgaaggatcgcgctacgggatagaagaatatctggagctgaaatacctgtgtatcgatgtgagccgttga

SEQ ID NO: 425258 - DNA, 1149 bp, Serratia marcescens
atgatcgtcggcaccaatatcggcgccggggtgctctccatcgcctacgcctccagcaaggccggtttcctgccgctgctgttctggctggtgctggtggggagcctgaccaccatcaccatgctgtacgtcgccgaatccacgctgcgcacccgcgcgcatctgcagctgagcgggctggcgaagcgctacgtcggcggcctgggcgcctggttgatgttcgcttcggtgtgcgtcaacagcgtcggggcgcttaccgcctacatgaccggcagcggcaagctgctgcaatcgctgttcggcatctcgccggcgctgggcagcctgctgttcttcgtgcccgccgccggcgtgctgtatctcggtttgaaagcgatcggccgcggcgagaagttcatcagcatcggcatggtggtgatgctgaccgcactggtggcggcgacgctgctgaaagacaccacccagatgcgcaacttgctggacggcgactggcgctatatggtgccggtgttcaacgtggtggtgttctgcttctcggcgcagtacatcgtgccggaaatggcgcgcggctttgccgacaagccggagcagttgccgaaggcgatcatcgtcggcatggcggtgaccttcattttgctggcggcggtgccgatgtcggtgatcgcgctcagcgggctggatggcatctccgacgtggccaccatatcctggggccaggcgctggggcagtgggcgttcttctccgccaacatcttcgcgctgtgcgcgatgctgacttcctactggggattgggcggcagtttcctgaccaatattttcgacaagttccggctgggcaacgacgagctgccgctgcgccgcttcggcgtgctgctgctggtggtggtgccgccgttcgcgctggcctacagcgggctggtgtcgttcgtcaacgcgctctacttcgccggggtgttcagcggggtgatcctgtcgatcatgccgatgctgatcctgcgcggcgcacgcaaacatggcgaccagacgccgcgctggcagtgcaactggatcacgcacccgctgctgcagatcagcattgtgctgctgtacctggccagcgcggtgtacgccatcgcttcattgttaggctatctgccctctggatggtga

SEQ ID NO: 425259 - DNA, 636 bp, Serratia marcescens
atgtctcaaccgatcaccgagctttacaccgacagtgaatttttcagcccgtacgccatgtccgcctttgtcgtgctgacggaaaaaggcattccgttcaccgtgaagacggtggatctggcgaaggaagagaataaagaggcggcctacgcggcgctgtcgctcacccgccgggtgccgacgctggccatcggcgagtttcagctctcagagtcttcggcgatcaccgaatacctggaggacatccatccggcccacgccgtgtacccgcgcgacgtgaagctgcgcgccaaggcgcgcgagattcaagcctggctgcgcagcgatctgctgccgatccgcgccgagcgctcgaccgaagtggtgttcaacaacggcaagttcccgccgctgtccgaagccgcacagggggccgcacgcaagctgatcgacgccgtcgaaaagctgttgagccatgggcaggataatctgttcagggagtggtgcatcgccgacaccgatctggcgctgatgctcaaccggctggtgatgcacggcgatcctgtgccggagcgcctgcgccactatgcgcacaagcagtggcagcgcccgtcggtgcaggcctggctggcgctgtcggcaaagcggcgcgcctga

SEQ ID NO: 425260 - DNA, 717 bp, Serratia marcescens
atgaagacgcagtggatagaacgagtgaaagtgggatgcgcgcgcctgtggccgcacccgctggcggtgggcaagcgagagatgctgatttccagcgtcggcgccggtttggggctgatgctcgccggctggatcagccactttattttgggcgaggtgaacctgtggtttatcgcgccgatgggtgcctcggcggtgttgctgttcggcgtgcccaacagcccgctggcgcagccctggtcgatcgtcggcggcaatgcggtggcggcgacggtgggcgtcagcgccggcctgctgatccccgatccggggctggcctgcggcatagcggcggcggtggccatcggcctgatgttcaagctgcgctgcctgcatccgccgggtggcgcggtggcgctcaccgctatcctcggcggccccggcattcatcagatgggctaccacttcgtgctgtacccggtgctgctgaactcggtgctgctggcggcgctggccattctgttcaataacctggccgggcgacgctacccgcacgcgctggcgccggcggaggctaagccggccaatctgccgatcgatgccgtgtccatcacccgcggcgatctgcacgaggcgctgatggagggggatctgttcgatatcgacgaggacgatctgcaggagcttctgctgcgcgccgagcagctggcgcatcagcggcaaagcaagaccgcctga

SEQ ID NO: 425261 - DNA, 441 bp, Serratia marcescens
atgatcgtcatctgcgaccacgacaacctcgacgcctggctggcgttgcgcaccgcgctgtggccgtccggctcgcctgaagagcaccgcgcggaaatgcgcgagatattggcttcgccgcaccacaccgcgtttatggcgcgggggctggacggcactttcgttgcctttgccgaggtcgcgctgcgctacgattacgtcaacggctgcgaatcgtcgccggtggcgtttttggaaggaatttataccgccgaacgcgctcgccgccagggctgggccgcacgcctgatcgcgcaggtgcaggagtgggcgaagcagcaggggtgcagcgagctggcgtcggataccgatatcgccaatctggactcccagcgcctgcatgcggcgctgggctttgccgaaacggagcgggtggtgttttaccgcaaaacgctgggctga

SEQ ID NO: 425262 - DNA, 489 bp, Serratia marcescens
atggaacttctggcgcccaatctgcgggtggtgttttgcggcatcaaccccggtctttcttccgcccatcagggctatcctttcgccaacggcagcaatcgcttctggaaggtgatccatcaggccggctttaccgagagccagctggcgccggagcagtggcagcagctgaaggacaacggctgcggcattaccgcgctggtggcgcgcccgacggtggcggcgagcgagctgtcgcgcgacgagttgcgcagcggcggtgaggcgctgcaagagaagatcctgcgctatcagccgcgcgcgctggcgattttgggcaagcaggcgttcaccaccgccttcggggtgaaaaatgcgccctggggcaagcagacgctgacgttgggggaaactgaggtgtgggtattgcccaaccccagcggattgaaccgcgccaccctggagcagctcaccgccagctatcgcgagctgttcctggcgctgcaatga

SEQ ID NO: 425263 - DNA, 1842 bp, Serratia marcescens
atggagcaaaacccgcagtcacagctgaagctacttgtcacccgtggtaaggagcaaggctatctgacctatgctgaggtcaatgaccatctgccggaagatatcgtcgactccgatcagatcgaagacatcatccagatgattaacgacatgggcatccaggtgatggaagaagcaccggacgccgatgacctgctgctcgccgaaaactcgaacagcacggacgaagatgcggaagaagccgccgcacaggttctgtccagcgtggaatccgaaatcggccgcaccaccgacccggtgcgcatgtacatgcgcgaaatgggtaccgtcgaactgctgacgcgcgaaggcgaaatcgacatcgccaagcgcatcgaagacggcatcaaccaggtgcagtgctcggttgccgaatacccggaagccattacctacctgcttgaacagtacgatcgcgtcgaagcgggcgaagcgcgcctgtccgacctgatcaccggcttcgtcgatcctaacgcggaagaggacatcgccccaaccgccacccacatcggttccgaactgtcgagcgaagagcaagacgacgacgaagaagatgaggatgccgaagaggacgacaccgaagacgacaacagcatcgatcctgagctggcgcgtcagaagttcgccgagctgcgcgatcagtatgaagcgacgcgcttggtgatcaagaagaatggccgcagccacgccagcgccgcggacgagatcctgaagctgtctgaagtgttcaagcagttccgcctggtgccgaagcagttcgacttcctggtcaacagcatgcgcaccatgatggatcgcgttcgcacccaggaacgcatcatcatgaagctgtgcgttgaacagtgcaaaatgccgaagaaaaacttcgtcaccttgttcgccggcaacgaaaccagcgattcctggttcgaagccgcgctggcgatggccaagccatggtcggaaaagctgaaagacgtggctgaagacgtgcagcgcagcctgcagaaactgcgtcagatcgaagaagaaaccggcctgaccattgagcaggtcaaagacatcaaccgtcgcatgtcgatcggtgaagcgaaagcccgccgcgcgaagaaagagatggttgaggccaacctgcgtctggttatttctatcgccaagaaatacaccaaccgcggcctgcagttcctggatctgattcaggaaggcaacatcggcctgatgaaagcggtagacaagttcgaataccgccgcggctacaagttctcgacgtacgccacctggtggatccgtcaggctatcacccgctccatcgccgaccaggcgcgcaccatccgtattccggtgcatatgattgagaccatcaacaagctcaaccgtatttcgcgccagatgctgcaagagatgggccgcgagccgacgccggaagagctggccgagcgcatgctgatgccggaagacaagatccgcaaggtgctgaagatcgccaaagagccaatctcgatggagacgccgatcggcgacgacgaagattcgcatctgggcgacttcatcgaggataccaccctcgagctgccgctggattccgcgacctcggaaagcctgcgttccgccacccacgacgtgctggccggcctgaccgcgcgcgaagcgaaagtgctgcgcatgcgtttcggtatcgacatgaacaccgaccacacgctggaagaggtaggcaagcagtttgacgttacccgtgagcgtatccgtcagatcgaagccaaggcgctgcgcaagctgcgtcacccaagccgctccgaagtgctgcgcagcttcctggacgactaa

SEQ ID NO: 425264 - DNA, 1749 bp, Serratia marcescens
atggctggacgaattccgcgcgtatttatcaatgacttgctggctcgcaccgacatcgtcgatctgatcgacgcccgcgtgaagctcaagaagcaaggcaagaactaccacgcgtgctgtccgttccaccacgaaaagacgccttcatttaccgttaatggcgaaaagcagttttatcactgttttgggtgtggtgcgcacggcaacgccgtcgactttttgatgaattacgaccggcttgagtttgtcgaaaccatcgaagagctggcgaccatgcacgggctggaagtgccttacgaagcgggcaccgggccaacccagatcgaacgccatcagcgccagagcctgtaccaactgatggagcagctcagcgcgttctatcaacagtcactgcagcagtcctccggggcaccggcgcgcagctatttgcagcagcgcggattaagtgacgacgttattcgccatttcgccatcggcttcgcgccggcgggatgggacaacgccctgaagcgtttcggccgcgacgccgactcgcgccgcgcattgaacgatgccggcatgctggtgactaacgatcaggggcgttcgtacgaccgtttccgcgaacgggtgatgttccccatccgcgacaagcgcgggcgcgtgatcgccttcggcggccgcgtattgggtgacggtatgccgaagtacctgaactcgccggaaaccgaagttttccataagggccgccagctgtatggcctgtatgaagcacagcagaaccaccctaccctccagcggctgctggtggtggaagggtatatggacgtggtggcgttggcgcaattcggcatcgattatgccgtcgcctcgctcggaacctcgacgacggctgaacacattcagctgctgttccgcgccaccgacaacgtcgtctgctgttacgacggcgaccgcgccggccgcgaggcggcatggcgggcgctggaaaccgcgctgccgtacctgaacgacgggcgccagctgcggttcatgtttttgcccgacggcgaagatccggacaccctggtgcgcaaggaaggcaaagaagccttcgaacagcgaatggagcaggcgcagccgctgtccactttcctgttcgaaagcctgctgccgcaggtggatctgagcagcccggacgggcgcgccaagctgagcacgctggcgctgccgctgattactcaggtgccgggcgaaacgttgcgcttgtacctgcgccaggagctcggcaacaagctggggctgctggacgatagccagctcgacaagctgatgcccaagcaggcggaaaatgcgaatccttatcaggcgccccagctaaaacgcacaaccatgcgtatactgatagggttactggtgcaaaatccgcagttggctacacttatcccttcgcttgaagggctggagcagaccaaacaggcgggattgccgctgttcgtcgaactggtgcagacctgtttggcgcagccgggcctgacgaccgggcaattgctggagctgtatcgcgacaacaaattcagccagcagcttgaaaccttggcgacctggaaccatatgatcgttgaggatatggtcgagcagacctttttggatacgttggccagcctgtacgactcggtgctcgagcaacggctggaaacgctgatcgcccaggccagaacgcgcggcctgagcccggaggaacgtgaagaagtccgttccctcaaccaggttttagcgaagaaaaactga

SEQ ID NO: 425265 - DNA, 1014 bp, Serratia marcescens
atgcgagtactgggtatagaaacgtcctgcgatgaaaccggaattgcagtgtatgacgatcaaaccggtttgttggccaaccaattatacagccaggtgaagctgcacgccgactacggcggcgtggtgccggaactggcctcccgcgatcacgtgcgcaaaaccgtgccgctgattcaggcggcgctgaaagaggccaacctgaccccggccgacatcgacggcgtggcctacaccgccgggccgggtctggtgggggcgctgctggtcggcgcgaccgtcgggcgcgcgctggcgttcgcctggaacgtgccggcggtgccggtgcaccatatggaaggccacctgctggcaccgatgctggaagacaatccgccggcattcccgttcgtcgcgctgctggtctccggcggccacacccagctgatcagcgtcaccggcatcggtgagtatgagctgctgggcgagtcgatcgacgacgcggccggcgaagcgttcgacaagaccgccaagctgctcggcctggattatcccggcgggccgatgctgtcgaagatggcgcagcagggcacggcggggcgcttcaccttcccgcggccgatgaccgatcgtccggggctggacttcagtttctccgggctgaaaaccttcgccgccaacaccatccgctccaacggcaacgatgatcagacgcgtgccgacatcgcccgcgccttcgaggatgcggtggtggatacgctggcgatcaaatgcaaacgcgcgctggagcagaccggcttcaagcgcctggtgatggccggcggcgtaagcgccaaccgcacgctgcgcaccaaactggcggagatgatgcataaacgcggtggggaagtgttctatgcccgcccggaattttgcaccgacaacggtgcgatgatcgcctatgccggcatggtgcgcctgaagagcggcgccaacccggagctgagcgtttcggtgcggccgcgctggccgctggcggaattgcctgcggtataa

SEQ ID NO: 425266 - DNA, 639 bp, Serratia marcescens
atgagtgctaccgcgcttggcatgattatcttcgcgtatctgtgcggctcgatttccagtgcgatcctggtttgccggatcgccaggctgccggatccgcgtgaacatggctcaggaaaccccggggcgaccaacgtcctgcgcatcggcggccggctggcggcggcggcggtgctggtgttcgatattctgaaagggatgctgccggtctggctggcctacaaactcgatgtgccgccgctgtacctcggcctgacggcgatcgccgcctgtctggggcacatctatccggtgttcttccacttccgcggcggtaaaggcgtggcgacggcatttggcgccatcgcgcctatcggctgggatctgaccggcctgatgaccggtacctggctgttgacggtgctgctcagcggttactcttcgctcggcgccatcgtcagcgcgctgatcgccccgttctacgtctggtggttcaaaccgcagttcaccttcccggtagcgatgctctcctgcctgatcctgatgcggcatcacgacaatattcagcgcctgtggcgcggccaggaaggcaagatctggggcaagctgcgcaagaagaaaaacgacgcggataacggcgaccagccgaaagacgaatag

SEQ ID NO: 425267 - DNA, 360 bp, Serratia marcescens
atggatatcgtatttattgaagagcttaccgtaattaccaccattggcgtttatgagtgggaacagggcattcgtcagaagctggtgttcgatatcgaaatgggctgggataaccggccggccgccgccagcgacgacgtaactgactgtctgagctatgccgacgtcagcgacgccgtgatccggcacgttgaatcgaaccggttcgcgctggtggaacgcgtggcggaggaaatatccgaaattttgcttcagcgcttcaattccccgtgggtccgtattaaggtcagcaaaccgggcgctgtagcacatgccaatcgggtcggcgtgatcattgagcgcggcactcgtcccgcatga

SEQ ID NO: 425268 - DNA, 825 bp, Serratia marcescens
atgacggacatgcattcactgtttattgcgtttgttcttggggttgtcgagggattaaccgaatttctgccggtgtcttccaccgggcatatgatcattgttggcgagtggctgggctttaccggcgacaaagccaagacctttgaagtcatcatccaactggggtcgatcctggcggtggtagtgatgttctggcgccggttgttcggcctgatcggcatccatttcggcggcaagccggtggagcacgagggcaaaacccacggccggctgaagctggggcacatcctgttggggatgatcccggcggtggtgctggggttgatattccacgatgtcattaaatcgctgttcgcgccgaaaaacgtgatgtacgcgttggtggtcggcggcctgctgctgttgacggcggaatggctgaagccgaagaagccgcgtgcggaagggctggatgacatcacctaccggcaggcgtttttgatcggttgcttccagtgcctggcgctgtggccgggcttctcccgttcgggagcgaccatcgccggtggcatgctggtgggcgtaaaccgctatgcggcgtccgaattttcattcatcctggcggtgccgatgatgataggcgccagcggcctggatctgtacaagagcctgcacttcctgacctggggcgacctgccgatgttcgccgtcggtttcgttactgccttcgtggtggcgctgattgcgatcaagaccttcctgtcgctgattaaacgcatctcgttcgtgccgttcgccatctaccgctttatcgtggcggccgtggtttacatggtgttcctgtaa

SEQ ID NO: 425269 - DNA, 1245 bp, Serratia marcescens
gtgcagatttatctggtcggcggcgccgttcgcgacagcctgctcaatattccggtggtcgatcatgattgggtggtggtgggcgccacgccggcagagctgctggcgttgggctaccagcaggtcggtaaagattttccggtgttcctcaaccccgactcccacgaggagtacgcgctggcgcgcaccgagcgcaaatccggccaggggtacaccggttttacctgctatgccgcgccggacgtgacgctggaagaagatctgctgcggcgcgatctgaccatcaacgccatcgcccgctccgccgaaggagagctgattgatccttacggcggcgtggccgatctgcaggcgcgcgtgctgcgccacgtttccgacgcgttcggcgaagatccgctgcgcgtactgcgcgtggcgcgattcaatgcccgcttcgcccatctgggttttcgcatcgccgacgaaacgctcgccctgatgcgccagatggcgcacagcggtgaactggccgcgctgaccgccgaacgcgtctggaaggaaaccgaaaaggcgctgcaaagccagagcccgcaggtctattttcaggtgctgcgcgattgcggtgcgctggcggtgctgttcccggaaattgacgcgctgttcggcgtgccggctcccgccaagtggcacccggagatcgacaccggcgtacacacgctgatggcgttggcgattgccgcccgcctcacgccggaggtggacgtgcgcttcgccaccctgtgccacgatctcggcaaagggttgacgccgaaagagttctggccgcatcaccacggccacggcccggcgggcgtgcggctagtcgaagcgctgtgccagcggctgcgggtgcccaacccggtacgggatttgagcaagctggtggccgagtaccatgatttgatccacaccgtgaacaagctgcgtccggagaccctgttgaagctgttcgacgccatcgacgtctggcgcaaaccgcaacggctggagcagatgatcctgaccagcgaagcggatgcacgcggccgcaccggctttgaggagaatccttatccgcagggcgactatctgcgccaggcgtatcaggtggcgaacgcggtatctattaaagaagtggtagccagcgggctgcagggcaccgcgatccgcgacgagctcaaacgccgtcgccagcaggcgctggccgactggaagctcaatcaaaccatcctcaacgatcaggcataa

SEQ ID NO: 425270 - DNA, 621 bp, Serratia marcescens
atgcagaaattacgcctgatttgccttgccgcgctgagcttcagcatcacttgggccgcacatgccgaagataaacgctatatctccgatgagttaagcacttacgtccatagcggcccaggtaatcagtaccgtattgtcggcactctcaacgccggtgaagaagtgaccctgctgagtgtcaacgacagcaccaactacggccagatccgcgatccgaaaggccgtaccacctggatcccgctcgaccagctcagccagacgccaagcctgcgcacccgcgtgcccgagctggaacagcaggtgaaaaccctgaccgacaagctggccaacatcgacaacacctggaaccagcgtacctcggaaatgcaggaaaaagtcgcgggcagcgacagcaccatcagcagcctgcagaaggaaaaccaggatctgaaaaaccagctggtggtcgcgcagaagaaggtcaacgccgttaacctgcagctcgacgacaagcagcgcaccattatcctgcagtggttcatgtacggcggcggcgtcgccggcgtcggtttgctgctgggcctgctgttgccgcacctgatcccgcgccgcaagaacaacaaccgctggatgaactga

SEQ ID NO: 425271 - DNA, 1308 bp, Serratia marcescens
atgaccgttgaaattgaactgaaattcatcgccgcgccgcaagcggtggccgctctgccacactggctcgccgcctggccgcatcagcattccgcgccgcaaaaactgaccaacatctacttcgaaacggccgacaacttcctgcgccgtcatgacatggggctgcgcattcgcggtttcgacgatcgctatgagatgaccatcaaaaccgccggtaaagtggtgggcggcctgcaccagcgcccggaatacaatgtcgctatcgccgagccgcagctggcgttggcgcagtttcctgccgacatttggccgcaggattgcgatatcgcagcgttgcagcaggcgttgcaaccgctgttccgtaccgatttcgtgcgtgagaagtgggtggttacttacggccaaagcgagatagagattggcctggatcagggcgaggtgcgcgccggtgatctcagcgaagccttgagcgagatcgagctggagctgctgaaaggcaataccgccgatctgctggcgttggccggtgagctggcggcgcacgacgggctgcgtcagggcagcctgagcaaggcggcgcgcggttaccacctggcgcagggcaatccgccgcgtgaggtgcgcccgctgcgggtgctgaagccggcggcgaaggcgaccgtcgaacaggggatgatcgccgccttcgagctggcgctgagccactggcagtaccatgaagagctgtggctgcgcggcgactcgcaggcgcgcgcttcggtgattgaggtggtcggcacgatccgccaggcgctggtgatcttcggcggcctggtgccgcgcaaggccagcgccgatctgcgcgcccgcctgaccgagctcgagccgctgttggcggacaaagccgcgcaaccagagagcctgtgctacagcgcggcctacctgcaatgtaagttggcgctcacatcatggctggtgagcggcgcctggcggccgtttattgacgccaaagggcaggccaagctggacggttctttcaaacgcttcagcgacatcatgctggggcgcagcggcgcggagttgaaagaggccttcagccgtacgctgaacgaagatgaatatcaggaacaattgccgcgcctgacgcgtcagatttcggcgctggtcctgctgtcgggcgcttaccccgacgagcagaccgggccttacatcgaggcctggcgcgaactgcaggcggcgctgagcgagcgccgtcagggctggtatgaagccagccgcaaacaggccttatcgcatgcgccattctggttaaacggcgcgcttcgttaa

SEQ ID NO: 425272 - DNA, 2793 bp, Serratia marcescens
gtgcagcgttttcaggaagttcacggcgcggacagcgcctttagcgagcaggagcagtgggtgctggcgtcgagcgacttcgtcagcgacgcactgctcgcccagccggcctggctggcgacgctgcgcgaacagccgccggcgcccggtgagtggcaacactatgccgcctggctgcaggacgagctggaagaggtgcgcgatgaggcgcaactgatgcgcacgctgcgtctgtttcgccgtgaaacgctggtgcgcattgcctgggcgcaggcgcaggggctgtgttcgaccgaagaaacgctactgcagctgagcgggctggcggagacgctgatcgtcagcgcgcgcgactggctgtaccaaacctgttgccgcgagtggggcacgccgtgcaacgccgccggtgaaccgcagccgctgctgatcctcggcatgggcaagctgggcggcggcgagctgaatttctcgtcggatatcgatctgatcttcgcctacccggaaaacggccagacccagggcgggcggcgcgagctggacaatgcccagttcttcacccgcctgggccagcggctgatcaaggcgctggatcagcagaccatcgacggcttcgtctatcgcgtcgacatgcggctgcggccgttcggcgacagcggcccattggtgatgagcttcgcggcgctggaagactactatcaggagcaggggcgcgactgggagcgctatgcgatggtgaaggcgcgcctgatgggcggcgcggaagacgcctacagccaggagctgcgcaaaacgctgcggccgttcgtgttccgccgctatatcgatttcagcgtcatccagtctttgcgcaacatgaagggcatgatcgcccgtgaagtgcggcggcgcggcctgaaggacaacatcaagctgggcgccggcggcattcgcgaaatcgaattcatcacccaggtatttcagctgatccgcggcggccgtgagccggcgctgcaggggcgttcgctgctgccgacgctgcaggcggtgggtgagctggggctgctggaggccgagcaggtgcgggcgctgagcgccgcctacctgttcctgcggcggctggagaatctgctgcaggcgatcggcgatcagcaaacccagacgctgccgcaggatgcgctcgaccaggcgcggctggcctacggcatggggctggcggattggccggcgctgatggcgacgctggaggtgcacatgcaggcggtgcgggcggtgttcgacgatctgatcggcgacgatagcccggatatcggcgaagatcccgactaccagcactatcacagcctgtggcaggacgcgctggaggaaaacgagctggcgccgctgacgccgcacctggacgaagaggggcgccgacagatgctgcgcaccatcgccgatttccgccatgatgtcgacaagcgcaccatcggcccgcgcggccgcgacgtgctcgatcagctgatgccgcgcctgctggcggaggtgtgcccgcgccaggacgcgccgaccgcgctggtgcggctggcgcagctgctgctcagcatcgtcacccgcaccacttacctcgagctgctggtggagtaccacgcggcgctcagccatctgatccgtctgtgcgccgcttcgccgatggttgccaaccagctgtcgcgctacccgctgttgctggacgaactgctggatccggccacgctgtatcagccggtggcgctggacgcctaccgcagcgagctgcgccagtacctgctgcgggtgccggaagacgacgaagagcaaaagctggaggcgctgcgccagttcaaacaggcgcagcagctgcgcatcgccgcagcggatatcgccggcgcgctgccggtgatgaaagtgagcgaccacctgacttatctggcggaggcgatcatcgacgcggtggtgcaacaggcctggagcgacatggtggcgcgctacggccagccgacccatctgcaggagcgcgaagggcgcggctttgcggtgatcggctacggcaagctgggcggctgggagctgggttacagttccgatctcgatctggtgttcctgctggattgcccgccggaggtgatgaccgacggcgatcgctgcatcgacggccgccagttctacctgcggctggcgcagcgggtgatgcatctgttcagcacccgcacttcctccggcattctgtatgaggtggacgcgcgtctgcggccttccggcgccgcggggatgctggtcagcaccgtcgaggcgttcgccgattaccagcaaaacgaagcctggacctgggagcatcaggctctggtgcgcgcgcgcatcgtgcacggcgacccggcgctgcaccagcagttcgacgcgattcggcgcgaaatcctgtgcaaaacgcgtgatgcggagaccctgaagcgcgaagtgcgcgagatgcgcgaaaagatgcgcaaccatctcggcaacaagcagcgcgatctgtttgatatcaaaaccgatgagggcggcattaccgacatcgaatttatcgcccaatatctggtcttacgctatgcgccgggtgaaccgcggctgacgcgttggtcggacaacgtgcgcatcttcgagctgatggccaattacgacatcatgccggaagaggaagcgcgcgcgctgacccaggcctatgtcaccatgcgcgacgagatccaccatctggcgctgcaggagcattccggcaaggtcggcagcgagctgttcaccgccgagcgcgagcaggtgcgcgccagctgggccaaatggctggattaa

SEQ ID NO: 425273 - DNA, 1431 bp, Serratia marcescens
atgaaagttacgctgcctgattttcgccgcgccggtgtgctggtggtcggtgacgtcatgttggatcgctattggtatgggccgaccagccgcatttcaccggaagccccggtgccggtggtcaaggtcgacaccatcgaagagcgtcccggcggcgcggctaacgtggcgatgaacatcgcttcgctgggcgccaattcccgcctggtgggcctgaccggcatcgacgatgcggcgcgggcgctgagcgccaagctgaatgaagtcaacgtgcgctgcgacttcgtctcggtgccgacccatccgaccatcaccaagctgcgcgtgctgtcgcgcaaccagcaactgatccgtctcgacttcgaagaaggcttctccaacgtcgatccgcagccgatgcttgagcgcattcagcaggcgctgccgcagatcggcgcgctggtgctgtccgattacgccaagggcgcgctcagccaggtgcagggcatgatccaactggcgcgcgccgccaaggtgccggtgctgatcgatccaaaaggctctgacttcgaacgctatcgcggcgcgacgctgctgacgccgaacctgtccgagttcgaagcggtggtgggccactgcaaggatgaggcggaactggtggaacgcggcatgaagctggtggcggattttgagctgtcggcgctgttggtcacccgttccgaacacggcatgacgctgctgcagccaggcgttgagccgctgcacctgccgacccaggcgcaggaagtgttcgatgtgaccggcgcgggcgacaccgtgatcggcgtattggccgcttcgctggccgccggcaattcgctggaagagtcctgcttcctggccaacgccgccgccggcgtggtggtgggcaagctcggtacctctaccgtgtcgccaatcgagctggaaaacgcggtgcgcggccgggccgaaaccggctttggcgtgatgaccgaagcgcagttgaaaaccgctgttgctcaggcgcgtcagcgcggcgagaaagtggtgatgaccaacggcattttcgacattttgcacgccggccacgtctcctatctggccaacgcccgcaagctgggcgaccgcctgatcgtggcggtgaacagcgacgcctcgaccaaacgcctgaaaggggaaaaacgcccggtcaacgcgctggagaatcgcatgatcgtgctgggcgcgctggaagcggtggattgggtggtgccgttcgaagaggacacgccgcagcgcttgatcgccgacattctgccggatctgctggtgaaaggcggcgattacaaaccggaagagattgccggcagtgcggaagtgtgggccaacggcggcgatgtcaaagtgttgaactttgaagacgggctgtcgaccaccaacatcatcaaagcgatcaaagacgggcgcggctaa

SEQ ID NO: 425274 - DNA, 276 bp, Serratia marcescens
atgattgacccgaaaaaaatcgaacaaatcgcacgccaggttcatgagtccatgcctaaaggcgttcgtgaattcggggaagacgttgagaaaaaaatccgtcaggtcctgcagtcgcagctgacccgcctggatttggttaaccgcgaagagttcgacgtgcagactcaggtgctgttgcgcacccgcgagaagctggcgctgttggaacagcgcctggccgagctggaaagcaagctgagcgcggcgccggcagccaagcaggaagacgaataa

SEQ ID NO: 425275 - DNA, 654 bp, Serratia marcescens
atgaatcagacgctactttcagacttcggcacgccgacagaacgcgttgaacgcgcgatcgacgcactgcgcaacgggcgcggcgtaatggtgctcgatgatgaaaaccgtgaaaacgaaggtgacatgatcttcgccgcggaaaccatgaccgttgagcagatggcgctgaccattcgccacggtagcggtatcgtgtgcctgtgcatcaccgaagaacgccgtcagcagcttgagctgccgatgatggtgaccaacaactccagccaattccagaccgccttcaccgtgaccatcgaagcggcgcagggcgtgaccaccggggtttccgcttccgatcgcctgaccaccatccgtgcggcggtggcagacagcgccaagccgagcgacctgaaccgtccgggccacgtgttcccgctgcgcgcgcagccgggcggcgtgctgagccgtcgcggccacaccgaagcgaccatcgatctggtttccatggccggtttcaaacctgccggcgtgctgtgtgagctgaccaacgacgatggcagcatggcgcacgcgccggaagtgatcgccttcgccaaacagcacgacatggtggtgctgaccatcgaagatctggtggcctaccgccaggcgcacgagaaaaaggccagctga

SEQ ID NO: 425276 - DNA, 1533 bp, Serratia marcescens
atgttcagactcacactggcaacccgcctggcgctttccatatccttgctcaccggctggacggccaccgccggcgcggcggacaacgcgcagctgacgcagcgcgaagatccttacttccttcaggcgcaagctcagctgcaacagcggctgaaacagacgccaaacaccaaccgcgccaaaaacgtcattctggtggtcggcgacggcatggggttttccaccgtgaccgccgcccgcatttttgaagggcagcagcgcggcgtggacggcgaatccaacgtgctggcctgggaggccttcccctatctggcggcggccaaaacctactccgccgacgcccaaatcaccgactccgcgcccagcgcggtggcgatgaccaccggcgtcaaaaccatcaacgatctgatgggcctcaaccatacggccaccctcaacaattgcgaggatcagcaaaccaagaccgtcaccacgctgtgggagatggccgcaacgctcggcatggccaccggcgccgtgacgaccgccaccatcacccacgccacgccgggcgcgacctatgcccatatcgccaaccgcgattgggaatccgacgccaaaatgccggcagcggctctggccgcaggctgccgcgatatcgcgcgccagctggtggaaatgaagtacggcgacggccttaacgtggcaatgggcggcgggcgcgccaacttcctgcccgatagcgtgagcgatccggaataccccggcaagaaaggcgccagaaaggatggccgcgatctgacgcaggcctggctgcaacgctatggcgagcgtgggcaatacgtctggaatcaggcgcagttcgacaaaatcgaaccgggtaagatcgatcatctgctggccctgttcgagccgtcgcacatgaacttcgagcacgatcggcggcaagacgcggcgggagagccttcgctggcagaaatgaccggcaaggccatcgatattctggccaggaatcccgaaggctatctgctgttggtggagggcggacgcatcgatcacggtagccacaacggtaacgcctaccgtacgctgagcgacgcggtcgccctgaacgaggcggtgaaaaccatcgtcgacaaggtcaacctggaggaaaccctggtgatcgtgaccggcgatcacagccacacattgaccatcgccggctatgccaagcggggtaatcctatcctcggcatttccgtcggcgtcgacggcaaaccgcggctgggcagcgacggcaagccttacaccaccgtcggcttcgccaatggccccggcggcacgatcccgctgaccgaacgcccgacattgaccatggaacaggccaccgcgcccgactttattcagccggcgctggtgccgctgaaaagcgagacccacggcggggaagatctcggcatctacgccatcggcccctgggcccatctgttccagggtacggtggaagagaactacaccttccacgtgatgaattacgccagccgcatcggcgaacgcctgtcagaacggtag

SEQ ID NO: 425277 - DNA, 783 bp, Serratia marcescens
atgaacacctctcgtatgccggcactgtttcttggccacggtagcccgatgaacgtgctggaagacaaccgctacacccgggcatggcgtgcgttgggtgagtcattgccgcgcccgaaggcgatcgtggcggtttccgcgcattggtatacccgcggcactgcggtcaccgcgatggaaaaacccaaaaccattcacgacttcggcgggttcccgcaggcgctgtttgatacccgttatccggcgccgggctctcccgcgctggctgcgcagctgcagcaagtgttggcgccggtgccggtgacggccgatctcggcgagtgggggttggatcacggaacctggggcgtgttgatcaagatgtaccccaatgctgacatcccggtggtgcagctcagcgtcgacggcacgcagccggcggcctatcactatgagctggggcgcaaactggcggcgctgcgcgatgagggggtgatgatcgtcgccagcggcaacgtggtgcacaacctgcgcatggtgaaatggcagggcgataccagcgcctacccgtgggcggaatcgttcaataactttgtccgggataacctgcgttatcggggcgataaccatccgctggtggatttcatgcgccatgagggggcagcgctgtcgaatccgacgccggaacactatctgccgttgctgtacgtgcttggcggctgggatggcaaagaggccatcagcgtgccgatcgacggtatcgaaatgggagcgctgagcatgctgtcggtgcaggtgggctaa

SEQ ID NO: 425278 - DNA, 1161 bp, Serratia marcescens
atgaaacgtattgctattaccgagcgcccggactggcgtgaaaaagcaaccgagttcggtttccgtttccacaccatgtacggcgagccgtactggtgtgaagacgcctattaccagttcacgctggcgcagattgaagagatcgaaagcgccaccgccgagctgcaccagatgtgtctgcaggtggtggaaaaagtggtcggcagcgacgagctgatggccaagttctgcatcccgaaacacacttgggagttcgtgcgcagttcgtggcgcaccaatcagccgtcgctgtattcgcgtctcgatctggcctacgacggtgtcaacccgccgaagctgctggagaacaacgccgatacgccaacctcgctgtatgaggcggccttcttccagtggctgtggctggaagaccagatcaacgccggcaagttggatccggaatcggatcagtacaacagcctgcaggagaagctgatcgagcgtttcgccgagctgaaagcgcatcacggcttcggcctgttgcacctggcgtgctgccaggacagcgaagaagatcgcggcacggtgcaatatctgcaggactgcgcgcaggaagccggtctgccgaccgagttcctgttcatggaagagattggcctcggcgagaaaggccagtttaccgatctgcaggatcaggtgatcggcaacctgttcaagctctacccgtgggaattcatgctgcgcgagatgttctccaccaagctggaagacgccggcgtgcgctggctggagccggcctggaagagcatcatctccaacaaagcgctgctgccgctgctgtgggaaatgttcccgaaccacccgaatctgttgccggcttatttcgcgcaagacgatcatccgccgatggatcattacgtcaccaagccgctgttctcacgcgaaggcgcgaacattcagatcgtcgaaaacggtcaggaagtggcgcgcgtcgatgggccatacggcgaagagggcatgatcgtgcagcagttccatccgctgccgaagttcgaagacagctacacgctgatcggcagttggctggtgaacgatcaaccttgcggcattggcctgcgcgaagatcgcgaactgatcacgcaggatctgtcgcgcttctatccgcacaccatcctcggctga

SEQ ID NO: 425279 - DNA, 663 bp, Serratia marcescens
atgaaacggacaaaaaacatcaaccaagagacgttccgcaaatcctggcgcagctaccgtgtcgcgcccgtggctttggcgatcagcgccgtctttatgctggccggctgtgagaagagcgatgaaacggtctccctgtatcagaatgccgatgactgttcgcgcgccaatccttcgatgagcgagcagtgcaccacctcctacaacaatgccctgaaggaagcggcgaaaaccgcgccgaaatacgccacccgcgaagactgcgtcgccgagttcggcgaagcgcagtgcacccaggcgccggcacaggccggcatggcggcggaatcgcaaagcagcggcagcttctggatgccgctgatggcgggctacatgatgggccgcctgatgggcggttccggcttcgcgcagcagccgctgttcacctccaagaacgccgccagcccggcgaacggcaagtttgtcgacgccagcggcaagagctacggcccggccaccgccggcggccgcaccatgacggtgccgaaaaccgccatggcgccgaagcctgcagtcaccaacaccgtgacccgcggcggcttcggcgagaccgtagccaagcagaccagcatgcagcgcagcagcgccacctccaactccggctctcgcagcatgggcggttga

SEQ ID NO: 425280 - DNA, 1101 bp, Serratia marcescens
atgttgagaatcatccagtcaccaggcaaatatattcagggcgccaatgcgctggccgccgtcggcgaatacgccaaatccctcgccgatcactatctggtgatcgccgacgacttcgtgatgcagctggcgggcgacaccctgatgggcagcctgcagcagcacggcgtgaaacatcatgcggcccgcttcaacggcgaatgctgccgcaaggagatagaccggctcggccatgagctgcaggctcacggctgccgcggggtgatcggcgtcggcggcggcaagacgctcgacaccgccaaggccgtggcgcactaccaacagctgccggtggtgctcattcccaccatcgcctccaccgatgcgccgaccagcgcgctgtcggttctctacaccgaacagggcgaattcgccgagtacctgatttacccgcgcaacccggacatggtggtgatggacagcgccatcattgccaaagcgccggtgcgtctgctggtggccggcatgggcgacgcgctctccacctatttcgaggcgcaggcctgcttcggcgcccaggccaccagcatggccggcggtaaatcgacgctggcggcgctcagcctggcgcggctgtgctacgacacgctgctggcggaaggggtgaaagccaaactggcggtcgaggccggcgtggtgacggaagcggtggaacgcatcattgaggccaatacctatctgagcggcatcggcttcgagagcagtgggctggcggcggcgcacgccattcacaacggttttaccgtgctcgaagagtgccaccacctgtatcacggcgagaaagtggcgttcggcaccctggcgcagctggtactgcagaacagcccgatggcgcagattgaaaccgtgctggcgttttgtcatggcatcggcctgccgatcacgctggcgcagatgggcgtcaccggcgatgcggcggcgaagatgatggcggtggccgaagccagctgcgcagccggcgaaaccattcacaacatgccgttcaaggttacacccgcgggcgtgcaggcggcgatcctgacggcggatcggctgggcgccgcctggctgcagcgtcattga

SEQ ID NO: 425281 - DNA, 1071 bp, Serratia marcescens
gtgaaaaaactgattaatcaggtcgagtcggtgttggaagagcagttgcaggggctggcggaggcccatcccgagctgctggtgcacgcggatccgctgttcgtgacccgcgccgacgcgccggtggcgggcaaggtggcgatcctgtccggcggcggcagcggccacgagccgatgcactgcggtttcgtcggcgaagggatgctcgacggcgcctgtccgggcgagattttcacctcgccgacgccggataaaatgtacgagtgcggccaggcgatcgacggcggcgccggggtgctgctgctgatcaagaactacaccggcgacgtgctcaacttcgaaaccgccaccgagctgctgcacgacagcggcgtcgcggtggcgacggtgctggtggatgacgacgtggcggtcaaagacagcctgtttaccgccgggcggcgcggggtggctaacaccgtgctgatggagaaactgctgggcgccgccgcggcgcgcggcgacgatctggacagcgtggtgacgttagggcatcgcatcaacaaccacgggcactcaatcggcatcgcgctgggggcttgcaccgtgccggccgccggcaagccgtcgtttaccctggcggagaacgaaatggagttcggcgtcggcattcacggcgagccgggcattgcgcgccgtccgttcaccacgctcaacgcggcggtggacgacatgttccatacgctgatcgaccacggccactatcagcgcacgatccgcgtctgggatcgtcagcagggcgagtggcgcgacgagatgcagaccaagcagccgttgacgcgcggcgatcgagcgatcgcgctggtcaacaacctgggcgccacgccactgtcggagctgtacggcgtataccatcggctggcggagcgctgcgccgaggcgggcatcatcattgagcgcaatctggtgggctcttactgcacttcgctcgatatgcagggcgtgtccatcacgctgttgaacgtggacgacgagctgttgtccttgtgggatgcgccggtgaaaacgcctgcgctgcgttggggttgctga

SEQ ID NO: 425282 - DNA, 633 bp, Serratia marcescens
atggcgttgaccaaacaacaggttgtcgattggctgatgcgttgcggcgaggtgttcagccgggagcgcgattttctgacccggctggacaccgagatcggcgatgccgaccacggtttgaacatgaatcgcggtttcaacaaggtggtggaaaagctgccgtcggtggcggacaaagatatcggtttcattctgaaaaacaccggcatgacgctgctgtcgagcgtgggcggcgccagcggcccgctgttcggcaccttcttcatccgcgcggcgcaggcggcgaacgccaagcaaagcctggatctggcggagctgcatcaaatgatgcaagaggggcttgaaggcgtggtgatgcgcggtaaggcggagccgggcgacaagaccatgtgcgacgtctggtggccggtggtggaaagcctcgggcagtccgcgcagcagaacctgagcgtggcggaggcgctgcagcgcgccgccgacagcgccgagtgggcggtggagagcaccattaccatgcaggcgcgcaaggggcgggccagttacctgggcgagcgcagcatcggccaccaggatcccggcgccacttcggtgatgttgatgatgaaaacgctggccgaggtcgccggcagctag

SEQ ID NO: 425283 - DNA, 1431 bp, Serratia marcescens
atgattaatatcgtggtggtttcgcacagcgcgttgctggcgcgcggcgttgagcaactggcgcggcagatgatgcgcggcgacggctgcaaactggcgctggcggcgggcgtggatgacgagcagcacccgatcggcacggacgccgtcaaagtgatggaggcgatcgaagcggtcgccgacggcgacggcgttctggtgctgatggatctgggcagcgcgctgctcagcgccgaaaccgcgctcgatctgctggatccggacgtggctgtcaaagtgcggctgtgtgcggcgccgctggtcgaaggcacgctggcggcggtggtggccgccaactctggtgccgcgctggagcaggtggtggcggaggcgcagggcgcgctgcaggccaaacaggcgcagctgggcgaaggctcgccggccgcaaaaagcgcggccttgccgctggcgcagggcaaaagcgcaacctggacggtgcagaacccgcacgggctgcatgcgcgcccggcggcgcggttggtcgagacgctggcgccgttcaaggccgagctggtgctggaaaagcaggggcagtgcgtcgatccgcgcagcctcaatcagttggcgctgctgcaggtgcgccacggcgacaccattcgcctgatcgccgacggcgcgcaggcggacgaagcgctggcggcgtttaaagcgctggcggaacaacatttcggcgagacggtttccgagcggcagcagccttcgctgcatggcattccggtggcggaaagcgtcaccagcgggccggtgttccaggcccacagcttctggccgccaaccgtcgatcgacgaatcggcgcggacgaggtgttgggcgaacagcaacgcctgcgtgaggcgctgcagcgcacgctaagcgatctgaaccggctggcagagcgcaccggcacgctgatcggcaagccgcaggcggcgatcttcggcgcccacagcatgctgctggacgatccggatctgcagcaggcggcgtacacccgcatcgcgcagcagttgtgcagcgccgagcaggcctggcgacaggtgctggaggcgatcgccgaagagtaccgcgagctggatgacgactacatgcgggcgcgcgaactggacgtgcgcgacatgctgcgccgcacgctgtgccatctgcaggggctgccgttaccgacgattgcgctggcagagccgtcgatactggtgatggacgaactgatgccttcggaggtggtgatgctcgacaggcggctggtgctcggcatctgcctgagcggcggcaatgccctgtcacacagcgccattctggcgaaggcgatgggcatgccgatggtggtcggcatgcaggattgcctgagcaaaacccgcagcgggcagaaggcgatgctggacgccgcgcgcggggtactgcagctcagccactag

SEQ ID NO: 425284 - DNA, 1950 bp, Serratia marcescens
atggacaacgattcacgctggcagcggctgattaacgacggcgaactgccgccgccgctgcgcccggcacaggcggtttacgcctcctggctgcgctgccgcagcctgatgcagcccgacgtctggcaagcaccgcaccgcgctcagggcgccaccttcgaatcgatttgccgccgcaagaacgatctgctgacgctcggccaggcggcgctggaagacgcctgcgagtacatggagccacgtcgttgtctgttgatgatcctcgacgagagcggctgcatgctgtggcgctgcggcgacgcccaaacctgggaacatttacagcaactggggttcgcccccggcgcttactgggccgaagggcagatcggcaccaacgccccggcgctggcagcaacggaaggccacccggtgcgggtgagcggcggggagcacgtgcgccgggcgctgcacggctggtcgttctgcgctacgccggtctacgacaacagcggccgccagcgcggttcgatcgcgctgggctgtctgttggccgactgcgccgccggcgatctgtcgctgacgctggccatcgcccgcgaaatcggcaactcgctgaacgccgacggcctgctggcggaatccaaccgccatctgaatcagctttacggcctgctggacggcgtggacgacggcgtgatggcctgggatcaccgcggctatctgcaatacatcaaccagcgcgccgccgccctgctgaagctggacgagcagcagagccagggcaaaccgctggcgcagctgctgacgctgcccgccctgctcaagcgcgctatcgccgaccggcagccgctgcaacacgtcgaagtcaccttcgaaagccagcggcagtttatcgccgccctgctgacgctcaagccgattttcgacggcgatcgctgcagtttcatcgccctgctgcacccgctcgagcggctgcgccagtatgtcagcagccagttggggcgcgtcagccacagcttcgagcaaatgccctcagcctcgctggagatgcggcggctgatccgttacgggcagcaggcggccaagggccagcatccaatcctgctgcgcggggaggaaggggttggcaaagagcggctcagccaggctatccacaacgccggcgaacgcgccgccgggccgtatatcgccctcaactgccagctgctgccgcaggcgcaggggctgcgtgaactgctgggcagcgacgccaacgaagaagaggcgggccagctgagtaaattcgaattggccaacggcggcacgctgtacctcgaacagatcgaatacctgccggcggagatgcagtcggcgttgctgcaggtgctgaaaaccggcgtggtgatccgcctcaattccagccgggtgatcccggtcgatgtccgagtcatcgccggcagcgccgccgatctgccgctgctggtgcagcaaaaccgcttccgccgccagctgttttacagcctgcaggcgttcgagatccagatcccgccgctgcgccagcggctgagcgatattccgctgctggtcaaacaccatctgcgcacgctggagcagcattttcagcgtcgctttcgggtggatgacgaagtgatggcccagctggcgctctacctgtggccgggcaacgatttggaactgaaaggggtggtggagcgcgcggcaatgatctgccacggccaccacatccaattggcggatctgccggcgcacctgctcggccagccgtcgctgctggaaagcgatccgcagcccggcgcgccgctgctgacgctgacggacatggagcgccaggcgatcctgcgcgcggcgaccgtcagccgcggccagctgacggaaatggcgcagctgttgggcatcggccgcaccaccctgtggcggaagatcaaacagcacgggatcgacatccgccagttcaagctgcgcgcctga

SEQ ID NO: 425285 - DNA, 1518 bp, Serratia marcescens
atgaagaaactgctcccccttcttatcggactgagcctgggcggcttcagtgcaatgagccaggcagagaacctgctgcaggtctacaaacaggccagggaaagtaacccggatctgcgcaaaagtgctgctgaccgcgacgccgcattcgaaaagatcaatgaagcgcgcagcccgttgctgccgcagctcggtttaaccgcaggttacgattacaccaacggttatcgtgacagcaatggcgttaacagcaacgtgaccagcggttcgttggcgctgacgcaaactattttcgacatgtcgaaatggcgccagctgacgctgcaggaaaagaccgccggcatctccgacgtcaccttccagaccgctgaacagcagctgattctcaacaccgccaccgcctacttcaacgtgctgaaggcgatcgacacgctgtcctatacccaggcgcagaaagatgcggtataccgcacgctggatcaaaccacccagcgcttcaacgtgggcctggtggcgatcaccgacgtgcagaacgcccgctcgaactatgacaccgtgctggcggcggaagtctccgcccgcaacgatctggacaacgcgctggaaacgctgcgccaggtgaccggggccttctacccggagctggcctcgttgaataccgatcgcttcagtacccagcgcccggaagcggtgaacaacctgctgaaagaagcggaagcgcgcaacctgagcctgctgtccgcccgtctgagccaggacctggcgcgcgagcaaatccgcgcagcccaaaccggctatatgccgacgattgacgtcagcgcatcaaccggcatcagcaataccaaatacaacggctccaacaccggcggcgcgaatgccgcacgctacagcgactccgatgcgggccaaaataaggtcggcatcagcttcaacctgccgctgtacagcggcggcgcgaccaactcgcaggtcaagcaagcgcagtacggcttcgtcggcgccagcgagcagttggaaagctcacaccgcagcgtggtacagaccgtgcgttcgtcgttcaacaacgttaacgcctcgatcagcagcatcaacgcctacaaacaggcggtgatctccgcgcaaagctccctggacgcgatggaagccggttatcaggtcggtacccgcaccatcgtcgacgtgctggacgccaccaccacgctgtataacgccaaacgtcagctgtccgacgcgcgctatacctatctgatcaaccagctgaacatcaagtcggcgctcggcacgctgaaccagaacgatttgctgctgttgaacggcgcgttgggcaaaccggtgtcgaccgcgcctgacgccgtcgcgccgcagaatcgcgcgcaggacgcctatgcagacggctatcaggacaatgcgccgatgcagcaaaccgcggcgccggtaccggcggccactcgcgcatccgcgccggccgttaccaccagccaaccggctcgcaacagcggcaacccattccgcaactga

SEQ ID NO: 425286 - DNA, 633 bp, Serratia marcescens
atgaaccgttcgcagccgtcgcccgttactttcgagaaaaaagatgtagaaattattgcacgcgagacgctgtaccgtggttttttttcactcaatttataccggtttcgccatcggttgttcaatggcgaaatgagccctgaaatcacgcgtgaaatttttgaacgcggccatgcggcggtgctgctgccctacgatccggtgcgcgacgaggttgtgctgattgaacaactgcgcatcgccgcggttgataccagccattcgccctggctgctggaaatggtggcgggtatgatcgagaccggcgaaagcgtcgaggacgtgtgccgccgcgaagcgcaggaggaggccggcgtggtggtcgggcgctgcaagccggtgctgagctacctggccagccccggcggcaccagcgaacgtctgtcgatcatggtcggcgaggtggacgccggtaccgctgagggcatccacggcctggcggaagaacatgaagatatccgcgtccacgtggtcagccgcgagcaggcttaccgctgggttgaggagggcgcgatcgataacgccgcatcagtgattgcattgcaatggctagcgttgcaccatgaatcgttgagaaaagagtgggccaactaa

SEQ ID NO: 425287 - DNA, 426 bp, Serratia marcescens
atgaaacagcgctatacccctgatttccccgaaatgatgagattgtgcgaaaccaacttcgcgcaattgcgccgcttgctgccgcgcaacgacgaagcgggcgaaacggtgacttatcaggtgaaccgcgccggctatcgtttgaccatcgttgagtccacgcgttacacgtcgctggtggagatcgagcagatctttccggcggtcagctactggagcctgcccgcgatgacggtgcggctgtaccatgacgccatggttgcggaagtgtgttccagtcagcagatctatcgctttaaagcgcgttatgattatcctaataaaaagttgcatcaacgcgacgaaaagcatcaaattaaccagtttcttgctgattggctgcgctactgtttggcgcatggagcgatggcggttccggtttgttag

SEQ ID NO: 425288 - DNA, 828 bp, Serratia marcescens
ttggaaagcctgtttaaactgcccgtggcgagtggggccgcggtcaggattctacaaataacagatacccacctttttgccggcgaacacgagacgttgctcggcatcaatacctatcgcagctatcacgcggtgctggacgccatccaggcgcagcgccgcgacgtcgatttgatcgtcgccacgggagatttggcgcaggatcattcgcaagaggcctaccgccacttcgccgccggcatcgcgcaattgccggctccctgcgtgtggctgccgggcaaccatgattttcaaccggcgatggtcgatgcgttggccgccgccggcatcgcgccttccaaacaggtgctgctgggcgacagctggcaggtgctgatgctggacagccaggtgttcggcgtgccgcacggcgaattgagcgaataccaactcgagtggatggagcgctgcctgcaggctcaccccgagcgctatacgctgttgctgctgcaccatcatccgctgccttccggctgcacctggctcgatcagcacagcctgcgcaacccgcatatgctgggcgcgatcctgctgcgttatccgaaagtgaataccgtggtgtgcgggcacattcaccaggatctggatctggaatggcagggccgacgcctgttggcgacgccgtccacctgcgtgcaattcaagccgcactgcacgaacttcaccattgacgacgtctcccccggctggcgctacctcgatctgctgccggacggccgcgtcgagacccaggtgttccgcctggaaaacgacgatttccgccccgatatggactcggatggatactga

SEQ ID NO: 425289 - DNA, 585 bp, Serratia marcescens
atgccttcgacactgctctacctgcacggtttcaacagttcgccgcagtcggccaaggcggtggccttcaaggcctggctggccgagcaccatcccgatatcgagatgctggtgccgcagctgccggcctttccggcggaggccgccgaaatgctggagaatatggtgctggagcgcgccggccaaacgctcgggctggtcggttcatcgctgggcggctattacgccacctggctgtcgcagtgtttttcgctgccggcggtggtggtcaacccggcggtcaagccgtttgagctgctggtcgactatctcggcgccaacgagaacccctacaccggccagcaatatgtgttagagtctcggcacgtttacgatctgaaagtgatgcagatcgatcccttggagtcgccggatttaatctggctgctgcagcaaacgggcgatgaaattctcgattacggccaggccgtggcgtattacaccgcgtgtcggcaaacggtggagtcgggtggaaaccacgccttcgtcggtttcgagcactacttcccccagattgtggattttttagggctaaacgcggtctga

SEQ ID NO: 425290 - DNA, 1896 bp, Serratia marcescens
atgactcaatccagctataacgctgatgccattgaagtactcagcggtctagaaccagtgcgccgtcgtcccggcatgtataccgacacgacgcgcccaaaccacctcggccaagaggtgatcgataacagcgtcgacgaagcgttggccggtcacgccaagcgcatcgacgtgattttgcacgccgatcagtcgctggaagtgatcgacgacggccgcggcatgccggtggacatccacccggaagagggcgtgccggcggttgagttgatcctgtgccggctgcacgccggcggtaaattctcgaataaaaactaccagttctccggcggcctgcacggcgtggggatctcggtggtcaacgccctgtcgaagcgggtggaagtcaacgtgcgccgcgacggcaacgtctacggcatcgccttcgaaaacggcgacaaggtgcaagatctgacggtgaccggcacctgcggcaaacgcaacaccggcaccagcgtgcacttctggccggatgagcagttcttcgacagcccgcgcttctcggtatcgcgcttgactcacctgctgaaagccaaggcggtgctgtgccccggcgtcgagatctatttcatcgacaaggtgaacaacaccgagcagcgctggtgctaccaggacggcctgaccgactacctgatggaagcggtcaacggcctgattaccctgccggaagcgccgttcgtcggcaatttcgccggtgacaccgaagcggtggactgggcgctgctgtggctgccggaaggcggtgagctgctgaccgaaagctacgtcaacctgatcccgaccatgcagggcggcacccacgtcaacggcctgcgccaggggctgctggacgcgatgcgcgagttctgcgaattccgcaatattctgccgcgcggcgtgaagctgtcggcggaggatatctgggatcgctgcgcctacgtgctgtcggtgaagatgcaggatccgcagttcgccgggcagaccaaagagcgtctctcctcgcgccagtgcgcggccttcgtttccggcgtggtgaaagacgccttcagcctgtggctgaaccagaacgttcaggcggcggaacagctggccgagctggcgatctccagcgcccagcgccgtctgcgcgccgccaagaaagtggtgcgcaagaagttgaccagcgggccggcgctgccgggcaagctggcggactgcacctcgcaggatctggccatgaccgaactgttcctggtggaaggggactcggcgggcggatcggccaagcaggcacgcgatcgcgaatatcaggcgatcatgccgctcaagggcaagatcctgaatacctgggaagtctcctcggacgaagtgctggcctcgcaggaagtgcacgacatttccgtggcgatcggcatcgatccggacagcgaagatctcagccagctgcgctacggcaaaatctgcatcctggcggatgcggactccgacggcctgcacatcgccacgctgctgtgcgcgctgttcgtgcgccacttccgttcgctggtgaaaggcggccacgtctatgtcgccatgccgccgctgtaccgtatcgatctcggtaaagaggtgttctacgcgctggatgaagaagagaaagccggcgtgctggaacagctgaagcgcaagaagggcaagccgaacgtacagcgctttaaagggctgggcgagatgaacccgctgcagctgcgcgaaaccaccctcgatccgaacacccgccgtctggtgcaactgacggtggcagaggatgacgtcgatcagacgctggcggtgatggacatgctgttggccaagaagcgttcggaagatcgccgcaactggctgcaagacaagggcgacatggccgaattggcggtctga

SEQ ID NO: 425291 - DNA, 915 bp, Serratia marcescens
gtgaagatcaccctcgaagagctgctggcgttcacggcggtggtcgacagcggttcggtcaccgccgccgccgatcggctcggccaaaccacctccggcgtcagccgcgcactcagccgcctggaaacgaaactcgacgctacgctcttgcgccgcaccacgcgtcgcctgagcctgaccgaagaagggcagagcttcctggcgcctgcgcgcgaaatactgcgttcggtggatcaggccgaagaactgatggcgctgcggcgccagctgcccgccggtcggctgcgggtcaacgccgccgcccctttcatggcgcacgtgctggtgccgatggtggcggagttccgccgtcgttatccgctgattgagctggagctggacaccgacgatcgcaatatcgacctgttggagaaacgcgccgatatcgcgatccgcatcggcgcgctgcgtgactccacgcttcatgcgcgcctgctggggcacagccggttgcgcatcctcgccagcccggattacctgcaacggcatggcgaaccgcgcggcgtggaagatctgcaccgccattgcctgttgggattcacctacccagaatcgctgaaccagtggccgctgcgttaccggcaggcgcggtatttcgccatcgaaccgacgatctcggcctccagcggggagacgctgcgtgagttggcgttgcgcggggcgggcattgtccaactggcggacttcatgacccgccgcgatcgggaagcgggccggctggtaccgctgctggtgcgggagacgctggacgtgcgccagccgatccacgcggtgtattaccacgacgcccagctggcggcgcgcctcacctgttttctcgactacgtcagcgcccgccttgagggagagccgccagaggccgcagagggcctctga

SEQ ID NO: 425292 - DNA, 309 bp, Serratia marcescens
atgatcaccgtaatcgcagaaatcaaagtcaaacccggccaccgcgccaccgtgttacaagccattgaaaaactggtgccactggtgctggcggaagaaggctgcggcgaatacacgccgatggtagacagccacacccaggccccctggcagaaactgtcgccggactcggtgtttatgctggaaaaatggcaaagccaggcgcatctggaaaaacacctgcagatcgaccatatgctcaagcaccgcgagaccatcaaggactacgtgctgggcaccgagatctacgtgctggaaaacgcgctgtaa

SEQ ID NO: 425293 - DNA, 582 bp, Serratia marcescens
atgagcaatatcctgattatcaacgctaaaaagcaattcggccattccaacggcgaactcaaccaaaccctgagcgacgtggcggaaagcttcctgcgcgatctgcagcacgaggtgcaggtcacggtggtcgacgacggctatgacattgaggccgaagtgcagaaatacctgtgggccgacgcggtcatctatcaaatgccaggttggtggatgggcgagccgtggatcctgaaaaaatacatcgacgaagtgttcaccgccggccacggcagcctgtacgccagcgatggccgcacccgctccgacgccggcaagaagtacggctccggcggcctgattcagggcaaaaaatacctgctgagcctgacctggaacgccccgctcgaagccttcaccgatccgaaccagttcttccacggcgtcggcgtcgacggcgtttacctgcacttccacaaggccaaccagttcctggggatggaagccttgccgacctttatctgcaatgacgtgataaaacaaccggatatcgaaacggacatcgcacgttatcgcgagcacctggcgggaatttttgcttaa

SEQ ID NO: 425294 - DNA, 2274 bp, Serratia marcescens
atgagtgatctgactcatgatggtgtagagcgtttaccgctgcacacattcactgaaaacgcctatctgaactattccatgtacgtcatcatggatcgggcgttgccgtacattggcgacggtttgaagccggtacaacgccgcatcatctacgccatgtctgagctggggctgaacaacagcgccaaattcaagaaatccgcccgcaccgtgggcgacgtgctgggtaaataccacccgcatggcgacagcgcgtgttatgaagccatggtgctgatggcgcagccgttctcgtaccgctatccgctggtggacggccaggggaactggggggcgccggacgatcccaagtcgtttgcggcgatgcgttataccgaatcgcgcctctccaaatacgccgaagtgctgctggccgagctggggcagggcaccgtcgactggatcccgaactttgacggcacgctgcaagagccgaagatgttgccggcgcgcttgccgaacatcctgctgaacggcaccaccggcatcgccgtcggcatggcgaccgacattccgccgcacaacgtgcgcgaagtcgccgccgctgcggtggcgctgctcgacaaacctggcgcctcgctcgacgatctgctcgaattcgtgcaggggccggacttcccgaccgaagccgagatcatcaccccgcgcgatgaaatccgcaaaatttaccagagcggccgcggctcggtgcgcatgcgcgctgtgtggaagaaagaagacggcagcgcggtgatcaccgccttgccgcaccaggtgtccggcgccaaggtgctggagcagatcgccagccagatgcgcgccaagaaactgccgatggtcgaagatctgcgcgatgagtccgaccacgaaaacccgacgcgtctggtgatcgtgccacgctccaaccgtatcgatctggaacaggtgatgaaccacctgttcgccaccaccgatctggaacgcagctaccgcatcaacatgaacatgatcggtctggataaccgcccgcaggtcaaagggctggtggagatcctcaccgaatggctggcctaccgtcgcgacacggtgcgccgccgcctgaactaccgcctcgagaaagtgctgaaacgcctgcatatcctcgaaggtttgctggtggcgttcctcaatatcgacgaggtgatccacatcatccgcagcgaagatgagccgaagccggtgctgatgcagcgtttcggcatctccgatacccaggcggaagcgatcctcgagctgaaactgcgtcacctggccaagctggaagaggtcaagatccgcggtgagcaggatgagttggcgaaagagcgcgatcagctgcaggcgctgctggcgtccgaacgcaagctgaacacgctgatcaagaaagagatccaggccgatgcgcagacctacggcgacgatcgccgttcgccgctgaccgagcgcgcggaagccaaggcgatgagcgagcacgacttcgtgccgtccgagccggtgaccatcgtgctgtcggaaatgggctgggtgcgcagcgccaagggccacgacatcgatccggccggcctgagctacaaggccggcgacagcttccgcggcgcggcgcgcggcaagagcaaccagccggtggtattcatcgactccaccgggcgcagctatgcgctcgatccgatgacgctgccttcggcgcgcgggcagggcgagccgctgaccggcaagctgacgccgccgccgggcgccaccattgagcaagtgctgatggcggccgacgatcagaagctgctgatggcgtccgatgccggttacggcttcgtttgcaccttcaacgatttggtggcgcgcaaccgcgccggcaaggtgatgatcacgctgccggacaacgccagggcgctgccgccgatggaaatccacggcgcagacgatatgctgctgtcgatcaccgccgccgggcgcatgctgatgttcccggtcgccgatctgccgcagctgtcgaagggcaaaggcaacaagatcgtctccattccggcagcccaggcggcggccggtgacgacaagctggcctggctgttcgtgctgccgccgcaggcgtccgtcacgctgcacgtcggcaaacgcaagctgacgctgcggccggaggatttgcagaaattccgcgccgagcgcgggcgcaagggcacccagctgccgcgcggcctgcagcgcatcgatcgcgtcgaagtggatgcgccggtgcgggcgtcgggcggcgacagcgaagagtaa

SEQ ID NO: 425295 - DNA, 735 bp, Serratia marcescens
atgttattgattttgcgtgccgttctcgccactcttttctgtattctggtgtgtattttcggttctgtttattgcttgttcagcccgcgcaatccccgccatgtggcgaccttcggccaccttttcggccgcctgtcgacgctgttcggcatcaaggttgaaacccgcgtgccggccgatgcggccaacaacggcaactgcatctatatcgccaaccaccaaaataactacgacatggtgacggcctcgaatatcgtgcagccgcgcaccgtgaccgtcggtaaaaaaagtctggtgtggatcccgtttttcggcccgctgtattggctgaccggtaatctgctgatagatcgtgataatcgcgccaaggcgcacggcaccatcgcccaggtggcggagcagttcaaaaagaaagacatttcgatctggatgttcccggaagggacccgcagccgcggtcgcgggctgatgccgtttaaaaccggcgcgttccacgcggccatcgccgccggcgtgccgattgtgccgatctgcgtatcgaccactagcggtaatataaatcttaatcgctggaataacggtcacgtgatcgtcgagatgttggcgccggtggataccagcaaatacggcaaagaaaacgtgcgcgagctggcggcgcattgccgcgagctgatggaggcgaaaatcgcccaattggacgccgaagtcgcccagcgcaacgccgccaaaaaataa

SEQ ID NO: 425296 - DNA, 1416 bp, Serratia marcescens
atgtcactcagtcgacgtcagtttatacaggcatcgggcctggcgctgtgcgcgagcgccgtgccgctgagggcagaggcgagcggaacgcagaccccattacccattcctccactgctggagtctcgccgcggtcagccgctgttcctgaccctgcagcgcgcccactgggcgtttatggatagccgcaaggcggcggtgtggggcatcaacggcatgtatttggggccgacggtgcgggtttacagcggcgacgacgtcaaactgatctacagcaaccgcctgcaggagccggtggcgatgaccgtcagcggtctgcaggtgccgggcacgctgatgggcggcgcgccgcgcatgatgtcgcccaacgtcgactggtcgccggtgctgcctattcgccaggcggcggccacctgttggtaccacgccaatacgccgaaccgcatggcgccgcacgtttacaacgggctggccgggctgtggctggtggaggatgccgtcagcaaagcgctgccgctgcccaaccactacggcgtcgacgatttcccactgatcattcaggacaagcgcttcgataacttcggcacgccgcaatacgatgcgccgtcgcagggcggtttcgtcggcgatacgctgttggtcaacggcgtgcaaaatccgtatgtcgaggtgtcgcgcggctgggtgcgtttgcgcctgctcaacgcctccaacgcgcgccgctataccctgcagctcagcgacgggcgcccattcaacgtgatcgccagcgatcagggcttcctgcccgcgccggtcgcggtgcagcagctgtcgctggcgccgggcgaacgccgggaagtgctgatcgacatgtcgaagggcgaggaggtgaccatcaccgccggtgaagcggcgggcatcatggatcgcctgcgcggcctgttcgagccgtcgagcattctggtgtccacccaggtgctgacgctgcgcccgaccggcctgctgccgctggtgaccgacaacctgccgatgcgcctgctagcggatcagctgttggacggcagcgccagccgcactcgcgatttccgcctgggcgacggcggcgtcggcatcaacggcgcgatttgggacatgaaccgcatcgacgtgcaggcgcagcaaggcacctgggaacgctggaacattcatgcggatacgccgcagtcgttccatattcagggcgtgcagttcctgatcaaacgcgtcaacggcgcgcagccgatggcggaagatcgcggctggaaggacaccgtctgggtcgatggcgacgtcgagctgctggtgtatttcaaccaacctacctccgaacacttcccgttcctgtattacagccagacgttggagatggccgatcgcggcaccgccggccagctgatggtgcagccgacgatgtaa

SEQ ID NO: 425297 - DNA, 912 bp, Serratia marcescens
atgaatcagccccatgccctgcccgatcccggccggattaacttccgcctgctgcactatttccgcgtggtggcggaagagatgaacttcacccaggcggcgcggcggctgaatatgtcacagccgccgctcagcaagcacatcaaggagctggaaagccagctcggcgtggtgctgttcaaacgcaccacccgctcaatgacgctgacaccggccggccgcatgctgctgcgcaacgtcgagcggctgctggatcaggccgacagcgcgctgcatcaggtgcaacagatggggcgcggcgaaggcggccacatggtggtcggcatggtcggcacctcggcctggggcggcctgatcgcggcgctgcggcggttcagcgagcaaaacgccggcgtcacctggtcgttgaacgagctgacgcccagccagcaaatcgccgcgctgcaaaagcggcatatcgatatcggggtctggcgagaggcgcagcaacagacgctgccggggttgacctgccaacgcttggcgagcgagagcatcgccgtggtgctgccgctcgatcatccgctggcgcagcaggaaagcatcccgctggcggcgctgcagaacgacagtttcatcgtgctgccgccgcacgaggccagcctggggctgtatctgcacaatctgtgcctgcagcagggatttttgccggacgtcgcttatcaggtcaacgagccgcaaaccctgctggcgctggtggcggagggctgcggcattacgctgctgccggacagctacggccgcatcccgtggcccggcgtccgcttttgctcgctgcagcaggcgccgccggcggatctgtacgcggtttaccgcgccgacagcgtcacgccggtcgtagaggcctttctggagatgctgcgggcgccgtaa

SEQ ID NO: 425298 - DNA, 822 bp, Serratia marcescens
atgtttaatcaagaagatgcttttacctgcgccgatgtcgtccgcgcacgcctgccgggtttccagccgaaagcggccttgattctcggctccgggctcggcgccctggcggaggtgatgaccgaaaccgtcaccatcgactacggggagctgccgggcttcccggtgagcggcgtcgccggccatgccgggcagctggtcgccggcaagctggaaggcgtgccggtattgtgcatgaaagggcgcggtcatttctatgaagggcgcggcatgcaggtgatgaccaccgcagtgcgcaccttcaaactgctgggctgtgaattcctgctggcgaccaacgccgccggttcgctgcgccgctcggtggcgccgggcagcctggtggccatcaccgatcacatcaacttcatgccggaatcgccgctggtcggcgccaacgacgagcgcttcgggccgcgcttcttcagcctggcgaacgcctacgatcgcgatctgcgcgcccggctggcggcggtggccgaaagcgcgggcattccgctggcggaaggggtgttcgccgcctacaccgggccgaatttcgaaacgccggcggagatccgcatgatgcagaccctgggctgcgacgtggtgggcatgtcgatcgtgccggaagtcctgacggcgcgccactgcggcctcaaggtgctggtggtgtccgcgatgaccaactacgccgaagggctgtcggatacgccgctctcccatgaacaaacgctcagctgcgcggcgctggcggcggacgatttcatgcgcctgatccgcgagctgttcaaaacgctgtaa

SEQ ID NO: 425299 - DNA, 1251 bp, Serratia marcescens
atggcgataaaagcacgattgaaagtcatgattttcctgcagttctttatctggggtgcctggttggtgacgctgggctcctacatgatcaacacgctgcatttcagcggcatgcaggtggggatggtttacagcgccaaaggcatcgccgcgctgatcatgccggggctggcgggcatcatcgccgatcggtggatgaaggccaactacctgtatgcgctttgtcacctgctcggggcgctggcgctgtactgcgcggcgcaggtcgagcaaccgatgctgatgttctgggtgatgctgttcaacgccatggtctatatgccgaccatcgcgctctctaacgccatttcctatttttgtctcgaaaagcacggctttgacacggtgaaggactttccgccggtgcgggtgtacggcacggtggggttcattctggcgatgtggctggtcggcttcagccgaatcgagctcagcaatctgcagctgtatctggcttctgcggcgtcgctgctgctgtccgcttattcactgacgctgccgcgctgcccgaccaaccgcgcggccgagtcgaagagctgggtgagcgtgctggggctggatgcgctggtactgttccgccagcggcgcatggcgctgtttttcctgttcgccatgttgcttggcgcggcgctgcagataaccaataccttcggcaacccgttcctgcacgatctgtcgctcaacccgctgtatcaggacagcctcagcgtccggtatccggcggtgctgctgtcgctgtcgcagatctccgaagtattctttatcctcaccattcccttcttcctgcgccgttacggcatcaagcaggtgatgcttatcagcatggcggcctggacgctgcgcttcctgttcctggcctatggcacgccggtcggctttggtttcgttctgctgctgctgtcgatgatcgtctacggctgcgccttcgacttctttaatatctccggtgccatcttcgtcgagaaagaggccgatcgccgcatccgcgccagcgcgcaggggctgttcatgaccatggtgaacggtttgggcgcctatctgggggcgctcgccagcggcgaggtggtggacttcttcagccatgacggcgtgaaagactggcagagcatctggctggtgtttgcgctgtatacgctggtgctggggatcgtgttcgcgttgagcttcaactatcgccacccgccgcaggagagcgcggcggcggcgcagtaa

SEQ ID NO: 425300 - DNA, 933 bp, Serratia marcescens
atgagtgagtgggaagctgtaacacctgtcctggtgattgggggcgcggttggcgatctggtgatgacgctgccgcgcctgccgaccagcggcgaagatatcgaagcccagccgcaggcgcggcaaatcggcggctgcgcgttcaacgtggcgcgcgcgctggtgcgcctggaaacgccggtgattaacggcatgccggttggcaacggcgaatggggcgcggcggtcgaagccgccatgggcgagctggggctggaggtgctgctgcgccacggccagatggacaacggctggtgcctggcgctggtggagccgaacggtgaacgcaccttcatcacggtttccggctgcgaaagccaatggaataaagcgcagctggcgacgctgccgctgacggagcacaccctgatctacgccagcggctacgagctggcgggcgaaagcggcgaggcgctacgcgagtggctgacgcgcatgccgttcgaccaaccgcgcctgatcgatcccggcccgcgcatcgctcagctcagcgaagatttcttcgccatgctcagcgacagccacaccctattgacgctcaaccgcgacgaagtggccgcgctgtgcggcggcggcgacgccgtggaggccgcgcagcgctatgccgccgcccgtaacctgacgctggtctgccgcctggatcgcgacggcgcgtggatctgcgacggccgcacgccgccgctgcacgtgcccgcctatccggtagacgtcgtcgacaccatcggcgcgggcgatgcccactgcgccggtttgctggcgggcctgtccgccggctggccgctgccgcaggcggtcgatctggccaaccgggtcgccgcttgcgtggtggccagcctcggcgccgccaatccgccggaccggcagcagttgcaacagcgcttcccgcaggcctga

SEQ ID NO: 425301 - DNA, 1398 bp, Serratia marcescens
atgaccgatatcaatcgcaatgaagcatggaaggtagaaagcaccggtatcgatcgggtgccggacgcggaacagaccggcaagcccatcgagctgttttggatctggtcggcggccaatatcggcattctcggcgtggtgtacggcgccattatcgtcggcttcggcttatccttcctgcaatcggtactcgccgcgctggtcggcgtcgccagcttcgtgctggtcggcctcaccagcttcgccggcaagcgcgggcgcacctctacgctgacgctctcgcgggtgattttcggcctgaagggcaacgtggcgcccaccctgttcagttggatcaacctgatgggctgggaagcagtcaatgtgatcaccggcaccctgacgctggcggcgctgttcgaggccttcgggttgggtagcagccacctgctgaccgcgctcagcctgctgctgttcggcgggctcactgtcgtcgtcagcctgctggggcaaaataccgtggtctggatgcaaagctggttcagccgcatcttcggcaccatgacgctgatcgtggtgctctatatcctgttcaacaccgagtggagccaggtgctggcgctgccttccggcagctggttgaccggcttcctgccggcggtatcggtgattgccgccggcaccggcatcagttgggcgatcgccggcgccgattacagccgctatcaaagcccgagctcgtcgagcaaaagcattttcgccgcggtgatgggcggcgcctgtttgccgctgatgctgctgatgctggccggcatcctgctttccgtgcagctgcccgatctggccagcgccgccaaccccatcgcgctgataggctcggtgctgcccgcctggatggccattccttatctgctggccgccaccgccggcatcgtcaccatcgcggtgctcagcctgtattccgccagccttaacctgctgaccatcggcgtgcaggtcaagcagtggctggcggtatcgatcgacgcggtggtggtgttgggcatcgccctgtatgtgctgttcatctccggcgatttcatggggccgttcatctccttcctggtgttctgcggcgtcttcctggcggcctgggaggcgattttcctgctcgattacctgtgcctgcgccgccgccacgggtatgatggcaacgctttgtacggcctgcatggccagaaccgcggcgtgcgcaaagccccgctgttctgctggttcctcggcgccctgtgcggcctgctggtcaccaaaaccggttttatcgacggcccgctggccaaaggcttgttcgccgattccagcctggggctgtttgtgtcgttcgcggtgagtctgatcgcttacggtctgtacctgacccaacgcagagaacatcaatga

SEQ ID NO: 425302 - DNA, 735 bp, Serratia marcescens
atgacggattttatggcctggctgcgtggccatctggcgcagggggcggtagcgccgcgttatattcagttggcatcggcgatagaaaacgcgatcaggcagcaggtgctggcggcggaggcgtttttgccacccgaacggcagatggcggaaggcctggcgctgtcgcgcgtcaccgtcagcaaggcgatgaaactgctggaggagaaggggctgattttgcgacagcagggcgttggcacccgcgtggcgatgcacattggctattccctcgataaggacagcggtttcaccgctcaggcgctgcgtcacggcagcagcgtcagcaatcgatggctgctgcgcacccgggtcggcgcgccggccaaggccgcagcggcgctggggctggcggaaggggatgaggtggtcaaactgcggcgtttgcgcttgctgaacggcagcccggtctcgctggaaaccacctatattccgccgcgcttcctgcccgaaccggggcagctggaacattcgctgtatgcgttatggcaatcgcgcggcatcgtgcctgaagataaacactttctgctgaaggcggtatcctgcagcgacgaggttgccgagctgctcaacgtgccgtgcggcgcgccgttgttgcacatcacccagactagccgcaatgcccagggtgaggcgctggagttcagcgatatcttgtgccgcagcgacgtttatgaattcgaagtgaacggttag

SEQ ID NO: 425303 - DNA, 2169 bp, Serratia marcescens
atgagcaccaccagcctgatccaacccgatcgtgaactgttttcctataagccttactgggcggaatgttttggcaccgcgccgtttttaccgatgtcgcgagcagagatggatcaactgggctgggacagctgcgatgtgatcatcatcagcggcgacgcctatgtcgatcacccgagcttcggcatggcgatcatcggccgcatgctggaagcgcagggcttccgcgtcggcatcatcgcgcagccggactggagcaacaaagaagacttcatgcggttggggaaaccgaacctgttcttcggcatcaccgccggcaacatggactcgatgatcaaccgctataccgccgatcgcaaactgcgccacgacgatgcttacaccgccggcaacgtcggcggcaaacgcccggatcgcgccaccctggtctacagccagcgctgtaaagaagcctacaaagacgtgccgatcgtgctgggtggcatcgaagccagcctgcgccgcatcgcccactacgattactggtcggataccgtgcgccgctcggtgctggtggattccaaggccgacatgctgatctacggcaacggtgaacgcccgctggtggaagtggcgcatcgcctggccgccggtgagaagattggcgacatccacgatattcgcaataccgccgtaatgcgcaaagaagcgctgccgggctggagcggcgtggattccacccgcctcgacaagccgggccgcatcgaacctatcccgaacccgtacggcgacgatctgccgtgcgccgacggcgccaagccgaaagagccggaagccaagcctgtcaccgtgcgcgccgccaagccgaagccgtgggagaagacctatgtgctgctgccgtccttcgagaaagtgaagggcgacaaggtgctgtatgcgcacacctcgcgcattctgcaccatgaaaccaacccgggctgcgcccgtgcgctgatgcagaaacacggcgaccgctacgtgtggatcaacccgccggcgatcccgctgaccacgccggagatggacagcgtcttcgcgctgccttatcagcgcgtgccgcacccgtcctacggccaggatcgcattccggcctatgacatgatccgtttctcggtgaatatcatgcgcggctgctacggcggctgctcgttctgttcgatcaccgagcatgaagggcgcatcatccagagccgttcggaagattcgatcgttcgcgaaatcgaagagatccgcgacaaggtgccgggcttcaccggcgtgatctccgatctcggcggcccgaccgccaacatgtatatgctgcgctgcaccaacccgcgcgccgagcagacctgccgccgcgcctcgtgcgtgtatccggagatctgcacctatatggacaccaaccacgagccgaccatcaagctgtatcgccgcgcgcgttcgctggagggcattaagaagatcctgatcgcttccggggttcgttacgatctggcggtggaagatccgcgttatatcaaggaactggcgacccaccacgtcggcggctacctgaagatcgcgccggagcacaccgaagaagggccgctgtcgaagatgatgaagccgggcatgggcagttacgatcgcttcaagcagctgtttgatcactattcgaagcaggcgggcaaagagcagtacctgatcccgtacttcatctcgtcgcacccgggcacccgcgacgaagacatggtgaacctggcgctgtggctgaagaagaaccgtttccgcctcgatcaggtgcagaacttctatccttcgccgatggccaattccaccaccatgtattacagcggcaaaaacccgctgagcaaggtggggtacaagagcgaagacgtggtggtgccgcgcggcgatcgccagcgccgcctgcacaaggcgctgctgcgttaccacgatccggccaactgggcgctgatccgcgccgcgctggaagagatggggctgaagcacctgatcggcagccgccgcgagtgtctggtgccggcgccgagcatcgacgagcagcgcgaagcgaaacgcctgcagcgccatacccggccggcgctgaccaaacataccgatatcaatcggcagcgcacgccgtccaaccggccgccgcgcaaaccgattcgcaaagccaagccgtaa

SEQ ID NO: 425304 - DNA, 606 bp, Serratia marcescens
atgaaattctctttctcacacgggtcacggctgggcatgctttgcatcatgctggtgctggcgggttgcgccggcaagaaacagcgcgtcagctacgatcgccacgccttcgatagcgccattaaagacgccgccagcgaatacggcgtagacgccaagctgatcaccgccatgatccaggtggagtccggtttcaaccccgccgcagtgagcagatccaatgcgatcggcctgatgcagctgaaagccgataccgccggctgcgacgcctatcgctacaaaggcaaacgcggttgcccggacgatgacgatctgctggatcccgacaccaatatcgatctcggcgccgcctatctggccaccttgcaaaaacaacagcttaaagggatcgccaatcccgttacgctgcgctacgccaccatcatcgcctacgtcaacggcaccggcgcgctgctgcgcaccttctccagcaaccgtcagcaggccatcgcgatgatcaacaacctgtcgccggaagcctttaactggcacgtgcgcaaataccatcccgctccgcaggcgccgcgccatttgatgaaagtggaagccgcctacgatcggctgtga

SEQ ID NO: 425305 - DNA, 825 bp, Serratia marcescens
atgacaacgcaacaacccatcatcaaactccacgatggtaatctgatgccgcagttgggtctcggcgtttggcaggcgagtattgaagagaccacccgcgcggtgagcaaagcgctggagatcggttaccgctccatcgacaccgccgcgatctacaagaacgaggaaggcgtcggcgccgcgctgcagtccagctcgctgccgcgcagcgagctgttcatcaccaccaagctgtggaacgacgatcagggcgatccgctggcggcgctggaaaccagcctggagaagctaaaactggactatgtggatctgtacctgatccactggccgcgcccgcagcaggatcaatacatctccgcctggcgcgaactgatcaacctgcgcgaacaaggcctggtgaaaagcatcggcgtatgcaacttccatacgccgcacctgcagcgcctgctggatgaaaccaacgtggcgccggtcgtcaatcagatagagctgcatccgctgctgcaacagcgccagctgcgtgcctggaacgccacgcaccacatcgccaccgaatcctggagcccgctggcgcagggcggtgaaggggtgttcgaccagccgctgatcaaggcgctggccgaaaaatacgagaaaaccccggcgcagatcgtggtgcgctggcacctggacagcggccttatcgtgatcccgaaatcggtcacgccgtcgcgcatccgcgaaaacttcgaggtgtttgatttcaaactcgataaggacgaactgggcgagatcgccaagctggacgtcggtaaccgccttgggccggatccggataccctgtaa

SEQ ID NO: 425306 - DNA, 1164 bp, Serratia marcescens
atgcaaaacttcattctgcataccccaaccaaaatcctgttcggcaaggaccaaattgccgaagtggccggccagatcccggcggacgcacgcatcctgatcacctacggtggcggcagcgtgaagaaaaacggcgtgctggatcaggtgtatagcgcgctggccggccgcgacgtgcgggagttctccggcattgagccgaacccgacctacgaaacgctgatgaaagcggtcgaggtggtaaaggcggaaaatatcgatttcctgctggcggtcggcggcgggtcggtggttgacggcaccaagttcatcgccgccgccgcccgttataccgccaacggcgacgcctggcatatcctgcagaccgtcggcagccacatcgccgacgcggtgccgatgggctgcgtactgacgctgccggccaccggttccgaatccaacagcggcgcggtgatcacccgtaaaagcagcggcgacaagcagcacttcttctcgccgctggtgcagccgcgcttcgccgtgctggatccggtggtgacctattcgctgccgccgcgccaaatcgccaatggcgtggtcgacgccttcgtgcacaccctggagcagtatctgacctacccggtcgacgccaaggtgcaggatcgcttcgccgaaggcctgctgctgaccctgctggaagacggcccgcgcgcgctggccgaaccggaaaactatgcggtgcgcgccaacgtgatgtggagcgccaccatggcgctgaacggcctgatcggcgccggggtgccgcaggactgggcaacccacatgctgggccacgagctgaccgccatgcacgatctcgaccacgcgcaaacgctggccatcgtgctgccggcgctgctgcacgagaagaaagcgcagaagcgcgcaaaactgctgcagtacgctgaccgcgtttggggcctgcgcgaaggcagcgaagacagccgcatcgacggcgccatcgccgccactcgcgccttcttcgagcagatgggcgtaccgacccgcatggcggattaccagctcgacggcagcagcattccggcgctgctcgacaagctgcatcagcacggcatgaccgccctgggcgagcatcaggacatcaccctggacgtcagccgccgcatttacgaagcggcgcgttaa

SEQ ID NO: 425307 - DNA, 918 bp, Serratia marcescens
gtgattgaaatcgatgcgcagcgcagccgcatggcgcgccaggcgatggctatcgccaccggcaacggctacacgccgtcgccggtgccgcgggtgaagatcctgtatgtcgatcgccactgcccgcgccaaccggtgatgtacgaaccggggatcgtcatcatctttcaggggcacaaggtcggctattgcggcagtaaggtgttccagtacgatccgcgcaactacctgctgatgacggtgccgctgccgttcgaatgcgaaaccttcgccagcccggaactgccgctggttggattggcggtcaatatcgatacccaaatgctgcaggatttgctgatcgacatcggcgacgacgactacctgatgcaaccgcgggcggagagcaacggggtgaacctggccgagctgacggaagcgctgctgtgcgccaccgaacgcctgctggacgtgatggccaagccgctcgacgcccgggtgctggggccgcagatcgtgcgcgagatcctttactacgtgctgcgcggcacctgcggcgcgtcgctgcaggagttggtcaatcgccatacccacttcagccagatcgccaaggcgctgcggcgcatcgaacatcagtatgccgacaacctcaacgtcgagcagttggccggcgaggtcaacatgagcgtctcggcgttccaccacaatttcaaagcggtgaccaacacctcgccgctgcagtacgtgaagtcgtaccggctgcataaggcgcgcctgctgatggtgcatgacggcctgaaggccagcaccgcggcgatccgcgtcggctacgagagcgcgtcgcagttcagccgtgaattcaagcggctgttcggcatgacgccgagcgatgaagtcgcccggctgcgcgaggccaacccgctgctgctggagggctga

SEQ ID NO: 425308 - DNA, 663 bp, Serratia marcescens
atggatgtattacgagagattattcatgcgctttggcagcaggactttatcgccctcgccgatccaagcgtaatttgggtggtttacgccgtacttttcaccaccctgtttttggaaaacggactgctgcccgcctccttcctccccggcgacagcctgctgctgctgtcgggcgcgctgatcgccaaaggcgtgatgggctttgcccccaccctgctgattctgaccgccgccgccggcctcggctgctggctgagctatatccagggccgctggctgggccacaccggcctggtgaagagctggctgctgcagctgccggcgcagtaccaccagcgcgcgcacaacctgttcaatcgccacgggctgacggcgctgctgatcggccgcttcctcggcttcgtgcgcacgctgctgccgaccatggccggcatttccgggctcaacagctcgcgcttccaggtgttcaactggctgagcgcggcgatctgggtctgtgcgctggtgggcctcggctacgctttcagtcaaatccctctggtaaaacgctacgaaagccaggtgatgaccggcctgatgctgctgccgctgctgctgctgttcgtcggcctgctgggcgccatgctggtgatctggcgcaaaaagcgcgcttcctcttcctaa

SEQ ID NO: 425309 - DNA, 1212 bp, Serratia marcescens
atgacgtcaaaacatatcgaaaccacgctgatcggcgccggccgcggcaagcgctacacccagggctccgtcaatcccgtcacgcaacgcgcctcttctttggtcttcgactccgtcgccgccaaaaaacacgccaccgcgcaacgcgcccacggagaactgttttacggccgacgcggcaccctgacccacttcgcgctgcaggatgcgatggtggagctggagggcggcgccggctgcgtgctgtacccctgcggcgcggcggcggtagccaatgcgatcctgtcgttcgtcggcgccggcgatcacctgctggtcaccggctcggcgtacgaaccgacccaggatttctgcacccatatcctcggccgcatgaacgtcagcaccacctatttcgatccattaattggcgccgatatcgccacgctgatccagcccaatacccgcgtggtgttcctggaatcccccggctccatcaccctggaagtgcaggatatcccggcgatggtgcaggccatccgcgccgtggcgccggaggtggtgatcatgatcgacaacacctgggcggcgggcgtgctgttcaaggcgctggatttcgacatcgacatttcgattcaggccggcaccaaatacctgatcggccattccgattacatgctcggcaccgccgtcgccaacgcgcgctgttgggatcggctgcgcgagtactcctacctgatggggcagatggtggatgccgacaccgcctacatggcgagccgcggcctgcgcaccctgagcgtgcgcctgaagcagcacgagcgcagcagcatcgaagtcgcccactggctggcggcacggccggaggtggcgacggtcaatcacccggccctgcccagctgcaagggccacgagttctaccgccgcgacttcagcggctgcaacgggctgttctccttcgtgctgaaagagcggctggatgatgcgcagctggccgcctacctggacaacttcagccatttcagcatggcctactcctggggcggcttcgagtcgctgatcctggccaaccagccggaagagctggaagcgatccgtccggcgggcggcgtcgatttctccggcacgctggtgcgcctgcacatcggcctggagaacgtcgaagacctgatcgccgatctggcggccggcttcgatcgcctcagcggcgtgcgccaagacggattccggtaa

SEQ ID NO: 425310 - DNA, 978 bp, Serratia marcescens
gtgaaaacggctggcaagaatttaaatcaaggatcgttcggccagggccgggcgcagtggggcaaggcctttggccgcagcctgatggcttcaatggtgctggtcgtggggctggccggtagcgcgcaggcggcgccggcggccaatccggccgttaccgaaagcgttgcgccgaccaccgcgcctgcacctgcagccgccgcgctggagagcatcacgccggtgaacccggcgccaacgatccagccaccggaaacccgcggcatggatctgtctgtttggggcatgtatcagcacgccgacgcggtggtgaaagcggtaatgatcggcctggtgctggcctcgatcgtgacctggaccattctgttctccaaaggcagtgaattgctgcgcgccaaacgtcgcctgcgccgcgaacagctggcgctggccgacgcgcgctcgctggatgaagcttccgagctggcgcaaaacttcggctcgcagagcgtcagcgctgtcttgctgaacgacgcgcaaaatgagctggagctgtccgcagagtccagcgacaacaacggcatcaaagagcgtaccggcttccgcctcgagcgccgcgtggcggcctacagccgcaacatgggccgcggcaacggtttcctggccaccatcggcgccatctcgccgttcgtcggcctgttcggcaccgtgtggggcatcatgaacagcttcatcggcatcgcccattcgcagaccaccaacctggcggtcgtggcgccgggcatcgcggaagcgctgctggcgaccgcgctgggcctggtcgcggcgatccctgccgtcgttatctacaacatctttgcccgcgtcatcagcggccatcgtgcccaggtaggcgacgtggcggcgcaggtcttgctgctgcagggtcgcgatctggatctggccgcaacggcggaagccaagcgctcacagcacgcacaccaactgcgggcggggtga

SEQ ID NO: 425311 - DNA, 417 bp, Serratia marcescens
atgcgcttaaatgaagatctggacgacagcggcgaattgcatgaaatcaacgtgacgccgtttatcgacgtcatgttggtgctgttgatcatctttatggtggccgcgccgctggcaacggtagatatccgcgtcgatctgccggcttcttccgccaaaccgcagccgcggccggaaaaaccggtgttcctgtcggtgaaggccgacaagcagctctacgttggcgatcagccggtgaatgccgatcagctgacttcggtgctggatcaacgcactcaggccaacaaagaaaccaccatcttcttccaggcggacaagagcgtggactatgaaacgctgatgagcgtgatggacactctgcgtaaagccggctacctgaaagtggggctggtgggcatggaaggcgccgccaagtag

SEQ ID NO: 425312 - DNA, 1035 bp, Serratia marcescens
gtgaaaaaaaataaacgcattaccatcagtgacatcgccacgctggccggggtgtcgaaatcgaccgccagcctggtgctgaacggccgcagcaaggaataccgggtgtccgacgacacccgcgatcgcattctggcgctggcgcacgaacaccattatcagcccagcatccacgcccgctctttgcgctccaaccgcagccacacgctggggctggtggtgccggagatgaccaactacggctttgcggtgatctcgcgcgagctggaaacgctgtgccgcgaggccggtctgcagctgttgatcgcctgtaccgatgaaaacccggcgcaggagatgatggcggtgaacagtctggtgcagcggcaggtcgacggcctgatcgtcgcctccagccagctgaacgacgcggaataccagaagatcaacgccgggctgccggtggtgcagatggatcgcctgatcgccggttccgaactgccgctggtgatcaccgactcggttaatgcgaccgccgacctggtggaaaaggtcgcgcgtcagcatccggatgagatctattttctcggcgggcaaccgcgcatttcaccgacccgcgatcggctggccggcttccagcttggcctggagcgcgccggcgtatcgtgcaaaccggaatggatcatcaacggcagctatcaccccagctcgggttacgagatgttcgctcagctgtgcgcacagctggggcgtccgcccaaagcgctgttcaccgccgcctgcggcctgttggaaggggtattgcgttatctgactcagcatcagctaatggaaagcgacatccacctatgcagcttcgacgatcactacctgttcgactgcatgacgttgaagatagacacggtggcgcaggactgccgggcgctggcgcaacatagcttcagccaggtcaccgcgctcatcgacgagcggccgctggaacagaacgcgctttacctgccgggccgtatccactggcgccatgccggttcgcgggcgttgttggccgaggagtga

SEQ ID NO: 425313 - DNA, 1410 bp, Serratia marcescens
atggaagaactcagcttaatcaaacaggcgctgcgggcagtcatgaacggccagccactcgcgctgcgcgatccgcaccgcccggcctggcatctggcgcccagcgttggcctgctgaacgatcccaacggctttatccagcacaatggcgtttatcacctgttctatcagtggaacccgctgggctgcgatcatcgcaacaagtgctggggacactggcagtcgatcgatttagtgcgttgggaacatcagccactcgccctggcgcccggcgcctgttacgacagccacggctgttattccggctcggcggtggtggcggaagacaaaatcacgctgatctacaccggcaacgtgaaattccccgacggctcgcgcaccgcttaccaatgcctggctcaggaaagcgatcggggcgaataccgcaaactcgggccggtgctgccgctgccggagggctacagcggccacgtacgcgatccgaaagtgtggcgtcatcaggatgcctggtacatggtgctcggcgcgcgtgacttgcaggatcgcggcaaggtgctgctgctgcgttcctgcgatctgcgcgactggcaagcgctgggggagatcgccggttccggcctgaacgacctgggtgaattcggctacatgtgggagtgcccggatctgttctcgctggacggcgacgacgtgttgatctgctgcccgcaggggctggcgccgcagccggaacgctatctcaaccgttatcaggccggctatctgctcggcaagctggattaccggcaggcggccttcagccacggcgaatttcgcgagctggacgccggcttcgagttctacgcgccccagacgacgcaggcagaagatggccgccgcctgctgttcggctggatgggcgtgcccgagcaagatgaagaagcccacccgacgcgccgttacggctggatccacaccatgacctgcccgcgcgagctgtcgctgcagcatggccgcctctaccagcacccggcacgcgagctgcaacagctgcgcggcgagcgggctggctggcaaggccgcgccgatgacgcccccgcctatgcgctgggcgccgcggagttgcagctgacgccgcagggcgcgttcagcgccgcctttggcgacgccatgacgctgagctgggacggcgaacggctgcagctgacgcgcgcttccctggccgacggtaggccggagcaccgttactggcgcggcccggtcacgcatctgcagctgctgttcgatcgttccagcgtggagattttcatcaaccacggcgaggcggtgatgagcgcgcgctacttcccggcagctgaaccgcaactgcggctgaacgggagcgcgccgctggcgttggaatactggccgctgacgccatgcatgctagaatga

SEQ ID NO: 425314 - DNA, 1371 bp, Serratia marcescens
atggacattaccgcaaccgccaacgcgctgttgccgctgctcggcggtaaagaaaacatcgccagcgccgcccactgcgccacgcgcctgcgcctggtgctggtggacgacagcaaggtggacaaagaggccatcggcaaactggacggcgtcaaaggctgcttcagcaacgccggtcagatccaggtgatcttcggcaccgggctggtcaacaaggtgcatgcggaattcatcaaggcggcgggcgtcagcgaatccagcaaggccgaagccgccgatattgcggcgaaaaagctcaacccgctgcagcgcatcgcccgcctgctgtcgaacatcttcgtgccgatcattccggcgatcgtcgcgtccggcctgctgatggggctgctcggcatggtgaaaacctacggctgggccgatgccaacagcgcgctgttcatcatgctggatatgttcagctcggcggcgttcattatcctgccgattctgatcggcttcaccgccgcacgcgaattcggcggcaacccctatctgggcgccacgctcggcggcattttgacgcatccggcgctgaccaacgcctggggcgtcgccgaggggttccataccatgaacttcttcggtctggagatcgccatgatcggctatcagggcaccgtgttcccggtgctgctgacggtgtggttcatgagcctgctggaaaagcggctgcgcaaggtgatccccaacgcgctcgatctgatcctgacgccgttcctgacggtggtcatctcaggctttgtcgccctgctgtttatcggccccgccggccgcgcgctgggcgacggcatctccttcgtgctcagcacgctgattgcccatgcgggctggttcgccgggctgctgttcggcggcctctattccgctatcgtcatcaccggcattcaccacagtttccatgcggtagaggccgggctgctcggcaatcccaatatcggcgtcaacttcctgctgccgatctggtcgatggccaacatcgcgcagggcggcgcttgcctggcggtgtatttcaaaacccgcgacgccaaaatcaaagccatcgcggtgccgtcggccttttccgccatgctcggcatcaccgaagcggcgctgttcggcatcaacctgcgcttcgtgaaaccgttcctggcggcgctggcgggcggcgcgctcggcggcgcctgggtggtggccaaccacgtcggcatgaatgcggtcgggctgacggcgatccccggcatggcgatcgtgcaggccagttcgctggtcagctatatcatcggcctggcgatcgcttttggcagcgccttcgtgctctccctgctgctgaaatataaaacggacgcgcaatga

SEQ ID NO: 425315 - DNA, 1413 bp, Serratia marcescens
atgatgaaaaaactcagctatttggcgataacaacagggcttttcctctccgcttccagcgcagcggcctcgggcagcggcagcatcgaggcgcgtctcaacgcgctggaacaacgtctggcgctggcggaacggcgcgccgcacaggctgaaacccgcgcgacggcggcggaacgtcgggcgcaacagctggaacaacgcaccaccaacaccgaacggcaaaccgcgcagattgcacagcatgccgccacgccggaaacaccgattgccaactccagcgtgctgaaacttagcggattcaatgacctgaagctgtacggggatgtggagttcaatctggacggcgccagccgcagcggccaactgacgtcgctgaaaggcagcgaccacaaggactggaaacccggcaacaaagaacgttgggatatcaacggccgcattctggtcgggctggacggctaccgccgcaatccggacggcaacttctccggcttcagcgtgcagccgctggcggacatgaccggcaaaatgaacctggacgacgccgccttcttcttcggtaatgaaaagaactggcaaaccaaaatcggccgctttgaagcctacgacatgttcccgctgaatcaggacaccttcattcaatactccggcaataccgccaacgatctgtacgccgacggcttcggctatatctacatgatgaaagagggccgcggccgcagcagcagcggcggcaacctgatgctgagcaaatacgccggtgatgtctatttcgagctgaacacgctggtggaggacggcacttcgctgttccaggacaacagctaccacggcaacgccctggacaataagaaaaacgtcgcctatttacggccggtgatcgcctggaaaaaagacgccttcagcatcgcggcggcgatggaaagcaacgtggtgaataacgcctacggctatcgggacagccagggccgtttcgtcgatcagtccaagcgcaacggctacggcatgacgatgagctggaacaacagcgccgccgatccggacaacggcgtggtggccaacctgagcaccgcctatctggatgcctcaggcgagcaagacttcaccgccggcgtcaacgtgctgtggcggcgcttcgaactgggttatatctatgctcataacaatatcaaagagttcaataccgccgggatcgccgccgatatccacaacccgctcagcgaaccgggcaactacgacatccacaccgttcacgcgtcgtatcagatacctaacattatgaatatgaagaatttcaatttgtatttgggcgcctatgtgtcgctgctggaagccaacgccgacaacaagatagccaacggcgacagcgatcaacgttacggcatgcgcgccagattcaagtatttcttctga

SEQ ID NO: 425316 - DNA, 927 bp, Serratia marcescens
atgatgaatcgcgtatgggtactgggcgacgccgtgatcgacctggtgccggaaaatgccaacggttatctcaaatgccccggcggcgcgccggctaacgtggcggtgggtatcgcccggctcggtggcgacagcgcttttatcgggcgagtggggcaagacagcttcggcgcctttctgcagcgggtgctgagcgatgaaggggtggatatcagccatatgcggccggatcccgaacaccacacctccacggtcgtggtggatctcgatctgcagggtgagcgctcattcacgtttatggtgcagcccagcgccgatctgtttttgcaacccgacgatctgccggctttccaacggggggaatggctgcacctctgctccatcgcgctctcgcaggagcccagccgcagcgcggcctttaccgcgatggagcgcattcgggcggccggtggccgggtcagtttcgatcccaacatccgcgaagaggtctggcgccagccggaagcgctgcgcccctgcctgcaaaaggcgctgctgctggcggacgtggtgaaactgtcgcgcgaagagctggttttcatcagccatcttgacgatctggagaacgccattcgctggatgatgcaaacctatccgctgcgcctgctgctggtgacgctgggcggcgacggcgtctgcgtacacgatgggcagcgtctgcgccatttccacgcgccatcgatcgtgccggtcgataccaccggcgccggcgacgccttcgtcgccgggctgttagcggcgctggcgcgccttcacgaattgccgcaggaagcgcaatggccggcggttatcgcccaggcccaggcctgcggcgcgctggccaccaccgccaaaggcgccatgaccgccctgccccgcgccgacgagctggccgctttcctgcgttga

SEQ ID NO: 425317 - DNA, 1527 bp, Serratia marcescens
atgagtgaggccacaacgccaatcaataaaagccccggacgcgttttttactgggtggaacgaatcggcaataagatccccaatccgtttttactgttcgtctatttgatcctggtgcttatgctggccaccgcgctgttttcctggctcgacgtggcggtgaaaaatccggccaccggcgagctcatcaaggtcaataacctgatgagcgtggcgggcatgcagtggatatttcccaacatcatccataacttcagcagctttgcgccgctgggggctattttggcgctggtgataggcgccggcctggcggaaaaggtcggcctgctgcaggcgctgatgtataaaatggcctcgcgcgtcagcgcccgctacgccagttatatggtgctgtttatcgccttcttcagccatatctcgtcggacgccgcgctggtggtgatgccgccccttggcgcgctgatgtttgtggcggtgggccgccacccgatagccggactgctggcggcaatagccggcgtcgcctccggctttaccgccaacctgttgatcgtcaccaccgacgtattgctttccggcatcagcaccgaagccaccaaagcggtggatggcgcggttcacgttagcgtaatcgacaactggtactttatggccacctccgtgatcgtgctgaccatcgccggcgcgctgctcaccgacaagtttatcgagccccggctgccgaagtggcaaggcggcgccgaagacaaaatcgcagcgctgaccccgttgcaaaaccgggggctgatgatgagcggcatcgccgcgctggtgtttatcgccatcatcgccgctctggtggtgccggaggccgcgccgctgcgtgacccgaacaccggttcggtgatcccttccccgttcatcaagggcattgtgccgatcatcatcctgttcttcttcaccgtcgccattacctatggcgtagtcaccaaacagatccggcggccggatgacattccccaccacttgctcgatccgatgaaaagcatggcgggttttatcgtgatggtgtttccgctgtcgcagttcgtggcgttctttaactggagcaacatgggcaagtttatggccgtcggcctgaccgatatgctggaagccgccggcatgagtggcgcgccggcatttctcggcctgatgttcctctccgccttcctgtgcatgttcatcgccagcggctcggcgatctggtcaattttggcgccgatcttcgtgccgatgtttatgctgctcggtttccacccggcgttcgcccagatgatctttcgcatcgccgactctgcggtactgccgctggcgccgatgtcgccgttcctgccgctgttcctcggcttcctgcagcgctaccgcaaagacgcgcagctcggcacttattacgtgctgatcctgccctatcctgtggtgttcttcagcgtgtggattttgctgctgctggtctggtatgcgcttgggttgccaatcggcccgggcgtgtatccgaaactgggctaa

SEQ ID NO: 425318 - DNA, 1452 bp, Serratia marcescens
atgagcaactcaacaccgcaggcatttatcgacgactacattgaccagcgccggccccgcttcagcgcgctgagcgacgcgatttgggaccacccggaaacgcgcttcaacgagacctattccgccacgttactggccgatgcgctggagcaggaaggtttctcggtcgaacgcggcgtgggcgacatcgagacggcgtttatcgccagctacggcagcggccacccggtcatcgcgctgctgggcgagtacgacgcgctggccgggctgagccagcaggcgggctgcgccacgccgcagccactggtggaaaacggcaacggccatggctgtggccacaacctgctgggcaccgcggcgctggcgggcgccttcgccgccaaggcgtggatgcagcaaaaccggctgaccggcaccctgcgcttctacggttgcccgggcgaagaaggcggctccggcaaaacctttatggtgcgcgaaggcctgttcgacgacgtcgacgccgccctcacctggcacccggaaggcttcagcggcatgttcaataccagtacgctggccaacattcaggcggcgtttcacttcaagggcgtcgccgcccatgccgccaactcgccgcacctggggcgcagcgcgctggacgcggtgacgctgatgaataccggcgccaacttcctgcgcgaacatatcgtgcaagaagcgcggctgcactacgcggtcaccaacaccggcggcaactcccccaacgtggtgcaggccgacgccgaggtgttgtacctgatccgcgcaccgcagctcgaccaggcgcaggacatttaccaacgggtgattaacatcgccaagggcgccgcgctgatgactgacacccagatggaagtgcgcttcgacaaggcctgctccaactatgtgccgaaccgcagcctggaacgcgcgatgtatcaaaacctgtgtgatttcggtctgcccgagtacagcgacgccgaacgccgcttcgccgaggaaatccgccagacgctgagccgcgacgatctgcgcaacgccaaactcaacattgcccgcaccggcggcgcagccgggcgcgagtgggtgcagttgctgggagaaaaggtgctgatggacgaggtcgctccttatgtggaatccgacgacctgctgtacggttctaccgacgttggcgacgtaagctgggtggcgccgaccgcccaatgctttagcccctgtttcgcactcggcacccctctgcacacctggcaactggtggcgcagggccgcaccgctatcgcccataagggcatgtgcctggccggcaaggtgatggcggcgaccgccatcgatctgctgagcgacagcgctctgctggcgcgctgccgcagcgagtttgaacgccggcgcgccgaacagccgtaccgctgcccaatcccgcagggggtgaaaccctccccattgaaatag

SEQ ID NO: 425319 - DNA, 1317 bp, Serratia marcescens
atgactaattcgctttcgatgttggtggccgatttgtacccgcaattgcaggcctggcgccgcgacttccatcgctatgccgagtccggctggtttgagttccgcaccgctaccctggtggcggaagaactcgatcggctgggttatcgcctgcagctgggccgcgaggtcatcaaggcagagtctcgcatggggctgccttcgtccgatgagctggaagcgcaggaacagcgcgcccgcaatcagggggcgttggaaaaatggttgccgcacttttccggcggcttcgccggcatcgtcgcaacgctcgataccggccgccccggcccaaccatcgcctaccgcgtggatatggacgccctcgatctcaacgaattgctggaacccgaacacctgccgttccgtgaaggcttcgcctcttgcaacagcggcatgatgcatgcatgcggtcatgacggccataccaccatcggcctggggctggcgcacgtcttcaaaagcctggagtcccagcttagcggcaccgtcaaactgatcttccagccggcggaagaaggcacccgcggcgcaaaatcgatggtggaggccggcgtggtggacgacgtcgatttcttcaccgcggtgcatatcggcaccggcgtgccggccggtgagctggtgtgcggcagcgacagctttatggccaccagcaagctggacgtcaccttccgcggcgtcgcctcccacgccggcgccaggccggaagacggtcgcaacgctctgctggcagcggcccaggctgcgctggggctttacgccatcccgcgccacagcgaaggcagctcgcgcatcaatgtcggcgtgctgcaggccggcaccggccgcaacgtgatcgccgatcgggcgtttatgaaggtggaaacgcgcggcgccaccaatgagatcaacgcgttcgtctatcagcaggcgctgaacgccatcgaaggcgcagccaagatgcacggcgtcgcctgcgacatcgcgctgatgggcgctgcgcagagcagcaaaccgactcaaccgtgggtggattacatccgccgccaggcacagcaggtaaccgagctgacctcggtggtcgatcgccgcgaacaggctgcgggttcagaagacgccacctacatgatggagcgggtgaaatcccgcggcggccaggcctcatacgtcattttcggcaccgagctgagcgccgggcaccataacgaaaaattcgacttcaacgagcaggtgatggcggtggcggtgaaaacgctggcgtcgctggcgctgaacctgccgacattcgggagcgaagcatga

SEQ ID NO: 425320 - DNA, 897 bp, Serratia marcescens
atgccagcctcgataaaattgcaccaattgcgtgcatttgtggacgttagccgccagggcagcatccgcgccgccagccgcacctcacgcctttcccagcctgcactgaccaaggccattcaggagctggaagaggtgctgggcgccaagctgtttattcgccgtagccagggtgtggtcttgaccgactgcggcgataactttttccagcatgccagcctgatccttgaagagctgcgggtggcgcaggaagatatccaacagcggttggggttggcgggcggcacggtgaatatcggcgttggtggcagcattgcgcgcaccgtgatgccgcaggtggtcacgcagtttcatcgtgagtatcccaacgtgaaggtgcgcatcgtcgaggggcagctggtgtcgatgatccctgaactgcgccagggcgagctggattttaccgtcaatacctactatcccagcagcctcgacaacgagttgcagtacgaacggctgatggaaaaagagtatcgggtggtggtgcgcaaagggcatccgatggagggggcgacctcgctgaaacagctgcagcactgcgactggaccatgccgacaccgaaaggcagttattaccggttattgcacgatctgttcggggacttgggcatggcgccgtcgatcagcgtgacctgcgagacctttatggcttgtaccagcctggtggcgcagagcgattttgttagcattctgtcggtggacgtgatttcggatccgattctgggcaagcatttggtgccgctcgagctggaagagagtctgccgaaagcgacgttttatcttatccaacgcaaggacaccactttgacgccgatgggcgcgcacctggcgcgcctgtttcgcctttactgtcggtga

SEQ ID NO: 425321 - DNA, 2124 bp, Serratia marcescens
atgtcacctctttttcggctttccctgctgacggctgccatcgccgtcgcgttccctgtccttgctactgataattcatctcagaacgataccgataccgtgaccgtcgtcggcaactggctggacaaccctgataccagttcggtgctgctcaaccatccgggcgcgcgttccatcgtcacccagcagcagatgcacgaacagggcgaccaaaccatcgccgacagcctgcgcggcgtacccggcgtgcaggtgcgcgacagcaacggcaccggcggcagcgacatctcgctcaacgtcggcgtgcgcggcctgacttcgcgtctttctccgcgctccaccattttgatggacggcgtcccgctggcggtcgcgccttacggccagccgcagctgtcgatggccccgctgtctatcggtaatctgcaatcggtggacgtggtgcgcggcggcggcgcggtgcgctacgggccgcagaacgtcggcggcgtgatcaacttcgttacccgagacattcccaaaacgtttggcggcaccgccagcgtacaaacccagggcgccagccacggcggcctgaagaccctgaccagcgcctccgtgggcggcaccgcagacaacggcctcggcgccgagctgctctactccggcctgcacggccagggctaccgcgacaacaacgacaacaccgacatcgacgatttcatgctgaaaacgcgttatgcgttcagcgatcgcgacgagctgctggccaatttccactactacgacgccaaagccggcatgccgggcgggctgagtgccgcgcaatacgcgcaaaacccgttccaatccacgcggccgtgggaccagttcgaaggccgccgcaaggatatgtcgttcaagtacaaacatcaggaagacgacaaacagttcgaagtgttgacctacttcaccgacagttatcgcggcagcaacatcgaatcggaaggcaccggcaaaaacgcgggccagcggcgcatggtctcctatccgcgtcactattcaacctgggctatcgaaccaagctattcgcaggtcttccgcttctgggatatggcgcacgagatcaccctcggttaccgttacctgaatgaaaccatggacgaaaaggcgtcgcgttcggcctggtataatccggcggatatcggctcgacgccggagaccccggactattaccagcacacctccggcggcaccgcggccaacgcgttctatatcgacgacaccatcaacgtcggcaactggacggtcacgccgggcctgcgttatgaaagcatccgcacccacgtggacgatgccttcaacaacatcagccgcgagaaaagctacagcgaaccgctgccgtccttgaacgtgatgtaccacctgtccgattcctggaagctgttcgccaacgccaacacctcgttcggcagcatgcagtatttccaactgaccaaaggcggcaacggcaaccaacctgcgccggggctgacggcggagaaagcgcatacctatgaattcggcacccgctacgacgataccgtggtcaaagccgaagccacgctgttctacatcgacttcgataatcagctgcaatacatcagcaacgacgtgggctggaccaatatgggcgccaccaagcataaaggcatcgagctggcgctcagctacgatctcagcgagctgaaccgggcgctcgacggcgccagcgtctacaccagctatacctacaccaaggccagcaccgataagggcgacttcgccggtaaagacctgccgttctactcgcgccaggtctataccgtcggcacgcgctacgccaccggcagctgggtatggaatctggacggctacgcgcagtccaaacagcattcgccgggcaccgggccggagtacatcacgcaggaaagcgccgatggtcagttcggcgatatcgccggttacatggtgtggaatatgcgcggggaatataacttcgggccgcagttgtcgaacctgacgctgggcgccggggtgaaaaacctgttcgatcagcgttacttcacccgctccaacgacaataacttcggcaagtacgtcggcgaaccgcgcaccttcttcgtgcaggggtcgatcgccttctga

SEQ ID NO: 425322 - DNA, 1137 bp, Serratia marcescens
atgcccgctgttcttatcgccaaagccggccgctggttggccgcctgcgttttgctgttggccggcgccgctcaagccgcgcctatcgtcgtcaccgatgtcgccggccgtcaggtcaccctgccgcaaccggccaaacgcgttattctggccgatgcccgcgcgctgctggcgctgaatattctgcacccgcagcagccgctgaaaaacatcatcgcctgggacaactcgctgaaggtcaaagcaccggatctggttgaggcctatgcgaaaaaatttccgcaggtcatgcaaatccctaccttcgacaacccctacaccagtgatttcagcgtggaaagcgcggtggtgcgccaaccggacctgatcattttcgacatcggtctgctgagcaaattgaaagacagcggcgtactgacccagctggaaaaagtcggcatcccggtgctgatcatcgattttcgccagcagccgctgaccaacaccgtcgccagcatggcgctgttgggtaaagtgtttgacgagcagcccaacgccgacgcctttattcgcctctatcagcagcgcctcgagctggtgcgccagcgcgtcgccacactgaaaccggagcagcgccccagcgtcttcatcgagcgcagcgccggcattaaaggcgatcagtgctgcaacaccttcggcaaaggcagcttcgggcagttcatcgataccgccggcggcaacaatatcggcagcaagctgttttcagacatgggcggtgaagtgaacgtcgagcaggtgatcagcagcaacccggatttctatctgctgaccggcgccgactggagccgcgggcatcgcggcacgctggcggtgccgctgggttacgctaccgatatggccaccagccaaaagaaactggcgcatctactggatcgcaccggcattaacgtgctgaaagcggtgaaagaaaaacgcgtgatggcgatttaccatcaattttacgacacgccgctcaactttatcgccgttgaggcgatcgccaaattcctgcacccggcgctgtttaaagatattgatccgcaagcggatatcgaaatggtgcatcagaaattcaccgcgctggattacagcggcgtcttctggcttacgccgcaataa

SEQ ID NO: 425323 - DNA, 1953 bp, Serratia marcescens
atgcctgacctttcacgcagagacatcctgcgggctgccgccatcggatcggctttctcgctgttgcccgcctcgattcgcaaagcgctggccattcccgccaataaccgcaccggcaccctgcgcgacgtcgaacacgtggtgatcctgatgcaggagaatcgctctttcgaccactacttcggcaccctgcctggcgtgcgcggcttcagcgatcgcttcaccattccactgcccggcgatcgccacgtctggcagcagcagggcgccgagcggctggtgctgccctaccacctggacagcaaacgcggcaacgcccagcgcgtcaccggcacgccgcactcgtgggtggatgagcaagccgcctgggatcacggccgcatgagcgcctggcccacctacaaaacgccggcctcgatgggctactaccgccagcaggagctgccgttccagttcgcgctggccaacgcctttaccctgtgcgacgcctatcactgctccattcacgccggtaccaacaccaaccggctgttccactggaccggcaccaacggcccgtccgccgccgacgtggcggtggtggtcaacgagtgggacagccccggcccggcggagattggctaccagtggacaacctatccggaacggctggaggcaagcggcgtcagctggaaggtgtatcaattcctgccggacaactttaccgacaacccgctggcgggttttcgccaataccgcgccgccagcattcaggtgggcaatccggcgcggccgccgaaagacttcaacgccttcgtgccctacagcgatgcgctcaacgaggccgcgccgctgtacaagggcaacggcaacaccctgccggccgccgacggcaacgatctggacgccatgctggccggattccgcgccgacgtgcagcagggcaaactgccgcaggtcagctggatcatcgcgccggcggcctattcggaacaccccgatccctccagcccggtgcagggcggctggttcacccaagagatcctcaacgcgctgaccgacaacccggaggtgtggagtaaaaccgtcctgctggtcaactacgacgaaaacgacggcttttttgaccatatgccttcgccttccgcgccgtcgctgcgcgaagacggcagcttcgccggtaaatcgaccgtgccgttcgacaccgagatcttccagcacgtggctccgcccggttcgcaggatcaaccgccgccggacggccgcatctacggccccggcccacgggtgccgatgctggtgctgtcgccctggagccgcggcggctgggtcaactcgcaggtcttcgatcacacctcggtgctgcaatttttggaacaccagcgtttgccccaccaacgccgcctggcacgcccttcccgcgcgttgccctaccagctgcacgttgaagccaccgtcgcggccgagcagcgccgcgtgacgctgaacctgttcaataccggcgagcagggagcggtgtttcacgtctacgatcggcgggatctgacgcagatcccgcgccgttttaccgtcgaggcgggtaaggcggtcagcgacgactggctggcggagaatgagtaccatctgtggttgctcggccccaacggctttcatcgcgagctgcgcggcaccctgagccggccacagccggaggtgcgtttgcgcccgacgggccgcagcctgctgctgcagctgaacaatccgagcaccgaagcgatagcggtcaccctcgaacgctgcccctacacgcagcaagggccgtggcctatcacgctgccggcgggcggcagccaccagcaagcgtttgacgcccgcgccagcggcggttggtatgaccttacgctgcaaggcaccgacggctggctgcgccgcctggcggggcggctggaggatggcgaacacagcgtcagcgacccgctgatgggccaggggtaa

SEQ ID NO: 425324 - DNA, 840 bp, Serratia marcescens
atgcatatccaaaagcaagataagatcacccatcttggtgccaactccgattatccggatcaatatgctcccgcattgcttgaagccttgccgcgcgcgcgcggccgcgatctgatcggcgtggacgagcggcagctgccgttcagcggctttgatctgtggaccgccttcgagctgtcctggctcaacgccaagggcaagccggtggtaggcatcggcgaatttaccttcccgcactcctcgtcgaacctgatcgagtccaaatcgttcaagctgtatctcaacagcttcaaccaaacgcgcttcgacagcgtggaacaggtgagcgccgccatgcagcaagatctgtcgcaggcggccaacggccaggtcaccgtcaaactctatccggggctggaaggttacccggcgcagatcgatcgcctgccgggcatcaacatcgacgatctggatatcgcggtcgacgacttcgccttcaaaccggaatacctgagcggcgcggccgagagaggggaaccggtgtcggagacgctgtcttccaatctgctgaaatccaactgcctggtcaccaaccagccggactggggcagcgtggtgatccgctatgaaggccgcaaaatcgatcgcgaaagcctgctgcgctacctgatctccttccgccagcacaacgaattccacgagcagtgcgtcgagcgcattttcaacgacatcaagcagagctgccgcccggaaaaactcagcgtgttcgcgcgctacacccgccgcggcggcctggacatcaaccccttccgcagcgatttcgaaacggcgccggcgctcgggcgcctgatcagacagtaa

SEQ ID NO: 425325 - DNA, 897 bp, Serratia marcescens
atggaaccgaatcagaagttcaagctgttgggcttcacccggcatggcaccatcgcggccaatgtcatggtattggccaccggcaaaaccattaccatggggctgaatgagctggcagacagcgaaatatcggaagatctgagccggcacgagctgcaggcgctgtaccgcaaactctatggcgacaaccaacaaaaaaccgcctacgagctcagcgatcgccatgaacgatcctggtacgcctacctgattattaccgtggcgctcagcgtgatttacattttctcaacgctgtgcggcgtcaagccgatccaaatcccggtgctgaatctcatcacgccgccggcgatcttcatctacccgctcacgttcattctggtggacattctcaacgaattctacgggttgcggctggccaggcgcaccatcatcatctcgtttatcgccaacctgaccttcgtcctgggagtttgggtgacgacgctggtgccgagcattccgcagtgggagtacagcgagacctacaacggcatcgtacacagcatcatggcggtgctggtggcctcgtcggcggcctatctgatctccgagaacgtcaactcctacctgctctgcaaaatcaaagagttgaccaactcccgctacctgtttgtgcgcgtgatcaccagtaccgtagtggcttcggccatcgacagcgtggtgttctgtacgctggcgttctacaacgtgctgagctgggacatcatcaaaaccatgatcctgtcgcagttcctgatcaaggtggtttacgcccttctgggcgtcgggccgatctacgccacccgcagtctgtttaaccgctacatcaataccgaacaagcaaagggcaatgaatatgcatatccaaaagcaagataa

SEQ ID NO: 425326 - DNA, 615 bp, Serratia marcescens
atgaaaaccaccaacgcacagcgcaaaatcaacatcattaaaaatattgaatatctgatgcgtacccgcggtgaaaccaaggcttccttttccaatcgcagcggcctgacgcgcacgactctctacaaaattcttgacggaagagtgaacaacgttcagcaatccaccgtgaatcggatctccgatttcttcggtgtctcctgtgaagagatcgaagactacgatctggaaaagctggagctgctcaacgagacgctgtccaccgagggcaacaagaacccttccgccattccggtgatcccgcagtcgcgctatctggccgtctcgcagcgcaagatcgggcaactggtcaccgagtttcctctgacttatttcttcggcgatgagtcgaacatgttggcaatgaaaatagagaccgaaattaaagggtcatttattcccggcgagatcatcatcataaaacgtccgccggtactgatttgcgattcgcctttgctgtatcactcgggaaaaagcggcttctttgtggttgacgacaaagacagcgaaagcatggacaaacgccctcaggacaccgtgcaattcctgggttacatcgttggagaaaggttataa

SEQ ID NO: 425327 - DNA, 1302 bp, Serratia marcescens
gtgataaagatcgaagattatccgctcacccgggtgccgcaggataaacgagtttcgtttttaagcgtggccatcgtacatatgggcatgttgaccgcgctggaccagttcatgctcggcgccgtgctcggcaactccatgacgctgattgacgccttcaccgccattttcgtcggcagcctaatcttcggcgtggtgacctacggcctggggctggcggggatgcgcgaaggcatttccggcagcctgctggcgcgctggtgcggcttcggccgtctgggctcggtgctgatcggcgtggtggtggccgtcagcctgctgggttggttcggcattcagaacgccattttcgccaagtcgctcgacttcgcgctcggcaataagctgggcttcggcctggccgccgggctctcgggcacgctgctgaccatcctggtggcattcggcttcaaggcgctgcgcatcgccgcccgtatcgcggtgccgatgttcatcatgctggtggcctatatttcggtgaccgcgctttccggccataacctgcaggagatcatccagctggcgccgccgggtgaaccgctgaccatcagcgccggcatcaccatcgtcgtcggcggcgccatcgtggccagcctgatgacccccgatctgactcgttactccaaaaacggcaagcacgtgctcggcgtcacgctcttcaccatcatcgccggcgagttcgtggtgaacggcctggcgatcctgatcgccaaaaccctgggcaccgccgatgtggtcaccatcatgtcacaagcggccggcggcgccggtttgctggtggtggtgttctccaccctgcgcgtcaacgatctcaacctgtactcttcttcgctgggcatcgtcaacgcggtggaaggcatcaccggcaaaaagctgaagtacacctacaccacgttggtgatcggcattcttggcaccacgctgtcggtgctgggcattcttgaccgctttgtcgacttcctgacggtgcttggcgtggtcttcccgccgattatcggcatcatgctggtggactattacctgctgcgcagccaccgcaagatcctggacgagagccgccgtaccggccagctgccgagcgaaacgccgaccatcggctgggcggcgatcgtcgccagcatcgtcggcggcgccgttggcctggcgaccgaatggggcgtgccgaccatcaactctctggtggccgccagcctgctgtattgggtgctcaaactggccttcagccgggcgcaaaaaccgctggcctcacagaaatcgctctga

SEQ ID NO: 425328 - DNA, 690 bp, Serratia marcescens
atgggttcatcgcataaaaataatgaatcttattttaagggcctcatcaccatgatggagcacctgagcgaaccctggggcatcaaagatcagctgtcccgccacctctatatgaaccgcgccgcttatctctataccaatacgccgctgaatttcgacgtcgccggtaaatatgaccacgagttccccgccgactgggccgactccgccgccgactttatcgagcatgacaagatgaccgaagcggcgcgcgatcgggtcacggtcatagaaacacactactggtacggcaaagacagcctgacgccgtttatcagcgaaaagctgccggtgtacaatgatgacaaacaggtgattggcgtgatctggaacgccaagccgatgaacagcctgtcgccgctgaaatacatcaatcagcaaaaacccagcgtgctgaccacagaagtcaataacgagctgttcacccgtgccgaactagatgtcattttccttatgctgcaacgatttacggtgaaagagatcgccaaaatctataacgtcagcaataagaccatcgaaaaccgcatttataacatttaccagaaggccaacgtgcatactcagcagcaatttgaggaatactgcaaatacgccaatctggataactacattcccgatcgcctgataaccaaaggcattcagtttatttga

SEQ ID NO: 425329 - DNA, 411 bp, Serratia marcescens
atgaatattaatatcaccgacaaacccaacccgcaggatgaagagttcgttatcgacagcctctgggcgcacaatcacaaaacccagcccgtagacattcacccgctgttcctgaccgtcaccgacgacaatcagcagatcgtcggcggcctggtcgcgcgcacctggtggggcggcctggaagtgcagtatctgtgggtcggcgatcaatgccgcaaaagcggatacggccgccaattgatggagctggccgaagaagaagcccgcaagcgcggttgccatatggcctatgtcgataccttcgatttccaggccagaggcttctacgaaaaactgggctaccgggtctacggcgagctgggcgactatgcgcatcgccacacccgccattacctggctaaaagcctgtaa

SEQ ID NO: 425330 - DNA, 915 bp, Serratia marcescens
atgttcttgtccaaccggcattttatctccgcgcttctggcgctcgccatcggcctttggctgccgggctccgtgctggccaggcccgatttggaacgcaagatcggcactaccgtagccgatagcgattctgcggattatcgtttcagcgatctgcgcttcacctccgccgatggccaacggcattaccgtgtgcgcatcgcccagccgcgtcgggcgcctgcgcctggcggctatccaacggtttatttcctcgacggcaatgcggtgctgatggagttgaacgccgccttactggccaaattggcagcggcgaagcggccgccggtgctggtgatgatcggttatgacaacgatctgcgcatcgatgccgccggccgcgcctacgactatacgctccctctgccggcaggcatgaagaaagcgccgcgggccggcgggggcgcggatgcgttcctgcaattgattgaaactcggatcaaaccggcgatcgccgccaaactggtggtcgatcctcagcggcaaacgctgtggggccactcctacggcgggctcttcgttctgcacacgctgttcgcccatcccgccgccttccagcgctacatcgccgtggaaccctcactgtggtggggtaacggcatgatcctgcaagaagcgcagcagatgacggaacgacgtgcggtgccggcgacaaggctgcaactgtgggttggcctggcagaacgcgatcgcgcggctccgcccggcgtgaagagccccactctgccggcggatgcaacgcatttgctggccgaacagctggcgcagctcggcggtctcaccgtcggctatcgggagtggcccgccttagggcacggcgccatgctgggcgcggccatcgagccggcgctgagcagcgtcatcgcagaggattga

SEQ ID NO: 425331 - DNA, 885 bp, Serratia marcescens
atgaaaagacaaattattaaatttattataaagcagctggccgtattggcccccgaattcaaggccagattgctctacaaaaaagcgtttggcaaaccgttaaacttgcaggcgccgtccacctggaatgaaaagatcaatcacctgaagttgaatggctatagtcacaatgcgttggtaaagcaatgcgcagataaatatgcggtgagagagtacatcaaagaaaaggggtgcgaagagatcctgaatgaattgtactttgcctgcgattcagtaaacgatattccgtgggacacgttgccggacaaatttgtgatcaaagggaatcacggttccgggtataacctgatttgccagaataaaaaattgctgaatatcacgagcgccaaaaaattgatcgacggctggatgaaagacgattattggaaaacctatgtagaactcaactacaaagggatacaaaaaaagatcattggcgagaagtatatcgaatcggccaatggtcacgggcctgaagactataagatctattgcttccgcggcgtgccttactgcaccttactgtgtgtcggcagggataccgggtcgccgaagtattacttctttgataaagatttcaagtttctgtgctacagcgatgactgtctggccttgagccaggaagaaatagacgccttcgtgaagccagagggttacgatgagctgtttgagtacgcctcgcgcttgtccgcgcccttcgagtttgttcgcgttgatttctacatctcgcaaggccgaatcatttttggcgagctgacctttaccccttccgccgggctggatacggatatcctgccgccgaccgatgttttgcttggcgagatgctgacgctgcaacagcactga

SEQ ID NO: 425332 - DNA, 1296 bp, Serratia marcescens
atgaatcagcgtttggatatcatcggtattggccttggcccgtcgaatcttagcctggcggccttagggagtgaaatagagggatttacggggcaattcctggaacgcaaaccccatttctcctggcacccagggatgatcctggcggattgcagcatgcagaccaactttttaaaagacctggtgagcgcggttgccccaaccaaccggtacagctttctcaactatctggtaaaaaacaggaagttctaccgtttcctgaccacggaacagcgcaccgcatcgcgtgaagagtttgccgattacctctcctgggccgccggcggcatgcgctcattagcatttaatcaagacgttcaacgggtcgagtttgacgatcggcagcgtcagttcgtggtgaccacctcgaataaggtcttccacgccaggcacgtcagcattgggattggcaagaaaataaagttgcctgattgcgtgacggcgcaaagcgatcgctgtttccatgccagcgaaatgatgctgcgcaaccccgatctgacaggcaaacgcgtggcgatcgtcggcggcggccagagcggcgccgacctgttcctgaatatttttaaaggggaatgggggcaaccggaacagctcgactggatatcgcgccgcaacaattacaacgcgctcgatgaagcggcctttgccaacgaatatttcacgcccgattacgtcgagagcttttactcgctggatagcgcggccaagcggcatatgctggccgaacagaagatgacctcagacggcatcaccagtgagtcgctgctggcgatttatcgcgccatgtaccaccgcttcgacgtcctgcgcgagaaattatgggtgcgcctgctgcccagccgttcgctgacggccgtgaaacacacgctggataacgcctaccaactcgaaacgcgccatcatctcgatcacggcgaagaagccttcaaggcggacgtggtgatctttgccaccggttaccaatcggcaacgccagagttccttgagcctttggcccaccgtttgctgaccactgcggatggcgaataccgcatcgcccccgactttacctttgagtgggaaggccctgcggagaactgcttattcgccatgaacgccagtatgcataatcacggcattgccgatccgcagttgagcctgatggcgtggcgatcggcccgtattcttaatcgcgctttagaacaacagccgtttgatctgagtacaacgccgagtgcacttcaatggcgaagtgaaggtgtctctcccacgttttaa

SEQ ID NO: 425333 - DNA, 759 bp, Serratia marcescens
atgaggttcttaatcaataaccgaattatcttcgatgaggataactcgacgctggcgttggcggaggagaacctcgaaccggtgacgctcaccacgatagccaatcgtctgctcgcgctgttggtaaaaaataacggcatcttgattagccgggactttattttttccaccgtctgggacgatcatggcaaaacggcctcgaacagtaacctgaacaactatatcgccagcctgcgccgtacatttgccggcttgggagagagcgaaattctggttaccgtgccgaggcagggatttatgtttaccgccgccagcattcattccgtggcggacaatatgacgcaggacgaaactgttccagccgcgcctttacccgtccggcgccgttgcgatgccattttacctaaggtaacgctgctgtttatcgggattgcgttggtattggcgggcgtttacttttttaccgaacgttacgacaccgcttatcagacccagatcgccagctacaaatcttgccgcgtggagacgctgaacgccagcgagcggatcgacgagcggtatattgccgacgccctggaaaggctcaaaagccgtggttttgattgtgatgtaccggcaacggtttattactctcgattgacataccattatacgaactacaaaaagctgattgatttcatctcgtattgcccgaaacaccgcgttaagaatatggatgcgcactgtgaagatgagtttgaggtgatcaatgaaggttag

SEQ ID NO: 425334 - DNA, 486 bp, Serratia marcescens
atgaaggttagctcgcgccgtgctttctacctggcattatctgctgctattgcccttgttattgttatattgatttatttattgaccgcctcgcgagatttccctgagtgcaatgcgtctttatcgacgacgcgcatgacgccgaatgggacggtaaccagcggtttgtacgtgaacatcgtgcgttcaggatggcgccgcgcgaccattacgcttaacggtttagcctatcgggatggaaagaagcaggtgatagcccgcgtgctcgaaacgaagtatcactatcatcgtgggtactactatgtcgccattgaaaagaaaatccttcaatccatggataacttcacctactcggatgcgcagacctttctgttgggtgaggaaaaacattactatgttttaaaaattgccaaattgaatgatgacaattttattatgtactacggcaggcagcctgagttgctgtgttccgtaaccagaaaatga

SEQ ID NO: 425335 - DNA, 777 bp, Serratia marcescens
atgattttcattataaacggaagggttaagttcaatgaatacgaaggaaccctggagagcgtcaatgccccgcacaatatgcagccgctagcggccgcggcttgccgtttgctttctattttcgtcaggaacaatgaaatgttgattaagcgtcaacaattacttgaagaggtctgggaagaacgaggactaaaaggaacaaacagcaacttgaataactatatctcactattgcgtcgccatctggcgcaacttggcgagacggagttgataatcacttaccctcggcaaggctttaagttcgttgcaaaaaaaattagccgacatgccactgccgaacctgaaaaagaacaaaacataatggaggaaaccgctgttcccacgcaaccgccggggcaagccgcccccagagggcgtggtagcggaaaactattatcggcctggcggcagtttcagagttggaataaatgggttaatctcatcctattcatcagcatcgctgcattgatcatggccagccatcagtactccgtgcgtaacaacctattcagcggcactcagttcgcgggttgccaaatatacaacatggggtgggattactcagagaaggaaacggtaaccgacatggtaaaggcctatgtcaattgccagaaaaagactaaagtttattactataacaaaatcacgcaggataacaggcagtttgaagagaaaatgctcgtatcctgccgagaaaatgcaggccgccaaccttgcgaagtggtttatattccataa

SEQ ID NO: 425336 - DNA, 549 bp, Serratia marcescens
atgaaactgaataaaatcatgctggctgccgtcatggcgtttggtgtttcttctgtggctcatgctgcggttaaagatcaagggcacggtaaagtgaccttcagcggctctattatcgatgcgccttgctctatcgcgcctgagtcaatcgatcagaccgttgagctgggcgccatctccaacgtggcgctgaaaaacggcggtaaatccacgccgcgtaacttccagatcaagctggaaaactgcgagctgaccaccgtcgagccaggcaaaaacaacactgtttcgctgactttctcaggttcagcgtcggaagcggacagcaagctgctgggcatcaccggtaccgctaaaggggctggcatcgccatcaccgacggcgccggcactaacatcgaactgggcaaggcttctaaagcacgtgatctgcagaacggcgccaacaccctgagtttctccgcttacctgcagggcagcagcgcgtccaatgcgacgatcgttccgggtgaattccagtctgttgccgactttaccctggcttaccagtaa

SEQ ID NO: 425337 - DNA, 543 bp, Serratia marcescens
atgaagcatcagataacaaagttaggggcgttttgcctattgtcggtgccgttgttctttgtgtcgcaggctattgctgcttcacagggcgaggggcgcgtcaatatgcaaggggccattaatgatgcagcttgtgcgatcgctatggaaagccgtgaacagattatcgatatggaggttattcctgtctccgatattgctcgcgatgggcaggggaaaaacgtctctttcagtatcaagttagtgaattgcatcttggagagagcagataaaaagttaccgggttggaagcaatttcaggtgacttttgatggccatgccgatggcgagatgtttggcattcacggagaagcctccggtgtggcgttaaagataagcgatgatgacggcaatatcgccaggccgggcatgccgttgccgttaatgaatattcctctggggagttatcggttgaattacgtcataaacctcatggcgaatcgtcaaccattaacggcgggaagttatttttcatcggttagattcaaaatggattattactga

SEQ ID NO: 425338 - DNA, 2544 bp, Serratia marcescens
atgatgtttttgcctgccggaaagtcatttcgtttatctattttgagtgcctgggtggcgttgtgctgctttggtttcacttctgctgccggcgctcaggaggaaatccagttcaatattgatgtactggacgtgaacgatcgcaaaaacatcgatctgagccagttcgctcgcagcggctacattatgccgggcacttacggtatggcggtgcacgtcaataaaagtgatttgccggaacagcaaatcgctttctatgcgccggatgatgatcctaacggcagccgcgcctgcgtttcgcgttctttagtggagcagttggggctgaaaacggcgctgtaccgagacttgagttggtggcatcagggggagtgcctggatgaggccagcttgaaaggcttggaagtgcgcggtgacctggccacttcgtcactttatctcagcattccgcaggcctatctggactatgtttcggaggattgggatccgccgtcgcgctgggatgaaggcattccggggctgttgcttgattacaacctcaatgcgcaaacccagcatcagatacaggcgggtacgcgtggctatagcatgagcggcaacggtactgcgggggctaacctgggtgcctggcggttgcgggcagattggcaggcgcagctaaatcaccagaccgggtcggggcaaccgactgacaagcgtttggattggagccgttactatgcttatcgggccgtgccggcgttgcgatcaaagctaacgcttggtgaagggtatcttgattccgggctgttcgacagcttccgcttcggcggcctgagcctgcgctctgacgacaacatgttgccgcctaacctgcgtggttatgcgccggaggtgacgggagtcgcgaagagcaatgccaaagtgattatcagccaacaggggcgggtgttatacgagaccacggtcgcggcggggccgttccgcatccaggatctgaatgatgcggtgtccggcgatttggacgtgcgggtggaagagcaagacggcagcgtgcagacgttcacgatgagcaccgccagcattccgtatctgacgcggccgggatcgctgcgctacaagctggctttgggtaaaccctccgatctcgatcaccgctatcgcgggccgctgttcggcaccggtgagttttcctggggggtgagcaacggctggtcgctgtacggcggcgggttgttcgggggggattataacgctgcggcgctgggcatcggccgcgatctgatgctgctgggggcgctgtcgttcgacgccacccagtcgcgcgccaggttgccgtataacggcgaaacgctgggcggcggttcataccgcctcagctattcgaagagtttcgatgagctggacagccaggtgacctttgccggttaccgcttctcggagcagaattttatgagcatgagcgaatatctggatgcgcgcgagtacggcaggcgtttcggtaacagtaaagagatgtacaccattacctataaccaacagctgcgggacctgggggtgagcgcttatctcaactacagccatcagacttattgggataaaccggccaacgatcgttataacctgacgctgtcgcgctatttcgacgtcggccgtttcaaaaatctggcgctgtcgctgtcggcgtatcgtaaccgttacaacgagcgcaacgacgacggcatgtatctgtcgctgtcgctgccgtggggcaacggcgccacgttaagctacaacgcgacgctcaaccgcaatgacaacactcatcgggcaagctattacgatcgcctcgacggccgcagcaactaccagctcagcgccggcggctcgcgcagcggcgccaatctgagcggttattacacccgcgatagcgatatggcgcgcgtaaccgctaacgccggctatcagcaggacaggtacagcgctttcggcctgtcggcacaggggggcatgacgctgaccgccgaaggcggagcgttgcaccgtagcaacctgccgggcggcactcgcttgctgctggataccgaaggagtgggcggggtgccggtgcgcggctatggcagcgttgcggcgaccaaccgctgggggaaagcggtggtggcggatgtcaacagctactaccgcaacaaggccagcatcgatctggacgagctgggcgatagcgccgaggcgatcaaatcggtggtgcaggcgacgctgaccgaaggcgccatcggctaccgcaagtttgaagtgattgccggggagaaagcgatggcggtgatcaagttggcggatggcagcgagccgccgttcggcgccacggtgcggaacgcgcggaaacaggaaaccggcatcgtcaacgacggcggcagcgtgtatctgagcggtatcaaagccggagaaaatatgaccgtgcactgggggggcacagcacagtgcgaagtgcaaatgccgatgttattgccgccagaaatgctggtgaataatttactgcttccttgccgggtattagcgggagcggatgaattgaaaagtggagcgtaa

SEQ ID NO: 425339 - DNA, 582 bp, Serratia marcescens
atgtttagtgttgacgaggcaaatgcagtgatgagaaatattttgcccttagcggaaacagttcaatttagccgccgggaggagcgtcatccgtactgtttagaattacgactagtaacggggtggacctcttacctattaggttccgactgcactggtttattgccgcctctgccgccaattacgccgcgcccaccggagccgctttcttgcgcggtgacatggcaaagcagcggcgagattgattttggcgtgatgacgcagggtgaaaacaaagtgaagggcattgccgccaaactggcctgccagggcgggacttcaggaaaagcccgcctcagatttaccgatgtcaatcaggtgggggcaaatacggtaacgctgcgtaagagcggcacgagtgatcaaataaaagcgaagctgtcgattggcgatccaaattcgtctaatgagcaggtgattgacgtctcgccaggttttaatgcgacctatgcctttgtagccaaattggacggcgcgcagctgagcggtattgacggcggcactttttcaggcaatgcgctgattgtgtttgaagtcatttag

SEQ ID NO: 425340 - DNA, 765 bp, Serratia marcescens
atgaatatatctatgcaatataatgtcgcgcgagccgtaccggcaatagcattaattggcagtgtctttttgtcgatgtcgtcacaggcggccattgccttggatcgcacccgcgttattttcgatggtggcctgcagtcggtgagcctgagcgtcagcaaccaaaataagcagctgccttatttagcgcagggctggctggaagacgagcagggcaacaagattcaaagcccgttgacggtgctgccgccggtgcagcgcattgagccgggcaagccaagccaggtgaagatccaggcgttgccggcggccaaacagctgccgcaggacagggaaacgctgtactactttaacctgcgtgagatcccgccgaagagcaacaagccgaactcgctgcagatcgcgctgcagacgcgcatcaagctgttttatcgcccggcggcgatagcgccggaacgcaacgctgcgccgtggcaggagcaattaacgctgaccaggcaaggcgataaatacatagtcaataacccgacgccgtattacgtcacccttatcgatgcggccagccgtaaaggcgctgcgggcgcgcaaaacttcgaaccgtttatggtgccgccgaagggcagcgcgccattgtcggtgaacgccgctaccctgggcggtaatccagtgctgacctatatcaatgactatggcggccggccgcagctggcgttcaattgtcaggcggacaaatgcagcgtcgtaccggagaagaaaagctcgtga

SEQ ID NO: 425341 - DNA, 657 bp, Serratia marcescens
atggcacgtaggcatgcaataccggaaatctggcgctatggggtgaacggatggcgttacggattgacgttggcggggctggcgctgatggcgccgctcagcgtggcgatgatgctgtggctgctgcctgcaacacgggcggcggataactggcaggtggagggttccaatggcgtgctgcatatcaggggggcgctggccgagagtgcttgccggttggagatggcttctgctcgccaggatatatggctgggagaaatggcgaccggaaggcttgaacaggtgggggctcgcggtacgccggtggcggttgagttgcgcctgcgcgattgcttgcgtattcggtcggccagccgggatgagcgtacgggtgctttaagctgggcaccggatcaaccggcggtcagagtgagcttcagcgcgcgggccgatcgggataacccgcagctgataaaagcgcagggggtgagcggcatgggattgcgaatgctggatgagcacggccgcaacgtgcgcttgggcagccgaggtgagccgctgtggctgacgccggggagcaatgcgctggcttactggattatggctgagcgtaccgcgcagcctctggtggcgggcagctatcgtgccgtggtggattttcatctgagctatgactga

SEQ ID NO: 425342 - DNA, 501 bp, Serratia marcescens
gtgaaaatgataaccagagtacgacaaaccgctgcggcgttgcttctgtgcggcagtagcgtaatggccttcgcacaggcggcgacagtgaaagtcagtgtgacggtgatgcagcctttgccctgcaccatcaacggcggacggccgattgaggtggattttggcgatgaggtgatgacaacacgcattaacggtaacttttaccgtatgccgatagatttttcgttcacctgtaataatccctataaaaacgccatgcggttgcaggtgcagggcggcaccgccaatttcggccaggggctgctcggcaccagtcgggatggtttggctatcctcatcttgcaaaggcaaggtggggatcaactgccgctgaattcctggcacaatttttcctatcccaatccggttaaattggatgccgtgccggtaaagcggagcggcgtcaatctggcgacgggagaattcaccgcatccgcaacgttgcgagtcgactatcaataa

SEQ ID NO: 425343 - DNA, 411 bp, Serratia marcescens
atgcaatttcgtggcggcttgattgccccgcctccttgcacgattaacgccggggcgaaaatagatgtcgattttggctcgcgcgttgggatcaaaaaagtggatggcgttaactaccgccaggcgatcgattaccaccttgattgtgaaccgggggcgcgcccttgggagctaaggttaaccctgaaggggaatggcaccgcgtttgatggggccgcgctacagagcaataaagcagatctggggattcgcgtttatcaaaatgacgagccttttgtgatctacagctccatttctatcgatcccagtagcccgccgcggctggaggcggtgccggtgagcagaccgggggccacgttgacggaaggcgcttttttcgcgaccgcgactttgctggctgaatttttctag

SEQ ID NO: 425344 - DNA, 531 bp, Serratia marcescens
atgaaagtttttccgtttttttctgcagcaatggcgttattgattgttttcactccacacgcccgggcagaggataacctgtattttcatggcgagctggtggcggaaccctgcgtgatcccgcctggcagtgaaattatcccgctcgattttggtaccgtgatagataaatacctttatagctatcaacgtacgttagccgttccattggccattcagctggcggagtgcgatctgagtctggggcaatccctgacggtaacttttgtcggtagcgaaaacggtagcttaccaggctatttagcgttggataccggcagccaggccagaggcgttgcaatcggcttagagagtatggaaggtaaatcgctgccgctgaataaacggggcgaaaagatctcactggtaagcggtaataatcagatccgtcttcaggcctatattcgaggtgagccgcttgctctacaaagcagaaccattgttcgtggggattttagtgctgctgtcacctttaacctggaatatgaatag

SEQ ID NO: 425345 - DNA, 540 bp, Serratia marcescens
atggaacgaatcaatatcgttattgatgatgacaatgcttatttcgtggcgggattacgtttcagcattacggaatatgcggaaaaaaatcataagacggtaagttttttgtcgcctgatgatggcgtacaggctgatatggtgattgcagcatcgatgtggcgcgcacaacgatggcgtaaaatgaatccttgcgaagctgtatcggctatcatgaccattaaagaaaaaagagtagggcgcgttaatgagagtgagagtgtcctttatcgaaccgataaccggagcagactatttgagttgttggcgaaaagcttggttaaaaactctgctgaaaaacagcttctcggttatgttctgacgagtagggaaaaacaggtaatcggttttctaaaaagaggttttgatcaatcacaaacagccaaactcctagggataaacgtaaaaacggtacatagccataaacggtcggtgatgaaaaaactgatgctgaatcgccatcgagaatttatgtattggttaatatcgcaagatgactaa

SEQ ID NO: 425346 - DNA, 576 bp, Serratia marcescens
atgtcgtcgaaaattgagaatgtgaagaaagagctgctgtcggacaactggtatgtgctgcataagtatacgttcgatctgaaacgcaaaaacggcggttcggtgcaacagatgcgcgaggtctacgatcgcggcaacggcgccaccattttgctgtacaaccgcgccaagggcacggtggtgctgaccaaccagttccgcatgccgacctatgtcaacggcaacgagagcggcatgctgctcgaggcctgcgccggcctgctggacgccgattctccggagcagtgcgcgcgccgcgaagcggtggaagagaccggttttcaggtgggcgaggtcaagaaaatcttcgaagcctacatgtcgccgggcggcgtgaccgagatcgtgcacttctttatcgccgaataccatgacgatgagcggcgtgcggccggcggcggcattgaagatgaagatattgaagtgatcgaactgccgttcagcgaagcggtggcgatgatcgccgacggccgcattaaagacggcaagaccatcatgctgctgcagtatttgcagatccatcgggtgatagcataa

SEQ ID NO: 425347 - DNA, 1602 bp, Serratia marcescens
atggccagcgccggcgctcaggcggcggactgcgccaacgtgccggaatgggcggctaaaacctacgccatcaaaggcacccgggtcataaaggacaatacgctgttcgccaataaatggtgggcagaaaaacaccatatccccggcgtagccggttgggtcggcgaaccctggcaaaacctcggccagtgtgccgcccaggagactccctggtggcaagcctatgccgagcaggagggattcaacaatgcgttgcgttacatcggcaccagcctggatgcgctgaatcaggacgccgaacaggcgctggcggactcgcaagatgcccgcacgccgctgtattggctcaaacgcaccatgcagatgtacccgtcagacacgccaaatgtctaccggctgccgatcgttcacgccgccagttggtacaactccttgtatggcagcatggcgcgcggaattttcttctacacccgcacgcttgggaatcagggcgacagcgtcacgataaaggccggaactattccggcaggcagctcatgttttgcggcgaccagcgcccgtttcgataacgttgacaacatctactcgaacaaacgaaagcttgatgccaacaaggagaccacttataccttcgcgcaaaccggcgtcctggccttaggctgcagccatccgcaaaaacagcaaaacggcgaatttgtccggttagaggtgagcggcggtggcgacagcaacctgcacattctcggtcagaatacgcaaggcgactgggagcaacagaaggccggcgccggcatcctgggcggcgccgtgttgtatgacggtaaatccaatcacttcgtaccgaagaaaatcaccgacaaaacgcaggagatcatcaataaatcgctgggggaaagcctcagcatcgccgcgctgtatgaagcggtgaacggcatggacggcacccacgagatgttcacggcatcacagggttccctgttcctcaactacagcaaatgctgcagcgccgaataccgcgagggcgcggtcaacgtcggtttcttcgccgacaagaccacccgcgccaacgccgcccactggggactctggcacgaactggggcatgagaacgaaccgcagtgggaatacaacgtattccccgaagtgcaggtcaaccgttattcggtactggcttgccgcctgttgtcggaacgcaacgatttcgactatggctcaacctgcaaactgggcgccgacaaggagtgggatcgggatgcggtgcgtaagttcctcgcatcagaagtgcgctatgacgaattcccgaagaagcagcatgatgtcgcgctgggtttttttacccatctgttgcacgcttatgatgaatcctttttcccgcggattaatcaggaacggctgaagcagactttcgcggcgccgggtaacaccatgcaggataagtataaatacgttttcggcacgccgcagaaggtcatcgacttcagcgtggtcgtctacagccgggaggcggggcaggatctgcgcgagtacttcacccgctgggggctgcgcttcagcgaccacgcagcgaagcaggtggccgcgatgaatctgccgacgccctga

SEQ ID NO: 425348 - DNA, 1677 bp, Serratia marcescens
ttgcttgttaaacgttccgtgaccggcagcctggccagagcgctgttcggcatcgtgatactgtcggtgctcgccaccgggttggcgttgacgaccgtcgccggcagccagagcgatgccgaggcgatcaacatcgccggttcgctgcgcatgcaaagctaccgcttggccttcgatctcgagcggcagagcccggagttggagctgcacctgcagcagtatcggcaatctttgcaggcgcccgcgttgcaaaagctggcgcgcttttacgtcccggccgaggtgcgcaaccactatctggcgctgcaacgaacatggcaaacgatggagcggcagatccgcgacgggcaggcggccgcctaccgggctgaggtcgccggctacgtcaaccgcgtcgatcatttcgtttccgctctgcagcgttattccgagttgaaactcaccctggtggccgccgtcagcgtactgggctacgccgccatcatcggtctggtgctgttctgcatccgctttatgcgccgccaggtggtcacgccgctgcagcatctggtcgacgccagccagcgcgtgcaacagcgcgactttcgccatccgcagctggacgtggcgctgccgaacgagctcggcgtgctgtcgcaaactttcagcgccatgtctgacgagctggcccgcctctatcagtcgctggaactgaaagtgcaggaaaagacccagcgcctgcagcaggccaacgacacgctggaggtgctctatcgctgctcgcaggcgctgagcgtgcgccagatcgatcagcaggcgttcgaaaatgcgctgcgcatcgtgcgccaaagcgaacgactgcgctgcatccggttgaacgtggcggacgatcatggccagtggcaactgaacgaaggagagccggcgccggcgcaaacctggagcgcgctgccgatcacccaaggcgataaactgctgggcgagttgcgatggcagcccgaagcgcagccgccgcatcctcacctgatgcagagcctggccaacatgctggggcgcggcgtctacttcaaccgggcgcaaaagcagcaccaatatctgctgttgatggaagaacgtggaaccatcgcacgcgagctgcacgattcgctggcgcagacgctgtcgttcctgcgcatccagctgacgctgctccggcgcgccgccgacgatccggcggcgcaggcgattatcgacgatttcgagcgcacgctggccgatgcctatcgccagctgagagaattgctggccaccttccgcctcaacattcaggaggcggatctgaatgccgcgctggagcaactgttgcagccattaaaggcgctaacccccgcgcggattcagttacactgtcggctgccctcgcaggcgctcaacgcccagcagcaggtgcacgcactgcagatcgtgcgcgaggcggtgctcaatgccatcaagcacgccggagcgaacgagatcgcggtatgttgcgaggtcaacgccgctggcgacaacgtattcagcattaccgacgacggttgcggcatcgccagtctggaagaaccggaagggcattacggcttgaccatcatgagcgaacgcgcggcgcgactgggaggaacgctgcgcatccggcgcagaagcggcggcggcacggcggtctgcctgacattctcgccctga

SEQ ID NO: 425349 - DNA, 633 bp, Serratia marcescens
atggtgatgaagcaataccgagtcatgatcgttgacgatcatccgttgatgcggcgcggcatcaaacaactgctgggactggatgcgcgatttggcgtggtggcagaggccggcaacggcagcgaggcggttgcgctggcgctgcagcacgctccggacgtgatcttgttggatctgaacatgaagggcatgtcggggctggatacgctgcgggccctgcgcgacgaaggcgtggacgcgcgcatcatcgtgctgacggtctccgacgcgcgcagcgatctgtatgcgctgatcgacgccggcgccgacggctatctgctgaaagacagcgaacccgaacaactgctggagcacatcagcgccgccgccgagggccagaacgtgatcagcgacgccatggccgactatttgctggcgcgcagcgagcagcgcgaccccttcgccgccttgaccgaacgcgaactggacgtcctgcaagaggtggcgcgcggcctgtccaacaagcaggtggcggcgcagttgcatatctctgaagaaaccgtgaaggtgcacatccgcaacatactgcgcaagctggacgtgcgttctcgcgtggcggcgacggtgatgtacctggagtacaaaagccactga

SEQ ID NO: 425350 - DNA, 279 bp, Serratia marcescens
atgggaattaacccggtatttgcccgtcggctttatttatgctggctgatcagccacagtgagcggcccaatgtgccgcggttgatggcgctgaccggctggccgcgccgtacgttgcaggatgtgcttaaggcgctgcccggcatgggcgtcgagctgcagttcgtgcagcagggcgtgcgcaacaacgacggtttctatcagttggaaagctgggggccgttcaacaagagctgggtgcaccagcatcatcaggcgctgctcagcgccatcgagtaa

SEQ ID NO: 425351 - DNA, 3138 bp, Serratia marcescens
atggccaatttttttattgatcgcccgattttcgcctgggtgctggcaattattctttgcctgaccggggcgttggcgattttttctttaccggtagaacaatacccgaatttggcgccgccgaacgtgcgcatcagcgcaacttacccaggtgcttcggcgcaaacgctggaaaacaccgttacccaaatcattgaacagaatatgaccggcctcgacaacatgatgtacatgtcgtcgcagagcaccaataccggccaggcgaccgtgaccttgacgttcgaagccggcaccgatcccaacgaggcgatgcagcaggtgcaaaaccagctgcaggccgcgatcaaacgcctgccgcaggcggtgcaaaatcagggggtgacggtctcgaaatccggcgacaccacgctgatgatggtggcgttcgtctccaccgatggcagcatggacaggcaggacatcgccgattacatcgtctccaacctgcaggatccgctcagccgcatcaacggggtcggcagcatggacgtgtacggctcgcaatacgccatgcgcatctggctcgatcccaacaagctcaacagctatcagttgaccacccaggatgtggtcagcgccattcagtcgcagaacgcccaagtcgcggtcggccagttgggcggcacgccatcggtcgataagcaggcgctgaacgccaccattaacgcccagtcgcagctccagacgccggaacagttccgccaaatcaccctgcgggtcaatcaggacggttcgctggtgacgctgggcaacgtcgccaccgtcgaactgggcggcgaaaactacaactacctcagccgttacaacggcatgcaggccgcgggcatgaacatcaagctggcctccggcgccaacgaactgcagaccgaccagttggtgaaggacaagatcgccgagctgtcgcaatacttcccgcacgggctggaggccaaagtggcctatgaaaccacccccttcgtcaaagcctcgatcaaggacgtggtgaaaacgctgctggaagccatcctgctggtgttcctggtgatgtatctgttcctgcagaacttccgcgccacgctgatccccaccatcgccgtgccggtggtgctgctgggcaccttcgccatcctttccgcctgcggcttcagcatcaatacccttaccatgttcgccatggtgctggcgatcggcctgctggtggacgacgccatcgtggtagtggaaaacgtcgaacgcgtgatgagcgaagaaggcctgccgccgcgtgaagccacgcgcaaatccatggggcaaattcagagcgcgctggtcggcatcgccctggtgctgtcggcggtgttcgtgccgatggcgttcttcggcggcaccaccggcgccatctatcgccagttctccatcaccatcgtttccgccatggtgttgtcggtgctggtggcgatgatcctgaccccggccctgtgcgccacgctgctcaaaccgatcgccaaggggcaccatcacggcaagcgcggcttcttcggctggttcaaccgcatgttcaaccgcaacgccgaacgctatgagcgcggcgtggggcgcattctgcacgccagcggccgctacatggtgatttatctgctgttgctcggcggcatggcgctgctgttcatcaagctgccgacctcgttcctgccgcaggaagaccgcggcatcttcaccgtacaggtacagctgccggcgggctcgaccctgcagcaaacctctaaagtggtggaaaaggtcgagcagtatttcctcaccgaagagaaacaggacgtgttgtcggtgttcgccatcatcggctccgggccggggggcaacggccaaaacgtggcgcgtctgttcgttcggctgaaagactgggatctgcgcacctcgggcgccaacagctcgttcgacatcatcgatcgcgccacgctggcattcaacaagattaacgaagcgcgggtgatcgccagcagcccgccggcgatcaccggcctcggcaactcctccggcttcgacatggaactggaagatcacgccgggttggggcacgccaaactaatggcggctcgcgaccaactgttacagctggcggcgcaaaatccgctgctgtcgcgcgtgcgccacaacggcctggacgacagcccgcagctgcagatcgatatcgatcagcgcaaggcgcaggcgctgggcgtatctatcgacgacatcaacaataccctctctaccgcctggggttcgacctacgtcaacgacttcgtcgatcgcggccgggtgaagagagtttacgtgcaggccgccgcgccgttccgcatgctgccggaagacatcaacaaatggtatgtgcgcaacagcgcgggcggcatggtgccgttctcggccttcgccagttcacactgggaatacggctcgccgcggctggaacgctataacggcaactcggcgctggaaatcgtcggcgaggcggccaacggcgtcagcaccggcaccgccatggcggaaatggaaaaactggtcagccagttaccgaccggcttcgggctggaatggacggcgctctcctaccaggaacgcttgtccggctcgcaggcgccggcgctgtacgccatctcgctgctggtggtgttcctgtgcctggcggcgctgtatgaaagctggtcgataccgttctcggtgatgctggtggtgccgctgggggtgatcggcgcggtcgccgccacctggctgcgcggcctggagaacgacgtttatttccaggtcggcctgttgaccatcattgggctgtcggcgaaaaacgccattctgatcgtcgaattcgccaacgagctgaaccacaaagggcaggatctgatgtccgcgacgctcgacgcatcacgcatgcgtctgcggccgatcctgatgacttcgctggcgttcatcttcggcgtgctgccgatggccaccagcagcggcgccggttccggcagccagcatgcggtcggcaccggggtgatgggcggcatgatctccgccacactgctagcgattttcttcgtgccgctgttcttcgtgctggtgcgccgccgcttcccgggcaaagcgcatccggcaggcaatacgacggccgccggggagtga

SEQ ID NO: 425352 - DNA, 432 bp, Serratia marcescens
atggaaattatcaccgacccgaaccgccgcgccatcgactggcagcggctgtgtgaattgctggaggccgccgggctgggcaagcgcgatccgcacaccctgcagcgcgtttaccaacacagtcagttttgctattgggggtttatcggcgacgagctgatcgccaccgcgcacgccatcagcgacctgacctcggtcgcttatctggccgacgtggcgatcgatccgcgctttcaggggcaagggctggggcgccggttgatggaccgggtgatgcaagatttggcgccgctcggcaagattttcatctattccgtgccggaaaaactggccttctataaaaagtacggctttcatgatttgaccaccggcatggtgtatgcggacggcgcctcactgcaacggttgcaaaacggcggttatatccgctga

SEQ ID NO: 425353 - DNA, 552 bp, Serratia marcescens
atgaagatcgatattttcagcgaatgtacctataccattatcggtatcagacaactgataaatcaaacatggtcagaaaaaaacacgccagccgactttaaccgcagaagggtctgctttatcgatgtcaccctcgccaattttgaagcgcgttaccgcgatgaatatgccaaccccaaaacctacaaaatagtcattattaccgactgcccgcatgagatggtgattgtcgacaataagaccattatattatcaaaccttatatctttaagccgtttcagccacctgatcggcgatttatatacgcgctacagtcactataccgagccgccgcagctctcccggcgcgagtcccttttcctgtcggagtggtcgacgggaaaatcgctgaccgatatcagcaacgctatgaatataagaaacaaaaccgccaatcattacaaatcgagaatcatgaaaaagcttggcgccagcagaataaaaccgctgttgcatattacccgcgtacggtgtttaaccgatcgtttaaatataaaaattaataaagaatag

SEQ ID NO: 425354 - DNA, 387 bp, Serratia marcescens
atggcaaacaaaccgcaacagacaacgctgacgatgtacggcatcaaaaactgcgacaccatcaagaaagcccgccgctggctggaagatcagggcgtggcctatcattttcacgactaccgcgccgacggcctgaccgaacagcagctgcgcggtttcgtcgcgcaactgggttgggagccgctgctcaatacccgcggcaccacctggcgcaagctggatgaagcgcagcgcaacgcctgcgataacgccgacgccgccatcgcgctgatgctggcgcagccggcaatcattaaacgcccgctgctggacgacggcaacggccgcgccctgctcggttttaacgccgacgcttaccagcaatttatcgccgaggtcgccgtatga

SEQ ID NO: 425355 - DNA, 1128 bp, Serratia marcescens
atgacttgcccggttatcgaactggcccagcagctgatcaagcgcccttccctcagcccgaatgacgaaggctgccagcagctgatgatcgatcgtctgcaggcaatcggcttcaccgtcgaagcgatggacttcgaagacacccagaatttctgggcctggcgcggcgaagggcaaaccctggcgtttgccgggcacaccgacgtggtgccaaccggcgatgaaaagcgttgggacaacccgccgtttgaaccggcgatccgcgacggcatgctgtatggccgcggcgcggcggacatgaaaggttcattggccgcaatggtggtggccgccgagcgatttgtcgccgccaacccggatcaccggggccgcctggcattcctgatcacctcggatgaagaggccagcgccacccacggcacggttaaggtggtcgaagcgctgatggcgcgcaacgagcggctggattactgcctggtcggcgagccgtccagcaccgagcgcgtcggcgacgtggtgaaaaacggccgacgcggctccatcaccgccaacctgcatatccacggcgtacaggggcacgtcgcctatccgcacctggcggacaacccggtgcaccgcgccatgccggcgctgaatgaactggtggcgatcgaatgggatcgcggcaacgagttcttcccgccgaccagcatgcagatcgccaacgtgcaggccggcaccggcagcaacaacgtgatcccgggcgatctttatgtgcagttcaacttccgtttcagcaccgagctgaccgatgcgatgatcaagcagcgcgtggaagagctgcttgaacgccaccagctgaactacagcatcgagtggcggctgtccggccaaccgttcctcacctcgcgcggcgcgctggtggatgcggtggtcaacgccgtcgagcactattctgaactgacgccgcagttgctgaccaccggcggcacctccgacggccgcttcatcgcgcagatgggcgcgcaggtggtggagctggggccggtcaacgccaccatccacaaggtcaacgaatgcgtcaacgccgcagatctgcagctgctgagccgcatgtatcaacgcatcatggagcaattggtcgcatga

SEQ ID NO: 425356 - DNA, 675 bp, Serratia marcescens
atgatcaacgcagagatgctcaccggccgctcaaccgaacacctggcgccgctgagcgggaaccatcggctgcagccgcaggcggtcaacgccttcctggcgatgcagcaggccgcgcgtgaggcgggattcgatctccaacccgccagcaccttccgcgatttcgaccggcagttggcgatctggaatggcaaattctgcggccagcggccagtattagataaggacagccgcccgatcgacgtcgcgccgctgcccgccgctgagcgctgtgaggcgatcctgcgctggtcggctctgccgggcgccagccgccatcactggggcagcgatctggatgtgtacgatccgtcgctgctgccggaagggaaaaagctgcagctggagccgtgggaatatgaagaaggcggttactttgcgccgctcaaccagtggctgacggcacatatggccgagttcggtttctaccgcccctttaccgaagacagcggtggcgtggcggtagagccgtggcatctgagctaccggccgctggcgcaagaggccgaacgcttgctgaccccggcgctgttgctggcggcctggcaagacaaggaggtcgccggtgccgaatggctcgaacgccatctgccctcgattttttcgcgttttatacgcagtgaagtaaaggagtag

SEQ ID NO: 425357 - DNA, 186 bp, Serratia marcescens
atgcaatggttagctgattactggtggattatcctgctggttctggtgggaatggtcgtcagcggcatcaaggaactgcgccgcgtcgacgtgaaaagctatctggccaacaagccggagataccgccgcaccgcgacaataatgcccagtgggatgacgaagacgactggccgaaaaagaaatga

SEQ ID NO: 425358 - DNA, 690 bp, Serratia marcescens
atgaaacatgagcatttcgttgtccaaagtccggcgaccccggcggcgcagctgatcttgctgtttcacggtgtcggcgataacccggtggcgatgggggagatcggcagctacttcgccaaagagtttcctcaggcgcaggtggtgagcatcggtggccccgaagcgtttggcaacggcgccgggcgccagtggttttcggtgcaggacgtgaccgaagagaaccgcgcggcccgtattgcagacgtgatgccgcagtttgtggcggtggtgcgccattggcagcagctgagcggcgtgggctatgccggcacggcgctggtggggttctcgcaaggggccattatggcgctggaagcgttgaaagcggaaacccggctggccgggcgcgtggtggcgttcagcgggcgtttcgcccagctgcctgagcaggctttcggcgacagcgtggtgcatttgatccacggtgcagaggacgcggtgatcgcggtgcaacacgctcacgcggcggcggaagcgcttcgggccggcggcgccgatttcacgctggacgtggaggaaaacgtcgggcacgcgatcaaccagggcatgatgaacgccgcgctggaaaggctgcattattatgtgccgcagcgctactgggacgaggcattgtccggcaagcgcggcgagctgatcgcctttcgctaa

SEQ ID NO: 425359 - DNA, 2013 bp, Serratia marcescens
atgttacaggcagcgcaacaactcatgcggcggcagggcatccggcgcctgctggtgctcagcggtgaacccggctggtgccgcgaacaggcacagcggctggcggcgacgctgccgggcgactggccgtgggtgggggaaaacccgccgcccggcctgacggcgttggcgagcggcgcggtgcgccaactgctggggcaggaacggctgcacgcggtgttcgacgccggccaatcgctggacgtggaggcattggcggcgctgtgcggcgcactgcgcgccggcagctggctgctgctgctgacgccgccctggcggcaatggcctcagctgccggacggcgacagcctgcgctggagcgattgcccacagccgatcaccaccccgcatttcattcaccatctgcagcagcacctggccgacgaccgagaagtgacggtctggcggcaggatgagcctctgacgctggccgcgctgccggcgcgcgagggttggctgccgccggatggccggccgaccggggagcaacaggcgatcttgacggcgctgctgcaggccgaatccggcgtgtgggtgctgaccgccgcccgcggccgcggcaaatcgacgctggccggcatgctggtggcgcagtcgccgctgacctgttggatcaccgggccgagccgcgccgccacggaggtggccggggaatgggcacaggggcgcgcgcagttttgggcgcctgatgccttgctggcgcagtgtcgggagggggacgtcagcgccgtgggctggctgctggtggatgaagcggcggcgatccccgcgccgctgttgcagcagctgatcggttatttcccgcgcgtgctgctgaccactacggtgcaggggtatgagggcaccggccgcggttttctgctgaaattttgcgccgggctgccgtcttatcaggcgttgagcctgcaacagccgatgcgctgggcacagggcgatgcgctggaacggataacggacaatgcgctgttgttcaatgagctgcccgcctggccggcggatggccaggcgatcgattacagccaggcagagcagcgtgagctgtgcgccgatccgcagcggctggcgcgtttctacgccctgctgagcagcgcgcattaccgcacctcgccgctggacttgcgcaggctgatggatgcgcccggcatgcattacgggctggcgcaggccgggccagaggtggtcggcgccgtgtggctggtggacgaaggcggcttgagcgccgagttggcgcacgatgtgtgggccggccgccgtcggccgcgcggcaacctggtggcgcagtcgctggcggcgcacggcggccaatggtgggcgccgacgctgcgttcaaggcgcattacccgcatcgcgacgctgccggcgctgcggcggcagggtatcgcgcgtcagctgatcgaacggcaacgccgccaggcgcaggggctggatttcctgtcggtcagcttcggctataccgagccgctgtggcgtttttggcaatcctgcggtttcgagctggtgcgtatcggcagcaaaccggaggccagcagcggctgctataccgcgatggctattttgcccttgagcgagcaaggggaggcgctgcggcacgcggcgcacaagcatctggcgcgcgactggccctggctgcggcagcgcatcgagctcgcgctggcgatcccgggcgacgacggcgatacgtcgctcggcgaagaggactggcgtgagctggccgggttcgctttcgcccaccggccgctggaggccagcctgggggcattgcagcgtttgctgttggccagcaatctgccgctgcccgcgctgcgcggccatctgcagcggcggcaatccccggcggcctgcgcggagcaggcgggcgtcagcggccagaaagccttgctgcgccactggcggcacgaaacggcgcaggcgctggaacagctgaatgcgcagcactgccgctactggcgcgactgggcgcagtcgttgcaataa

SEQ ID NO: 425360 - DNA, 864 bp, Serratia marcescens
atgcgttggcaagggcgtcgggaaagtgacaatgttgaggatcgtcgcgggcaatcttcaggtttgggcggcggcggcttccgcgtgccggtgcgcggcaagggtggcatcgtcattctggtggtggtgctggtggccggctattacggcatcgatctgtcgccgctattgaacggcggtaacgttgcgccgcaggggcaacaacagagcgccaacatcagtccgaaagatgatgagctggccaaattcacctcggtggtgctggcctcgaccgaggacaactggaaagagattttccagcgcatgggcaaaacctatcaaccgccgaagctggtgatgtatcgcggcgtgacgcgcaccagctgcggcaccggtcaggcggcaatggggccgttctactgcccgggtgacagaacggtgtatatcgatctgtctttctatcaggacatgaaaaccaagctgggcgccggcggtgatttcgctcaggcctatgtggtggcgcacgaagtcggccaccacgtgcagaacctgttgggcatcgagcccaaggtgcgccagatgcagcagggtgccagccaggcggaagtgaaccgtctgtcggtgaaaatggagctgcaggctgactgtttcgccggggtgtggggcaaatacgccgagaagcagcagatgctggaagagggcgatctgcaggcggcgctgaacgccgcgcaggcgattggcgacgatcggttgcagcagcagagtcagggccgcgttgtgccggacagcttcactcacggcacctcgcagcagcgctacacctggtttaaacagggcttcgacagcggcgatcccaatacctgcaacacctttgcatcccgttaa

SEQ ID NO: 425361 - DNA, 714 bp, Serratia marcescens
atgcaaaagctagctgagctgtatcgcggaaaggcaaaaaccgtttacaccaccgagaatcccgatctgttggtgttggagttccgcaacgatacgtcagcactggatggtcagcgcattgagcagttcgatcgcaaaggcatggtgaacaacaagttcaaccatttcatcatgagcaaactggaagaagccggcatcccgacccagatggagcgtatgctgtccgacaacgaagtgctggtgaaaaagctggacatggtgccggtggaatgcgtgatccgcaaccgcgccgccggttcgctggtgaagcgtctgggcatcgaagaaggcctggtgctgaacccgccgctgttcgatctgttcctgaaaaacgacgccatgcacgatccgatggtcaacgaatcctactgcgaaaccttcggctgggtgagcaaagcgcatctggcgcgcatgcgtgagctgagctaccgcgccaacgacgtgttgacccagctgttcgacgacgccggcctgatcctggtcgacttcaagctggagttcggcctgttcaacggcgaagtggtgctgggcgatgagttctcgccggacggcagccgcctgtgggacaaaaacaccctggacaagatggacaaagaccgtttccgtcaaagcctgggcggcctgatcgaagcctatgaagaagtggcgcgccgcatcggcgtgaagctcgactaa

SEQ ID NO: 425362 - DNA, 1053 bp, Serratia marcescens
atggcttattcattgcaaaagtcgacggtagcaaaagtagtgggcatctctttggtgatgatgctggcggcctgcagcagcgatcagcgctacaagcgccaggtcagcggcgacgaggcctacctcgacgcggctccgctcaaggcgctgaacgcgccgtccggcatgatcctgccggtgcagagcggcaactatgacgttcccgccacgacgctgcaaggcaacgtcggcaagcagttggacattcgtccgccggtgcagccgttggcgctgctgagcggttctcgcgcgcaatacgccggcgacagcggcacgctgctgctggaaaacagcccgcagaaccagaacctgtggtcgcgcgtggtcagcctgctgcaggcgaagaacatcgcgatcgcttcgcgccaggacgccggtcagaccctgaccaccgactgggtgaagtggaaccgtctggacgaagacaaccagtacgaaggccgttatcagatcagcgtgcagcaacagggctaccagcaggcgctggtggtgaaaagcgttggcctacagcagcagggcaagaccgaacaggtgaccgatcagtctgaaatccagcgctacaacggcatgatgatcaacaccctgatcgaaggcctggacaagcaggacaacctggcgagcagccagaccgccagccgtttcggcgcgctggacgtgcagagcggcgccgatgacaccggcctgccgatgctggtggtgcgcggcccgtacaccgtggtgtgggatcgcctgccgccggcgctcgaaaaactggggatgaaagtgggtgaccgcagccgtccgcagggcaccgtcgccgtgacctacaagtccctgagcagcagcgattgggatgcgttgggcgtcaaggatcctgaactggcggaaggggattacaagctgcaggtcggcgatctcaacaaccgcaccagcctgcaattcatcgatccgaaaggcaaaccgctgacccagtcgaaaaacgacgcactggtggcggcattccagtctgccttcagtaagaccagcgttaactaa

SEQ ID NO: 425363 - DNA, 882 bp, Serratia marcescens
atgtttacgggaagtattgttgcactggttacgccgatggacgacaaaggtgctgtcgatcgtgcgagcctgaaaaaattgatcgattatcatgtagccagtggcaccgcggcgatcgtttccgtagggaccaccggcgagtccgcaacgcttgcccatgacgagcacgttgacgtggtgctgcagacgctggagctggccgatggccgcattccggtgatcgccggcaccggcgccaacgccaccgccgaagccatcgcgctcaccacccgcttcgccaataccggcgtagtgggctgcctgacggtgacgccgtactacaataagccgacgcaggaagggctgtaccagcacttcaaggcgatcgccgagagcaccgagctgccgcagatcctgtataacgtgccttcgcgcaccggctgcgacatgctgccgccgaccatcgctcggctggcgaaaatcaagaatattgttgctgtaaaagaagcgacggggaacttaagtcgcgttagtcagatccaagtgctggttgacgatgaagatttcattttgctgagcggcgacgacgccagcgggctggacttcatgcaactgggcggcaaaggggtgatttccgtgacggccaacgtggccgcgcgcgagatggcggaactttgcgcgctggcggcgcagggcaagtttgcgcaggcgcgccgcttaaatcagcgcttgatgccgttgcatcaggatctatttgtagaagcaaacccaattccggtgaagtgggcctgtaaggcgttgggattgatggcaaccgatacgctgcgtctgccgatgacgccgttgagcgaagccgcccgcccggtggtggagcgcgcgctgaaaagcgtcggtttgctgtaa

SEQ ID NO: 425364 - DNA, 570 bp, Serratia marcescens
ttgcctcagtcagacgaacactatctcgtgattaccgcgctcggcgccgaccgccccggaatcgtcaataccatcacccgccacgtcagcagttgcggatgcaatatcgaagatagccgtctggccatgctgggagaggagttcacgttcatcatgctgctgtccggcagttggaacgccatcaccctgatcgaatccaccctgccgcaaaaaggcgcggagctggatctgctgatcgtgatgaaacgcacaaactcgcacgaaaggccgccgatgccggccacggtgtgggtgcaggtggaagtgaaggactcgccgcacatcatcgaacgctttaccgatctgttcgactccagccagatgaatatcgccgaactggtctcgcgcacgcagccggcggacggcgacctgccgccgcagctgtatatccaaatcaccgcccacagctccggcgatcgggacgcctcaaatattgagcaagccttccatcgcctatgtacagaattgaacgcgcaaggcagtattagcgtggtgaactatccacagcatgacgagaaagatggagagtag

SEQ ID NO: 425365 - DNA, 465 bp, Serratia marcescens
atgagcccattgaaagccggtgacacagcgccgaaatttagtttgcctgaccaggacggtgaggaaattaatttggccgacttccagggacagcgagttttggtttacttctatccgaaggcgatgacgccgggctgcaccgtgcaagcctgcggcctgcgggacaacatggacgaattgaaaaaggccggcgtcgaagtgctgggcatcagcaccgacaaaccggaaaaactgtcgcgcttcgccgaaaaggagctgctcaacttcacgctgttgtctgatgaagatcatcaagtgtcgcaacagtttggcgtgtggggcgagaaaaccttcatgggcaagacctacgacggtattcaccgcatcagtttcctgatcgacgccaaaggcaagattgaaaaagtgtttgatgatttcaaaaccaccaatcaccacgacatcgttttgaactacctgcagcagtaa

SEQ ID NO: 425366 - DNA, 1077 bp, Serratia marcescens
atgctggagatgttattacagtggtaccgccgccgcttcaccgatccgcaggctatcgcgctgctggtgatcctggttgccggcttcctcattctctattttctgcacggcattctgaccccgttgctggtcgccatcgtgctggcctatctgctggagtggccgaccgcgcgcctgcagcgcatcggctgttcgcgcacctgggcggcgagcatcatgctgctggtgttcgcgggcgtcgccatgctgctggtgttcgtcgtcgcgccaaccgcctggcaacagggcatcaatctgatgagcgatctgccgggcatgctcaaccagttctataacttcgccgcgacgctgccgaagcgttacccggcgctggtggatgccggcatcatcgacatgatggcggaaaacctgcgcagccggctgtccggcatgggcgagtcggtggtgaaattctcgctggcgtcgctggtcggcctgctgacgttggctatctacctgatcctggtgccgatgatgatgttcttcctgctgaaagacaaagagcagctgctgaacgcggtgcgccgcgtgctgccgcgcaatcgcggcctggcggggcaggtctggaacgagatgaatcagcagatcaccaactacattcgtggcaaggtgctggagatggtgattgtcggcgtggcgacctacctggtgttcgccgtgctggacatgcgctattcgctgctgctggcggtgctggtgggcttctcggtgctgatcccctacatcggcgcggtgctggtcaccataccggtggtggtggtggcgctgttccagtggggcgtcggcgccgatttctggacgctgatcgtcgcctatctggtggtgcaggggctggacggcaacctgctggtgccgatcctgttctccgaagcggtcaacctgcatccgctggtgattatcctttctgtgatcgtgttcggcgggatgtggggcttttggggggtgtttttcgccattccgctggcgacgctggtgaaggcggtgattcacgcctggccggatgaactgcgggtcgaggtggaagacgaggccggctga

SEQ ID NO: 425367 - DNA, 213 bp, Serratia marcescens
atgaacagcaaaccgtgtgaatttgatgaagccatctgtctggcgatcgggcgtggcgtttgcgaagtcgtgaagataggggatgaaatcagcgtcttctccctgctggaagccatcgagagcttcatcgaacggcaggcgctcagcgaaagcgaaatcgcggcggcggacgacgcgctggatctgatcagcgtgctcacccatcggtcatag

SEQ ID NO: 425368 - DNA, 2196 bp, Serratia marcescens
atgcacaacaccagtacaacgaatttccctttacgtaaaacgctgctggcgctgactattggcgcgctgagccagggggcgctggccgcagacggcggcgccaagaaaaaccaggaggacaccctggttgtccgggccgaaaaacacggcgatttcaactccggcggcaatgatttggtgcccgcctacctggatggacaggtcgcccacggcggccgcctgggaatgttgggcgaacagaaagcgatggacgttccgttcaacgtcataggttataccgcgaagctggtacaggatcagcaggcgaagaccatcgccgacgtggtcagcaacgacgcgggtgtacaggcggtgcaggggtacggtaacttcgccgaaacctatcgtattcgcggtttccaactggacggcgacgacatgacgatgggcgggctgccgggcgtggtgccgcgccaggtgatggatacccagatgctggagcgggtggagatcttcaaaggggcgaacgccctattgaacggcctggcttccagcggcgttggcggcatgatcaatcttgaaccgaagcgggcggaagaaacgccgaccacccagatcggcctcgactacacctccgattctcaggtgggcggcacgctggatctgggccgccgttttggtgacgacaaccagtttggcgctcgcgtcaacctggtgcaccgtgagggtgaaacggcggttgaggatgataagcggcgcacgacgctggcatcagttgggctggactatcgcggcgatcgtttccgttcatcgttggacttcggttatcagaaaaagaccttccatgggggaacgatgggggtcaacatcagcggcatcgatgtgatacccgcggtgcctgacacccgtaaaaattacagtcagcagtggggctacagcgatatcgagaacgaattcggcatggcgaaagcggaatatgatttaacccgcgactggaaggcctatgccggcttgggcgcgcagcatggccatgaaaccggtgtttacagcgcaccgaagctcatcaacgccagcggcgacgccacggttgggcgcctggacaccaaccgcattatcgacgctttcagcggcatggcggggcttgagggcaagttcacgacctgggcggtttcgcatcgggtcaacgtcggctattccgcgcagattaaacgcgacaaaaccgcgtggcgcatgtccgccaacaatccgacgaccaatatctacgataaccatgatgtcgcaataccggacaatgcctatttcggcggcaactacagcgatccgctgaccacggcgcgtaaccggacgcagggctggttgttcagcgatacgttgggctttttcggcgaccgggtgttgttaacggcggcggcgcgccatcagaaagtggtggtgcgtaattacagcaacgccaccggcctggaggataccgcctcccgttatacgcaaagccgctggatgccgacgttcgggctggtctacaagccgtgggaaacggtgtcgctttatgccaaccataccgaggcgttgcagcctggcggcattgcgccgaaagaggcggctaacttcgggcagagtaccggtatcgcccgttccaagcaaaatgaagtgggcgtgaaagttgatttcgaacgcgtgggcggttcgttggcgttgtttgaaatcaaaaagccggccaccatgatcgacagcaacaactactacacgttgaacggcgagcaacgtaaccgcggcgtggagttgaatgtatttggcgaaccggccttcggcctgcgccttaacggcagcgctacctggctttcgcccgagctgaccaaaacccagggcggccgtaacgatggcaaagacgctatcggcgtagcgcacttctacgcggtgctgggggcggaatacgatatcaggccggtcgatggcctgacggcgacggcgaaagtgcggcataccggttcgcaatatgccgactccgccaataccaaaaagctcgatagtttcacgaccctggatctcggccttcgctatcgcatgcgtttgaatgaggatcaaaatacgctggtatggcgtgtggggttggacaacgtcacgaacgagaagtattggtccggcgtagaaagcaatggcacttacgtcttccagggacaggcgagaacgctgaaagcgtcggtaacttacgacttctaa

SEQ ID NO: 425369 - DNA, 1083 bp, Serratia marcescens
atgaaaatgaaaacctctgtgctcgccctgctgacggggatggcgctcagcggctgcacgccgcaccaaacctcttcctcttcccctgccgtgcagcctctggcgcaagcggtgcaatccgacagcatcgtcaaacgccaactggcttatggcttgtatgaaatggcgctgacgccagggggagatgcgctgtacgtcgccagcgccgaaagttttaaagatgtacagggtggcgtggtctataagctggacgccaagaccctgaaaacccttggcacgacgcataccgatctgaaaaatttcgccatgcaggccgctgcggatgggaaaaccctttatgtcagcaattcgctggacggcggcatcagcgcaatcggcgccgccgacggtaaggtgaaagggcgtttgctgttcagcgagcgcaatgagaaagggttgccgtatggtgcgcgccaaattctggctcacgacaacacgctgtatgtgggggcggtggccgacccggcgcaaatttgggtggttgacgctgaatcgctcaagctgaaaacgcgcatcaaaaataccggcaaatggatgaccggcctgcattactccgaacagacccaacgcgtgtatgccgccaatggcagcggcgagatcctggtgatcaacccgcgttccaaccgcatcgaaaaacgctggaaaccgttgggagaccaacccgcactgctgctcaatatggcggaggacgaggctaccggtcgtttgttcgtcaccgacaactccaaggcgaagaccacgctggtcttggatattcacaccgggaagttattgaagcggcttgatgtgggcgactctttggctgtcgttttcaatccacggcgcaacgaaatttacatctcgcagcgtgaatccggcaatgtgctgagcctggatgcgacgacctatgcggtgaaacagcgctggccgctgccgccgaatccaaacagcttgctgctgtcggcagacggccagacattgttcgttacggtcaaacagccgtttaacaaagatcattccactcaggggccggacagcgtggttcgcatcgcgttgaataaataa

SEQ ID NO: 425370 - DNA, 453 bp, Serratia marcescens
atgacaacccctgccccacgggagtggcagcgtgcggactatctcgtcagcaccgatcccgctctgctggatctcgatgccatccatgcatttctgacccgttcgtcatgggcggaaggcattgataaagagaccgtccgccagtccctcgcccacagcctgtgcttcggtttgtatcacggcgccaggcagatcggtttcgcccggctggttaccgattacgccactttcggctatctgtgcgacgtgtacgtgctggaaacgtaccaaaaaagcgggctgggtctgtggctggcggaatgctgccaggcccatccgctgatggcgacgctgcggcgagtcatgctggtcaccagcaccgccccctggctctatgaaaaagtgggctatagcgccatcaaccgccccgattttgtgtggcagatcgcccgaccggacatctaccgacgttaa

SEQ ID NO: 425371 - DNA, 429 bp, Serratia marcescens
atgcccgtttcagcccgtaaccagttagccggtaccgtgtccgccgtcgccaaaggtgccgtcaatgacgaagtggagatcaccctgcagggcggtgaaaaactggtggccatcgtcacggtacaaagccaacagtcgctggggttaaccatcggtaaagaggccgtcgcgctgattaaagcgccgtgggtgatcctggcgacggaggattgcggtttgcgtttttccgcccgcaaccagtttgccggggaagtgattgcggttgagcacggcgcggtcaacagcaccgtacacctcaaagcggatgccggttttgtgctgacgtcggtgatcaccaatgaaagcctgcaggagatggcgctgaagaacggttcgcgcgccatcgccctgatcaaagcctcatcggtgctgctcgccgtcaaagcctga

SEQ ID NO: 425372 - DNA, 618 bp, Serratia marcescens
atgacgctcgctctgttcgccgctttttgggcggtatcgattttattggtgatcacgccgggtatggattgggcctatgtgatctcggcgggcattcgcggccgggtggtggtgcccgccgtcgccggtttgctgtttggccatttgttgatgattgcgagcgtggtggcgggcgtcggcgcgctgctgatcggcaacccgctggcgctgacggcgcttaccttgctgggagcggcttacctcttgtggatcggttgcaacatgctgctgcacccgccggtgcccggcgccggtgaagatcagcgttccgattcctggctgcgctgggccggcaagggcgtgtgcgtcagcggcctgaaccccaaggtgtttctgctgtttttggcgctgctgccgcagtttaccgacgcccgggccgaatggtcggtgccgatgcagatgctggcgttgggcgtcgtgcatttgatcagctgcggcctggtgtatctgctggtgggattcggatcgcagtcggtactgcgcacgcgcccacaggccgcgaaggtggtggggcgcatctccggcgcggcgatgatcgtcatcgccctcgggctgctggccgagcaggcgctgaaatag

SEQ ID NO: 425373 - DNA, 462 bp, Serratia marcescens
atggataagattgatcgcaagattcttgctgaactgcaggctgacggccgtttgtcggtgaccgagctggccgagcggatcgggttgagcgtatccccctgccaccgccgggtgcgggcgttagaggaatccggggtgatcagaggttaccgcgcccagctcgatcccggcagcctgggctataacttttccgccctggtgttcgtcaccatgcgcgaaggcgatcgccgcgccgttgaaaccttcgaaaacgccatgatggacattccgcaggtggtgcaggcgcagcggctgttcggcgatccggactatctgctgcacgtgatcgcccgcgatctgcccgcctttcaacagctttacgacgagaaactctccgctctgccgggcgtgcagcgcctgagctccaccctggtgatgaaaaccgtagtgccggagcgttcattcctgccgctgggaaaatga

SEQ ID NO: 425374 - DNA, 1209 bp, Serratia marcescens
atgacgcagaaaatagtgattgccggttccggttttgccggtttttgggccgccgtgtccgccatgcgcgccattaccctcgccggtaagcatgacgagatcgaggtgctcatggtttcgccgacgccaacggtcaccatccggccgcgcctgtatgaagcggtgctggaaaacatgaacccggacatttccgcgcagctcgccgccgtcggcgtgcgccacctggccgggacggtagaacgcatcgacgccgccgccaaaacgctcacggtggcgcaggcgacggggggatcccttgagctggtctacgaccgcctggtgtgggccaccggcagtcggctctccgtgcctgcggtgccgggctttgccgaatacggtttcaacgtcgatacgctggaaagcgcgcagcgtttggatgcccatatcaaagcgctggcggccaaaccctcgacgccggcgcgcaacaccgccgtggtggtgggtgcggggctgaccgggctggagagcgcggcggagatgccgcagcggctgcgggatgtgctgggcaaagacgagaacgtgcgcgtggtgatcgtcgatagcgcgccggaagtgggcgccgggatgggggcggagccgggggcggtgatacgccaggcgctggcggagtgcggcgtggaggcgcgggccggcctgcgcgtctcggccatcgacgccgagggggtgatgctgtcgaacggtgagcgcatcgccgccaacacggtgatcctggcggcgggcgtgcgggcgcatccgctgaccgagcagatccccggcgagcgcgacggcagcggccgggtgatcggcgatgccttcctgcgcgcgccggcggcggcgggcattttcgtgaccggggatacggtgaaggcggcgaccgacgatctcggcaaccacaacctgatgacctgccagcatgcgatgagtcttggccgcgtggccggccacaatgcggcggcggagctggcgggattgccgacgcacccgtacagccagccgaagtatgtgacctgtctggatctggggccttggggcgcgctgtataccgaaggctgggatcgccaggtgcgttttacccgtcaggaaggcaaaaagattaagcaggagatcaatacgcagtggatttatccaccggcggcggatcgcgaggcgctgttcgccgtagccaatccggatttcgtgattgtgccttaa

SEQ ID NO: 425375 - DNA, 540 bp, Serratia marcescens
atggcgtacatcacaaccagcgttgaatatggcatccactgcctgctgtggctggtcggcgataaccagcgcgcgctcagcagccgcgagctcgccgaactgcagggcatttctcccagctttctggccaagattttccccaagctggaaaaggcagggatcgtcgccgccagtgaaggggtgcgcggtggttatcgtctggcgcgcccggcggacgagatcagcttcctggagatcatcgacgccatcgaagggcacaagccgctgttcgattgccaggaggtgcgcgggcgctgtgcggtgttcgacgattccccgccggattgggcggtttccggcaaatgtgccatccacgcggtgatgctgcaggcggagaaggcgatgcgcgacgcgctggcggcgcagaccctcggcgccgtcgcggcccgctttggccgcaaggcgccgcagggcttcttcggtgaggtcaacctctggctcgacgagcgcatgacggaacgcaccgcgcgcagcggcaaaacggcgcgcgccaagacctaa

SEQ ID NO: 425376 - DNA, 1470 bp, Serratia marcescens
atgaccaaccggttgaccaaaaccgcgttagcggtgctgctgctcggcacgctgaacgccaccgccctggcgccagcacaggcggaaagccaggatcagttgccggatatgggcacctccgccggcggcaccctgagcatcggacaagagctggcgatgggcgatttctacgtgcgccaactgcgcgccagcgccccactgatcaacgatccgctgctgagccagtacatcaaccagttgggcaaccggctggtggccagcgcctattcggtgcgcacgccgttccatttctatctggtgcgcaacgacgagatcaacgccttcgccttcttcggcggcaacgtggtgctgcactccgcgctgctgcgcgtcagcgacaacgaaagccagctggcttcggtgctggcacacgaaatctcgcacgtcacccagcgccacctggcgcgcgcaatggaagatcagcagcgcaacgccccgctgacctgggtgggcgcgctcggctccatcctgctggcgatggccaacccgactatgggcatggcggcgctgagcggcaccctggccggcacccagcagggcatgatcagctttacccaatcgaacgaacaggaagctgaccgcatcggcattcaagtgctgcagcgtgccggattcgatccggaagcgatgcccgacttcctgcagaagctctcggatcagtcgcgctacgcctccaaaccgccggaaatgctgctgacgcacccgttgccggacagccgcctttccgacgcgcgcaaccgcgccaaccagatgccgaaacacatcgtgcagtcttcgcaggattacctgatggccaaggtgcgcgcactgggcatgtacagttcggagggctatggcctgaacgaagagctgctcggctcgctcagcaagggcaacgtgcgcgaacaggcggccgccaaatacggccgcgccatcctgttctatgaagcgaaaaaatacgacgacgcgcgcaacatcattcaaccgatgctggcgcaggatgcgaaaaacgtctggctgatcgacctgatgaccgacatcgatctcggccagaaacgcgcgccgcaggccatcgcccggctgcaggcggccaacgccgcccagagcaacaacccggtgctgcagctcaacttggccaacgcctatgtcgaaggcaaccagccggcgcaggcctcgaagatcctgaaccgctacacctttgcccatccggacgatccgaacggctgggatctgctggcgcaggccagcgccgcccaagggctgcgcgatgaagaactgtcggcccgcgccgaaagcctggcgctgaccggccgcctcgatcaggccatcggcctgctcagcaatgccagctcgctgcagaaactcggcagcctgaaacaggcgcgctacgatgcgcgcatcgaccagctgcgccaactgcaacagcgcttccgccaataccagcgtagctga

SEQ ID NO: 425377 - DNA, 354 bp, Serratia marcescens
atgaaaaacgtcacgatttaccataacccgcgctgctccaagagccgtgaaaccctggcgctgctggaacagcacggcgtcgatcccaaggtggtgctgtaccttgaaacgcccccgtcggccgatgagttgaaaaagctgttgaaggaactgggcttcacatcggcgcgcgatctgatgcgcaagaaagaagacctgtacaaggaattgaagctggcggacgacagcctgagcgaagaacagctgctggcggcgatgacggcgaacccgaaactgatcgaacgcccgatcgtggtgaaaggcagcaaggcgcgcatcggccggccgccggagcaggtgctggagattttgtaa

SEQ ID NO: 425378 - DNA, 546 bp, Serratia marcescens
atgacgctctttcatttctcattgacgctagatggagtgaccgccgataccaccgggttggaggatgcgctgcatgcagcgggatgcgatgacgcgctgatctgtttctacggtaaaaccgtctacctggagttcgatcgagaaagcgataactttgcgcacgcgatttgcagcgccatcagtgatattgagtctgcaaatattggcgccaaggtgatatcggtagactccagcctggtgggattaagcgatattgccgagctcactgaactgtcgcgtcaggcgatcgcgatgctaaaagacgggactcgcggccccggcggcttcccttcccccattcaacggctcggcggcacctcaccgttatggcgctgggctgacgtggcggcctggttggcgcaacaagggaaaatcgacccacggcttgcagacaatgcgcagtgtctggaacatatcaatctcgctttgcaactgcgaagcgatcggcaacgccagcaggttgagcactacagctccctgctggaacatgcagaaaaacaggtttga

SEQ ID NO: 425379 - DNA, 474 bp, Serratia marcescens
gtgccgctcgacaagcgcgcctacttcgtgcctgaagtgttggacggcatggaacagctggcgctggtttgcatcgacaatattgaatgcatcgccggcgacgaagagtgggagatggcgatcttcaacctctacaatcgcattctggaaaccggccgcacccgtttgttcatcaccggagatcgcccgccgcgccagctgaacctgcgtttgccggatctggcttcgcgcctggactgggggcagatctacaagctgcagccgctgtcggacgaagagaaactgctggcgctgcagctgcgcggcaaactgcgcggcttcgagctgccggaagacgtgggccgcttcctgttgaaacggctggatcgcgagatgcgcacgctgtttatgaccctcgatcaactcgatcgcgcctcgatcaccgcccagcgcaagctgaccatcccgttcgttaaagagatcttggggctgtag

SEQ ID NO: 425380 - DNA, 516 bp, Serratia marcescens
atgaaagtatggaataaagtgctgttggcctcctttatcgggttgttggttgccggctgtgatgactcgtccaaggttgacgccaacctggataaagccaaagacagcgccgagcagatgaaagacgccgcccagaaaaaagcggacgatctgacggacaaggcgaaagcaacggcggatgaaatcaaaaaagaggccgccacccaggctgaccagctgaaagacaaagcctcggcgattaaagatgaagccgccaaacaggcggacgccatcaccaacgacgccaaggccaaagccgccgcgatcaaagacgacgcaggcaaacagagccagcagttggtggatcaggccaaggctatcaaaaacgacgccatcaacggcgccaacgatctgaccgagcaggccaaggccaagaccgaagccatcaagagcagcgccgaaaacaaagcgcaagagttgaaacaagagaccgatgcggcggtaaacggcgatacacagccggccacccagcaataa

SEQ ID NO: 425381 - DNA, 249 bp, Serratia marcescens
atggggattatttcctggattatcttcggcctgatcgccggtattttggctaagtggatcatgcccggcaaagacggcggcggctttatcctgaccatcgtgctggggatcatcggcgccgtggtcggcggctatatcagcaccttcttcggctacggcaaggttgacggcttcaacttcggcagcttcgtggtagcggtcatcggcgctatcgtggtgctgttcgtgtaccgcaaaattcgcagctaa

SEQ ID NO: 425382 - DNA, 651 bp, Serratia marcescens
atggagtactacggatatattttgctcaaatttgttattggctttgtcattgttatcacccacttgaacttgtccggaaagacccagctatcgcaaatgacccctgtggattttatcggcaactttgtgctcgggggcattattgggggcgttatctatagcgatagcatccccttgtaccagtatgtcgttgtactgcttatcggtgtaggactaatttctctgttgaatgcaatcagtaaacactgcaacttctttcgttcggtcactatcggcaacccgataccaattataaaaaacggccgctttttaatggaaaatattttggccaagaaaaataaaatcgatatcttgaacgtttcctcacagctgcatgcgcaggggattcacgcttttcaagagattgtctatgcgcaaattgagccgggcggtcagatcaccgcggtatgtgagggaaatgagctgccttcgattatcattatgaaaaatggcagggccaggccttatgagctgcaggagattaataaagatgaggagtggttgagccaaactatccgtgaacacggtatagagccgaaagatatttttattgctgagttttgggacgggagaactgcgttcattcttaatgacggacgcatggtcaaatag

SEQ ID NO: 425383 - DNA, 1290 bp, Serratia marcescens
atgacccgtcgcgccatcggcgtcagcgagcgcccgccgctgctccagaccattccgctcagcttccagcacctgttcgccatgttcggcgccaccgtgctggtgcctatcctgttcaagatcaacccggcgaccgtgctgctgttcaacggcattggcacgctgctgtatctgttcatctgtaaaggcaagatcccggcctacctcggttccagcttcgcgtttatctcgccggtgctgctgctgttgccgctcggttacgaagtggcgttgggcggtttcatcatgtgcggcgtgctgttttgcctggtggcgttgatcgtgaaaaaggccggcaccggctggttggacgtgatgttcccgccggcggcgatgggggcgatcgtcgccgtcatcgggctggagttggcgggcgtggcggccaacatggcggggctgctgccggcggaaggcaccagcgccgattcgaccaccatcaccatttcgctggtgacgctggcggtcacggtgctcggctcggtgctgttccgcggcttcctggcgattatcccgatcctgatcggcgtgctggtgggctatgcgctgtcgttcttcatgggcgtggtggatttgactccgattcgcgaggcgcactggttcgcgctgccgaccttctacactccgcgctttgagtggttcgccatcttcaccattctgccggcggcgctggtggtgatcgccgagcacgtcggccacctggtggtgaccgccaacatcgtgaagaaagatctgatccgcgatccagggctgcaccgctcgatgttcgctaacggtatctcgacggtgttctccggcttcttcggctctacgccgaacaccacctacggtgagaacatcggcgtgatggccatcaccaaggtctacagcacctgggtgatcggcggcgcggcggtgttggcgatcctgctgtcctgcatcggtaagctggcggcggcgatccaggcggtgccggtgccggtgatgggcggcgtttccctgctgctgtacggtgtgatcggcgcctcgggcattcgcgtgctgatcgagtccaaagtggattacaacaaagcgcaaaacctgattttgacctcggtgatcctgatcatcggcgtaagcggtgccaaggtgcatatcggtgcggcggagctgaaaggcatggcgctggcgaccatcgtgggtatcggcctgagcctgctattcaaggtcatcagcctgttccgcaaggaagaagaggtgctcgacgcgccggacgaaccggcggagcagaagtaa

SEQ ID NO: 425384 - DNA, 627 bp, Serratia marcescens
atgaagatcgttgaggtgaaacacccgctggtaaaacacaagcttggcctgatgcgcgaaaatgacatcagcaccaaacgcttccgtgagctggcctcagaagtgggtagtttactgacctatgaagcgaccgccgatctggagacggaaaaagtcaccatcgaaggctggtgcgggccagttgaagtggatcagatcaaagggaaaaagattaccgtagtgccgatcctgcgcgcaggcctgggcatgatggaaggggttttggagcacgtgccgagcgcgcgcatcagcgtggtgggcgtataccgcgacgaagaaaccctggagccggtgccgtacttccagaagctggtttccaacatcgaagagcgtatggcgctggtcgttgacccgatgctggccaccggcggttcgatgatcgccactatcgatctgctgaagaaagccggctgccacagcatcaaggtgctggttctggtggcggcgccggaaggcatcgccgcgctggagaaagcgcacccggacgttgagctgtacaccgcctccatcgatcagtgcctgaacgacaaaggctacatcgtgcctggcctgggcgatgcgggcgacaagatatttggtaccaagtaa

SEQ ID NO: 425385 - DNA, 1038 bp, Serratia marcescens
gtgaccgacaaaacctctctcagctataaagacgcaggtgtcgatatcgatgctggcaacgcattggtagaccgcatcaaaggtgtagttaaacagacccgtcgcccggaagtgatgggcggtctgggcgggtttggcgccctgtgtgcgttgccgcagaaataccgcgagccggtgctggtttccggtaccgacggcgtgggcaccaagctgcgtctggcgatggatctgaaacgccacgacaccatcggcatcgatctggtggcgatgtgcgtcaacgatctggtggttcagggcgccgagccgctgttcttcctcgactactacgcgaccggcaagctggatgtggacaccgcggccagcgtgatcaccggcatcgccgaaggctgcaaacagtccggctgtgcgctggtgggcggcgaaaccgctgaaatgccgggcatgtaccacggcgaagattacgacgtggccggtttctgcgtcggcgtagtcgaaaaatccgagatcatcgacggcagcaaagtgcagtccggcgacgcgctgatcgccctgggcgcttccggcccgcactccaacggctactcgctggtgcgcaaaatcctggaagtgagcaacaccgatccgaccgccacccagctggaaggcaaaccgctggccgaccacctgctggcgccgaccaagatttacgtgaagtccgtgctggagctgatcgagaaggcggacgtacacgccatcgctcacctcaccggcggcggcttctgggaaaacattccacgcgtgctgccggaaggcatgcaggcggtgatcgacgaaaccagctggcagtggccggcggtgttcacctggctgcagcaggccggcaacgtcagccgccatgaaatgtaccgcaccttcaactgcggcataggcatggtcatcgccctgccggaagccgaagtggaagcggccatcgcgctgctgaccgcggcaggtgaaaaagcgtggaaaatcggtaaactgaccgcctcttccgacgaacaacaagtggtcatcaactga

SEQ ID NO: 425386 - DNA, 639 bp, Serratia marcescens
atgaaaaagatcgtggtgttggtctccggccaggggagcaatctccaggcgctgattgacgcctgccagcaggaccgcatcgccgccgagatcgtggcggtgttcagcaacaaggcgcaggcttacggcctgcagcgcgccgaggcggcgggcatcgccacccaggcgctggatgccaaggcctacgccgatcgcacggcgttcgacgccgcgttggcggacgccatcgaccagtaccagcccgatctggtggtgctggccggctacatgcgcatcctcagcccgcagttcgtgcagcgttatgccggccgcatgctgaacatccacccttccctgctgccgaaataccccgggctgcatacccaccgtcaggccatcgacaacggcgacagcgaacacggcacctcggtgcacttcgtgaccgagcagctcgacggcggcccggtgattttgcaggccaaggtgccgattttcgctgacgacgaagaggatgacgtggttgaacgggtgcaaacccaggaacacacgatctatccgctggtggtgagctggttcgtcgacggccgcctggcgatgcgcgatggcgccgcctggctggacggcgaacgcctgcctgagcagggccacgccgccgactga

SEQ ID NO: 425387 - DNA, 552 bp, Serratia marcescens
atgtccagcactgccagcgtcaggttacgcccattggaacgggacgatctgtcgttcgtccaccagatggacaacaacgccagcgttatgcgctattggtttgaagaaccttacgaagcctttgtcgagctttccgatctctacgacaaacacatccacgatcagagcgagcgccgctttatcatcgagcacgaaggcgccaaggtcggcctggtggagctggtggagatcgatcacatccaccgccgcgcagagttccagatcatcatcgatcccgcccaccagggcaaaggctatgccagcaccgccgcccgcctggcgatggactacggcttctcggtgttgaacctgtacaagctgtacctgatcgtcgacaaagagaacccgaaggcgatccacatctacagcaagctgggcttcaacgtggaaggcgagctgatcgacgagttcttcgtcaacggcgaataccgcaccgtgctgcgcatgtgcatcttccagccgcaatacctggcgaagttcaaaacgcccaatgataagccgctggtgaagtga

SEQ ID NO: 425388 - DNA, 1305 bp, Serratia marcescens
atggcgtcatccaatgcaatgaatattctcgactttgttgaggcgggcgaaggaaataatttaactaacgcatttcttcgccttgccaagaaaattaatgagaatcctaacccggtctgggaatccctcggcggtaaggtcatcgtgcctgccggtacctacagcatcactaagcagatcgtttttttaaagccaggggtacacatcgttggggaggggattcagtcaacgaagttactcctcacggctgacctgggggagctgggggccgttttcaaatttgactctgatattgcggggtactctaccgttggcgtgtgcatcaaagatatctcgatcaatatggccagtcataccgggagcgcaattgttttacgtaagccctatgacggttttatcctggagaatatcaatattgataatttggcggacagcggtatcggcatcgttatcgagccagataacgataataatccgtcggacaaagtctcccagacgctaacggcagtaaacgtcatcgtaaaacataccaatatgacggcaacagcgccttgtttttatgctgaggcattacaagaggccgtcttcatcaattgcaaagcgtttggcggcccagagagctatgttaaccaggcgccatgccacggttttttatttgtagattgccgcggtatcaccttgattggctgcagcgtggcgtttaccggtttgcacggtatttctatcgtttgttctaaccgcccttcaacagggttcttcttgtatggcacaacggcagaatcttgcaaagggatcgttaaagcgtcaggaagcaccaatggcagtgtcagtcagctttatattgacttcgtacgctcggagggaggaacggagaatacggtaggcaccttttcactcaataaagttatcgaggccagcattaattcgggaacgaactcggtcacgatcgatagccaaagcgctctggtatccgtttcatctcttgatgtgggtaaagtcaaaaattccggtcagaactgcttggtcatcggattgccttcgggggcaaataatgggtattcgattaatgctagtgctttcagcgtggcgaaagaaggaactaaaattatcaatggcaataccgatttgattgaaatgcatgcctccggtgcccgtgtggtcgctatcgattacccctggagcgaaggcaatacgtcgctaagcctgctgacgaacagaaaagggaagatggggtttgagcgagtgttgctgggggaggagaacagtgccggaaccggttttagagcgcttaaaatagtgaactaa

SEQ ID NO: 425389 - DNA, 216 bp, Serratia marcescens
atgcataaagtatcaagcttatttatctttattagccttattattttaattattgcgttttcattgaatctctatggccactacgccaccagtaactcaaacgctgtaccgctgttttccccgctctggtggacacgctggttcccgctctacgcctcgggcgctgcgttgctgttgatagggctggtattgcgggtttcggggcggggacgataa

SEQ ID NO: 425390 - DNA, 363 bp, Serratia marcescens
atgttgtatagcgaggatcaatacaaactgtttagtgaagagttggacggtgcttccattggaaccgtatggtcagctatgagagctgataattttgataggaatacattgtcctatgaagaaaagaaaaactattttttcgacttaattcatcagcttatgaatgaagggagagtaaggttaggtaaacatggccaattccttgagggagacattgaagaacaggtaacacattacaaagctgtattccctaagacagaagaggaatggaaaacaaaaaatgaagacatttggttctatgaagaggaatgccctggtggtcttgtctggattcatgaagacggctaccaagattggacgtag

SEQ ID NO: 425391 - DNA, 1398 bp, Serratia marcescens
gtggcgcagcgggtggccgggcaatcggtcatcagctccagcctgaataccgccatcaatggtggcagtttcaaggacaacctgaccaatgcgctgctggcgaacatcggcagccaggttcaggccgagggcgccaatctgatcggggataacggcgacgttctgggtaccgccgggaagtcagtcagccatgcggttgtggcgggcatcgccgcggaaatcgggcgcggcgatggtaaaggggctgctgccggggcgctggcggcggagctggccggcgtcgtgatgcagagcacgctgttcgaaccggccaatctcaacgaaaaggaacgccagctctaccgtctgcaggaagcgctaaacggcaatgaagtaaaagagcaaacggcacgagtgatcggggctttgaccggggcgttgacaacgcatacgccggaaggcgcctacagtgctgcggacagcgcgcagtcggtttatcgctacaacatgaccgaacatatgttgatgcagtatgcgctggataatcagaaagacattttggccgctgataaaggtgatgttgctgcggcaaaacgtgttgtggctcgccgagaagctgccgcaatagtggcgaccgtaggtggcggcggtctggtacttactgcggggggaatgacgctggtgggagctgcgccagaattggttctggcggcacgattggcgattgccggttgcaaaactaaccccgcgctttgcctgaaccaagccggtatttatgcggcggatattgtggcaccagaggcgattattggtactggtgccgtaaccaccggcagcacattgattccggggaaaaccgaagacggcgtgaggaagttgagccgacagctggtgaacgcttccgatgaattatacaaaacaaaaacgttcaacactcagccggttgccgattttatcaaaggagaaacagcagccggggcgaatttgtcgactaaaacggcagattatttgcgggaaatacagaaggttaacactaaccagttggttaaggtgtttgacccgaaacagaacgaaagtaagctaaacgtgtttggtcagcagttcgagcaggtgttaggtgagggtggcggcaacaagcaaggtaatacaaaagtgtttgccactgagaatttatcgaaacagacgattttcgattatgcgcaatctcttaccggagggaaaccattaatagaagttagaaaagatgcactatggacggtggttttaaatgaaaaaacaggtgagaaattaactcttaggagtgtttcaagtagcaaggaagataccaaagcacgttggacgattgatatcatagataatgaacacctgaatgcgcttcaaggtaaagtgaaaaaaagagtagaaatcaaatttcgatga

SEQ ID NO: 425392 - DNA, 384 bp, Serratia marcescens
atgatagatgacgaacgtatgagctataaggatatacgaactgattttttagactgtttctacggttgttgccgaaatattttagatacgagtaataagtcaggcgagaagccttcgtatgacggtatagaaataggatatgcatcatatcaatatgagtatgtaccttttatacctatagaaaatctaatgttaaatgtatttaagcttgttttaatggctggtagagggccagagggggtagaaattaatattagaaataacatatcggacatattaaaggatagatctctagaagagttactgctggatgctagcgaagaagaaaaaagcgacttgctttatgacatggagctacttgggttactggaacagtgtaagtaa

SEQ ID NO: 425393 - DNA, 5982 bp, Serratia marcescens
atggataagtccacttcccctttggcgcggggcgccagctatttgctgatctacctgacggctttccagccgttgcacccggcgttcgccgccggcattaccgccgctaacggcaatacgcaggtggttatcaagccgggcaacgtaccggtggtgaatatcgccacgccgaacggcgcggggatttcacacaatacctacaaggattttaacgtcggtacgcccggtgcggtgctgaataatgccatccagggtggcaagacccaactgggcgtgactattgagaatgcaaagggcaacccgaatctgaaagggaagccagcagaacttatcatcaacgaagtcaccggaggcagtcgttccgagctgcagggcaagctcgaggtgttcggcaacaaagccaacgtgatgatcgccaacccgaatggcatcacctgcaacggctgcggctttatcaacgcgccgggcgtgacgttaaccaccggcaaaccgcagttcgacaagcagggcgcgctggaggcgctggaggtgaaaaaaggcggcgtcaccatcggcggtaaagggctggacggcagcagcgccgactatgttgacatcatcagccgcgccaccgagctgaacggcaaaatcaacgcgcaaaacctgtcgctgacccagggcgctaaccgcatcagttttaaagacggcaccatcaagccgatcgctggcgaaggcgccaaaccagtgttggcggtggacaccaaggcactgggcggcatgtacgccaacaaaatccgcctggtggccaatgaggatggggtaggggtgaacctgaaagacctcaccagcaaacagcgggatattacgctgagcgttagcgggcggattgagttgggcaatacacaggcagcgacagacttgaacgccagcgccagggaaattcatatctcatcgggcgttaaggtgcgcggtgaacgtgacgtgacaatggctgccgatacgctcaataacaacggcaatgttacggcgcatcgcgatatgcgggtgtttgccgatacggtacgcaatgtggcactacgtgatggcgacaacaccgcattgcatagcaacaataatctctggattcagaaagacgctcaggggaataaagccaaacagatagaaaaccgctctgcacgcattcagaccaacagcggtgacttggttatacgcacggagaatttgaacaatgtcaggcaagaggttcaagccgtttggaaaaatactcccgctaactctaaagcgttcaataaatccttggtaggaagttattacgactcacggcaaggtgttgacgctattgtgctgctggagcctgaactgaaggactttggcatcggcagttggtttggcgaaatcaacctgtcgaaaggcgacaaggttaatgtggggaaagacgagtatcttctggtgaaatcgcaggcgccgggggtgataaattcaggcaacaacgcttatattaacgcgacaacgttatggaacgatcagtcgaatatcagcgcggccaaagatctgatcctgacggggaacgattttaccgtaaagagcattcaactcggccagaaagatcggtactggcgtctgggaacgaacacgtttggcgttggggcgtttgcccgtgacgaagatgcgcctcccggagattgggatctgctgtatgtcacggaaaaagcgccttataccaagcagcaggaacttgtcgtctggcgagcaaaggggcagcaaaaatcatcgattaccgccggcaataatctcactgcggattttaaaaataagatagagatcagtacgccgacgcctcatgaaaatcagctgaatgaagtggtcacctccggcaggccagagtcgctaaaggcacggaatgttctgctgcatgccaaaaacatcgtcggtactgatgcgattcgtgccgacggcaatatcaccgcgattgccgaagatcggattgttcttgggcaaggcattttggccgccggaaaagagctgtctctgacggcggtcaacgccatcgacgcctggcaaagtgagctgaaagggcaggacgtcacgctaaacgccaaaaacggtgagataaagatacattccagcgagaaacctcactacttccgccctgacggttcgcgttggttgggcagccttgaggcttcacgcgatctgtctctcacggctggcagtaccattacgttgctgaatacgctgctggcgccgcaaagtcgcaatatcgccatgacggctaacggcagcattgcaatcgtaaaaaacagcgcgttgttggaggggtcgctattgggggggccggtttctccggctaaacggcaggaatacttcaaccagctgttggccagtggccaaatgagggcaacgggttcggttctgctcaatagcggtggctatctggcgctccgcggcgccaagattaatgcggataaggacgttacgctgttagccgcccataacgccgatcttaactaccgtgaacttgacggtcgattcaatgcgcttttccctgtgtcccgcacgcctgaactgggcagccgggtacacgccggcggcaatttgctgattaactcggcccgcgacatcggcacccagggcggcgcgctctccgctaacggcaatatcacgctgctggccgggcagaatctatggttgtcgaacctggcctattccgccattgatgccgccaacgacaacaacaaagacgaccgccatgtggtcacagccctcagcgcgggtaaaaacctgaccgcgtcggcgaataaccaactgctgacttacggcgccaggctgacctccggcgccaacatgacgctgacctccggcggcgatatgcgtttcgaggcggtgcaaaatcacacttaccgcgagggcggcaacgagttcaccgaaactcgcactcagcagggcaccgagctgaatgccggcggcctgatgacggtgatttccggcggcagcattctgttccaggcgaccaaactggtggttaaaggattaggggcgaactggaaaccgtcggtggcggtgacggattggggaagccggatagcggcggcggagcaggcggttagaaatgcagagcaaaatgttaatcaaaaacagaatgtactgaacaacgttagaaatacgcctgaaggtttgttactcgataatcctgctcagcatcctatttcatacaagcacagtagttctgtaatgataccgggtacggggacttatcacctcgatatggggaatattgaaataaaaacccgttcagatctggatagattgcttaatgagggagggaaggcatttgacccattcccttatggtgtcgatcctgcggaaacatccggtgatggttatgagattgcgctggcaattcgaaaaaagacgatagatgaatatgaaaatttgcgtcaacgcataatcaaaaaaaagaatgagatacacgccgcccaacaagcgttgaattctgttgatagtgaaaaggtaaacgcaaataggaaattagttagcgtccaacaggaagcccaagctaaacatgcggaagaaacaaggctgaaagcccaggtcgatgcccacaaccaggcagaggccatgcgtgtcggcaatatggatatcgccgccaagggcggctatctctacgcccaggcaatggaagagtccagccattacgagaaaaaggaaaccaagcgcaaatggtggggcaagaaaaccgaggttaagcagacccgccatgacgtgaccaacaaggttaccgagtttaccgccgccggcaatatcacgctgatgagccgcgacgacagcacctatgaagccagtaaaatcgccgccgggcaaaacgcgcgcctgaccagttcccgtggccaggttaacttccgcgcggtgaaaaacacctctttcgaacagaccgtcagcaattcgaaaggcttctttatcaagcaggccaataaagggtacgaagacaataagtgggtgctgccgagcattcataccggtggcgccttgaccgtagaggccgccaagggcgtcagcgccgatgtgaaggtgaaaaacgggcaggcgctgcaaagcgccatcgacgccctgggcaatacgccgggcaccacctgggtcaaagatctgaacaagcgcaacgacgtgcagtggagcaaggtcaaagacgcttacgacagctgggattacacgagccagcacctgaacccggcggtggcggcggtgatcgccatcgcggccgcggcggtgaccgcaggcagttcactggcggccacggcggcctccagcgtttccggcgccgtgggcggcggggcggtaaccagcggtgcggtcaccgccgggatgtcttcgctggcctcccaggcggcggtggcgttggtggagaaccagggcaacctgtcgaaaaccctgcaggcgctgggtagcaatgagaacgtcaaggcgaccgccacggcgatggcgatcggtggcgcgctcaacggtttcgacagcgcgatgggctggagcaaggacgcggcgggcaaaccgctcaatccaaacaacgtcaaactgccgcagctgagcaacggcgactggagcaaggtggcgcagcgggtggccgggcaatcggtcatcagctccagcctgaataccgccatcaacggcggcagcttcaaggacaacctgaccaatgcgctgctggcgaacatcggcagccaggttcaggccgagggcgccaatctgatcggggataacggtcaggttctcaatataccgggccgtgccgtaagccatgccgttctggcgggcgtggccgcagaaatcggcaagggcaatgccaaaggcgcagcggcaggggcgctggcggcggagctggccggggtgatcatcaatgataatttggtcagaagtgaaggctggcaagagcgtcaggctcaaatcagccgcgtagcgggcgcctttgcaggggccatcgtaaccgccaaagcagcaggtgccaccagcggtgcaaatgcgggtgagtttgtcgagcgttttaatcgacagttgcatcaggaagaactcaacgccattaaagcgttggctaagggtgacaaggaaaaagaagcgcgtctgatggcggcttcatgccgaaaagtagcttgcaccacgcaagaggcgttgaactcagacgaacgcaagcagtttgaagccctgatgaataagtacccgtcaacgcgggatgaagacggcctcattgccaattactgggtacaaaaagagcgccagcgcttcggcaactatccggcgtttgccggctatgacagcgaacagttattcacgtatgatttgggcgaccagataaccgacggccagctgtttgcacgcaaccagcagatagaacaaatcagcaagttgaccgggtggtcgccggactgggtgaatgcctcggtgatggcggtctctattgccagcacgtttgccggtatgggtaaagcgaacgtcggcaaccagtacctgtcatccaaactggtagggccaaccagcgcctggaaagggtatctggtcaatgagaagaccgttcaacaggctgctgcgtttaggcagcaggtattggatgctagggcgccgttttctcaaaatatcaggaagatggggaatgccgcagttgcacaaatcgatatcccaggcatgccgaaaactcttgcggcacatagccgtatagacaaggctgaaaaaagttttgttgggaaaggtgggggaaacttcacatatgaaacgatcaagaatagtgacggtaacccaatccccagaaacctggattctgaatataaaattttggataatctggctgataaattgggggcgaacattaccgctaagggaaaggttaccatttttactgagcgtgtagcttgcgacagttgccttggtgtcgtggaacagtttcagaaaaaatacccaggagtcaaggtggaagtgatcgataacaataatatactgctgatacctcggaggttgaaatga

SEQ ID NO: 425394 - DNA, 1668 bp, Serratia marcescens
atgtgtgcatggaagcccgggatttggcctgcactcttggcgttctgcgctccggcgtggtgtgcggagatcgccagccctgctgaccgcgacagcattacccaacagcagaaaacgttgctggaacaggcgcaacaacagcgcgaggcgctgcaaaataacgttgagttgccggccttgccgctgcctgtgtcggccgccgcaggggcggtttgccaaccggtgcggcaaatcgtttttcagggcgccgaacatctttcctggtcggtaaaagaaagcctggcgcgcccgtatcaggggcgctgcctgacgctggatcacatcaaccgtctggtgcgcgaaaccaccaatgcttatctgcaacgcggctatgtcacctcgcaggcctggctgcaggagcaggatatttcccgcggcgtgttgaccgtgagcgccagcgaagggcgaatcgagtccatcacgcagaacggcgagcagacgctggcgctgaaaatggcgtttcccggcctggttggcgacgtattgaatctgcgcgatattgagcagggcatggagcagctcaaccgcctgccatcgcaacaggtggctatcgatattcaacccggcgaacaacccggcttttccaacgtggttttgttgcgtggcgcccggcgtgcgccggtctctttctctttcggcgccgacaacagcggccagaaaagcaccggcaccgggcagatgaacgccgccttcacgctggataacccgctgcgcctcgccgatcaatggtcgctttccgcagcgcgcaataacgatttcagcccgcattaccgcagccgcagcctgaacggcggcgtcaccttaccctacggctattggctgttcagttaccagtacgcctggaacgattttttccagcgggtgccgttcaacggcgcggcttaccgctatcagggcaacaaccagacccagcgtctgggcgccaaccgcacgttgctgcgggatggcaaacgcaagctggccgtcgatatcgggctggcgcggcgtaccacggaaaataagctggcgggggaacggttgggcgtcagcagcccgacgctcagcgtcgccagcctgggcctcaattacagtgcggctgcgggcggcggctatatgacgctgaacccgacggtaagccgcgggctgcgcatgctgggcgccaccgccgacgatcctgagcgcgacggggcgccgcgcagcgagttccgcaagcttggcctcagcgccagctacttttatccgctcgccccctctctctattacctgacctcggcctatgggcaaaccagcgcagacaacctgtatgccggcgagcgcatttccattggcgggcaatactcggtgcgtggctttaaagagcagtacctgaccggaaatcgcggcgcctactggcgcaatgaactcaactggcaatggcagacgttgccggggctgggagagctttctttcaccggcgcgttagacgccggttggttgcaggggcgcgccggtctgatagacggcggcagcgtcgccggcgcggcgctgagcgcgacgttaaacggccgctggttcaatcaggcggtcaccgtcggtaaatcgctgacgcacccaggcagcctgcaaccggatcgttgggtggcctactggcaagccaccgtcacgttataa

SEQ ID NO: 425395 - DNA, 1455 bp, Serratia marcescens
atgccagaacgtgatatagaactgtttattcgtgattacgttaatgatatcaaagccggcagcgccgcgctatttgccggtgccgggctgtccatacccgccggtttcgtcagctggaaagagcttatcggtgatatcgcttatgaattggggctggatatagaaaaagaaagcgaccttatttctctggctcaatatcatctcaatgaaaaaggcaaccggcataagataaatcaaaaaataattacagaattcgctgagcaagcggaagaaactgaaaatcatcggatcattgccagattgccgatagcgtcactctggacaaccaactacgacgatctgattgaaaaaacctatgcccgttataatcgcgtctgcgacgttaaaaccacgccggaaagtctgaccaacaatattcacaagcgcgatgttgtcttatataaaatgcatggtgattatagaacacccaaccaggcgattatcacccgcgaacaatacgaaacttactcccgtacacaccttccttttatcaacatgctgatggcggagttgaccgccaaaaccttcctgtttatcggtttcagctttgaagaccccaacctgcaatacgtattgagtcgcctttacgcgcagtacggcgaagggaaaagaaaccactactgcatcatgcggcgcgttcagcctggcgacagcggcagcgaggatcaggcgtcttatgattacaacagccgaaaacaaagcctgatgatcaacgatctgcgccgttacggcattcaaacgctactggtggaggactatcggcaaatcaccgacctgctatatgccatcgaaacgcaattcaagaaaagcacggtgtttatctccggcagcgccgacaactaccacccctatgcccgtgaagagtccatccagttcatacaccgcctggcgcgcctgcttatccgcaaacagtaccgcatcgtcaacggcttcggttggggcgtgggcacggcggtgatcaacggcgcattggaagccatctacgccagcggggggaaaatcagcgaaagccagctggtgctgcgccctttcccccaattcgccagcgggggcattacgctgccggcactttggcacgagtaccgccagaacatgatttcgctcagcggcatcgcggtctttttgttcggcaacaagcgtaacgccgaaggcgaatgcgtgctggccgacggtttattgaaagagttccacatcgctgcggaacaaggctgcgtctgcattcctatcggttgtaccggcggcgcatccgccgagatctaccgaaaaatcaaggaggagatgaaagacaccctctatcaccgccatcccgtcgccatgaacctgctggatcaacttaacgagccgggcagcctggcggagaagaaaacatgcctgttggcacttatcgatatcattactaaggataatcctcgttga

SEQ ID NO: 425396 - DNA, 492 bp, Serratia marcescens
ttgaccagaaaatgtttttacagtttccattatgagccggacaactggcgcgcttctcagatacgcgaaatgggctcgctggaaggtaaccggccggccacggataacgattgggaggaagtgaaaaaagggggtgacgacgccatcgccgcttggatcaaaggccagttggacaatcggagctgcgccgtgattctcgcgggtaaagataccgccaatcgcaagtggatcaacttcgaaatctgcgaagcctggaagaaaggcatgggcgtgctggtggtgtatatccataacctgaaagacagcgccggcgaacaagcccgaaaaggcaacaacccgttggatcatatcaagctgggcgacacaaaactctccgctatcgccaaagcctatgatccgccttatttgaccagcaccaatgtctataatcacatcaaggaaaatctggcggagtgggtagaagaagcgatccgcattcgcgaaaattactga

SEQ ID NO: 425397 - DNA, 813 bp, Serratia marcescens
atgggtttgatgacgccaggcagtttgccccggctggatgtccagcatctcgacgatgaacagaccgcgctggcggtcaacggactgaacctgttttatggcgacaaacaggtgctgcatgatatttcgctgcgcattccgaagcaccgggtgacggccctgatcggcccttcgggctgcggcaaatcgacgctgctgcgctgtttcaaccgcatgaacgatctggtggacaactgccgcatcgagggcgatctgcagctgaacggcgcggcgatctccggcgcacagatcgacgtggcggcgctgcggcggcgggtgggcatggtgttccaacggccgaacccgttcccgaaatcgatctatgaaaacgtggtgtacggcctgcgcttgcagggcgtgcgcgaccggcgcttgctggatgaagcggtggagcgttcgctgcgcgccgccgcgctgtggcatgaggtgaaggatcggctgcgtgaaaatgcgttccgcttgtccagcggccagcagcagcgcctggtgatcgcgcgcgccatcgccatcgagccggaagtgttgctgctcgacgagccgacctcggcgctggatccgatctccacgctgaccatcgaagagctgatttccgcgctgaaacagcgttacagcgtggtgctggtgacgcacaacatgcagcaggcagcgcgcgtctccgactacaccgcctttattcatcaggggcggctggtggagtacaacgacaccgatgccatcttcacctcgccgcgccagcgccgcaccgaggattatattaccgggcggtatgggtga

SEQ ID NO: 425398 - DNA, 1650 bp, Serratia marcescens
atgaagaactgggtgaagagcggatcgccgtggatttggctgaccgccggttcggtggccgtcagcctgttggcgctgatcggcattctgttgctgctggccgggcaggggatgcgttatttctggccgagcccggtttatcagttcgagctgaatcagaacggcgccgggccggtgacggtgatcggcgagctgtaccagcagcaaagcatttcgcgccgccagctgacggaggcgggcgtgacgccgccgggcgaggcgcaaagcgtcgaacgctatctgattaaggtcggtaaccgcgagcgtgaagggcaggatttccgcaccttgctggccagcgacatcggcagccaaagcacgccgcgcagcctgctggtgctggagcgtgacagccacggcaccgcttacggctatctggcggggctgctggaggacgggcaaccgctgaccggccgcaatctggggcaggcgttgcagcagcggctgccgcaaatcgccgcgctctcgcgccaggcgcacgacattcaatttcgcgatatggcgcgcatcaatcagcagtttgacgcgctgcggctgcgggaaaagcgcctgcagcgcgacgataagctggacgcccgcgcgcaggacgccatcaaggccgagcggctggagctgcagcggcaataccagctgctgtccgaacgcctggcggggctgaaccgcgatcgccaacgtgatgcgctgctgctgcgcgatatgcatggccagacgttgaccattccgctcagccaggtacgcgatgcctggtacccgaacgccatgaacaccagcgagaagctggcgcactggggcgagcaggtgaagaagttcctcaccgacagcccgcgcgaggcgaacaccgaaggcggggtgttcccggccattttcggcacggtgttgatggtgatcctgatgtcgatcgtggtgatgccgtttggcgtgatcgcggcggtgtatctgcacgagtatgccggcaacaatctgctgacgcgggtgatccgcatcgcggtggtcaacctggccggcgtgccctcgatcgtctacggcgtcttcggcctcggctttttcgtttatatgataggcggcacgctcgaccagctgttctatcctgaatccttgcccaacccgaccttcggcacgcccggcgtgctgtgggcggcgctgacgctggcgctgctgacgctgccggtggtgatcgtcgccaccgaggaagggctgtcgcgcattcccacctcgctgcggcagggttcgatggcgctgggcgccagccgggccgagacgctgtggcgcatcgtgctgccgatggcggcgccggcgatgatgaccggcctgattctggcggtggcgcgcgccgccggggagaccgcgccgctgatgctggtgggggtagtgaaatcggtgccggtgctgccggtggacgagattttcccgtatctgcacctggagcggaagtttatgcatttgagcttccagatctacgatatggcattccagagcccgagcgtagaggcggcgcggccgctggtgttcgccaccgccttcctgctggtgacgatcgtggtgagtttgaatctggcggcgatgggtatccgccattcgctgagggagcggtaccgagcatggtcgcagtaa

SEQ ID NO: 425399 - DNA, 2133 bp, Serratia marcescens
atgcgcgggcgcatcgaccgcggcgtgcaggcggcagtgaccgccagcgggctgatggtgctgatgacgttgatgctgatcttcgtttatctgctgtttgcggtgctgccgctgttcaaaccggcctcgcttgggcaggcgcagccgttgccgatcgcggcgtcggccccggcgctggcgctgggcatggacgtgcagcagcgcgtcggttaccgcattgacgcgcagggcgcggggcaattttatcgcctgacgccgaccccgaacggccagccccaggcgccgctggcgcagcagacgctgttggccaagccggcgctgctcgcgcaggccgccggagagcgcgatctgtttgcgctggcgcaggccgacggccgcttggtggtggcgcgcgcggatttcgcgacggcggagaccggccggccgcagtggctgttcccgctcgggcagcagccgttggcgctggatccacagcgcaagccgctgaaactgctgtcgctggcggatgcgcatcgcgggcagtatctgctggccggggtgaccgacgatcggcgcctggtgtttggccgtttcagccccgaccggccgccgcagttcagcgagcgcccgctggaacatgatgctgagcaactggtgctgacgccggatggccgccagctttacctgttggcgggcaaccggctggcgcgttatcagatcgacggcgcgcagctgcagctgcgtgaaacgcgtacccttggcgaacatgccccgtatcagatgacggcgctgcccggcggcagcgcgctgctgatcaagggcgccgacggcaatctgcgcgagtggttcgaagtagaaaaagagcagcgctggcgcctgacgccggtgcagcatttcgaccatggcgccgacgggcaggagctgacggtggccgagccttaccgccgggtgttcgccaccctgcggcccgatggcggcttctcgctgttctccaccattcaaccgcagccgctgctgaatacccgtttgggcgccgaggtgcagcagatagcgttcgcgccgcgcggcgatggcctgctgctggagagcgcgcagggctggcagcgctatgcgctcgacaacccgtatccggacgtcacctggcgttcgctgtggggcaaggtgtggtatgagaactacccgcagccggcctacgtctggcaatccacctccggcgaagacagttatcaaccgaaattcagcctgatgccggtgatcttcggcaccttcaaggcggcggcttacgcgatgctgttcgccattcccctggcgctggccggcgctatctataccgcttattttatgacgccggggctgcgtcgggtgatcaaaccggctatcgaagtgatgggcgcgttgccgacggtggtgatcgggctggtggccggcatttggctggcgccgatcatcgagcaatacctgttggcggtgctggcgttgccgctgctgctggcggcggcggtgctgctgtgcggcgcgctgactcatcgctttatgccgcgttgccggccgggtgtcgatctgctgttgctgttgccgctgctggcgttgacggtgtggctggcgctcagcctcgggccgcggctggaggtggcgttgttcggtgagccgctgcatttctggctgggggataattacgaccagcgcaatgcgctggtggtgggcgtggcgatgggcttcgcgctggtgccgatcatcttctcgctggcggaggacgcgctgttcagcgtgccggccaccctgagccagggctctttggcgctgggcgccacccaatggcagacggttgtcaaggtggtgctgccttccgccagcgccggcattttctccgcgctgatgatcggctttggccgcgcggtgggggaaaccatgatcgtgctgatggccaccggcaatacgccgattatcgacggcagcctgttccaggggctgcgggcgttggcggccaatatcgccatcgagatgccggaggcggtctccggcagcagccattaccgcgtgctgttcctgaccgcgctggtgctgtttatcttcaccttcgtgttcaacacgctggcggaggcggtgcgcctgcggctgcgcaagcgctacacgccgaatcaggaggcgccatga

SEQ ID NO: 425400 - DNA, 2064 bp, Serratia marcescens
atgggtcaggaaaagctctacatcgaaaaagaactaagctggttatcctttaatgaacgcgtgttgcaggaagccgcagataagagcaatcccctgattgaacgtatgcgttttctgggcatttactccaacaacctcgacgaattctataaagtccgcttcgccgatctcaaacggcgcatcctgatcagcgaagagcaaggctccgccggcgcctcgcgccacctgctgaaaaagatccaggccaaggtgttgaaaaccgatcaggagttcgacggcctgtacaacgatctgctgctggaaatggcgcgcaatcagatcttcctgatcaacgaacgccaggtgtccgagaaccagcaaatctggctgcggcaatatttcaaacagcatctgcgccagcacattacgccgatcctgatcaatcacgacaccaatctggtgcagttcctgaaagacgattacacctatctggcggtggagatcatccgcggcgcgcgcatcgactatgcgctgctggagatcccgtccgacaaggtgccgcgcttcgtcaatctgccgccggaagcgccgcgccgccgcaagccgatgatcctgctggacaacattctgcgttactgcctggacgatatcttcaagggcttcttcgactacgacgcgctcaacgcctactcgatgaaaatgacccgcgacgcggagtacgatctggtgaccgaaatggaatccagcctgctggaactgatgtcctccagcctgaaacagcgcctgaccgccgagccggtgcgcttcgtgtatcagcgcgacatgccgaacgaaatggtggaactgctgcgcggcaagctgggcatctccaactacgattcggtgatcgccggcggccgctaccacaacttcaaagatttcatcagcttcccgaacgtcggcaaggccaacctggtcaacaagccgctgccgcgcctgcgccacatctggttcgacggtttccgcaacggcttcgacgccattcgcgaaaaagacgtgctgctctactatccgtaccacaccttcgagcacgtgctggagctgctgcgccaggcgtcgttcgatccgagcgtgttggctatcaagatcaacatctaccgggtagcgaaagattcacgcatcatcgaatcgatgatccacgccgcgcacaacggcaaaaaagtcacggtggtggtcgagctgcaggcgcgcttcgacgaagaagccaacattcattgggcgaagcgcctgaccgaggccggcgtacacgtgatcttctccgcgccgggcctgaaaatccacgccaaactgttcctgatttcacgccgtgaaggcgatgaaattgtgcgctatgctcatatcggcaccggcaactttaacgaaaaaaccgcgcgcatctacaccgactattcgctgttgaccgccgactcacgcatcaccaacgaggtgcgtcgggtgttcaactttatcgagaacccctaccggccggtcaccttcgacaacctgatggtgtcgccgcagaactcgcgcctgaagctgtatgagctgatcgacaacgaaatcgccaacgcccaggccggggaacaggccggcattatgttgaaaattaataatctggtggataaagggctggtagatcggttatataccgcgtccggcgccggcgtgaagatccgcctgctggtgcggggcatgtgttccctgattcccaacctgccggggatcagcgacaatattcaggtgatcagcatcgtcgatcgctttttggaacacgaccgggtttacgttttcgacaataaaggtgacaaacgggtgtatctgtcctccgccgactggatgacccgcaacatagattaccgtatcgaagtggcggtatcgctgctggatccggcgctgaaacagcgcgttctggacattctggagatcctgttcagcgatacggtcaaggcccgttatgtggataaagaactgagcaaccagtacgtgccgcgcggcaaccgccgcaaagtgcgtgcccaggtggctatttacgagtatttaaaagctctggaacaaccaggacagtag

SEQ ID NO: 425401 - DNA, 1551 bp, Serratia marcescens
atgccgctaaaaaacactgcaacgaacaaaccgcaggaaatcgccgccatcgacctcgggtcgaacagtttccacatggtgatcgcccgcgtcgtcaacggcgccttacaggtattgggccgtttaaaacagcgggtgcatctcgccgacggattggacagcaacaacgtactcagtgaagaggcgatagaacgcggcctggcctgcctggcgctgtttgccgaacggctgcagggcttcccggcggataacgtgaccatcgtcgggacgcacaccctgcgtcaggcggtgaacgccgaagtgttcctcaagcgcgccgccaaagtgatcccctacccgatcgaaatcatcgccggccaggaagaggcgcgtctgatcttcatgggcgtggagcacactcagccggagaaaggccgcaagctggtgatcgacatcggcggcggatccaccgagctggtgatcggcgaagacttcgagccgctgctggcggaaagccgccgcatgggctgcgtcagcttcgcccagctgttcttcccgggcggcgagatcagcaaaaacaacttccgccgcgcgcggctggcggcggcgcaaaaattggaaacgctggcctggcagtaccgcattcagggctggcagtacgcgctgggcgcctcgggcaccatcaaggccgcccacgaagtgctggtggcgatgggggaaaaagacggtctcatcaccctggatcgcctggaaatgctcgccgaacaggtgctgcagttcaaaagcttcagttcgctgagcctgccggggctgtcggaggatcgccaatcggtgttcgtgccggggctggctatcctgtgcggcgtgttcgacgcgctggcgatccgcgatctgcgcctgtccgacggcgcgctgcgcgaaggcgtactgtatgaaatggaaggccgcttccgccatcaggacatccgcagccgcaccgccaagagcctggccgatcattacaacatcgaccgcgagcaggccaagcgggtgctggaaaccaccgagctgctctactcgcagtggatggcgcaaaacaccaagctggcgcatccgcagctggaagcgctgctgaaatgggccgccatgctgcacgaggtggggctgagcatcaaccacagcggcatgcaccgccattcggcctacattctgcaaaactccaacctgcctggcttcaaccaggaacagcagctgctgctgtcggcgctggtgcgtttccaccgcaaggcgatcaagctcgaagagctgccgcgcctcaacctgttcaagaagaagcactacctgccgctgatccagctgctgcgtctgagcaccctgctcaacaaccagcgtcagtcgaccaccacgccggaaacgctgcgcctgaccaccgacgacaaccactggacgctgcgcttcccggccggctacctggcgcagaacaacctggtgcagctcgatttcgagcgcgaacaggcctactggaacgacgtcgtcggctggaagctgctgatcgaagaagaaggctcgcaaaacgaacagcgctccgcctga

SEQ ID NO: 425402 - DNA, 183 bp, Serratia marcescens
atgcgcaagaaaaccaccggacagatgacgaagatagtgttgtttatcagctttatcattttagtcggccgactgctgtacgccgccgtggtggcggtgcctcatcatcaggaaaaaaagcaggccgctgcgcaaaacgccgccgaagtcagcgcgccgcaacaggacgcctcctctgaataa

SEQ ID NO: 425403 - DNA, 1434 bp, Serratia marcescens
atgtcagccgcaacccataacgtcaaaaaagtcgctgaataccgccagcgcattctcactctgctgttgaacaataaggagttggtcgacggcattctcggccggccaggggatgaacacgccctcagccaaagcgaactgctgaaccagacggcggaaatcaccggtctgttggacgatatgcacgccgccgacctggcggacctgctggaggcgctgccgcaggacgaacgtatggcgctgtggcggctggtgggcaacagcaagcgcggccagacgctggtggaggtcgccgaaccggtctgggacagcctgatcgaggaaatgagcgacaaagacctgctcaaagcgatcaaaacgctggacgtcgacgaacaggcctacctggcgcaatacctgccgcgtaacctgatgggccggttgctgacctcgctggagccggagcagcgcgcccaggtgcgcgagatgagccagtacgccaaagacagcgtcggctggatgatggatttcgaactggtgacggtgcggccggacgtcacgctcggcgcggtgcatcgcttcttgcgcatgcgcaaaaccattcccgacgccaccgataaactgttcgtcaccgatcgcaaaaacaccctgttgggcgagctgccactgaccgcagtgctgctgaacgatccggagatcccggtgcgcgaagtgatggacagcgatcccgccacctttcagcccgaagacaaggccgatgaagcggccggcgcgttcgaacgttacgacctgatcagcgccccggtggttgacgccaagggcaaactgatgggccgcctgaccatcgaagagatcgtcgacgccgtcaacgaagagagcgacaccaacctgcgccgcatgggcggtttgagcccggaagaagacgtgttcgccccggtcagcaaggcggtcaagacccgctgggcctggctggcgatcaacctctgcaccgcattcatcgcctcgcgggtgatcggcctgttcgaacacaccatttcccagctggtggcgctggcggcgctgatgccgatcgtcgccggcatcggcggcaacaccggcaaccagaccatcaccatgatcgtgcgcgcgctggcgctgcaccagattgaagtcggcaacatctcgcgcctgatgctcagagagctgggcgtcgccatcatcaacggcgtggtgtggggcggcatcatgggcgtcatcacctggctgctgtacggcgacgcggcgatgggcggcgtgatgacgctggcgatgctgctcaatctgctgctggcggcgctgatgggcgtagtgatcccgatgaccatgctcaaaatgggccgagatccggcggtcggctccagcgtgctcatcaccgcgctgaccgataccggcggctttttcatcttcctcggcctcgccaccctgttcttgctgtaa

SEQ ID NO: 425404 - DNA, 3327 bp, Serratia marcescens
atggagatcagcgcgccgaacacgttcggcacccacaaaggcgtcgtgctgacgcattccctgttagtggcgctggcgacgtttctgctcgccttgctaagcctgtcgctgtccagcgaagccagccacttcaccccgctgtggtttccgaccgccgccgcgatcgcggtgctgtaccgccacgccccgcgccactggggcctgccgctgttggccagcggcctcggcatcgtgctcgccagcttcttgctgttcggcgtcagcgccacgcccatcaagctggccgccatcaacctgctggaagcggcggtttgcgccctgctgctgcgccgcatgctacacccgtacgatccgttgaacgatctcgccagttggctgcgttttgtggtgtgcgcggtgatttttaccccgctgttcagcgcgctgctggccgccggcctggtgcccgcgccaggccagcctttttggcagccgttcggtacctggttcatttccgaagcgataggggtgctgtcgctggcgccgatcggcctctcttataaccgtcgcaccctgacggcgctgaacccgtttccattattgctgacgctgatggttacgctggctttcagctttgtggcgctgacctacctgccttttccgttcacgttcgtgattttgccgctgctgtgggcagccatcgcactgccgcgttttgaggcgttcaccgtttgcttctgcaccctcttgctgatcaccgtgatgatttcgctggggttgctgcatttccaggcttccggcaagcaccttggcgatctcggtctgtacttgccgatgctgctgattttaatcccggcgcacgcgatggcggtggtgatgcacgcctttcgggtggaaaaacagcacatcgtcgagagcgaaagccgctttcgcagcgcgctggagtattccgccatcggcatggcgctggtgtcgccgcaggggaaatggctgcaggtcaatcaggcgctgtgcgcgctgctcggctatacgcctgaggcgctgcataagctgacctttcaagaaattacgcatcccgacgatctcaccgccgatctcagccagttgcacgacctgctcgatggccatatcagcagctacaccatggagaaacgctacatccgcagcgacggccagaccgtctgggcgctgctggcggtctcgctggtgcgcgacgccgaaggcctgccgctgtacttcatctcgcaggtggaggacatcagcgatttgaagcgcagccaggcggaaaacaaccgactggtggagcgcattacgctggccaatcaggtgggcggcgtcggcatctgggaatgggtgatgagccaggaaaacttcacctgggatcagcgcatgttcgaactctacgatctcaatcccgaccaaacgccgacgctggcgctgtggcgcaccctgttggtgccggaagatcgcgaccgcaccgatcgcgagctggccgcgctgttggccgaccccaagcctttcgtcatggaataccgcatcgtgacccgccagggcagcgtgcgccatattcgcggccagggcaacgtgatcctcgacgatcagggccggccgctgcgcatgatcggcaccaatatcgacatgaccgagctcaagagcctcgccgaagcgctgcacgaggagaaagagcgtttgcacatcaccctcgacgccatcggcgaaggggtgatctccaccgacagccacctgcgcattacctttatgaatccggtggccgagcagatgtgcggctggccgctcgatctggcgatcggtatgcccgtcgccggcgtggtgcgcctgaccaacggcaaagacggcccggaaatcgaaaacctcacgcaatatccacggcagtggccggcggattacgcattggtgctgcacagccgcgacgggcgctatttcgacgtgcagcagtctgtctcaccgctgaaaaccctcgacggtgaaaccatgggcgcggtgatggtgctgcaggatgtcaccgcctcgcgcgaactgatgaaaaagctcagctacagcgcctcgcacgacgcgctgaccggcctgccgaaccgcgccagcttcgagaagcagctgaaagcggcaatcgtcgccggcggggaaccgtcgccgccgcattcgctggtgtttctcgatctggatcggttcaaggcggtgaacgacaccgccggccacgcggcgggcgatgccttgctgcgagacatcgcccagctgatgcgtcaccagctgcgcaacagcgactgtctggcccggctgggtggtgacgagttcggcctgatcctgttcgactgccggctggagcaggccaaatcgctgatgcaacaggtggtcaaccaaatcagccaacacccgttctactgggaagggaaaatttaccgcgtcggcgccagcgccggcatcacgcgcatcggcggcgacgccaaaagcagcgaactgctggcccaggccgacatcgcctgctacaccgccaagcaccacgggcgcggccaggtgtatctgtatgaggcacgacaaaaacagctgctggagcgacagcatgaattactgagcccacaggaggtacagacgatcatcagcgaggggcagttgcggctgttgacccgcgcggccgcgccgccggcgacgccgctgtcggccgctttccaccaggtgaaactgcaggtgatggcgccagacgatcggccgctgccgcacgaggcgttcatcgccgccgcgcagctgtacggcctgatgccggacatcgaccgctggacggtggcgcagctgctggtgcactgcgccgacgacatcaagcgcaaggggctgtcgctcgcgttgccgctggccaccgacagcctgctgaacaccgacttccagcgcgagctgacggaaagggtgcgcgcttcctcgctgccgccgcaggcactgttgttcagcgtcgatgaggccgtggtgctggaacacgccgcgcagtgccgggcgtgtcttcgcgaactgcagcagctgggctgccggctgatcgtcaatggcttcggacataacatcaatgccttcgatgagctgggcgatcagaaaatcgacatcattcgcgtcgatgaacgctttatcaccaacgtgcactgcaaccagatggatgaactgatggtctcgatgctcaacggcgcggcgcatcggatcaaagcgcagacgctcgccgggccggcccaccaaccggtgacgctgcaggcgctgcgcgatatcggcgtcgatctggcggatggcgatcaggtagcgctggagcagccgctggcggtgttgctcagcgacggctacttcggcattcgctaa

SEQ ID NO: 425405 - DNA, 354 bp, Serratia marcescens
atggaaaagaaatggttttccgccagggaactgatgggcaaggcggggttgccttcaacaccgcaaggggtcaatttgatggcccggcgcgaaggctggctaagccgccgccgcagcggcgtgcagggcaaagcgctggaataccatatcgacagcctgccgtacggcgcgcgcagcctgtctgccttgcgcgagacagaccctccgggctacgacgtcaaacgccaggatccgatacgggtctggatcgagtattactaccacctgacgccggccgagcgggaaaagctgctggcgttcctgatgcgcgagggcatgagccgcctgctgcagctgatcgagcccccccgctag

SEQ ID NO: 425406 - DNA, 1491 bp, Serratia marcescens
atgcagaaaaaaccgaacccgagcgttgccatgaatactcaacagcaagcgttgtacgacgcgctgcgcgcgcgtgaccgcaaattcgacggccgctttttcgtcggcgtctcttccaccggcatctattgccgcccggtgtgcagcgcccgcacgccgaagctggaaaactgcaccttttatccgagcgcggcggcggccgagctggcgggctttcgcccctgtcttaaatgccggccggagctggcacccggcctggcgctgatcgatctgggcaatcgctatgcgcaggtggcggtgcagctcatcgagcaaggctatctgtccgaacacagctgcgaagcgctggcggcgcggctcggtatttccgatcgccacctgcggcgcatcttcgccgaacagtttggcgcttcgccgatcgattacgcgcagtcgcaccggttgctgcaggccaaacgcctgctggcggacaccgatctgccgctcagcgaggtggcgttcgccgccggtttcggcagcctgcggcgtttcaacgagctgttcaaggcgcgctatcgcctgatcccgtctgcgctgcgcagcggcggcgcgcgcggtgagcgggccgccgccagcgggctggtgttccatctgggctatcggccgccctatgactgggatcgcatgctgaatttcctgcaggcgcgcgccgtgcagggcgtggagcgggtcgagggacgccgctacctgcgttcgatcgccgtcaaccagggcggcacggaatatcgcggctgggtcagcgtgcagccggaggaagcgcgcaaccgggtcagggtcgagatcgcgcctgcgctcagtttggtgacgacggaggtgctgcgccgcgtgcgcctgctgtttgatctggacgccgcgccggatcgcatcaatgaggcgctgggcttgctggcggccgatgcgccggggctgcgcctgccgggctgcgtgaacagcttcgagcaggcggcgcgggcggtgctggggcagttggttagcgtgaaaatggcggcgaccttcgccgggcggatggccgaacgctggggagagccgctggcggcgccgcacgagggcatcacccacgttttccccagcgccgaacgggtggcgcagctgcagcccgaagcactgcgcctgctcggggtgcagctgaagcgcgcggcggcgctgatcgagatcgcccgcgcgctgggcgaagggcggctgcagctcgacaacgtgctggatatcgaccagggcatcagggcgctgaccgcgctgccgggcatcggcaactggaccgccagctatatcgcgatgcgcgcctggtcttggccggacgtgtttctggccggcgactacctgatcaaacagcgttttcccggcatgacgccgcgccagatcgaacgctatgccgaacgttggcgcccgtggcgctcttacgccacgctgcatctgtggcacaacgacggctgggcgccggaaggggaggattga

SEQ ID NO: 425407 - DNA, 1353 bp, Serratia marcescens
atgtttattggattcgattacgggacagccaactgttccgtcgcggtgatgcgcgaccacggccccgagctgctgacgctggaaaacaacgaaccgtatctgccttcgatgctgtgcgcgccgacccgcgaagcggtgagcgaatgcctgcaccgccattggcaggtgccaaccggcagcgaagaaaaccagcagctgctgcgccgcgccatcagttacaaccgcgaagaggacattccggtcaacggcgacagcgtgttgttcggcctgcaggcgctggcgcactacatggaagatccggaagaggtgtacttcgtgcgctcgccgaaatccttcctcggcgccaacggactgaaaccgcagcagatcgcgctgttcgaagacctggtgtgcgccatgatgttccacatcaaacgccaggcggaaaacgtgctgcagaccggcatcgagcaggcggtgatcggccggccgatcaacttccagggcatcggcggcgaagaggccaaccggcaggcgcagggcattttgcagcgcgccgccgaacgcgccggtttcaaagccattgaattccagttcgagccggtggcggcggggctggacttcgaggcgacgctgagcgaagagcaaaccgtgctggtggtggacatcggcggcggcaccaccgactgctcggtgctgctgatggggccacagtggcgcgaccgcgccgatcgccagcaaagcctgctgggccacagcggctgccgggtcggcggtaacgatctggacatcatgctggccttcaaacagttgatgccgctgttcggcctgggcggcgaaaccgcgaaaggcatcgccctgccggcgctgccttactggaacgcggtggcgaccaacgacgtgccggcgcaaaacgacttctacagcgccgccaacggccgcgtgctgcgcgatctgatcctcgacgcggcggagccggaaaaggtcaaacgcctgctgaaagtgtaccagcagcgcctgagctaccgactggtgcgcgcggccgaagagagtaagatagccctgtccggccaaaccgccatcagcgcgccgctcggcttcgtgcaggccgatctggcggagagcatcagccaggctcagctcgcagacgccatctcgcagccgttgatgcgcatccaggaacaggtcagcgccgcactggccagcagccagaccgcgccgcaggtgatctacctaaccggcggcagcgcgcgctcccccctgctgcgcgccgcgctgcaacagcagctgccaggcattccgatcgtcggcggcaacgacttcggctcggtcaccgccgggctggcgcgctgggcgcaaacgctgttccgttga

SEQ ID NO: 425408 - DNA, 567 bp, Serratia marcescens
atgtcaaccatccttacccttgacagcgccaggctgcgcctgcgcccctggcgcgacgacgatctaccggccttcgctgcgcttaacgccgatccgcaggtgatgcgctatttcccggcgacgatgacggccgaggaaagccgcgcgcaggccgaacgcatccgcgccttcatgcaacaacatggctgggggctatgggcggtggaagtgaaagacggcgcgccctttatcgggtttgtcgggctggcgcggccgggcgacgatctgccctgttccccctgcgtggagattggctggcggctggcggcggcccattggggcaacggctacgccgctgaagcggcacgcgcggcgctggcgtgcgccttcgacacgcttcacttgccggaagtggtgtccttcacagccgaaaacaaccaaccgtcgcgccgggtgatgacgcgcatcggcatgcagtttgacggcgaaaccttcctgcacccacgcctgccgacgggccatccgctgcaaaagcacgtcttgtaccggctgaaccggcaaacgtggcgcgaacgtcgcggcgattaa

SEQ ID NO: 425409 - DNA, 618 bp, Serratia marcescens
atgtctggcgatatcatcaacgacctcgcgacgctggaacagctgtacggcaaacccgccgcgccctcggtgtttaaagaagtcagctatatccacccggcgtaccgtccgtttatcgaggcggcgccgtttgccgccctctcgacggtcgggccggacggcatggatgtctccccgcgcggcgatccggccggttttatccatatcgaagacgagaaaaccctgctgctgccggatcggcgcggcaataaccgcatcgacagcctgcgcaatatcctgcacgacaaccgggtggcgctgctgctgctgatccccggtatcggcgaaacgctgcggattaacgggcgggcggagatcgtggtggcgccggcggtgctgcagcgcttcgcccagcgtaatcagttgccgcgttcggtgctgcgcattcgggtggaggcggtgtttttccagtgcagccgggcgatcttgcgttcgggactctgggaagagggcagccgcctcgaacgttcggcgctgcccagccccggccatattttggccgcggtgagccaaacgcgcttcgacggtgaggagtacgaccaggcgctgccgcagcggctgaaggatacgctgtattaa

SEQ ID NO: 425410 - DNA, 954 bp, Serratia marcescens
atgagcaagaaacaactgggccgttcgggcattcaggtgccggcgttgaccttcggcggcaacgtgttcggctggacggcggatcaagcgacctctttcagcctgctggatgcgttggtggacaatcagctcaactttatcgataccgccgatgtctattccagctgggcgccgggcaaccggggcggcgaatcggaaaccgtcatcggcgaatggctcaagaagagcggcaagcgcgacaaggtgatcatcgccaccaaggtgggcaaaccgatgggcgaaggcaaacaggggctgtcgccgcgctatattcagcaggcggtggaggactcgctgcgccgcctgcaaaccgattatatcgatctctaccagtcgcacgacgatgaccgcgatacgccgctggaagagacgctggcggcgttcgatgcgctgatcaaggccggcaaggtgcgggcgattggcgcctccaactatcaggcggatcgcctggaagaagcgctgcgggtgagcgaaagcaacgggctggcgcgctacgaaaccctgcagccggaatataacctgtatgcgcgcgaagggtatgaggccgagctggaaggcgtggcgcagcgccacgggctcggggtgatcaacttcttcgcgctggccagcggcttcctgaccggcaaataccgcagcaaagcggacgagggcaaaagccagcgcggcgatcgcatcgtcgaacgctaccttaacccgcgcggtttccgcattctggcggcgctggatcaggtggcgggcaagcacggcagctccccggcgcaggtctcgctggcctggctgattgcgcgcccgagcatcaccgcgccgatcgtcagcgccacctcgttgccgcagttggatgagttggtcagcgccacccgcctgacgctggatgcggacgacattcagacgctgaaccacgccagcgctgagtaa

SEQ ID NO: 425411 - DNA, 1254 bp, Serratia marcescens
atgaatgcaaaaccccaacgtcgttccctgctgctgcgcctgctggttgcggcgattgcgatcatcgtcgccgttctggcctggcgccatttcagcgccgcccaaccggccaccgggacgacgccgggcgcgcaccaggccgccggtaaaacgggagcgggccgcgcggcgggcgggcggcgcggcgcgccgatgtcgccggtgcaggcggcgaccgccacccgccagacggtgccgcgctatctttccggcttgggcaccgccaccgccgccaataccgtgaccgtcaccagccgggtcgatggccaactgatggcgatccactttaccgaaggccagcaggtgaaagccggcgatctgctggcggagatcgatccccggccgttccaggttcagttgacccaggcccaggggcagttggcaaaagatcaggccacgctggccaacgcccggcgcgatctggcgcgctatcagcagctggtgaaaaccaatctggtttcccgccaggagctggatacgcaggcctcgctggtgcagcaaaccgaaggcgcgatcaaggccgatcagggcgcggtcgacagcgccaagctgcagatcacctacagccgcatcactgcgccaatcgacggccgcgtcggcctgaaactggtcgacgtcggcaactatgtcaccagcggcagcaccaccggtctggtggtgatcacgcagacgcacccgatcgacgtggtgttcacgctgcccgaaggcaacatcgccgatctgctcaaggcgcaaaaagccgggccggtgagcgtcgaagcctgggatcgcaccaaccagaacaagctgacgaccggttcgctgctgagcctggacaaccaaattgataccgccaccggcaccatcaagctgaaagcgcgcttcaccaacgaagatgacgcgctgttccccaaccagttcgtcaacgcgcggctgcaggtggataccctgcacgatgcggtggttatcccgaccgccgcgctgcagatgggcaacgagggcaacttcgtctggacgctcggcgaagacaacagggtcagcaaacatcgggtcaccgccggcgtgcaggacagccggcaggtggtgatcagcgccggcctcaacgccggcgatcgggtggtgaccgacggcatcgatcgcctgaccgaaggcatgcaggtggaagtgctcgcgccgagcgaagcgccggcggcggccaacgccaagcgcgaacctgacgttcagaggaagtcctga

SEQ ID NO: 425412 - DNA, 3120 bp, Serratia marcescens
atgcaggtgatgcctcccaacgccggcggcggtccgtcccgcctgtttattctgcgtccggtcgccaccacgctgctgatggtggcgatattgctggcggggattatcggctatcgcgcgctgccggtgtccgccctgccggaggtggattaccccaccatccaggtggtgacgctgtatcccggcgctagcccggacgtggtgacctccgccattaccgcgccgttggaacgccagttcggccagatgtccggcctcaaacaaatggcgtcgcaaagctccggcggcgcctcggtggtcacactgcagttccagctggcgctgccgctcgacgtcgcggagcaggaagtgcaggcggcgatcaactccgccaccaacctgctgccgaccgatctgccctacccgccgatctacagcaaggttaacccggccgatccgccgatcctgacgctggccgtgacctccaccgccatgccgatgacgcaggtggaagacatggtggaaacccgcgtggcgcaaaaaatttctcaggtgaccggcgtcggcctggtgacgctggccggcggccaacgcccggcggtgcgcgtaaaattgaacgccgcggcggtcgccgcctatggcctgaacagtgaaaccatccgcgccgccatcagcaacgccaacgtcaactcggcgaaaggcagcctggacggcccgacccgctcggtcaccctgtccgccaacgaccaaatgaaatctgccgacgactatcgccagctgatcgtcgcctaccagaacggcgcggcgatccgcctgcaggatatcgccaccattgaacaaggggcggaaaacacccggctggcggcctgggccaacaagcaacaggcgatagtgctgaacattcagcgccagcccggcgtcaacgtcatcaccaccgccgacagcatccgcgaaatgctgccgacgctgattaaaagcctgcccaagtcggtcgacgtcaaggtgctgaccgatcgcaccaccaccatccgcgcctcggtcagcgacgtgcagttcgagctgctgctggcgatcgcgctggtggtgatggtgatctacgtgttcctgcgcaacgtgccggcgaccattatccccagcgtggcggtgccgctgtcgctggtcggcaccttcgccgccatgtacttcctcggcttctccatcaacaacctgacgctgatggcgctgaccatcgccaccggcttcgtggtggacgacgccatcgtggtgatcgagaacatctcgcgctacatcgagaaaggggaaaaaccgctcgacgccgcgctgaaaggcgccggcgagatcggcttcaccatcatctcgctgaccttctcgctggtggcggtgctgatcccgctgctgttcatgggcgacatcgtcggccgcctgttccgcgagttcgccgtcacgctggcggtagcgattttgatctccgccgtggtgtcgctgacgctgacgccgatgatgtgcgcgcgcatgctcagccacgaatcgctgcgcaagcagaaccggttttccgccgcctccgagcgctttttcgaccgggtgatcgcgcgatacggccagtggctgaaaacggtgcttaaccatccctggctgacgctcggcgtggccgtcggcaccctggcgctgacggtattgctgtacctgctgatcccgaaaggcttcttcccggtgcaggacaacggcatcattcagggcacgctggaagcgccgcagaacgtctcgttcagcaatatggccgagcgccagcagcaggtcgcggcgcagatcctcaaagatccggcggtggagagcctgacctcgttcgtcggcgtcgacggcagcaacgccacgctcaacagcggccggctgcagatcaacctgaaaccgctgagcgaacgcagcgagcgcattccggcgatcatcagccgcctgcagcagcaaacggcgcagttcccaggcgtgaagctgtatctgcagccggtgcaggatctgaccatcgatacccaggtcagccgcacccagtaccagttcaccctgcaggcgatgtcgctggacgatctcagcctgtgggtgccgcagctgatggatgagctgaagcaaaccccgcagctggcggacgtcaccagcgactggcaggatcaggggctggtggcctacgtcaacgtcgatcgcgattcggcctcccgcctcggggtcaccatgagcgacgtggacaatgcgctgtacaacgcgttcggccagcgcctgatctccaccatctacacccaggccaaccaataccgcgtggtgctggagcacgacgtcagcgcgacgccagggctggcggcgctcaatgagatccgtctgagcggcaacgacggcgccgtggtgccgctgagcgccatcgccaaaatcgaagagcgcttcggcccgctgtcggtcaaccatctcgaccagttcccgtcggccaccgtttcgttcaacgtcgccgacggctactcgctcggcgaggcggtcgacgcggtcacccaggcggaagaaaatctcaacatgccgagggacatcaccacccaattccagggggcgaccctggccttccaggcggcgctcggcagcacgctgtggctgattttagcggcggtggtggcgatgtacatcgtgctgggcgtgctgtatgaaagcttcattcatccggtcaccatcctctccaccctgccgaccgccggggtcggcgcgctgctcgcgctgatgatggccggcagcgagctggacgtgatcgccatcatcggcatcatcctgctgatcggcatcgtgaagaagaacgccatcatgatgatcgacttcgcgctggcggcggaacgcgaacagggcttatcgccgcgcgacgccatctatcaggcctgcctgctgcgttttaggccgatcctgatgaccacgctggcggccttgctcggcgcactgccgctgatgctgagcaccggcgtcggcgcggagctgcggcatccgctcggcgtctgtatggtcggcggtttgatcatgagccagatcctgacgctgttcaccacgccggtgatctacctgctgtttgacaaactggcgcgcaacacgcatcgccagccggatacgcaggagctacagtga

SEQ ID NO: 425413 - DNA, 3081 bp, Serratia marcescens
gtgaaattcttcgccctgttcattcaccggccggtggccaccaccctgctgacgctggccatcgccatcagcggcgcgatcggttttcgcctgctgccggtgtcgccgctgccgcaggtggactttccggtgatttcgatcagcgcgtcgctgccgggcgcctcgccggaaaccatggcgtcctcggtggcgacgccgctggagcgcgcattgggccgcatagccggggttaacgaaatgacctcgatgagctcgctcggcagtacccgggtcattttgcagttcgatctcgatcgcgacatcaacggcgccgcgcgcgatgtgcaggcggcgatcaacgccgcgcaaagcctgctgccgaccggcatgccgagccgccccagctaccgcaaggtcaacccttccgacgcgccgatcatgatcctgacgctgacctcggacacctacagccaggggcagctttacgatttcgcctccacccagctggcgcagaagatcagccagaccgagggcgtcggcgacgtttccgtgggcggcagctcactgccggcggtgcgggtggagctgaacccttcggcgctgttcaatcagggcgtgtcgctggacaccgtacggcaggccatcgccaacgccaacgtgcgccgcccgcagggcgccgtggaaaacccgcagcagcgctggcagatccaggccaacgacgcgctgaaaaccgccgaggcctaccgtccgctgatcgttcattacaacaacggctcggcggtgcgtttggccgacgtggccgaggtcaacgactcggtgcaagacgtgcgcaacgccgggatgaccgacgccaaaccagcgatcattctggccatcagccgcgcgccggacgccaacatcatcgaaaccgtcgatcgcattcgcgccgaactgcccgccctgcaggagaatatcccggcctcgattaaactcagcgtcgcgcaggatcgttcgccaaccattcgcgcgtcgctggccgaggtggaacagtcgctggcgatcgccatcgggttggtgatcctggtggtgttcatcttcctgcgctccgggcgcgccacgctgatcccggcggtcgccgtgccggtgtcgctgatcggctcgttcgccgccatgtatctgtgcggattcagcctcaacaacctgtcgctgatggcgctgaccatcgccaccggctttgtggtggacgacgccatcgtagtgctggaaaacatttcccgccacgtcgaagccggcatgaaaccgatcaacgccgcgctgctgggcgcgcgggaagtcggcttcaccgtgctgtcgatgagcgtttcgctggtggcggtgtttatcccgctgctgctgatggaaggcctgccggggcgcctgttccgcgagttcgccgtcaccctgtcggtatcgatcgggctgtcgctcatcgtctcgctcacgctcacgccgatgatgtgcgcctacctgctgcgccaccagccgccgcgttcgcagcggcgggcgcgcggcttcggcaaaatgctgctggcgctgcagcagggctacggacgctcgctgaactgggtgctcggccactcgcgctgggtgctggcggtgttcctcgccaccgttgcgctcaacgtctggctgtatatcagcatcccgaaaaccttctttccggaacaggataccgggcgcctgatgggctttatccaggccgaccaaagcatttcgttccaggcgatgcgcggcaaactggaagacttcatgaaaatcgtgcgcgaagatccggacgtggaaaacgtcaccggttttaccggcggctcgcgcaccaacagcggttcgatgttcatctcactgaaacccctatcggtacgcagcgacgacgcgcagaaagtgatcgcccgcctgcgcgctcgcctggccaaagaaccgggcgccagcctgtttctgatggcggtgcaggatatccgcgtcggcggccggcaggccaacgccagctaccaatacacgctgctggcggacgatctcgccgcgctgcgcgaatgggagccgaagatccgcaccgcgctggccgcattgcccgagctggcggacgtcaactcggatcagcaggataaaggctcggaaatggatctggtctacgatcgcgaaaccatggcgcgcctcggcatttcggtgtccgacgccaacaacctgctgaacaacgccttcggccagcggcagatttcgaccatctatcaaccgcttaaccaatacaaagtcgtgatggaagtggcgccgccctacacccaggacgtgagctcgctggacaaaatgttcatcatcaacagcgaaggcaaggcgataccgctctcctacttcgccagttggcggccggccaacgcgccgctgtcggtcaaccatcaggggctgtccgccgcctcgaccatctcctttaacctgccggacggcggcagcctgtcggacgccaccgccgcggtagagcgcaccatgactcagctcggcgtgccgtctacggtacgcggcgcgttcgccggcaccgcccaggtattccaggacaccctgaagtcgcagctgatcctgatcctggcggctatcgccacggtctatatcgtgctcggcgtgctgtatgagagctatatccatccgctgaccatcctttccacgctgccttccgccggcgtgggcgcgctgctggcgctcgagctgttcggcgcgccgttcagcctgatcgcgctgatcggcatcatgctgctgatcggcatcgtgaagaaaaacgccatcatgatggtcgacttcgcgctcgaggcgcagcgcaacggcggcatcagcgcccgcgaggcgattttccaggccagcctgctgcgtttccggccgatcatgatgaccacgctggcggcgttgttcggcgcgctgccgctggtgctgaccagcggcgacggcgcggagctgcgccagccgctcggcatcaccatcgccggcggcctggtaatgagccagctgctgacgctgtacaccaccccggtggtctacctttacttcgaccggctgcaggcgaagttccgccgcaacaagcaactggccccgctgccgcattaa

SEQ ID NO: 425414 - DNA, 1431 bp, Serratia marcescens
atgctgataaaacacgccgccacggtacgctggcaactctggatagtggcattcggcttctttatgcagacgctggataccactatcgtcaacaccgccctgccctcgatggccgccagcctgggggagaacccgctgcgcatgcagtcggtgatcgtctcctatgtgctgacggtggcggtgacgctgccggccagcggctggctggcggacaagatcggcgtacagcgggtgtttttcagcgccatcctgctgttcaccctcggctccctcctctgcgcccgttcggaaaccctgaacgagctgatcgcctcgcgcgtgcttcagggcatcggcggcgcgatgatggtgccggtcgggcgcctgacggtgatgaagatcgtgccgcgcgagcagtacatggcggcgatgaccttcgtgacgttgccggggcaaatcggcccgctgatggggccggcgctgggtggcttcctggtgcaatacgccagctggcattggattttcctgatcaacattccggtgggcatcgtgggcgccatcgccacgctgctgctgatgcccaactaccaaatgcagacccgccgcttcgatctaagcggctttatcctgctggcgatcggcatggcgtcgctgacgctggcgctcgacggccacaagggcatggggctgtccggcggcgccatcgccggcctggtggcgctgggcgtggcggcgctgttggggtatgtttggcatgcctacggcaatagccgtgccctgttctcgctgcggctgctgcgcaccccgacttacaagatcgggctgctggccagcttgctggggcgcatcggcagcggcatgctgccgttcatgacgccgctgtttctgcaggtcggcatgggcttcacgccgttccacgccgggctgatgatgatcccgatgatcatcggcagcatgggcatgaagcgcatcgtggtgcaggtggtcaaccgcttcggttaccgtaacgtgctggtggccgccacgctgctgctggcgctggtcagcctgagcttcttgctggcggcgatgctcggctggctgtggctgctgccggtggtgctgttcttccaggggatggtcaactcgctgcgcttctcggcgatgaacaccctgacgctgaaagatctgccagacaggctggccagcagcggcaacagcctgttatcgatggtcatgcagctgtcgatgagccttggcgtcagcgtcgccggcatcttgatcggcagtttcgcccatcatcaggtggtggccgatagcccggccattcacagcgcatttatttacagctactgctgtatggcgttgattatcgctctgcccgcgctggccttcgcgcgcgtggcggccgatagcgcgcccaaccgcacgctgaccaaagagccgggtaccggctcaacgaggttgcaatga

SEQ ID NO: 425415 - DNA, 1383 bp, Serratia marcescens
atgaggataggcattaccgggaaactgttcctggccattttcgctacctgcatgctggtgttgatcaccatgcattggggggtgcgcgtcagctttgagcgcggctttatcgattacatcaagagcagcaacgagcaacgcatcaatatgctgagcgaagcgctggaggaacagtacagccaccatggcaactggatattcctgcgcaacaacgatcaggtggtctaccagatcatgcgctcgttcgagcagaacagcgacagcagccacaatctgccgcccaagggctggcgcacccagttttgggtggtggacagccagttcaatcgtttggtcgggcattctggccccctgccgaaagaggggccgcgccacccgatccgctacaacaaccagatcgtcggctgggtgctcaccaccccggtcgagcgcctgacgcgcaataccgacatcaacttcgatcgccagcagcggcgcaccagttggattatcgtcgcgctctccaccctgctggcggcggcggtgacctggctgctgtcgcgcggcatgctggccccggtcaagcgtctggtggcgggcacccaccgcctggcggcgggcgatttcaccacccgcgtggcggtcagcagccaggatgaactgggccggctggcgcacgacttcaaccagctggccacctcgttggaaaaaaacgagcagatgcgccgcgcctttatggccgacgtatcgcacgagctgcgcacgccgctggcggtgctgcgcggcgaactggaagcgctgcaggacggcgtgcgccagccgacgccggcgtcgctcagctcgctgcaggccgaggtatccaccttgaccaaactggtcgacgacctgcaccagctgtcgctctccgatctcggcgcgctggcctatcgcaaatcgtcggtggactgcgtgcacctgctgcagatcgccgtcgccgcctttcgcgaacgcttccgcgccaaagggctggagatcgtcacccatctgccgccccaggcgccgctgttcggcgatcccgatcgcctgaaccagctgttcaataacctgctggaaaacagcctgcgttacaccgacgccggcggccggctggagatcggcgccgagctgcagccggggcggctgcttctctactggcaggacagcgcgccgggcatcagcgatcagcaactgacgcgcattttcgaacgtttctaccgggcggaaggttcacgcaaccgcgccagcggcggttccgggctggggctggcgatctgccacaacatcgtggaagcgcacgacgggaaaatccgcgccgagcattcgcctttaggcggcgtgcgcattacagtagaatttgctaccccgataaaaaataaggcgccctga

SEQ ID NO: 425416 - DNA, 717 bp, Serratia marcescens
atggacattcagaatcaacccgtgcagatcatgattgttgaagatgagcccaagctgggccagctgctggtggattatctgcaggcggcgggctacgccacccgctggctgaccaacggcaacgaggtggtgccgaccgtgcaccagcagccgccggcgctgatcttgctcgacctgatgctgccgggcgccgacgggctgacggtgtgccgcgagctgcgccgcttcagcgacgttccgatcgtgatggtgacggcgaaaatcgaagaaattgaccgcctgctggggctggagatcggcgccgacgattacatctgcaaaccctacagcccgcgcgaagtagtggcgcgggtgaaaaccatcctgcgccgcagctatcggccgcaggagagcgcgcgggaagatgacctgctgcacatcgatgaaccgcgcttccaggccagctatcagggacagttgctggatctgacgccggcggaattccgcctgctgaaaacgctggccagccagccgggcaacgtattttctcgcgagcagctgctgaacaacctgtacgacgactaccgggtggtcaccgaccgcaccatcgacagccacatcaaaaacctgcgccgcaagctggagctgatcgacggggaaaaatcctttatccgctcggtatacggcgtgggctaccgctgggaagccgagccctgccggctggtgaatggggtttag

SEQ ID NO: 425417 - DNA, 390 bp, Serratia marcescens
atgtacatgtttgataccaacaccgtcagccacttgtttcggcagcatccgcaggtgcttaacgtcatggaaaagctcccgccttctgccgtatgtatttccagcgtcacggaggcggaactgctttacggtgtggctaaacggcggaacaaggcgttgcaaagcatggtcgaggcctttcttgccgcggtgacggtctatgcatgggatagcgaggccgcccgctgctacggtgaaatgcgcgcgaacatggagaaaaaaggcaaaatcatgggcgcgctggatcaactgatcgccgctcacgcgcagagccgtggcgcgacgctggtgaccaacgatcgcgcattcgccatggtgcccgggttggcggttgaagactggacgcgctga

SEQ ID NO: 425418 - DNA, 264 bp, Serratia marcescens
atggaaagaatcgcaaagctgtttaaaaacggcagaaatcaggcggtgaggttaccggtggaatttgaatttgatacggatcgtgtctatatccgtcgcgatcgggagggcaacgtgattttatccaaatatccggcaaagccggacagctgggcaccgctgctgagcattatcgcccaaacgccggtgccgcaagagtttcttggcgcggaagatcgtcagcaaggggttgcagaccgcgatccattctcagaggaagagtag

SEQ ID NO: 425419 - DNA, 339 bp, Serratia marcescens
atggcaatcggtcattatgagctgaaaaaagcaaagaacgggcagtaccacttcaacctgaaagccagtaacggcgagagcattctggccagcgaaatgtacgccagcaaagcctcggcggagaacggcatcgcctcggtgcagaccaactcgccgcatgaagcgcagtacgaactgaagcacagcgccagcaatcagccctattttgtgctgaaggcaaagaaccatcaggtgatcggcgtcagcgaaatgtacagctccgaaagcgccgccaaaaacggtatccaatcggtgatgaaaaacggcccgaccaccgatatccgcgatttgagcgcctga

SEQ ID NO: 425420 - DNA, 1353 bp, Serratia marcescens
atgtttacaccggaacttctctccccggccggaacgctgaaaaacatgcgttacgccttcgcgtacggcgccgatgcggtttacgccggccagccgcgctacagcctgcgggtgcgcaacaacgagttcaaccacgagaatctggcgcagggcatcaatgaagcccatgcgctgggcaaaaaattctacgtggtggtaaacatcgccccgcacaacgccaagctgaaaaccttcctgcgcgatctgaagccggttatcgatatgggcccggatgcgctgatcatgtccgatcccggccttatcatgatggtgcgcgaagccttcccgcagatggatatccacctgtcggtgcaggccaacgccgttaactgggcgacggtgaagttctggcagcaaatgggcctgacccgcgtgatcctctcgcgcgaactgtcgctggaagagatcgccgagatccgcgccgaagtgccggacatggagctggagatcttcgtgcatggcgcgctgtgcatggcctactccggccgctgcctgctgtccggctacatcaacaagcgcgatcccaaccagggcacctgcaccaacgcctgccgctggcagtacaaagcggaagaaggcaaagaggacgacaccggcaatatcgtgcacctgcacgagccgatcccggtgcaaaccgtcgagccgacgttgggcatcggcgcgccgaccgacaaggtgttcatgctgtctgaagcgcaaaagccaggcgaatatatgagcgccttcgaagatgaacacggcacctatatcatgaactccaaggatctgcgcgccatccagcacgtggagcgtctgacgcagctcggcgtgcactcgctgaagatcgaaggccgcaccaaatccttctactactgcgcccgcaccgcccaggtctaccgccgcgccatcgacgacgcggccgccggcaaacccttcgatccgactctgcttaccacgctggaaggcctggcgcaccgtggctacaccgaaggcttcctgcgccgccacgtgcacgaagcgcagcagaattacgactacggctcctcgctctccgagcgccagcagttcgtcggcgaattcaccggcgtgcgccgcgatggctgggcggaagtcgacgtgaagaataagttcgcgctcggcgacagcgtcgagatgatgacgccgggcggcaacgtggtgttcaccctcgagagcatgcaaaataagaaaggcgagccgattgaggtggcgccgggcaacggccatatcgtttatttgccgatcccgcaggatatcgatctcaattatgcgttgctgatccgcaatttggcggaagaaaatagcgccggggcataa

SEQ ID NO: 425421 - DNA, 906 bp, Serratia marcescens
atgcctcaacactcacatgcgcccgccctgcttatcatcaacggcaaaggcgccggtaacgaagagctgcgtcaggcggtcaaacgcctgcgcgcagagcaaatcacgctgcacgtgcgcgtgacctgggagcacggcgacgccgcgcgctatgtcgcagaagccacgcagctcggcgtgggcaccgtcgtcgccggcggcggtgacggcaccatcaacgaagtggccgccgcgctggtgcaactgccggcgcacaaccggccggcgctgggcatcctgccgctcggcaccgccaacgacttcgccatggcctgcaacattcccccgtcgccggaacaggcgctgcagctggcgatcaagggccgctcggtgccgatcgatctggcgaaggtcaacggcgagcgctacttcctcaacatggccaccggcggcttcggcacccgcatcaccaccgaaacgccggagaagctgaaggcggctctcggcggcgtgtcctacttcgtgcacggcttgctgcgcatggatacgctgcaggccgaccgctgtgaaatccgtgggccggacttccgctgggccggcgaggcgctggtgatcggcatcggcaacggcaaacaggccggcggcggccaggagctgtgccccagcgcgctgatcaacgacggcctgctgcagctgcgcctgctgatcgccgatgagctgctgccggcgctggtcgccgccctgttcaacgacgaagagagcaacagcatcctcagcgcggcgctgccgtggctcgagatcgacgcgccgcatgagatgaccttcaacctcgacggcgaaccgctcaagggtcgccatttccgcatcgaagtgctgccgcaggccatcgaatgccgcctgccgcctaactgcgccctgctgggctga

SEQ ID NO: 425422 - DNA, 1050 bp, Serratia marcescens
atgactgatattgtgcagttgctaggaaaggaagcggaagatctgctgcaacaccgctgtaccactatccccgccgagaatctctacctgccgggcgacgacttcgtcgaccgcgtaatgatcgataacaaccgtcccaacagcgtgctgcgttctatgcaaaccctgttcaaccacggccgcctggccggcaccggctacctgtcgatcctgccggtcgatcagggcatcgagcactccgccgccgcctcgttcgccgccaacccgctgtatttcgatccgaagaacatcgtcgagctggcgattgaagccggctgtaactgcgtcgcttccacctacggcgtgctggcgtcggtatcgcgccgctacgcacataaaattccgttcctggtcaaactcaaccacaacgaaacgctgagctacccgacccagtacgaccagaccctgtacgccagcgtcgagcaggcgttcaacatgggcgcggtggcggtcggcgctaccatttacttcggctccgagcagtcgcgccgccagatcgaagagatctcgatcgccttcgagcgcgcgcatgagctgggcatggtcaccgtgttgtgggcctatctgcgcaacccggcattcaacaaggacggcgtggactaccactccagcgccgatctgaccggccaggccaaccacatcgccgccaccatcggcgccgacatcgtcaaacagaaaatggcggaaaacaacggcggctaccgcgcggtgaaattcggctataccgacgatcgcgtctacaccaagctgaccaccgatcacccgatcgatctggtgcgctaccagttagccaactgctacatgggccgcgccgggctgatcaattccggcggcgccgccggtgagaacgatctgcaggaatcggtgcgcaccgcggtgatcaacaaacgcgccggcggcatgggcctgatcctggggcgcaaggcgttcaagaaatcgatgaaagacggcgtggcgctgatcaacgcagtgcaagacgcctacctggacaagaaggtcaccatcgcctga

SEQ ID NO: 425423 - DNA, 528 bp, Serratia marcescens
atgaaagtcaatattgtaatcatctccctgctcatcctttcgctatcgtcttgcgcgctatttaaatctccggcctctaggcatgagttgaaacctggagaaacgtattggtttgactatgactcaacaagaagcagcgccatttatattcccgcagactcaaatatcaagtactgcgtggctccaccgcctgatgtcgcgcagtccgttattgccgcgctgaaagctgaaatgagcacggagcaaattcaaaaagtcagtggcgatgcagagttcagcaccgccgtagtcgatctggctcggcgcacgaccacggtaaattttatccgcgatacgttgtatcgcgtctgcgaagccagactacaaggcccgctcaccgcgacggaaaaagaaattttcctggccgcgatagccgccgccaaagatatggcaatcgctgaaaaagacaaacaaaagcaagaactggcccaaacggccgaaagaaacggtgcttccgtagagacaatacaaaagattctcgagcagtaa

SEQ ID NO: 425424 - DNA, 549 bp, Serratia marcescens
atgattgagctaatcacccacggcgccgagtggtttatcggcctgtttcagaaaggcggtgaagtgtttgtcggcatggtgaccggcattttacctttgttgatcagcctgttggttatcatgaacgcgctgatcaaatttgttggccaggaacgtatcgaacgattggcgcagcgctgcgcgggcaaccccgtgtcgcgttatctgctgctgccgctgatcggcacctttgtcttctgcaacccgatgaccctcagcctggggcgcttcatgccggaaaaatacaagccgagctactacgcggcggcctcctacagctgccactcgatgaacggcctgttcccgcacatcaatccgggcgaactgttcgtttacctcggcatcgccagcggcctgaccaccctcggcctgccgctcggcccgctggcggtgagctatttcctggtggggctgttcaccaacttcttccgcggctgggtcaccgatctcaccaccagcctgttcgaacgcaagatgggcatccgtctggatcgccaggtgcaactttaa

SEQ ID NO: 425425 - DNA, 981 bp, Serratia marcescens
atgagtgcttatatccgtattgaaaaaggcgccagcggctggggcggccccctggagctgccgatcgagcccggcaagaaagtggtgtacatcaccgccggcacccgaccttcgatcgtcgatcgcctcagcgaattgaccggctggccggccgtcgacggcttcaaagaaggtgaaccgccggcggaagagatcggggtggcggtgatcgactgcggcggcaccctgcgctgcggtctgtatccgaaacgccgcattccgacggtcaacatccacgccaccggccagtccggcccgctggcgcagtttatcctcgaagacatctatgtctccggcgtgcgcgaccacaacatcagccgaatcgaagcggcagatagccagcccgccgccaccgttgcagcgccgcccaaggcgcgcgactacgacaccagcaagaagatcaccgagcaaagcgacgggctgctggcgaaggtcggcatgggcatgggatcggtggtggcggtgttcttccaagccgggcgcgacaccatcgacaccgtgctgaagaccatcctgccgtttatggcgttcgtctcggccttgatcggcatcatcatggcctccggcctcggggactttatcgctcacggcctgacgccgctcgccaacagcccgatcggcctggtgacgctggcgctgatctgctcattcccgctgctgtcgccgttcctcggccccggcgcggtcatcgcccaggtgatcggcgtgctggtcggggtgcagatcggcctcggccatattccgccgcagctggcgctgcccgcgctgttcgccatcaacgcgcaggccgcctgcgacttcattccggtcggcctgtcgctggcggaagccaagcaggacaccgtgcgggtcggcgtgccttcggtgctggtcggccgcttcctgaccggcgcgccgacggtgttgatcgcctgggccgcctcggccttcatttatcaataa

SEQ ID NO: 425426 - DNA, 363 bp, Serratia marcescens
atgcacaccatttttcacaccaccatcacgcagatcggcggctgcgcccgcgacgcgttgctggacaacatgctgatcaccttccgtgaaggcgcgccggcggatatcgaagagttctgcttcatccaccgccacggcgcgaccgccggcgagctgcaggtcggcggcgtgatggaactggcgcagcggcgctacgccatcaccgccgtcggtagcgtcgccacgcagaatctgcgcgagctgggccacatcaccgtgcgcttcgacggcgaagccgaagccgaattccccggctcgatccacgtatccggcccgacgccgaccgatatcccgttgggcagcacgctgtcatttatcgcataa

SEQ ID NO: 425427 - DNA, 780 bp, Serratia marcescens
atgtctgaagtagctgtagtgattggcggcggccaaacgttaggcgcctttttgtcccacgggctggcgcaggccggttatcgggtggcggtagccgatctgaacgccgataatgccaatcaggtggcacagcagatcaacgaagcgtttggcgcgggcagcgcctgcggttttcaggccgacgccaccgacgagcagagcgtgatcgcgctggcggcggcggttgaccgggcattcggccaggccaacctgctggtgtacagcgccggcatcgccaaggcggcaccgatcaccgattttccgctgggcgacttcgatcgctcgctgcaggtgaacctggtgggctatttcctctgcgcccgcgagttctcgcgcctgatgatccgcgacggcatcgccgggcgcatcattcagatcaactccaagtccggcaaggtcggcagcaagcacaactccggctacagcgccgccaagttcggcggcgtggggctgacgcagtcgctggcgctcgatctggcggagtacggcattaccgtgcattcgctgatgctcggcaacctgctgaagtcgccgatgttccagtcgctgctgccgcagtacgcgcaaaaactgggcatcgcgccggatcaggtggagcagtactacatcgacaaggtgccgctgaagcgcggctgcgactaccaggacgtgctgaacaccctgctgttctacgccagcgacaaggcctcttactgcaccggccagtcgatcaatatcaccggcggccaggtgatgttctga

SEQ ID NO: 425428 - DNA, 357 bp, Serratia marcescens
atgactcaagctctgatcgccttcgcgctgctggcctggctgctgcaaatcgcctttggctggtggcaactgcagcgcttcaaccgcgccttcgacggcctgtgccggctgggcgccgtcggcgtcggccgttccggcggccgtttccgcccgcgagtggtgctggcgctggccttcgacgccgagcgacgggtgtgcggcagcctgttgctgcgcggcctgaccgttttcgcccggccccgcccgctgcctcgattgcacggtttgcatcagcgggatttgcgcccggatgtgatcttccccgaggatcgcgcatgccagtctgcactaacgttagcgattgaacccaaatcgtga

SEQ ID NO: 425429 - DNA, 774 bp, Serratia marcescens
atgaaaccaaagcagcggcaggccgctatccttgaatatctgcagcggcacggcaaaacggcagtggatgccctggccgagcatttctccaccaccggcaccaccatccgcaaggatctcaccctgctggaagaagaaggcgaggtgatccgcacctacggcggcgtggtgctcagccgcgacgacggcgatcagccgatcgaccgcaaaacccatatcaacaccgagaaaaaacgccacatcgccagcgccgccgtggcgctgatcgccgacggcgactcgctgatcttcgacgccggcagcacggtgctgcagatggtgccgcacctggcgcagttcaataacatcacggtgatgaccaacagcctgaccatcgtcaacgcgctggtggagctggacaacgatcagaccatcctgatgcccggcggcacctaccgcaaaaaatcggcctcgttccacggcagcctggccgaatcggcgtttcagcagttcagcttcgacaagctgtttatcggcgcggacggcgtcgatctcaacgccggcgtcaccaccttcaacgaagtgcacaacgtcagcaaagcgatgtgcgaagccgccggccgcattattctgttggtagactcctcgaaattcggccgcaagagcccgaacgtggtgtgcgaactcagcgccgtcgacacgctgatcaccgaccgagacatcaaccccgattacctcgccgccctgcaggcgaaaggcatcaatatccttctggtaggagaccccgatgagtaa

SEQ ID NO: 425430 - DNA, 972 bp, Serratia marcescens
atgagtaacgccaacgccctgctcaccttcgcccgcgaaacgctggagatcgagctgaccgaagcgcaacgcctgctggcgcgcctggacgacaacttcgtctgcgcctgcgaactgctgctgaactgccgcggcaaagcggtgatttccggcatcggcaaatccggccatatcggcaagaaaatcgccgcgtcgctggccagcaccggcacgccgtcgttcttcgtgcacccggcggaggcgctgcacggcgatctcggcatgatcggcgccgacgacgtggtggtgttcatctcctactccggccgcgccaaagagctggatctgatcctgccgctgctggcggagaacggcattccggtaatcgccgtcaccggcggcaaagagtcgccgctggcgcaggccgccgcctgcgtgctggatatcggcgtcgagcgcgaagcctgcccgatggggctggcaccgacctccagcgcggtcaacacgctgatgatgggcgatgctctggcgatggcgctgatgcgccagcgcggtttcaacgcggaagacttcgcccgctcgcacccgggcggcagcctgggggcgcgcctgctgaaccgcgtgcatcacctgatgcgcaccggcgatcgcctgccgcgcgtgagcgaaagcgccaacgtgatggaagcgatgctggaactgagccgcaccgggctcgggttagtggcggtctgcgacgcgcagcagcgggtggtgggcgtgtttaccgacggcgacctgcgccgctggctggtgaagggcaacagcctgcaggatccgctcagcccggcaatcacccgcccgggctatcggctgccggagcagtggcgcgccggcgaggcgctggaagcgctgcacgaacagcacatcagcgcggccccggtggtcgatatggacggcgtgctggtgggggcgctcaacctgcacgatctgcatcaggccggcatcggctga

SEQ ID NO: 425431 - DNA, 459 bp, Serratia marcescens
atgacgggacaccaggcgctgcgttgcgccctcttcggcgcactgctcagcttcagcgcgggcagctttgctcagcagatcgtcaccacgtcggatttgattcagcagccggggtatcaggccagctggcaaaacatggtgaaaggccaggcgcggatgccgggctgggcgcgcaagggcgtcggcacctcgacgccggcgcagaacctgagctggaagggcaaagagtatctggtcggcaatctgtgcaaaccgcacgactgcggcaacaactttttgatcgtggcgttcagcgcggacaaatcccaggcctggggcgtgcgagtggcggtggaagaccggccggaagccgtcgatcatccgaagaagtatgccaagtatcagtggctcggcaagccggatgacgacatgaaggcgctgctgaagcagcagttcgagaacaatcccgactggaaatga

SEQ ID NO: 425432 - DNA, 801 bp, Serratia marcescens
atgaaacgcattaacgccctgaccatcgccggcaccgatcccagcggtggcgccggcattcaggccgatttgaaggctttctcggcgcttggcgcctacggcacctcggtgatcaccgcgctggtggcgcagaatacccgcggcgtgcagtcggtgtattacatcgatccggcgttcgtcgccgcgcagctggactcggtgttcagcgacgtgcgcatcgacagcgtcaagattggcatgctggccaacgccgacatcgtgcaggcggtggccgaacggctgcgccattaccggccggaattcgtggtgctggacaccgtgatgctggcgaaaagcggcgatccgttgctggcgccggaggcggtggcgtctattcgacgcgagctgttgccgctggtgtcgatcattacgccgaacctgccggaagcggcggcgctgctggcgtgcgcgccggcggaagatgaagcgcagatgcgcgagcaggggcgggcgctgctggcgatgggctgccgggcggtgctgatgaagggcggccacctgagcgaaagcgagagcccggactggctgtttactgccgaaggcgagcagcgctttaccgcgccgcgcgtcgccacccgccacacccacggcaccggttgcacgctctcggccgcgctggcggcgctgcgcccgcgccatgccgactgggcggctacggtagccgccgccaaggactacctgcaacaagcgctgcaacaggcggacacgctggaagtggggcacggcatcgggccggtgcatcatttccacgcctggtggtga

SEQ ID NO: 425433 - DNA, 792 bp, Serratia marcescens
atgatcgctcgacctgatgcactacccggcgcgcgcgccgcggcctgtctgacccaattccaacagcggcctccgctgatccactgcctgaccaacgaagtggtgcaatcgctgaccgccaacgtgctattggcgctcggtgcctccccggcgatggtggtggagccgcaagaggcggcgcagttcagcgcgctggccgacggcctgctgatcaacgtcggtaccctcaatgcgctgcgcgccgaatctatgcgggcggcggtggccgcggccaatcaggccggcaagccctggacgctggatccggtggcggtcggcgcgctctcctaccgcaccgcctttgctaaacagctgctggacgagaaaccggcggcgatacgcggcaacgcctcggaaatcatggcgctcagcgggttgctggccagcggccgcggcgtggacagcggcgacgattcgctggcggcattgcccgccgcgcgtgagctggcgcagcgcagcggcgcggtggtagcggtcaccggcgcggtggattacgtcaccgacggccaacgcgattgggcgatcgaaggcggttccccgctgatgacgcgggtggtgggcaccggctgcgcgctgtcggcggtcgtggcagcgttttgcgccctgccgggcgatcgcctggacaacgtggcgaccgcctgccgggtgatgtcccactgcggcggcctcgcggccagacaggccaccgggccgggcagctttacgccggcgttcctcgacgccctgtatcagctgcgcggggaggatctgtga

SEQ ID NO: 425434 - DNA, 426 bp, Serratia marcescens
atgcagataagaccctaccaagagaccgatcgccctttcctgcgcacgctgtacctggcgtcgcgcaaggcggcgttcggctggcgcgatacctcaaactatcagttggaagatttcgacggcgcgacgctgggcgaagcgatttgggtggcggaagacggcggcgtgctgctgggattcgtctccgtctaccgcgaagacaacttcattcataacctgtatgtcgctccccatcagccgccgcgcggcgtcggcagtgcgctgctgcaggcggcggaagctaccttcaccgccaccggctcgctgaaatgcctggtgaagaatgaaaaggcgctggcgttctaccgcaaacacggctggcgcatcatctctaccggcaacgacggcgaagaagattattacctgctgcattcgccggcccgctaa

SEQ ID NO: 425435 - DNA, 681 bp, Serratia marcescens
atgcaacatcaaacggatacacgcttccccgatgccgcggcggcggactacgatcgccgtattctgaccctggtgcccggctatcagtttgctcaggcgctgctgacggcgacgctcgcgcagacgctgccgaatgacgccacgctgttgctggccggctgcggcaccggcagcgaactgtcggcgctggccgccgccaacgccagctggcgtttcagcgcagtggaaccctccgccggcatgctggcggccgctcgcgccaaagccgaagccgcgggttatgcacagcgggtgagtttccaacccaccttgctgcaacaagcgccgcaaacccgccacgacgcggcggtgtgttcattggtgctgcactttatcgccgacgatggcgccaaactggacttcctgcagcagctggcgcagcgcctctcccccgccgcaccgctgctgctgttcgactatcaaccggagggcctgcccgtcagccactaccaacattggctgcaaagcgccgggcactcggcggcgcaggcgcaggaggtgatcgaacgcacccgccgcaactggcacccgatggcggcggcacgcagccgtcttcttttggcggaaagcggcttcaccgcgcctcagcagttgtgcggtgcgctgggcttccagctttcactgctccaccgccgccgttga

SEQ ID NO: 425436 - DNA, 1230 bp, Serratia marcescens
atgagcgacaaactgctggatcccccctgtgcggcgctggggcgcctgccggcccctctggtgctgctgttggccgccgccagcgcctttagcgtggccaacgtttactatgcgcagccgctgctggacgctatcgcccatgatttttccatcagcctggcggcggtcggtatggtgatcaccgtgacccaactgggctgcgcgctggcgctgctgttggtggtgccgctcggggatcggctgaaccggcattggttgctggcggggcaacagctggggctgatcggcgcgctgctattggtgggctgggcgcacagcgcgccctggctgctggtagggatgttgctggtaggcttattgggcaccgccatgacgcaggggctgatcgctttcgccgcagcactggcggcgccgcaggagcgcgggcgggtggttggtgcggcgcagggcggagtggtgctgggattgctgctggcgcgcaccctgtccggcgcgctggcggacgtcggcggctggcgcacggtgtacttcttctctgccggggtgacgttggtattgctgccgatcctgtcgcgcctgctgcctgcgccgcgcaccgctcccagtacgctgagctatcccgcgctgctgcgttcaatgctgaccctgctgctacatgaccgcacgctgcaaattcgcggcatgttggcgctgctgatgttcggcgctttcagcctcttttggagttcgctggtgttgccgctgagccaggcgccgttcaacttcacccatgccgcggtgggggcgttcggcctggtcggcgcggtgggcgcgctggcggcggtgcgcgccgggcatctggcggatcgcgggctggggcaggcggccagcggcgtgtgtctgctgctgttgacgctggcctggctgccgctcggtttgctcggcagcggcctggtttggctggtggcgggcatcgtgctgctggatctggcgggccaggcgatccacgtgctgaaccagagcatgatcttccgcgcgcacccgcagtcgcacagcaggctggtgggctgctacatgctgttttacgccgtcggtagcgggttgggcgcctttgccggcacccatatgtatgcctgggcgggctggagcggcgtctgctggctgggggcgggcgtcagcctgagcgcgctgctgttttggcggctgacgctgcgcggcatgccgggctcaacggcggcggtggagcagtga

SEQ ID NO: 425437 - DNA, 450 bp, Serratia marcescens
gtgaaacgtaaaagcctggaagacgcgccgtgcccggtggcgcgcacgctggatgtgattggcgactggtggtcgctgctgatcgtgcgcgacgccttcgacggcgtcacccgcttcagcgaatttcaaaaagggctgggaatggcgaagaacatccttgccacccgcctgcgcgcgctggtgacgcacggcgtgctggaaatcgtgcccgccgcagacggcagcgcctatcaggaatatgtgctgaccgagaaaggccgcgcgctgtttccggtgatcgtcggcctgcgccagtggggcgaagatcatctgttcgccgagggagaagcgcactcaacgctggtggaaagcgacagcggccgccccgtcccgcgcctgacgccgatcggcagcgccgggcagacgctcaccccgctgaatacccgggtggtgaaggtggaggaacggtga

SEQ ID NO: 425438 - DNA, 381 bp, Serratia marcescens
atgaaaaaatatgtggttctattcacggcctgcttcctggtcggctgtccggggcctggcgataagctgactccgcgcttccccgctgccgtcactgccaaagataaccatgtctgcattctttcttctatgaaggcgggggataatatccgcttcgttcagatttatagcgaatcaggcgataagctcattaaagctatcgataatgacgttttcttcgttgagccggggaggtgcatgccggtattcgactatgcttttcggccagggaagcgttattccgtcgcctacgatatacagacacccgaaggttcgcatttgattaccgccgcatttatggttgtctccgacgaacggggcaacctgagggttaaccattaa

SEQ ID NO: 425439 - DNA, 870 bp, Serratia marcescens
atgctgactaactcatccattcgtctgaacaaatacattagcgagagcggtatctgctcacgccgcgacgccgatcgatacatcgaacagggcaacgttttcatcaacggtaaacgcgccaccgttggcgcccaggtatttgccggcgatgtggtgaaggttaacggtcagctgatcgaaccgcgcaatgaagaagatctggtgctgatcgcgctgaacaagccggtcggcatcgtcaccaccaccgaagacggcgagcgcgacaacatcgccgacttcgtcaaccacagcaaacgcattttcccgatcggccgcttggacaaagattcgcaggggctgatctttctgaccaaccacggtgacctggtcaacaagatcctgcgcgccggcaacaatcacgagaaagagtatctggtgacggtcaacaagccggtgaccgacgagtttattcgcggcatgggcgccggcgtgccgatgctgggcacggtgaccaaaaagtgcaaggtgaagaaagaggcacctttcgtgttccgcatcacgctggtgcaggggctgaaccgccagatccgccgcatgtgcgaacacttcggctacgaggtcaccaagctggaacgcacgcgcatcatgaacgtcagcctcaaaggcttgccgctgggcgaatggcgcgatctgaccgatgacgagctgatcgagctgttcaaactgattgaaggctcttcatccgaggccaagccggcgaagaaggccccggccaaatccgccgcggcgaaaaaaccgagtgccggcggccccaaaagcgccgacaaagccgctgcgccggccggccgcaagcgctttacccagccagggcgcaagaaaaaagggcgttaa

SEQ ID NO: 425440 - DNA, 2934 bp, Serratia marcescens
atgctggcgcccgccgatatcgctcgcgcagatgatgccatttttgatggcgacgcaaaaattaccgaatcattggcctacaccggggacgtttacgtcggccgtaatcaaagcggcaacctgctgatcgataatggcaagatcagcgcctataacatcaatatcggccggatgttcaacggccaaattcatgaaagcctggtcacggtccgcgggccgaacgccgagctgaacgcggtgaacgatcagttcgtgctgcgcggcggcctgaatctggggcggggcaccctgcgggttgaagacggcgcgctggccagcgcgaaagagatcgtggtcggcaccacgcgtggctacgacagccatctgatcgccaccggcgccggttctcgcgtcaccagcaattttctcagcgtcggcaccgatttaggggcacgatccacgctggcgattgaagacggcgcggtgctgaacaccgcctttgacgcgcgcatcggcaatggtagcgggccgggcgagaccgatacgctgagcccgaaagccacggtcaccggggccaattcccaatggaacgtcggccgcgcgctcacgctttacggcgatctggacgtgctgaacggcggcgcggtcagcgttggcagcatcgaagtggcgggcgtctccggcgcgcgtaaaaccgccgaactgacgatcgccggcaacggctcacggtttaccagcggcagcagcgtcaacgtcggcgattacggcaacggcgtgctggcggtcatggacggcgggacattctccgccggcggcaacgaagtggtgctgggcaagaccggctccggctctaaccgcggcgcgctgattatcggcagccgcggcaacatggacaccggcaccgggttgactgagccgacgctcggcgcggcgggcgccgcaggcaccatcgatgcccagacggcgatcgccctgcggggcggattgttccgcagctatgtgtactttaaccataccgacggcaattacgttttcagcaacaagatgagcggcgaaggcgaggtgatcaacagcgccgggcacacgacgctgaacggcgatctctctgagctgcaggcgaacgtcaccgcgcgcggcggcaagctcatcatcgccagcgacatcaatacccagaaagaagacgacatcttcgagatccaaaccctcagcgcagagaacggcggcacgctgatcctcaacgcgacggcgggttccgacgtcaataacgggcagggctacagcagcgccgcgtcgatcaaggccggcggcacattgggcggcaacggcacgctgggccagaccgagatccagtccggcggccatatctcgcccggcgacggcaatatcggcacgctgacgctgaaacgctacctgaactttatcggcgaatccttctacgacgtcgatatcgccggcgacggccgcagcgaccagttgctggtggcgggcaaaaccaccatcagcgatcgggccaaggtgcaggttacggcgctggatccgcaaaccagctataaaaccggccaaagctatcgcattctgacctcggacggcggcattgacggccagttcgcggcggcggtctccaagtctgccttcctcgatgtagcgctgaatcacagcgccaacgccgtggatctgaccatcgcgcagaaagacacgggcggtgaaaatccagggggcgaaaacccgggtggagaaaacccaggcggtgagaatccagggggcgaaaacccgggtggagaaaacccaggcggtgagaatccggggggcgagaacccaggcagcggcaagccgggcattttccaaacggtggccgaaagcggcaaccagtggaataccgccggtgcgctctcgacgctgacgcagagcggcccttcgttggcgctgtacaactcgctgctgctgctgagtgcgccggaagcgcgcgaggcgttcaatcagctgtccggcgaagtctatccgtcgatgcagtctaacctgatcgccggcagcacccagctgttcaacgtgctgaaccagcgcatgctgcgcctgttcgacaacgacagcctgccgataccgccgttggcgatgtcgctggtgcaaccggcgcaggcgcaaaacagcggcgtctgggggcagaccttcagttcctggggcagaaacagcggcaacggcaacgtgggcaagctggatggcaacaccaccggcttcctgttgggggcggatcgcaagctggcggaccataacgtgcgcatcggcggctacttcggttacagccgcggcgactacgacgtcgacagccgccgttccaaggccgataccgacaactaccacctcggcctgtatgcggcggggcagcaggatgcgttctcgctgcgcggcgcgctgggttacacctggcacaagatcgaaggcaagcgcaacgtcgatttcagcggcttctcggatcggctgaagtcggactacgatgccaactcgctgctggcgttcaccgaagcgggttaccgtttcggccagccggagatgaacgtcgaaccgttcatcaacctgagctacatccgtctgcataccgacagcttccaggagtcgggtggcgcggcggcgctgagcgtgcgcaatgaaacgatgaacaccttctactccacgctcggggtgcgcggtgtgaccgaactgccgaagaacgtcagcctctacggctcgctcggctggcagcacgcctacggcgataagaacacctcatcgcgcatggcgtttgccggcagtgacgcgttcgtcactcagggccaggccgtggatgacaacgtgatggtgggcgatatcggcgtgagcgtgaaactgtcgcgcgccgcgacgctggatgtcggctatcaggggcaattcggcgccgatacccgcgttaattcggtcaacgccaacctgcgctggtcgttctga

SEQ ID NO: 425441 - DNA, 315 bp, Serratia marcescens
atgaaaaaaccacttatcgctttaaccgttacgatgatgatagccggttgttccaccctgaaaaccgatcaggccattccattactgcaggcggaaaccgccaaaatgctgggcctgggctcatcggacgaaattaccgtgaccaatgtcaatggcgcacagccggatgcgctgggcgggcaaaaactttcttatcgcgccaccacggaaaaaggccgcattttcgattgctcgtcgctgatgatgccgggaattttaggttcgtcgccgtcgctgagcgcgccgacctgtacgccggtggtcacgcataaataa

SEQ ID NO: 425442 - DNA, 633 bp, Serratia marcescens
ttggggcaggattatgcgttggtcgttgatgaccatccattggtagcaagcggtatcgctaactttctcagcacgcattgccgattcaaacaggcacatgtggtgaccaatgaagaaaattgctaccgtcatattagggaaaatggcccgccgcgtttactggtgatcgatttttggctctcttccggcaccgcattgaaattactcaaagaagtaaaacaacgttattctcaggtgcgtattttggtggtcagcggcgacgaaaataacgatatctggcagaaagtgcaaaatgccggcgggcatgggttcgtattaaaaaatgaacccccggaattattcgccagagcggtttttgcgttgaataataatcaggagtggttcccggaaggaaatgaacccgccattaaaaacagtcatgaaaatttaaataaattcaatttaacgccaagacaaatcgacgtattaactatgatgctgcgcggcctgccgaataaaaggatcgcgacacagctgtctatttccgaacccaccgtgaaagagcatatcagtaatatcttgaaaaagatcggcgtcaacagccgggtagaagccatcacgctgttgcacggcaaacgggatccgtcacaatga

SEQ ID NO: 425443 - DNA, 1782 bp, Serratia marcescens
atgaagtttttccagaatttacaaaatgatggcatctcctcacgcgcgcagatccgcctgctggacaacaccttcatgcggttggtgttcagcttcaccgccgtgcctttcgtcggcatcccgttcgccatctggatttatttgctgggggatgaactcggcccaaccattgcctggatcatggtttacctgctatgcgccgtggcgatcagaatatggcatcggcgctaccaacgcgaggccaaagaaaatgatgaagacgccgtgctgcgccgctggctgccgcgcattaataaggtggcgtttattcacggattggggatctcatcactctatttaattacgccgcagacccataactttgacttttttctgctgctcaatatcagcatcgccgcgatcgtcgccgccaacgcaacgcatctgacgccggttatcagcacctttacccgctttttcttcgcttcctgggggctgctgaacctcggcatcatctggcggctggaagacgtgatgttcatcgtgctgatgctgaacttgctgtacggcttcgccatttaccgccacgcgttaacctcgcatgcgttctttatccagcaggcgttgctcgaagaacaaagctcccgcctggcggaacagttccggcaagctaaagaggaggcggaacaggcgctgctggacaagaaccagttcctgaccaccgccagccacgatctgcgccagccggtgcacgccatgggctttctgatcgaagccatcatccacaagaaccgcgacgacagcctgacgccgcagctgctggatctgcaacagagcgtgcgttcggtgcatttgatgttcaattcgctgctcgatctcagcaagatcgagtccggcaacgtgcgcaccgccgccacccatgtggatatcggcgccctgctcgactcggtgatcaccctgttccgcgaagaggccaacagccgcgccctggcgctgcgcacctggcggcctaaacggcgcatcagcgtgatgggcgatccgctgctggtgcggcaatcgttgatcaacctgatccaaaacgccctgcgctacacgcaacggggcggcgtgctgatcgccatccgcccgcgcggcaccgagtgcctggtggaagtgtgggacaccggcgtgggcatcgccgacgaagagaaaagcaaaatcttctccccttactaccgccccgaactggcgtggaaaatcgacagcgccggccacgggctggggctggcggtggtggcgcgctgcgccaagctgatgaaggtgaagtacggcatgcactccgtcgaaggcaaaggttcgcgcttctggatgcgcttcacgcaatacatcggcgaagacaaagcgccggaaaccgcggccgcctacgacaacaccgccacgcccatccgctatgcgccgctgcgcggcgcctgcctggtggtggacgacgatcctttggtgacttcagcctgggagagcctgatgagcacctggggcatcaccgtgcgctgcgcggcctccgccgaggaagccttcgccatcgtcgacgacggttttacgccgttcgccgtgctgtgcgaccagcgcctgcgttccggcgagagcggtttcgacatcctgaaagcgctgttcgaacgcctgccggacgtgagcggcgccatggtcagcggcgagttcaactcgcagatattgcaagaggccgagcaggaaggctatctggtgctgcgcaaaccgctggagccggccaggctgcatgcgctgctgacgcagtggggggccggctag

SEQ ID NO: 425444 - DNA, 834 bp, Serratia marcescens
atgacagatacaaatttcagcaaactcaggctgtctcatgcgcacggcgtgatgacgatcgctatcgataacccaccggtaaacgtacttgatgtggcgctgatgtcggaaatcagccgtttattgctcgcggtgcgtgacgatccggatacgcgggtgttggtgttccagagcgcaaacccagaattctttattgctcacgtcgacatgaccttgatcgatgagccgcacgctttcgacgaactggcgagcaacgcgccggaggggcttaatccgttccaggcgtttggcgaactgctgcgcagccagccgcaggttactctcgttaagctggctgggctggcgcgcggcggcggcgccgagtttgtggcggcggccgatatggctttcgctgcacgggaagcggcgggactggcccagtgcgaggccttgatgggcattacgcccggcggcggcgcgacgcagtatctgacgagccgaatgacgcgcggccgcgctctggaagtgatcctgggcgctgagcttttcgatgccgctaccgcagaacgctacggctggattaaccgcgccttgcctgctgccgagctcgatgatttcgtcgatcggttagcgcgcaatatcgcggcattgccagagggcgtgattgcggcggccaaacaggcgatgcctgcgccggatctgcaggccggtttttatcgcgagcacgacgcctgggcaggattgttcgcacgcccggccgcggagcggttgattcgcggcgggctgaaggccggagcgcaaaccccggagggggagcgcaatcttgaaggcctgctgcgtcatctggcccgctaa

SEQ ID NO: 425445 - DNA, 363 bp, Serratia marcescens
atggataagaccgatgttgtttaccgcgccgactgcccgagccgcatcgtgctcgatcagattgccgataaatggtccatgatggtgctggaagtgctgcgcgagccgcagcgtttcaacgccatcaagcgccgtctggatggtgtcacgcagcgagtgctgacccagaccctgcgcaaattggaacgtaacggcatggtgcatcgcaaagtgttggacgggcgggtgcttggcgtcgagtattcgctgacgccgctcggcaaatccctgcaggggccgttctcgatactgttcgattggacgttagggaatattgaggcgattcaggagtgccaacgcaagtatgatgagcaggacgagtaa

SEQ ID NO: 425446 - DNA, 1578 bp, Serratia marcescens
atgacacaaaatatccataagcatcgcatcctgatactggacttcggttcgcaatacacccaactggtcgcccgccgcgtgcgcgaaatcggcgtttactgcgaactgtgggcctgggacgttagcgaagagcagatccgcgaattcaacccaagcggcatcatcctctctggtggcccggaaagcaccaccgaagccggcagcccgcgcgcccctgactatgtgttcaacgccggtgtgccggtgctgggcgtgtgctacggcatgcagaccatggcgatgcaactgggtggccatgtgcagggttccaccgaacgcgagttcggctacgcgcaggtggaaatcgtcaaagagagcgcgctgctgcgcgacatcgaagacgccatcagcccggccggcaaaccgctgctggacgtgtggatgagccacggcgacaaagtgaccgcgatcccgtccgacttcgtgaccgtcgccagcaccgacacctgcccgttcgccattatggccaacgaagaaaaacgcttctacggcgtgcagttccacccggaagtgacccacactcgccagggccagcgcatgctggagcgcttcgtactggacatctgccagtgtgaagccctgtggaccccggccaccatcatcgaagatgcggtcgagcgcatccgcgagcaggtgggtgaagaccacgtgatcctcggcctgtccggcggcgttgactcctccgtcaccgcgatgctgttgcaccgcgccatcggcaaacgcctgacctgcgtgttcgtcgacaacggcctgctgcgcctgaacgaagccaagcaggtaatggaaatgttcggcgaccacttcggcctgaacatcgtgcacgtcgaagcggaaaaccgcttcctgaccgcgctggcgggcgtggacgagccggaagccaagcgcaagatcatcggccgcgtgttcgttgaagtgttcgacgaagaagcctgcaagcaagagcaggtgaaatggctggcacagggcaccatctacccggacgtgatcgaatccgccgcttccgccaccggcaaagcgcacgtgatcaaatcgcaccacaacgtgggcggcctgccgaaagagatgaagctgggcctggtcgagccgctgaaagagctgttcaaagacgaagtgcgcaagatcggcctggagctgggcctgccgtacgacatgctgttccgtcacccgttcccgggcccgggtctgggcgtgcgcgtgctgggcgaagtgaagaaagagtactgcgatctgctgcgccgcgctgacgctatcttcatcgaagagctgcacaaagccgacctgtacaacaaagtcagccaggcgttcaccgtgttcctgccggtgcgttcggtcggcgtgatgggcgacggccgcaaatacgactgggtggtctccctgcgtgcggtagaaaccatcgacttcatgaccgcgcactgggcgcacctgccgtatgacttcctcggccgcgtctccaaccgcatcatcaacgaagtggacggcatctcccgcgtggtgtacgacattagcggcaagccgccggcgacgatcgagtgggagtga

SEQ ID NO: 425447 - DNA, 1464 bp, Serratia marcescens
atgctacgtatcgctaaagaagctctgacgtttgacgacgtcctcctggttccagcccactccacggttctgcctaacaccgcagagctcggcactcaactgaccaaaaccatccgcctgaacatccctatgctgtccgcagccatggataccgttaccgaatccggcctggccatcgcgctggcgcaggaaggcggcctgggcttcatccacaaaaacatgtccatcgagcgccaggctgaagaagtcagccgcgtgaagaagcatgaaagcggcgtagttaccgacccgcagaccgttaccccatccaccacgctgcaggaagtgaaagagctgaccgcgcgcaacggctttgccggttacccggtcgtcaccgaagacaatgagctggtcggcatcatcaccggccgcgacgtgcgcttcgtgaccgatctgacccagccggtcaccgcggtcatgacgccgaaagatcgcctggtcaccgtgaaagaaggtgaagcgcgcgacgtggtactgcagaagatgcacgaaaagcgcgtagaaaaagcgctggtggtggacgacagcttccacctgctgggcatgatcaccgttaaagacttccagaaagcggaacgcaaaccgaacgcctgtaaagacgagcacggccgtctgcgcgtgggcgcggccgtcggcgccggcgccggcaacgaagagcgcgttgacgcgctggtggcggcaggcgttgacgtcctgctgatcgactcctcgcacggccactccgaaggcgtgttgcagcgcatccgcgaaacccgcgccaaatacccggatctgcagatcgtcggcggcaacgtcgcgaccgcagcgggcgccaaagcgctggctgaagccggcgtgagcgcggtgaaagtcggtatcggccctggctccatctgtactacccgcatcgtgaccggcgtgggcgtaccgcagatcaccgccatcgccgacgcggtggaagcgctggaaggcaccggcatcccggttatcgccgacggcggcatccgcttctccggcgacatcgccaaagcgatcgccgcgggcgcatcctgcgtgatggtcggctccatgctggcgggcaccgaagaatccccgggcgaaatcgagctgtatcagggccgttcgttcaaatcttaccgcggcatgggctcgctgggcgcgatgtccaaaggctcttccgaccgttacttccagaccgataacgccgccgacaaactggtgccggaaggtatcgaaggccgcgtcgcctataaaggcatgctgaaagccatcgtgcaccagcagatgggcggcctgcgctcctgcatgggcctgaccggctgcgccaccatcgacgatctgcgcaccaaggcggagttcgtgcgcatcagcggcgccggcattcaggaaagccacgtgcacgacgtgaccatcaccaaagagtcgccgaactaccgcatgggctaa

SEQ ID NO: 425448 - DNA, 1299 bp, Serratia marcescens
atggggcagatttggctctccgccgagatctccaacctctcccagcccgcctccggccactggtatttcacgctgaaagacgatcgcgcccaggtgcgctgcgcgatgttccgcaacagcaaccgccgcgtcaccttccggccgcaaaacggccagcaggtcctggtgcgcgccagcattacgctgtatgaaccgcgcggcgactaccagctgatcgccgagagcatgcagcccgccggcgacggcctgctgcagcaacagttcgagcagctgaaacagcgcctgagcgccgaagggctgttcgatcagcagttcaagcagccgctgcccgccccggccaaacgcgtcggggtgatcacctccgccagcggcgcggcgctgcacgatattctgcaggtattgcagcggcgcgatccgtcgttgccgatcgtcatctaccccacctcggtgcagggagccgaagcgccgatgcagatcgtgcgcgccatcgaggccgccaaccgccgcgaagaatgcgacgtgctgatcgtcggccgcggcggcggttcgctggaagatctgtggagcttcaacgacgaacgcgtggcgcgggcgatcttcgccagccgcattccgatcgtcagcgccgtcggccatgaaaccgacgtcaccatcgccgacttcgtcgccgatctgcgcgcgccgaccccttccgccgccgccgaactggtcagccgcaatcagctcgagctgttgcgccagctgcagtcgcagcagcagcggctggagatggcgatggattactacctggcgcagcgccagcagcagttcacccgcattcaccaccgtttacagcagcagcatccgcatctgcgcctggcgcgccagcagacgctgctgttcaagctgcagcgccggatggaagacggcatgcagcaacagctgcgcctggccgcccgccgcagcgaacgcgcccagcagcggctggcgcaggtgcagccgcagggccgcattcaccgctaccaacagcgcgtgcagcagcaggaataccgcctgcagcaagcgatggagcggcagctcaacgcctaccgccagcgcttcggcgtggcctgcagccagttggaaaccgtcagcccgctggcgacgctggcgcgcggctacagcgtgacgcaaaccccgcgcggcgagctgctgaaaaccaccaagcaggcgcaggtcggcgaactgttgaaaacccgcctgcaggacggctgggtggaaagcgaggtgaaaaccatcaccgtcgccaagaagccgcgcaagaaacgcgcggccgagtaa

SEQ ID NO: 425449 - DNA, 2367 bp, Serratia marcescens
atgaaaaccttgaaaaactggacgctggcggcgcagcatgccgaccacgttgagctgctggtcgatgaacgccaccgtttctgcctgtacgtgctggaagacggtctgttccgcgtgttgatcaaacgtgagggcgaactggcgctggatcgtacctggagcatcgcgccgcaggaagatgtgccctgggaggggcgcgatcggctcagcgtcgccggcttcagcctgccgggctaccagctgcgccaggagggcgatcggctggtggtcagcacgccgctgctgcgcgtgacggtgcatcagccgctgtggctggaatgggaatattgcaacgccgccggcgaatggcggccgctggcggcggatcggccgaccagcgcctacctgctcaatgcgcacggcgacggcgtggcgcactatcagcggcgtttcgccgatgagcgttattacggcctgggggagaaggccggcgatctggagcgcaccggccgccgcttcgagatgcgtaacctggacgccatgggctacaacgccgccagcaccgatccgctgtacaagcacattccgttcaccatcacccgcgggccggaggcgagcttcggcctgttttacgacaacctgagcagctgctggttggatctgggcaacgagatcgacaactaccacgcggcctatcgccgctatcaggccgaagcgggcgatctggattactacctgttcctcgggccgaaggtcttggacgtcactaaggccttcgtgcgcctgaccggccgcacccacttcggaccgaagtggagcctgggctacagcggctcgaccatgcactacaccgacgcgccggatgcccagcagcagctgcagcagttcatcgcgctgtgccgtcaacacgccattccctgcgactccttccagctgtcgtcgggctacacctcgatcaacaacaagcgctacgtgttcaactggaactacgacaaggtgccgcagcccaagctgctcagccaggcgtttcacgacgccggcctcaggctggcggccaacatcaagccgtgcctgctgcaggatcacccgcagtatcaggaggtggcggcgcaggggctgtttatccgcgattcgcaaagcgacgcgcccgagcgctccagcttctgggacgacgaaggatcgcacctcgacttcaccaacccggcggcggtgcgctggtggcagcggggcgtcacgcagcaactgctggagatgggcatcgactcgacctggaacgacaacaacgaatacgaagtgtgggacggcgaagcgcgctgccacggcttcgggcggccaatcgccatcaagcacatccgcccggtgatgccgctgctgatgatgcgtgcctcgatggaggcccagcagcgcttcgcgccgcagaagcggccgtatctgatctcgcgctccggcagcgccggcatgcagcgctacgtgcagacctggagcggcgacaaccgtaccagctggcagacgctgcgctacaacatccgcatggggctgggcatgagcctgtccgggctgtataaccttggccacgacgtcggcggcttctcgggcgacaaaccggatgcggagttgctggtgcgctgggtgcaaaacggcgtgatgcatccgcgtttcaccatccactcctggaacgacgacgccacggtcaacgagccctggatgtacccggccgccaccccggcggtgcgcgaggcgatcaacctgcgttaccgactgctgccgtatttctacacgctgttgtggcaggcctgcgccgacgatgagccgatgctgcgcccgacctttctcgatcatgaacaggatgcgcgcaccttcggcgagaacgacgattttctgatcggccgcgatctgctggtggccagcgtggtggagccggggcagcgccggcgttcggtgtatctgccggacaacggcgaaggctggtactgcttctacagcggccaatggttcggcggcggccagacggtgacgctggcggcgccgctggagcgtttgccgctgctggtgcgcgccggggcggcgctgccgctgtcgcagcggctggcgcatgtggacgtggccgccgacgatcggcgcgagctgcggctgtttccgctcaagggctgcggcgcaagcagcgggctgctgtttgaggacgacggtgaaagcgagggctggcgacagggcgatgcgctgtggctgcgttgggaaatgcgctgcgaccatcagcgcatcatgctggatatcacgacggaagggcgtttccgcccggcctggcgcacgttggcgctcagcctgccggaaggcgaaatgcgcgcgctgtgggtgaacggcgaaccgggcgagcgttttacgctggagtag

SEQ ID NO: 425450 - DNA, 1311 bp, Serratia marcescens
atgagtgtggagatcaatcaggcggtcgcgcagagcggccggcgcaagttcaaatcgctgcgctggtggatgctggcgctgttcttgctgggcgtcacggtcaactacatcacccgcaactcgctgggcattctggcgccggagctgaaaaccagcctgaatatgagcaccgagcaatatgcctgggtggtggcgtcgttccagctggcctacacggtgtttcagccgatctgcggctggttgatcgacgttatcggcctgaagatgggctttctgatctgtgccggcatctgggcggtggtgtgcatgctgcacgccggcgccggcagctggctgcaactggccattctgcgtttcttcatggggggcgcggaggcggcggccaccccggccaacgccaaggcgatctccgactggtttccgaagaaggagcggccgatcgccgccggctgggcgggcgtcggtttctccatcggcgctatgctggcgccgccgatcatcgtcatcgctcacgtctccttcggctggcagggcgccttcctgttctccggcgggctggcgctgatctgggtggtgctgtggtggctgttctaccactcgccgcagcagcacccgaacctcagccagcaagagctggatctgatccgcgaagacaacgagccggtgctgccgaagctgccgttcctcacctcgctggccagcctgtgcaagaacaagaagttttacggcatcgccatcccggcctttctcgccgagccggcctgggcggtattcagcttctgggtgccgctgtacctggccaccgaacgcggcatggatctgaaacagatcgcgatgttcgcctggctgccgttcctggcggcggatatcggcagcgtcgccagcggctatctcaccaccctgtaccgcaaatggttcggctgcagccgcgtcaactcggtggtcgccagctcggtgaccggcgctttcctgatggtgtcgctggcgttcgtggcgatcacccaagatccctatgtggcgatcgcgctgatctcgatcggcggcttcggccaccaggtgatctcctgcatgctcagcgcgctggtggtggagtcgttcgataaaaaccagatggcgacggtcaacggcatgcgcggatccagcgcctggatcgccagcttcctgttcacgctgctgatcggcgcggtatccgacaccatcggcttcaacccgctgttcatcgccatgggcttcttcgatctgatcggcgccctgttcctgattgccctgatcgccgaacgcggcggtaagaaaacaccttcacacagctaa

SEQ ID NO: 425451 - DNA, 1083 bp, Serratia marcescens
atgaacggaaagctgaaaattcaggagatcgctcgccaaaccgggctgtcgatcagcaccgtttcccgcgtgctggcaggcaaggccaacaccagcgccgaggcgcgccgcaaggtgctggactgtgcgcagcaaaacggcattctgcagggcatttccagcggccgactaatgctgaacaacgtgatggtgttcgcgccgcagcgcgcgttcgacgtacgcaccgacatcttctactacaaggtcattcagggtatcgccgccgcgctaatggagcacgaggtgcgcatccgctactgcgggctggaagagcaacacagcgacggcgcgctgtttctggaaaagatgagcgacccgcacaccgaagcggcgctgatcatcggcatcgacgacgaacatatccacaccctggccgccgatctgcacaagccctgcgtgctgatcaactgcagcgatcggcagatgcggctggacagcgtctcgccggatcatcagctgatcggcgactattccgccagctacctgtttcagcaggggcacagccatatcctcaatctgcaatgcctgcgccgccacaccatggagctgcggctggcgggcatccgccaggcctacgcccggcatcatttgccgttcgacgacggccgccatctgatcaccacctccggcttcggcggcgaagaggccgagcaggcgctgaccacctatctcgacggcatccacggccactccccgctgccgacggcgatcctggccggcggcgactacatggcggtcggggcggtcaaagcgctcaacaagcgggggctgagcgtgccgggcgacgtctcggtgatgagcaccgacggcttcaatctggcggaaatccacgatgtgccgctgacctcggtgcaggtgccgcgcgacgaactgggctacgaggcgatccaactgctgcagcggcgcatgctgcgcgccgacgcgccgccgtgtaatctgctgctgcacggccggctggcggtgcgcacctcggtgcgacgcatcagcccgcacaagaccgcgccggcggtgagcacgcatgaccacaggctttatgacgagtag

SEQ ID NO: 425452 - DNA, 1026 bp, Serratia marcescens
atgccagcccagcgcatgcgttccgtcattcctccctacatgctgcgccgcatcattgaacacggcaacgccccgcagcgcgactgcgcgctgcacacgctgaaccacgtgcaaagcctgctcggcaacaagccgctgcgttcgccgaccgagaaaaacgcccgagccggcgaagcgctccgcgatatctacgacgcccagaacggcacccagctgcccggcaaacaggtgcgcaaagagggccagcccagcaaccacgatgtggcggtggacgaagcctacgactacctcggtgtcacctacgatttcttctggcaggcctaccgccgcaattcactggataaccaggggctgccgctggttggcagcgtgcactacggcaaggagtaccagaacgccttctggaacggccagcagatggtgttcggcgacggcgacggcgagatcttcaaccgtttcaccatcgccatcgacgtggtcggccacgagctggcgcacggcgtgaccgagagcgaagccgggttgatctactaccagcagtccggggcgctcaacgagtcgttgtccgacgtcttcggctcgttggtcaagcagttccacctgcagcaaaccgccgataaagccgactggctgatcggcgccgggctgctcgccgagggcatcaaaggccaagggctgcgctcgatgtcggcacccggcaccgcctacgacgatccgctgctgggtaaagacccgcagcccgccagcatgaaggattatatccagaccaaggaagacaacggcggcgtgcacctcaattccggcatccctaaccgcgccttctacctggcggcgacggcgctgggcggcttcgcctgggagaaagccggttacgtctggtatgacacggtgtgcgacaaagcgctgccgcaaaacgccgacttcgccaccttcgcccgcaccacgatgaaacatgcgctagcgcgtttcgaccagaacgtggcggacaaggtgcagcaagcctggcatcaggtgggggtggaataa

SEQ ID NO: 425453 - DNA, 342 bp, Serratia marcescens
atgaaaccgctgccgacgctcaatcaggatacggtcattgagctggcgcgcgagggaggctttgcctacattcccaaactggcgggccagcgccgcatcgcgctggccgatatcacgccggagcagcggcagcgcctgaatcagttgctgaaccagacgctgccctatgcgcaggaagaaggccagcccacctcccccggctgcggcgaccagcgctactaccgcgtgcaaatcaactacaccagccccaccctgagcactgagatcgtgctgttaatcccggaaagcagcgcgccgcaggcgctggtggatctgtggaaaaccggccaggtggatgagtga

SEQ ID NO: 425454 - DNA, 222 bp, Serratia marcescens
atggaagcgcactgtccgcaatgccgtcagaccatgaagtgggtagcgggtcactaccattgtgaagcttgccagcgcgattatcggcagctggcgagctgcccggcgtgcgggcagccgctgcaagaattgaaagcctgcggggcggtggattacctgtgccagcacgggcacgggctgatctccaaaaaacgggtgaatttcagctatcagccgctgtaa

SEQ ID NO: 425455 - DNA, 957 bp, Serratia marcescens
atgtcctgggaaacctggagttttgcgttcaacgtcaccgtgccgaatctgttgatgatgctgctggggatcctgctgcgccattggcgcctgatggatgaccgcttcgtcgacggcgcgacccgcctggtgttcaatctggcgctgccatgcctgctgtttttcagcatcgccaccaaccacccgcagctgctcggcaacctgccgctggtgctgttcggcgcggtcggcacgctggcgaccttcctgctcctggagctggccgccaagtggctggtgaaagaaccgcgtgagcgcggggtgttcgtgcagggcggtttccgcgccaataccgccatcgttggcctggcctacgccatgaccgcctacggcagcgaaggcattgcgctcgcttcgctgtacctgacggtgacggtgatcctgttcaacatactgtcggtcatcaccctcacgcgcagcctgcagggcgggcagggcaagaaaatcagccacctgtctttgctgcgcagcatcgttaccaacccgctgatcatcggcctggtgtgcgggctgctgtacgcgcaaaccgggctgggcatcccgaccgtgatccgccagaccggcagctatatctctgcgctgtcgctgccgctggcgctgctgtgcaccggcgccagcctggattttcgcgccatgttccgttcgtccaacgtggcggcgctgtcgtcggcggccaagctgtttctggtgccgtgcctgatgacgctggccggctggctgtgcgggtttcagggggcggcgctgggcattatcttcctgttttccgccacgccgaccgcgtcgggcagctatgtgatgacgcgcgccatgggcggcaacgccacgctggcggccaatattatcgccatcaccaccgtcggttcgttcttcaccaccgcgttggggatttatttcttgcgctcatggggcgcgatttaa

SEQ ID NO: 425456 - DNA, 1491 bp, Serratia marcescens
atgatacctgtcgtcgcgctggtcgggcgcccgaatgtgggtaaatccaccttgttcaaccgtttaacccatacgcgtgatgcgctggtggcggatttcccggggctgacgcgtgaccgcaagtatggtcgtgctgaaatcgaaggcaatgaattcatcatcgtcgataccggcggtatcgacggcaccgaagacggcgtcgaaacgcgcatggccggtcagtcgctgctggcgatcgaagaggcggacatcgtgctgttcatggtcgacgcccgcgccggcctgatgccggcggatcagggcatcgcccagcacctgcgcagccgccagaaggcgaccttcctggtggccaacaagaccgacggcctggatccggacaccgccaccgccgatttctactcgctcggcctgggtgaagtgttcgctatcgccgcttcccacggtcgtggcgtgacccagctgatcgaacacgtgctggtgccgttcgtgccggaaaaaccggaagacgtcgagctgaccgaggaagaggccaacgccgcttactgggccgagcaaaacggcgaaacgctggaaggcgaagaagacgaagagccggaagaagcgttcaacccgcaggatctgccgatcaaactggcgatcgtcggtcgtccgaacgtcggtaagtctacgctcactaaccgcatcctcggcgaggagcgcgtggtggtgtatgacatgccgggcactacccgcgacagcatctacattccaatggtgcgcgacgaacgcgaatatgtgctgatcgacaccgccggggtgcgtaaacgcggcaaggtgactgaaaccgtcgagaagttctcggtgatcaagaccctgcaggcgattgaagacgccaacgtggtgctgctggtgatcgacgcgcgtgaaggcatctccgatcaggatctctcgctgctcggctttatccttaatagtgggcgctcactggtgattgcggtcaacaagtgggacggcatgagcgaagaagatcgcgagcacgtgaaagagatgctagacctgcgtctgggcttcgtcgacttcgcgcgcgtgcacttcatttccgcgctgcacggcagcggcgtcggcaacctgttcgaatcggtgcaggaagcctacgagtgcgcaacccgccgcgtaaacacctcgatgctgaccaaaatcatgcagatggcggttgacgatcaccagccaccgttggtgcgcggccgccgcgtgaagctgaaatacgcccacgccggcggttacaacccgccgatcgtggtgatccacggcaaccaggtcagcgacctggccgattcgtacaaacgctacctgatgaactacttccgccgctcgctgaacgtgatggggacgccgatccgcatccagttcaaagagggcgacaacccgttcgccggcaaacgcaacctgctgacgccgacccagatgcgtaagcgcaagcgcctgatgagccacctgaaaaagagcaagtaa

SEQ ID NO: 425457 - DNA, 1182 bp, Serratia marcescens
atgcaattgcgtaaaacactcttggtcggactggtttccgctgccttgctgagtggttgctcgctgtttaacagcgaagaagacgtggttaccatgtcgccgttgccgaaagttgaaaatcagtttacgccgagcaaggcgtggagcacctcggtgggcgacggcatcggtgagtattactcccacctgcgtccggcctatcaggacagcaccatttacgccgccgatcgcttcggcatcgtgaaagcgatggacgccgacagcggcaacgagaagtggaaggtcaatctctccgagaagaccggcttcttctccagcaacctgtctgcgctgctgtccggcggcctgacggtcgcgggtgacaaggtttacgtcggcagcgaaaaagcggtggtttacgcattgaacaccgccgacggcgccatcgcctggcagaccaaagtggccggcgaagcgatctcccgtccggttgtcagcgacggcatggtgttggtgcacacctccaacggcatgctgcaggcgttgaacgaagccgacggcgcggtgaaatggacggttaacctggacatgccttcgctgtcgctgcgcggtgaatccgcgccggccgtcgcctttggcgccgccatcgtcggcggtgacaacggccgcgtcagcgccgtgctgatgcagcagggtcaactgatctggcaacagcgtatttctcagccgagcggcgcgaccgaaatcgatcgcctgaatgacgtggacaccacgccggtgatcgttgacggcgtggtctacgcgctgggctacaacggcaacctgacggcgctggatctgcgttccggccagattatctggaaacgcgagctgggttcggtgaacgatttcatcgtcgacgcgggccgcatctacctgatcgaccaaaacgatcgcgtagtcgcgctcagcaccgaaggcggcgtgaccgtgtggacgcagagcgatctgctgcaccgcaacctgacgccgccggtgatgtataatggttatctggtgaccggtgacgccgaaggctatctgcactggatcaacaccaccgatggccgttttgtcgcccagcaggaagtggacagctccggcttcctgtctgcgccgatggtggccggcgacaagctgatcatccaggctcgcggcgggaaagtttacgctttcacccgctaa

SEQ ID NO: 425458 - DNA, 621 bp, Serratia marcescens
gtggaagtctataccactgaaaacgaacaagtcgacgcactgcgtcggttctttgccgagaacggcaaagcgctggcggtgggcgtggtgctcggaattggtgccctggttggctggcgttactggcagagccatgaaaactccaacatgatggctgcgtcgcaatcctatcaggaagccagcgatcgtctggcggccggcaagccggatgacgtggctgccgcggagaaatttgtccaggctaacggcaacagctacggcgtattggccgcgctgcagttggccaagcactttgtcgaacagaatgatttcgccaaggcggaacagcaattggcgctggcgcagggccagaccaaagacgacaacctgctggcgatgatcgacctgcgtctggcgcgcgtccagctgcaggagaaaaagctggatgaagcgctgaaaacgctggatggcgtgaaaggcgaaggctgggcggcgatgatgcaggatgtgcgcggcgatgtgctgctggccaagggcgacgccaaaggcgcgcgcgaagcttacagcaaaggcattgagtccaacgcttctcaggcgctgcaggttctgctgcgcatgaaattgaataacttgtccagctaa

SEQ ID NO: 425459 - DNA, 1275 bp, Serratia marcescens
gtggcaaagaacattcaagccattcgcggcatgaacgactacctgccggaagaaacggcattatggcagcgtattgaaggcaccctcaagcaggtgctgggcagctacggttacagcgaaatccggttgccgattgtagagcagaccccgttattcaaacgcgcgatcggtgaagtgaccgacgtcgtggaaaaagagatgtataccttcgaagaccgcaacggcgaaagcctgacgctgcgtccagaagggacggccggctgcgtgcgcgccggcatcgaacatggtctgctgtacaatcaggaacagcgtctgtggtacatcggcccgatgttccgctacgagcgcccgcagaagggccgttaccgtcagttccatcagctgggcgcggaagtgttcggcctgcaaggcccggacgtcgacgccgagctgatcctgctgacggcccgctggtggaaagcgctgggcatcgccgagcacgtcaagctggagctgaactccatcggttcgctggaggcgcgcgccaactaccgcgacgcgctggtggcgttcctggagcagcacgttgaggtgctggacgaagactgcaaacgccgcatgtacagcaacccgctgcgcgtgctggactccaagaatcctgaggtgcaggcgctgttgaacgacgcaccgcgcctgtccgagtacctggatgaagaatcccgtgctcacttcgccggtctgtgtgaacttttggcgcaggcaggtatcccatataccgttaacgagcgcctggtgcgcggtctggattactacaaccgcaccgtgtttgagtgggtgaccaccagcctgggcgcgcagggcaccgtctgcgcgggcggccgttacgacggcctggtcgagcaactgggcggccgcgccaccccggcggtcggtttcgccatgggcctcgaacgcctggtgttgctggtgcaggcggttaacccggaattcaaggcgccgtcggctatcgacgtgtacgtcatctcttccggcgcgggcacccagagcgcggcgatgcagctggctgaacaggtgcgcgacgcggcgccgcagctgaagctgatgaccaattacggcggcggcaacttcaagaagcagatcacccgtgcggacaaatggggcgcgcgcattgcgctgatcctgggtgagagcgaagtggcggcgcagcaggtggtggtgaaagacctgcgcagtggtgaacaagaaacgctggcgcaaagcgaagtcgctgcgcgtctggctttgatgttaggttaa

SEQ ID NO: 425460 - DNA, 1122 bp, Serratia marcescens
atgcataaccaagcgcccatcaaccgtcgaaaatctacacgcatttacgtcggcaaggtgcctattggtgatggcgcgccgattgccgtgcagtcgatgaccaacacccgtaccaccgatgttgaagcaacggttaatcagatcaaagcgctggagcgcgtgggcgtcgacatcgtccgcgtttcggttcctaccatggacgccgccgaggcattcaagctgatcaagcagcaggtcaacgtgccgctggtcgccgatatccacttcgattatcgcatcgcgctgcaggttgccgaatacggcgtagactgcctgcgcatcaacccgggcaacatcggcaacgaatcgcgcattcgctcggtggtggactgcgcccgcgacaagaacatcccgattcgcatcggcgtcaacggcggctctctggagaaagacctgcaggaaaagtacggcgaacctacgccggaagcgctgctggaatccgccatgcgccacgtggacatcctcgatcgcctcaacttcgaccagttcaaggtcagcgtcaaggcgtcggacgtgttcctggcggtgcaatcctaccgcctgctggcctcgcgcatcgatcagccgctgcatctgggcatcaccgaagccggcggcgcgcgcagtgggtcggtcaaatcggccatcggcctgggcatgctgctgtctgaaggcatcggcgacaccctgcgcatctcgctggcggcggatccggtcgaagaagtgaaggtcggtttcgatatcctgaagtcgctgcgcatccgcgcgcgcggtatcaactttatcgcctgcccgacctgttcgcgtcaggaattcgacgtgatcggcacggtgaacgcgctggagcagcgcctggaggatatcatcacgccgatggacgtttcgatcatcggctgcgtggtgaacggcccgggcgaagcgctggtgtccaccatgggcgtgaccggcggccacaagaagagcggcttctatgaagacggcgtgcgccagaaagagcgtttcgacaacgaacagatgatcgaccagctggaagcgaaaattcgcgccaaggccgcgatgatggacgaaagcaaccgcatcacggtcaatctgctggaaaaataa

SEQ ID NO: 425461 - DNA, 975 bp, Serratia marcescens
atgaatactgaagcctcccaagataaaaccgtatccatgacgacgggccagcgcctgcgtcaggcccgtgagcaactcgggctgagccaacagaccgttgcagaacgcctgtgtctcaaaatgtccaccgtgcgcgatatcgaggaagacagcgtgtccgctgacctcgcgtccactttcgtgcgcggctacatccgttcctacgccaagctggtgcatttgccggaagacgaactgctgccgatgctggccaagcaggcgccgttgaagatggcgaaagtggcgccgatgcaaagcttctcgctgggcaaacgccgcaagaaacgcgacggctggctgatgagcttcacctggcttatcgtgttcgtggtgatcggcctgaccggcgcctggtggtggcaaaaccacaaggcccagcaggaagagatcgccaccatggccgatcagtcctccgcgcagctttcgcagaataacgaagggcagtccgtgccgctgaccgacggcaatgccgatgccggcaccaacgtgccgttgaccgacaacagcgccgcgccggccgatactggcgcagcggctcaggcgccggcggcgaccgcccaggcgccgagcgcggctcagcagcagcctgccgtggtgtcgccaagccagaccaccctgccggaaaccgcgccggcggcacaggcgccgttgccgaccgccgatgcgggcgtggctgcgccggtggccgatccgaatgcgctggtgatggatttctctgccgactgctggctgcaggtgaccgacgcgagcggtaagacgctgttcagcggcacccagaagcagggtggcaagctgaacctggccggcactgcgccgtataaactgaccatcggcgcgccggcggcagtacagatccagtatcagggtaagccggttgatttaagccggttcgttaagtcaaaccgtgttgctcgcctgaccgtcgccgcgcagtaa

SEQ ID NO: 425462 - DNA, 750 bp, Serratia marcescens
atgaagctgaaactgtggggtgtgtggctggcggccgggttgttggccgggtgttccggttcagcgccggaaaaggaagcacaagtctctgaggcgggccaaacgcggttgcagctgggcctggagtacctgcagcaaggcgacatggacgccgcgcgccagaacctggaaaaggcgctggacgcggccccgcaggattaccgcacgcagttgggcatggcgctctatgagcagcggatcggtgaaaatgccgcggccgaacagcgttatcggcaagcgctcaaacttgcgccgggcaatggcaccgtattgaataattacggtgcgtttctttgcagtttagggcagtatgtaccggcgcaacagcagtttagcgcagcggcgctggcgcccgattatggccaggtcgccgacagcctggaaaacgcaggttactgttttctcaaggccggacaaaacgatgaggcgcgcacgctgttgagccgcgcgctgaaagtcgatccggacaaaggcactccgctgttggcggaggccgaaaagcaatttggagaagggaagcgcgcccagtcgcaacttttattggatgtttatcagcatgttctgccggccagcgccagcagcttatggttacagattcgtttcgccgcgttagccggccgtcaggatagcgttcaacgctatggcaagcagctagcgcgaagttttccacaatccaaacagtaccagcagttcttagctaatgaatactga

SEQ ID NO: 425463 - DNA, 1197 bp, Serratia marcescens
atgttagaacccatcacgtccgagcacaccgtgtctgaaaataattcgctgactaccccctccgttaacgtggagcaaccggctgcggccaaaatcaacctgctggacctgaaccgccagcaaatgcgcgagttcttcgccgaaatgggcgagaaaccgttccgcgccgatcaggtgatgaagtggatttaccactactgctgcgacgatttcgagcagatgaccgacatcaacaaagtcctgcgcggcaagctgcaacgcgtggcggaaatccgcgcgccggaagtggcggaggaacagcgctcggccgacggcaccatcaagtgggcgattaaagtcggcgatcagcaggtcgaaaccgtgtatatcccggaagccgaccgcgcgacgctgtgcgtctcctcgcaggtaggctgcgcgctggagtgcaaattctgttcgacggcgcagcagggcttcaaccgcaacctgcgcgtgtcggaaatcatcggccaggtgtggcgcgcggcgaaaatcatcggcgcgctgaaggtgaccggccaacgcccgatcaccaacgtggtaatgatggggatgggcgagccgctgctcaacctgaacaacgtggtgccggcgatggaaatcatgctggacgacttcggctttggcctgtccaaacgccgcgtgaccctgtctacctccggcgtggtgccggcgctggacaagctgggcgacatgatcgacgtggcgctggcgatctcgctgcacgcgccgaacgacaccatccgcgatgagatcgtgccgatcaaccgcaagtacaacatcgagaccttcctgtccgcggtgcgtcgctatttggagaaatccaacgccaaccagggccgcgtgaccgtcgagtacgtgatgctggatcatatcaacgacagcaccgacgatgcgcatcagctggcggaagtgctgaaagacacgccgtgcaagatcaacctgatcccatggaacccgttcccgggcgccccttacggccgcagctccaacagccgggtggatcgtttctccaaggtgttgatggaatacggctttacgactattgttcgtaaaacccgtggtgacgatatcgacgccgcctgcgggcaactggcgggtgaagtgatcgaccgtaccaagcgtaccctgaagaagaaaatggccggggaacctatcaacgtacgggcggtctga

SEQ ID NO: 425464 - DNA, 426 bp, Serratia marcescens
atgaccgtagaacgtaccttttccatcgttaaaccaaacgctgtagccaacaacgacatcggcgctatctacgctcgtttcgagcgcgccggtttcaaaatcatcgccgctaaaatgctgcgtctgactcgcgagcaagctgaaggcttctacgctgagcacaaaggccgcccattcttcgacggtctggttgagttcatgacctccggcccaatcatggtgcaggttctggaatctgaaaacgccgtgcagcgcaaccgcgacatcatgggcgcaaccaacccggacaacgcgctggctggtaccctgcgtgccgactacgcggacagcttcaccgctaacgccgttcacggttccgattccgttgaatccgcacagcgcgaaatcgcttacttcttcaacgaaagcgaaatctgcgcacgttaa

SEQ ID NO: 425465 - DNA, 831 bp, Serratia marcescens
atgagtgcccatcatcacgatgctgccccgagcgaaaacgaacttgaacgcctgctgaagctggcggtgacggagccggcccatcgcccggcgttcttccgtgaactgctcgacgccacggtgctgatcctcggcgacagcgagcaggtgcagcaggacggcgacatcgcgctgaacgcggatacgccggtcaatatccagcattgggagaagcaggacggcggcagcatcattccgttcttcacctcgctggaagcgctgcagaaagccgttgaggacgaacagccgttcatcgccatgccggcgcgggtgctgttcgaaatcacccagggtgcggatctgttcctcaacccgaaggcggagtacggcaaggagttctatccggaagaggtggcgatgctgctggcgaccggcggcgtcgtcaaaccggtggagcattacgtcgacaaagagacccaaatcctgctggggcagcccgaagagtatccgtcggcgatggtggacgcgttgaccacgctgttcagccagcgcaagccggtgcgccgcgcgtttctggcgctgatgcacgatcaggcggcggacgagaagccgaatctgctgatcgggctggaagtggacgccgagccggcggagatcgaggcgttgatcaacgaggccggcagcgtcgccagcgaaacggcgccgaacgacgaaccggtggatttctgcctggtgtcggagaacgagcgcggcatcagccactatctgatctcccatacgcagccgttttatcagcgccgctggggcagctggctgcgcaatttgatcccgtctaccgacaagacccagtag

SEQ ID NO: 425466 - DNA, 1296 bp, Serratia marcescens
atgacaacagaattcatgcaggtcacgctgtcgcaacaacctgccgacgcccgttggggcgaaaaagcgctgctcagcaccaacggcgaagggatgaccatccacctgaccggcgccgacaagctgggcgcgatccagcgtgcgggccgcaaaattgacggtcagggcatcaaaaacgtcaagctggccggcgacggttgggacttggaaaacagctgggcgttttggcagggttaccgcgggccgaaagggcagcgcaacgtcgaatgggcagagctgccggaagccgcacgtcaggaactggataagcgcctgaagatcgttgactgggtgcgtgacaccatcaacatgccggcggaagagctggggccagagcaactggcgacccgcgccgtcgatctgatgtgcgacgtcggctgcgatgccgtcagctaccgcatcaccaagggcgaagatctgcgcgagcagaactatgccggcatccacaccgtcggccgcggctccgagcgtccgccggtgctgctggcgctcgacttcaacccgaccggtaacccggacgcgccggtgttcgcctgcctggtcggcaagggcatcaccttcgataccggcggttatagcctgaaacagagcgcctttatggattcgatgaaggctgacatgggcggtgcggccaccatcaccggcgccctggcgctggcggcggcgcgcggcctgaagcagcgcgtgaagctatacctgtgctgcgccgacaacatggtcagcggcaacgctttcaaactgggcgacatcattcgctaccgcaacggcaaaaccgttgaggtgatgaacaccgatgcggaagggcggctggtgctggccgacggcctgatcgacgcttctgagcagaacccgcagctgattatcgactgcgccaccctgaccggcgccgccaaaaccgcggtcggcaacgactaccatgcgctgttcagcttcgacgacgcgctggcgcaggagctgctgagcagcgccgccgccgagcaagagccattctggcgtctgccgctggccgagttccaccgcagccaactgccgtccaactttgccgagctgaacaacgtggccggcccggcctacaccgccggcgccagcaccgcggcggccttcctgtcgcacttcgtcaagaattaccaacaaggctggctgcacatcgactgttccgccacctaccgcaaaggcgcggtggagcagtggtcggccggcgcgaccggtctgggcgtgcgtaccctggccaacctgctgctgagcaaagccaaataa

SEQ ID NO: 425467 - DNA, 201 bp, Serratia marcescens
atgggactgaagtggaccgacagccgagaaatcggcgaagccctgtacgaccaatacccggacaccgatccgaaaaccgtgcgttttaccgacatgcatcagtggatctgcgatctggaagagttcgacgacgatccgcaggcttccaacgaaaaaatactggaagcgatcctgctggtctggttagatgaagcggagtaa

SEQ ID NO: 425468 - DNA, 336 bp, Serratia marcescens
atgcctaaaattgttttcctgccccatcaagatctttgcccggaaggggcggttctggaagctgaaaaaggggagtcgatcctcaacgttgcgctgcgcaacggcattgaaatcgagcacgcctgcgagaaatcctgcgcctgcaccacctgccactgcatcgtgcgtgaaggcttcgattcgctggaagagagcagcgagctggaagacgacatgctggacaaggcctgggggctggagccggaaagccgcctgagctgccaggcgctggtcgccgacgaagatctggtggtcgaaatgccgcgctacaccgtcaaccacgcgcgtgagcattaa

SEQ ID NO: 425469 - DNA, 1851 bp, Serratia marcescens
atggccttattacaaattagtgagcctggcctcagcgccgcgccgcaccagcgacgtctggccgccggcatcgacttaggcaccaccaactcgctggtcgccacggtgcgcagcgggcaagcggaaacgctggccgacgaacagggccgccatttgctgccttcggtggtgcattatcaggcggatgcgcagcgcgtcggctgggaggcgcgccaacaggcggcgcaggatccggccaataccgtcagctccatcaagcgcatgatgggccgctcgttggcggacgtgcagcaacgttacccgaacctgccgtatcaattccaggccagcgacaacggcctgccgctgatcgtcaccgccggcggcccggttaacccggtcggcgtctccgccgatatcctgcgggccctgtccgcgcgcgcgcaagcggcgctggaaggggagctggatggcgtggtgatcaccgttcccgcctacttcgacgacgcgcagcgccagggcaccaaagacgcggcgcgtctggccggcctgcatgtcctgcgcctgctgaacgaaccgaccgcggcggcgatcgcctacgggctggactccggccaggaaggggtgatcgcggtttacgatctgggcggcggcacctttgatatctccattctgcgcctcagccgcggcgtgttcgaagtgctggccacgggcggcgattccgcgctgggcggcgacgacttcgatcacctgctggccgactggctgcgcgagcaggccggcgtggccgatcgcagcgaccacggcgtgcagcgccagctgctggacgccgccatcgccgctaaaatcgcgttgagcgatgccgacagcgtgcgcgtcgaggtggccggctggcagggcgaggtgacccgcgcccagttcgaagcgctgatcgccccgctggtgaaacgcacgctgatggcctgccgccgcgcgctgaaagacgccggcgtcgccgccgacgaggtgctggaagcggtgatggtcggcggttccacccgcgtgccgctggtgcgtgagcaggtgggcgccttcttcggccgcacgccgctgacgtcgatcgatccggataaagtggtcgccatcggcgccgcgatccaggccgacattctggtgggcaacaagccggacagcgacatgctgctgctggacgtgatcccgctgtcgctgggcctcgaaaccatgggcggtctggtggagaaagtgatcccgcgcaacaccaccattccggtggcgcgcgcgcaggaattcaccacctttaaagacggccagagcgcgatgatgatccacgtgctgcagggcgagcgcgagctggtgcaggactgccgttcgctggcgcgtttcacgctgcgcggcctgccgccgctgcctgccgggggcgcgcacattcgcgtcaccttccaggtggatgccgacggtctgcttagcgtcaccgcgatggagaaatccaccggcgtcgaagcttcgatccaggtgaaaccgtcttacggcctgtcggacagcgaaatcgccggcatgatcaaggattcgatggccaacgcgcaaagcgacgtgggcgcgcgcaagctggcggagcaacgcgtggaagccgcgcgggtgctggaaagcctgcagggcgcgctggccagcgacgccgcgctgctgagcgaggcggaaagccaggcgatcgccgccgcgacccaggcgttgcagcaggcggtgcagggtgaagatcccgccgctatcgaagacgccatcaaaacattagatgcacaaacgcaagattttgccgcgcgccgcatggacgcttccattcgccgcgcgctggctggccattctgtggatgaggtttaa

SEQ ID NO: 425470 - DNA, 522 bp, Serratia marcescens
atggattactttactttattcgggctgccagttcgctacaccgtggacggcagcctgcttgcgtcccgcttccaggatctgcagcgccaatttcaccccgatcgtttcgccaaccagccggagcgcgaacgcctgatggcgttgcagcaggcggcgaccatcaacgaagcctaccagtcgctgaagcacccgttaaaacgcgcggagtatatgctatctttgcacggcttcgagctgggcaacgaacagcatacgatgcgcgacaccgcgttcctgatggaacagctggagctgcgcgaagagctcgacgccattgagcgcaagccggaggcggaaagcctgctggccgatttcggcgcgcggctggctgtctccatcaaacagcgcagcgcgctgatgctgcagcagctggacggcgagctgtgggcggacgccgccgacaccgtgcgcaagctgcgctttttggacaaactccagcaacaggttgaacaactcgaagaaaaactgctgggttttgagtaa

SEQ ID NO: 425471 - DNA, 324 bp, Serratia marcescens
atgtctattaccatgagcgacagcgctgcgcagcgtgttcaggcgtttttgacgaaccgcggcaagggtctcggcctgcgtctgggagtgcgaacttccggctgctccggaatggcctacgtgctggaatttgttgacgaagccaacgatgacgacatcgtgtttgaagacaaaggcatcaaggtgatcatcgacggcaagagcctggtttaccttgacggcaccgagcttgatttcgttaaggaaggcctgaacgaaggcttcaagttcaacaacccgaacgtctcaagcgaatgcggctgcggcgagagtttcaacgtctga

SEQ ID NO: 425472 - DNA, 387 bp, Serratia marcescens
atggcttacagcgaaaaagtaatcgatcattatgaaaacccgcgcaacgtgggttcctttgacaacgaagatcctaccgtcggtagcggcatggtaggggcaccggcttgcggcgacgtcatgaagctgcaaatcaaggttaacgatgaaggcatcatcgaagacgcgcgctttaaaacttacggctgcggttccgccatcgcctccagctcgctggtgaccgaatggatgaagggcaagtcgctcgatcaggctgaagcgatcaaaaacacccagatcgccgaagagctggaattgccgccggtcaaaattcactgctcgatcctggctgaagacgccatcaaagcagcgattgccgactataagagcaagcatagcgccgagtaa

SEQ ID NO: 425473 - DNA, 1215 bp, Serratia marcescens
atgaaattaccgatttatctggattactcagcaacgacgccggttgacccgcgcgttgctgagaagatgatgcagtttttgaccctggacggcactttcggcaacccggcttcccgttcccaccgtttcggttggcaggcggaagaggcggtagacatcgcccgtaaccaaatcgccgaactggtgggcgccgacccgcgcgaaatcgtcttcacctccggggcgaccgaatccgacaacctggcgatcaaaggcgctgccaatttctaccagaaaaaaggcaagcacatcatcaccagcaaaaccgaacacaaagccgtgctggacacctgccgtcagctggagcgcgaagggttcgaagtgacctatctggcgccgcagagcaacggcatcatcagcctgcaggatctcgaagcggcgctgcgcgatgacaccattctggtctccatcatgcacgtcaataacgaaatcggcgtggtgcaggacatcgaagcgatcggcgaaatgtgccgcgcgcgcggtatcatctaccacgttgacgccacccagagcgtgggcaaactgcctatcgatctgagcaagctgaaagtcgatctgatgtcgttctccggccacaaaatctatggcccgaaaggcatcggcgcgctgtacgtgcgccgcaagccgcgcatccgcatcgaagcgcaggtacacggcggcggtcacgagcgcggcatgcgttccggcaccctgcctgtccaccagatcgtcggcatgggcgaagcttaccgcatcgccaaagaagagatgaccgaagagatggcgcgtctgcgcaccctgcgcgatcgtctgtggaacggcgtgaaagatatggaagaagtgtatctgaacggcgatctggagcacggcgcaccgaacatcctgaacgtcagcttcaactacgttgaaggcgaatcgctgatcatggcgctgaaagacctggccgtttcttccggttcagcctgtacctccgccagcctcgagccgtcctacgtgctgcgcgcgctgggcatgagcgatgaattggcgcacagctcgatccgtttctccctggggcgtttcaccacggaagaagagatcgactacaccattcaactggtgcgtaaatccatcggccgtctgcgcgatctgtctccactgtgggagatgttcaagcagggcgtggacatcaacagcatcgaatgggcgcatcattaa

SEQ ID NO: 425474 - DNA, 495 bp, Serratia marcescens
atgagactgacatccaaaggccgttatgccgtaaccgctatgctcgacgtagcgctgcattcccaggaagggccggtgccactggcggacatttccgaacgccagggtatttcgctctcttatctggaacaattattctcccgtctgcgcaagaatggcctggtggccagcgtgcgcggcccgggcggtggttatctgctgggtaaagacgcgggtgagatcgccgttggcgctgtcatcactgccgtcgatgaatcggtagatgcaacccggtgccagggcaaagaaggctgtcagggcggcgatcgctgcttgacccacgccctgtggcgcgatctgagcgagcgcatcagcgggttcctgaacaacattacgctggcagaactggtcaacaaccaggaagtgctggtggtggcggatcgtcaaaacaacgatacgcgccgcacggccaacggtcgtccgcaagaaactatcaacgttaatctgcgcgcataa

SEQ ID NO: 425475 - DNA, 735 bp, Serratia marcescens
atgctgcacaatatccgcattgttctggtagagacttcacataccggcaacatgggctcgaccgccagagccatgaaaaccatgggtttaaccaacctttatctggttaatccgctgatcaaacccgattctcaggccatcgccctggccgccggcgccagtgacgtgatcggcaacgccactatcgtcgacaccctcgatgacgccatcgccggctgtagcctggtggtgggcaccagcgcccgttctcgcaccttgccgtggccgatgctggagccgcgtgaatgcggcgtgcgcgcggtgcacgagggcgaacacgcgccggtggcgctggtgttcggccgcgaacgcgtcgggctgaccaacgatgaattgcagaagtgccactaccacgtcgccattccggccaacccggactacagctcgctgaacctggcgatggcggtgcagatcctggcgtatgaagtgcgcgtggcttacctcgatcgccaacaggcgggcgcgccgcagctggaagagacgccgtacccgctggtggatgacctcgagcgtttctatcagcacctggagcagacgctgcagcgcaccggctttattcgcccgtcccatccgggccaggtgatgagccgcctgcgtcggctgttcacccgcgcgcgcccggaagggcaggagctgaatatcctgcgcggcatgctgacgtcgatcgagaaacaggataaacatcaaggtaattaa

SEQ ID NO: 425476 - DNA, 804 bp, Serratia marcescens
atgcatccgatgctgactatcgccgtgcgcgctgcgcgcaaggccggtaacctgattgccaaaaactacgaaaccccggacgctgtagaagcgagccagaaagggaccaatgacttcgtcaccaacgtcgatcgcgatgcagagcatctgatcatcgacgtcatccgcaagtcttatccgcaacacagtatcgtgagcgaagaacgcggtgagctgatcggcgaagatcgcgatgtgcaatgggtgatcgatccactggatggcactgcaaacttcatcaaacgtttccctcatttctccgtttccatcgccgtacgcatcaaaggccgtactgaagtggccgtggtttacgatccgatgcgcaacgaactgttcaccgccactcgcggccagggcgcacagctcaacggctaccgcctgcgcggcaccaacgccaaagatctggatggcaccatcctggcgaccggcttcccgttcaaggtcaaacagcacgcaacgccttacatcaacatcgtcggcaagctgttcacccagtgcgcagacttccgccgcaccggttccgcggcgctggatctggcctatgtggccgccggccgcgtagacggtttcttcgaaatcggcctgaagccgtgggacttcgccgcgggcgaactgctggtgcgtgaagccggcggcctggtgaccgacttcgtcggcggccacaaccacttcagctccggcaacgtggtggcaggcaacccgcgcgtagtgaaagccatgctggccaccatgcgtgaagaactgagcgaagcgctgaagcgttaa

SEQ ID NO: 425477 - DNA, 1023 bp, Serratia marcescens
atgtcgttaaatctctcgcaaccgacgacgagccggcgccactgggccttcggcctgtggccgctgctgccgttcacgctggcgctggcggccgccgcgctgctggcgtggcactattggccgcagctgctgatgcagagcgtggtgtggcaaaaagcgctgcaccagcagatggcggggctgttgcagcaggtgaaggccgcgccgcagcaggccgggctggcgctgatgctgttcagccttggctatggcgtcttgcatgcgctcggccccggccacggcaaagtggtgatcgccacctacctggctacccatccggcgcggctgaaaagcagcctgaagctgaccttcgccgcctcgctggtgcagggtggggtagcgatcgcgctggtcacgctgatgctggtggtattgcagctctcttcgcgccagctgcaccaaagcagtttctggctggagaagggcagctttattctggtgatgctgcttggcgtgctgctgagttggcgcgcgctgaaacgcctgtttgcggcgatcaaggcgatgcgcccggcgccggcgctgcgcatcaacagcctgacgccgctggcggcggatcatgtgcacagcgccaattgcggctgcggccaccggcatctgccgagcgacagcgagctgcaggcgggaagcgactggcgcactcaggccgccatcgtgctggcgatgggcatgcgcccctgttcgggggcgattttggtgctgctgttctccaaagtgatcggcgtgttcggctggggagtgatctccgcgctggcgatggcgttcggcacctcgttgaccatctcgatgctggcgctgctggtacattacagccgccggctggcggtgcgcctcagccgttcgcgcgcgcccgccgcctggagcgcggtggcctggggggcgttggcgctggccggcggcctgatcctgctggccgccgggctgttgctgtacgtcagcgcgcagccggaattcggcggcggcatccgtcccttctcccgctaa

SEQ ID NO: 425478 - DNA, 633 bp, Serratia marcescens
atgaagttacgtcgtcttttggctgccttcggcgccgtgttcagcgccggtgcgttcgctcatccgcacagctttatcgacatgaataccaccttcgtcgccaaagaccagcggctggtcggcctgaaaatggtgtgggtgatggatgaaatcacctcggcggatctgctctacgatgcgaaaaacgccaagagcgattcggaagtgtggaaaaagctggcggcggaagtgatggccaacgtgctggggcagcactatttcaccgatctttaccgcgacggcaagccggtgaaatacctgaacttgcccagcgaatatcacctgtcgcgccagggcaatcaggcggtgctggagttcgtgctgccgttggccgagccacagccgctggcgggcaagccgttcgaactttctacttacgatccgacttatttcgtggatatgacctataaagaccaaaatgcgctgcatctgccgccggagatggcgcagctgtgcagctacaagctgatgacgccgaagccgaatgcgtcgctgcaggcctatgcgctgtcgctcgacaagaacgactcgcccggtgaagacctggcgctggggcagcagttcgcccagcgggtgacgctgcaatgtcgttaa

SEQ ID NO: 425479 - DNA, 1266 bp, Serratia marcescens
atgagcctggacacctctcccgtgcccgagctctccggacaacaacggcgctgccatctgctgctgatgctgtacacgccggagcccgagttacagctggagaccctaagccgaatcaacggcgtcgcccccccgataacccggcaagatatagccgaggtggccagtgaaatccagcgtttccatcacctggagatcgccgtcgatcccgatcgtggctaccaactgcggggcagcgcgctcgaccaacgcctgtgcctgatccactggctgcggcgggctctgcgctgcagcccgcggtttgtcgaaggcgatttcgccccgcgcctgcggcaagcgctggcgaccgatgccgccccggcgtctgcgctgacagaggcgatcgacgcctgcgagccgctgctcagccgccacttcgatgcgcgcgaccgccaattcctgcagcattacctgctctactgcgcctggcaaaatcgcctgcagcagcatccgcgtttcgacgcggttcaacgcgactggctgcggaaaaagccggaacagcaagccgccgcctggctgcatcaggcctgcaaccggctgtttaaccagccgccgcaggcagacgagcgcgattttttggcgctcaccttcaccatgttgaaaaatcacagctaccacagcaacgactcagcgcaagagcggagattgatggcggcgatcgacagcatggtcgagcgcttccagcaactttccggcatggccttcagcagcaaggcggagctggtcagccagctgttcgcccatctggcgccggcgctggagcgctgccgtttcgccatcggcatcgacaatatgctgctggaagaagtggtgcgcaaatacccgcggctgatgcgcaccacgcaggaagcgttgaaaccgctggagcaggagtacggcgtgcatttttccaacgaggaggcgggtctggtggccatcagcttcggcgcctggctgatgcaggacaacgcgctgcaggaaaagcaggtgctgctgctgacgctggacaacccgcagttggaagaggaagtggaatatcagatccgcgagctcacgctgttgccgctgaacatcaagtacctgccgctgagcgactatctgcgcggcggagcgccgcagggcatcacgctggtgatcaccccttatgcggcggtgcacagcgatccgcacccgccgctggtctataccgaactgccgctggaaacccggcagcgccaggcgatccgcgcgctgctggaggccccttaa

SEQ ID NO: 425480 - DNA, 1146 bp, Serratia marcescens
atggttctgcaatccacgcgttggctcgcgctcagttatttcacctacttcttttcctatggcatcttcttaccgttctggggcgtgtggctgaaaggcgagggcatcgcgcccgaaaccatcggcatgctgctcggcgccggcttggtggcccgcttcctcggcagcttactgattgcaccccgcgttaaagatccctctcatttagtctccgccctgcgcctgctggcgctgctgaccctggcctttgcggtcggtttctgtttcggcaacggctggggttggctgatgctggtgatagcgggtttcaacctgttcttctcgccgctggtgccgctgaccgacgcgttggccgccacctggcaaaagcagatccgtatggactacggccgggtgcggctgtggggctcgctggcgttcgtcatcggctcggcgctgaccgggcaactggtggcggtgtggggccataacgccattctctacagcctgatcttcagcgtgctggcgatgctgctgggcatgctgttgaagccgagcgtcatgccgcagggcgaagcgcgcacgcacagcggaaccgaacgttcgctgtgggcgctgctgaaagaagggccggtctggcgcttcctgctgtgcgtcacgctgctgcaaggggcgcacgccggctactacagcttcggctccatttactggcaggaggcgggctattcggcctcgaccatcggctatctgtggtcgctgggcgtggtggcggaggtgattattttcgccagcagcaacgtgctgttccgccgctggaatgcgcgcaacctgctgttgctctccgcctgctgcggcgtgttgcgctggagcctgatggcctacagcaccgagctgggctggctgctgctgatccagatcctgcactgcggcactttcaccgtctgccatttggcggcgatgcgctttatcgctgcgcgtcaggggcaagaggtgatccaactgcaggcggtgtattcggcgctggcgatgggcggcggcatcgccgtcatgacggtcattgccgggttcctgttcgaacattggcagggcggggtattctgggtgatggcggcggtcgcggtgccggccttgttcatccggccgccggcggtcagcgtcagccgctga

SEQ ID NO: 425481 - DNA, 1254 bp, Serratia marcescens
atgttaaagcgtgaaatgaacattgccgattacgatgcggaactgtggcgtgccatggagcaggaagtggtgcgtcaggaagagcacatcgagctgatcgcgtctgagaactacaccagcccgcgcgtgatgcaggctcagggttcccagctgaccaacaaatacgctgaaggctatccgggcaagcgttactacggcggctgcgaatacgtggatatcgttgagcagctggctatcgatcgcgccaaagaattgttcggcgccgattacgccaacgtgcagccgcactccggctcccaggctaacttcgccgtgtacaccgcgctgctgcagccgggcgacaccattctgggcatgaacctggcgcacggcggccacctgacccacggttccccggtcaacctgtccggcaaactgtataacgtggtgccttacggcatcgacgacaaaggccaaatcgactatgacgatctggccaagcaggcgcaaacccacaagccgaaaatgatcatcggcggcttctccgcatactccggcgtggttgactgggccaaaatgcgcgaaatcgctgacagcatcggcgcttacctgttcgtcgacatggcgcacgtggcgggcctgatcgccgccggcgtctacccgaacccggtaccgcacgcgcacatcgtcaccaccaccacccacaaaaccctggcgggcccgcgcggcggcctgatcctggcgaagggcggcgacgaagagctgtacaaaaagctgaactccgccgtgttccctggcggccagggcggcccgctgatgcacgtgatcgccggcaaggcggtggcgctgaaagaagcgatggagcctgagttcaaggtttaccagcagcaagtggcggtcaacgccaaggcgatggtggaagtgttcctgcagcgcggctacaaagtggtctccggcggcacccataaccacctgttcctgctggatctggtcgacaaaaacctgaccggtaaagaagcggacgccgccctgggccgcgccaacatcaccgtcaacaaaaacagcgtgccgaacgatccgaaaagcccgttcgtcacctccggcgtgcgtatcggcaccccggccgtcacccgtcgcggcttcaaagaagccgacgtgcgcgaactggccggttggatctgtgatgtgctggacaacatcaacgatgaagccaccatcgaacgcaccaagaagaaagtgctggatatctgcgcccgcctgccggtttacgcgtaa

SEQ ID NO: 425482 - DNA, 1191 bp, Serratia marcescens
atgctggatagccaaaccatcgccaccgtgaaatccacccttcccctgctggctgcgaccgggccgaagctgaccgcccacttctacgatcgcatgttcgcgcacaacccggaattgaaagacattttcaacatgagcaaccagcgcaacggcgatcagcgtcaggcgctgttcgacgccatctgcgcctatgccgccaacatcgagaacctggcggcgctgctgccggcggtggagcgcatcgcgcagaagcacaccagcttcaatatccagccggagcagtacaacatcgtcggcggtcacctgctggcgaccctggacgaaatgttcagcccgggtcaggaagtcctggacgcctggggcaaggcctacggcgtgctggccaacgtatttatccagcgtgaagaacagatttatcagcagagtgaaaccgacaacggcggctggcgcgatctgcgcgcgttccgcatcctgaagaaacagccgcagagcgacgtgatctgcagcttcgtgctggcaccggtggacggcggccgagtggcggacttcaaaccggggcagtatctggcggtctacatcaagcacgacagcctggaacatcaggaaattcgccagtactcgctgaccacctcgccgaacggcgagttctaccgcatcgcggtgaagcgcgaagatcaggggaaagtgtccaactacctgcaccagcaggcgcaggaaggcgacgtgatctacatcgccccaccgcacggcgacttcttcctcgacgtggcgccgaccacgccggtggcgctgatctccgccggcgtcggccaaaccccgatgctcggcatgctcaacaccctgcacgacagccagcatcaggcgcaggtccactggctgcacgcggcggaaaacggcggcgtgcacgcctttgccgatgaagtggcggatattgccgggcgcatgccgaatctgagccgccatgtgtggtaccgcgagccgggcgccgatgacgtggaaggccgcgactaccacagccgcggattgatggatttgagcgccctgcaaggcagcctggccgatccgcagatgcactattacttctgcggcccggtggccttcatgcagttcgtgggcaaacagctgctggaaatgggcgtagaggccgaacgcatccactacgaatgcttcggcccgcataaggtgctgtaa

SEQ ID NO: 425483 - DNA, 1185 bp, Serratia marcescens
atgagtctgcgttcgctgtacctgttgagcctgctggcggcaggcggctcggcccaggcgatgtcggccggggaatacgtcgccaaagccggtgactgcaccgcctgccacaccgcgccgggcggcgccgaattggcgggtggcatgaagttcccgacgccgctcggggctatctacgccaccaacatcacgccggacaagctgcacggcatcggcgcctattcgttcgaagagttcgatcgcgccatgcgccagggggtagccaaagacggccaccggctctacccggcgatgccgtacacctcgtacgccaaaatgagcgcggaagacatgcgcgcgctgtatgactatctgatgaaagaggtgccggcgcagaacgtggccaaccgcgccagcgacatcagctggccgctgtcgatgcgctggccgctggcggtgtggaaccagctgttccacgacgaccggccgtatcaggcagatccgcagcaaagcgccgagtggaaccgcggcgcctacctggtgcagggcgcgggccattgcggcagctgccacacgccgcgcggctgggcgatgcaggagaaggggctggacggcaaggagccggtgttcctgagcggcgccgagctggacggctggtacgcctccaatctgcgcggcctgccgccggaagaggtgacggcgctgctgaaaaccggccgcagccgccatgcggcggtcgccgggccgatgagcgaggtggtgacccacagcacgcagtacctcagcgacggcgatctgaacgccatcgcggtgtacctgcgcagcctggcgccggacaccgccgccaaagccgctgcgcctgccgcgcaggcggataacccgggcggcaaggcgacctacgcgatgtactgctcgacctgccacggcaacaagggggagggcactgacttcgccattccggcgctggcgggcaatgccacggtaacggcggacaatccgctgaccgcgctgcgggtggtgctggagggggcgcatacgccgatcacgcagcaggcgatggcgttcgacatgccggcttacggctgggcgttgaacgatcggcaggcggcggatctgatgagctatctgcggggaagctggggcaaccaggcggcgccggtgacggtgcagcaggtgcaggacgcgcgccagctacaggcgaaatga

SEQ ID NO: 425484 - DNA, 1911 bp, Serratia marcescens
atgggtatcacccgacgcgattttctcaacggggtggcgatcaccatcgccgccgggttgacgccgctgcaaatcttgcgcgcgtcgccgcaaaccgccaatcaaaccctgtactacccgccggcgctgaccgggctgcggggtaaccatccgggctcgttcgagcatgcgcaccagttggggcgcgacggcaaaacctttgatttcggcagcgtgcccgccgttgaagagttcgatctggtggtggtcggcgccggcatcagcgggttggcggccgcctgcttctggcagcagctgaaaggtgagcagcagcgcattttgctgatcgacaaccatgacgacttcggcggccacgccaagcgcaacgaattcaacaccgacgacggcatgctgctcggctacggcggcagcgaatcgctgcagtcgccgcgctccaacttcagcccggtggcgatggggctgctgcgcaagctcggcgtcgatatcgatcggctggagcaggcgtttgacaccaccttctacccggatctgaacctgagccgcggggtttacttcgatcgcaagaacttcggcgtcgacaaggtggtgagcggcgatccgggccgcacggtggcggacgacattccgcgcgatcgcctcaacggccgctcttatgaagcgttcatcggcgatttcccgctgccggaaagcgatcgccaggcgttgatcgcgctgcatacggtgaagaaagattatctgccggagatgacgctggagcagaaggtcgagtggctcgatacccacagctacacccagttcctgcgcgagaaggtgggcctgagtgagctggcgatccgttatttccagcagaccaccaacgatttccaggcggtgggcatcgacggcacgtcgtgcagcgatgcgcgcatctgcgatctgccgggccttgacggcatgaatctgccgccgctggacgaagagtcgcaggcggatctcgacgatccttacgtgttccacttcccggacggcaacgccacgctggcgcgcctgatggtgcgcaaattgatcccggcggtggcgccggctggcaaagatatgaacgacgtggtgctggccaaattcgactacggccagctcgatcggccggaatcgccggtgaagctgcgtttgaacagcaccgggctgcacgcggccaacgttggcgacaaggtggaagtcacctacatgaccggcgagaagatgaccaaggtgcgcgccgggcaggtggtgatggccggctacaacatgatgatcccatacctggtgccggagatgtcgcacgagcagcaggaggcgctgaagcagaacgtcaagtcgccgctggtgtacagcaaggtggtgatccgcaactggcaaccgttcatcaagctgggcgtgcacgagatctattcgccggccgcgccgtacagccgcgtgaagctggattacccggtgagcatgggcgggtatcagcacccgcgcgatccggatcggccgatcggcctgcatatggtgtacgtgccgacgctgccgggcagcggcctcagcccgcgtgagcagtcgcgcaaagggcgcgcgctgctgctgggcacgccgttcgaggtgcacgagcagatgatccgcgaacagctgcagggcatgctgggcgaggccggtttcgaccatcagcgcgacattcaggcgatcaccgtcaaccgctggtcgcacggttactcctacttcctcaacgggctgtttgacgacgaagacgaggccacgaaaatcatcgaaacggcgcggcagccgatcggcaagatcgttatcgccaactccgatgccgactggagcccgtacgccaactcggcgatcgatcaggcgtggcgcgcggtgaatgaactggcctacggcaaggttgccgccaaggagggagcatga

SEQ ID NO: 425485 - DNA, 1425 bp, Serratia marcescens
atgcaaagccaactgttgattgacggccacctggtgaacggccagggcgcgacccagccggtgtataacccggcgaccggcgaagtgatcgcgcaggtggcggaggccagcccggagcaggtcgatcgcgcggtgctggcggcggacgccgcgttcgccgcctgggggcaaaccacgccgaaagagcgcgccgagcatctgctcaagctggcggatctgatcgatgcgcatgccgagaccttcgccaggctggaatcgctcaactgcggcaagccttatcactgcgtgttgaacgacgaactgccggcggtggccgacgtgtttcgcttcttcgccggggccagccgctgcctgaccggcatggcggccggcgagtatctggccgggcatacctcgatgatccgtcgtgatccgctgggcgtggtggcctcgatcgcgccgtggaactacccgctgatgatggcggcctggaaactggcgccggcgctggcggcgggcaactgcgtggtgatcaagccttcggagcagacgccgctgaccactttcaaactggccgaactggccgccgggctgttcccgccgggcgtgctcaacgtgctgttcggccgcggcgcaagcgtcggcgatcggttgaccgggcatgacaaggtgcgcatggtgtcgctgaccggctcgatcgccaccggcgagcacatcatcgcccacaccgccgccggcattaagcgcacccatatggaactgggcggcaaggcgccggtgctggtgttcgacgacgccgatctgcagcaggtggtggacggcattcgcggcttcggtttctacaatgccgggcaggattgcaccgccgcctgccgcatctacgcgcagaaaagcatttatcccgagctggtgaagcggctgggcgaggcggtggccagcctgaagatcggcgcgccggacgacgagagcaccgagctggggccattgattaccgcccagcatctggagcgggtcgccggttttgtcgagcgcgccaaagcgttgccgcacgtgcaggtggtgaccggcggcgagaaggtgaaggggccgggttactacttccagccgacgctgctggccggcgcgcgccaggaggatgaaatcgtgcagcgcgaggtgttcggtccggtagtgacggtgacgccgtttgacgacgaagagcaggtgctggcctgggcgaacgaatccaactacgggctggcgtcgtccgtgtggacccgcgacgtgggccgtgcgcatcgcttaagcgcccgcctgcaatacggctgcacctgggtgaacacccacttcatgctggtgagcgaaatgccgcacggcggccagaaactgtccggctacggcaaggatatgtcgatgtacgggctggaggattacaccgccattcgtcatgtgatgttcaaacattga

SEQ ID NO: 425486 - DNA, 807 bp, Serratia marcescens
atgcactctgaacgcgcgcccttagggctgaagctggccgcctggggcggacttgtcttcctgcatttcccgttggcgatcatcgccatctacgccttcaacaccgaggatgccgctttcagcttcccgccgaaggggttcacgctgcactggttcaacgttgccgccgggcggcaggatatcctcgatgcggtgctgctgtcggcgcagatcgcctgcctggcgaccgccatcgcgctggtgctcggcaccctggcggcggcggcgctgtatcggcgcgatttcttcggcaaggacagcatttcgctgctgttgctgctgccgatcgcgttgccggggatcgtcaccggtctggcgctgctggcggcgttcaaggcgctgaacatcgagccgggcatcctgactatcgtcgtcggccatgcgacgttctgcgtggtgatcgtgttcaacaacgtcatcgcccggttccgccgcacctcgtacagcctgatcgaagcgtcgatggatctcggcgccgacggctggcaaaccttccgctacgtgatcttgccgaacctcggctcggcgttgctggccgggggcatgctggcgttcgcgctgtcgttcgatgaaatcatcgtgaccacttttaccgccggccatgagcgcacgctgccgctgtggctgctgaaccagctcggtcgcccgcgcgatgtgccgattaccaacgtggtggcgctgtcggtaatgctgttgaccatgctgccgatcctcggcgcttactacctgaccaaaggtggggaaagcgtcgccggcagcggcaaataa

SEQ ID NO: 425487 - DNA, 945 bp, Serratia marcescens
atggacatgagcatcgattccccctcggcgcgcggcggcaccgtgcgcgcgctgtcgacctggctctatcgccggccgacgctgtatctgcttttgctgttggtgccgccgctgctgtggttcggcgcggtgtacctcggttcgctgctgacgctgctgtggcaagggttttacacctttgacgatttcaccatggcggtgacgccggatctgaccttcgccaacctggcggcgctgttcaacccggccaactacgacatcatcctgcgcacgctgaccatggcggtgctggtgtcgctggccagcgcggtgctggcgttcccgatcgcctattacatggcgcgctacaccagcggccgcgtcaaggcgttcttttacatcgcggtgatgatgccgatgtgggccagctatatcgttaaagcctacgcctggaccttgctgctggcgaaagacggcgtggcgcagtggttcctgcagcacctggggctggagccgctgttggcttcgctgctgacggtgcccggcgtcggcggcaacacgctgtcgacctcggggctggggcgttttttggtgttcgtctatatctggctgccgttcatgatcctgccgatccaggcggcactggagcgcctgccgccttcgctgctgcacgcctcggcggatctgggcgcccgaccggcgcagaccttccgccacgtcattttgccgctggcggtgccgggcatcgccgccgggtcgatcttcaccttctcgctgacgctgggcgactttatcgtgccgcagctggtggggccgccgggctatttcatcggcagcatggtgtacgcccagcagggtgcgatcggcaatatgccgatggccgcggcctttacgctggtgccgatcgtcctgatcgccatctacctttccatcgtcaaacgtctgggggctttcgatgcactctga

SEQ ID NO: 425488 - DNA, 1029 bp, Serratia marcescens
atgaccattgccgtgcaattcatcgatgtttcgcggactttcggcgatgttcgcgccgtggatcgggtatccatcgacattcaggacggggaattcttctccatgctcgggccgtccggctcgggcaaaaccacctgcctgcgcctgatcgccggctttgaacagctctcttccggctcgattcgcatccacggccaggaagccgccaacctgccgccgtaccagcgcgacgtgaatacggtgtttcaggattacgcgctgttcccgcacatgtcggtgctggaaaacgtagcctacggcctgatggtgaagggcgtcgccaaacgcgagcggctggcgcgggcgcaagaggcgctggagagcgtggcgctcggtttcgttgccgaacgcaaaccggcgcacctgtcgggcggccagcggcagcgcgtggcgttggcgcgcgcgctggtcaatcggccgcgggtgctgctgctggacgaaccgctcggcgcgctggatctcaagctgcgcgagcagatgcagggcgagctgaagaagctgcagcgccagctgggcatcacctttatcttcgtcacccacgatcaaagcgaagcgctgtcgatgtccgatcgggtggcggtgttcaataacggccgcatcgaacaggtggatacgccgcgcgagctttacatgcggcctaagacgccgttcgtcgccgaattcgtcggcacctccaacgtggtgcgcagcgagctggcgcagcgcctgctcggcgaaagccgaaccttctcgatccggccggagcatatccgcctgctggagcagggcggcgcggcgcaggacgagatccaggtgcaggggacgctgcaggaaatccattaccagggcgcggccacgcggtatgaaatcgcgctgcatggcggcgaaaagctgctggtcagccaggccaatccgcagtggctcgccgaagggcaacagctgcagatcggccagccgatcgtcgcctgctggccgcgcgcggcgatggtgccgctgctggaggagaggtga

SEQ ID NO: 425489 - DNA, 1155 bp, Serratia marcescens
atgggaaaaactaccgcagtcaccaccaccgtctccgcgctctgtcttaccgtgctgtgcggcctggcccaggcggccgatctgccgcagacgctgggcaaaggcgaaggccggctggatatcatcgcctggcccggctacatcgaacgcggccagtccgacaaaaactacgactgggtcacccagtttgagaagcaaaccggctgtgcggtgaacgtgaagaccgccgccacctctgatgaaatggtcagcctgatggccaagggcggctacgatctggtgaccgcctccggcgacgcctcgctgcgcctgatcttcggcaagcgggtgcagccgatcaacaccgcgctgatcccgaactggaagaacatcgatccgcgcctgctgaacggcgcctggtacaccgtggacggcaaaacctacggcacgccgtaccagtgggggccgaacctgctgatgtacaacaccaaaaccttcccgacgccgccggacagctgggcggtgatcttccagcagcagaacctgccggacggcaagagcaaccagggccgggtgcaggcttacgacggcccgatctacatcgccgacgcggcgctgttcctgaaggccacccagccgcagctcggcatcagcgatccataccagctcaacgaagagcagtatcaggcggcgctgaagctgctgcgcagccagcacgcgctgatccaccgctactggcacgacacctcggtgcagatgagcgactttaaaaacgaaggcgtggtggcctccagcgcctggccgtatcaggccaacgccctgaagggcgaggggcagccgatcgccaccgtgttcccgaaagagggcgtgaccggctgggcggacaccaccatgctgcatgccgacgccaagcacccgagctgcgcctaccagtggatgaactggtcgctggagccgaaggtgcagggcgacgtggcggcctggttcgggtcggtgccggcttcgccagcgggctgcaaggccagcgcgctgctgggtgagaagggctgcgaaaccaacggcttcaaccagttcgacaaaatcgccttctggaaaacgccgcaggcgcagggcggcaagttcgtgccgtacagccgctggacccaggattacatcgccatcatgggcggccgctaa

SEQ ID NO: 425490 - DNA, 1464 bp, Serratia marcescens
atggcagatgtgcaggttctctcaggtttgtcctgtcagcagttcattaacggtcagcttatcgacggcgaaggccagcaggagtgcatcgtcaatccggccaacggcgagacgctgatcgtcctgaccgaagcctcttcggcgcaggtcggcagcgcggtgaaagccgcgcagcaggcgtttggtcactggtcgcgcaccacgccggcccagcgcgccgccctgttgctgcgcattgccgacgccatcgagcggcaggcgccgcagctggcgcagctggaagccctcaactgcggcaaaccgctgcatcaggcgctcaatgacgatctgccggcggcggtcgacgtgttccgctttttcgccggcgcggtgcgcacgcagcaagggcagctggccggcgagtatgtgccgggccacacctcgatgatccgccgcgatccgatcggcgtggtggcctcgatcgccccctggaactatccgctgatgatggcggcgtggaagatcgcgccggcgctggcggcgggcaataccgtggtgttcaaaccctccgaacatacgccgctgaccattctggcgctggtgccggcgctgcaggagatcctgccgccgggcgtgctgaatatcgtctacggcggcggggaaggggtcggcagccagctggtggggcacccgcaggtgcggctggtatcggtcaccggcgatatcgtcaccgggcaaaaaattctgcaggcggcggccaaaagcgtcaagcgcacccacctggaactggggggcaaggcgccggtgatcgtctgcgacgacgccgatctcgacgaagtggtcaacggcattcgcacctacggctattacaacgccggccaggactgcaccgccgcctgccgcatctacgcgcaggcgggcatctatcccaagctgttggacgcgctgggcgaggcggtcgccagcctgcgtttcgcccgcaagcgcgatcaggacaacgaaatcggcccgttaatcagtgcccgccagcgcgatcgcgtcgccagcttcgtcgagcgagcgctcagccaaccgcatatcgaattgatcaccggcgccgcggtccactccgggccggggttctattaccaaccgaccctgctggcgggctgcctgcaaagcgacgaaatcgtgcagcgcgaggtgtttggcccggtggtcagcgtcacgcgcttcgaacacctggagcaggcggtggcgtgggccaacgactcggaatacgggctggcttcgtcggtgtggacgcaaaatatcgatcgggcgctgcacattgccgcccatctgcagtacggcagcacctggatcaacacccatttcaccttggcgagcgagatgccgcacggcggcctgaaacgctccggctacggcaaggatctgtccagcgattcgctgcaggattacagcgttgtcaggcacgtaatggcgaagttcaaagccggcttctaa

SEQ ID NO: 425491 - DNA, 924 bp, Serratia marcescens
atgatgacgttacgccaaatccgccacttcatcgcggtggcggaaaccgggtcgatctccgccggcgcccaggcggtgtttgtctcccagtcttcgctgacgctggcgatccagcagttggaaaccgagatcggcgtgcggctgttcgatcgccacgccaagggcatgacgctgacccatcaggggcatcagtttctgcgccagtcgtatctgatcctggcgacggtggacaacgccaagcgcagcctgcagatcggcaccgaaagcctgaccggcaagctgaccgtcggcgtcaccagcctggtggctggctacttcctggtggagctgctcacgcgctttaaatcggcctatcccaacgtcaccgtgcaggtggttgaagacgagcgcccgtatatcgagcatctgctggtcagcggcgagatcgacatcggcgtgctgatcctgtcgaacatcgaagaccgcgacgcgctgcagaccgaggtgctgatgcactcgccgtatcgcctgtggttgccgccgctgcacccgctgctggagcacgagagcatcagcctggcggacgtggccaaacagccgctgatccagctcaacgccgatgaaatggacgtgcacgcgcggcgcatctgggcgcgcgccgggctgaagccggagatcgccatgaagaccgcctcgaccgaggcggtgcgcagcctggtggcggcggggatgggggtctccatccagccggacatggcgtaccgcgcctggtcgctcgagggcaacatgatcgaggcgcgcaagctggacgatctgctggagccgctggacatcgggttggcgtggcggcgcggcagcgcgcggccggagctggtgacgccgttccttaccatcgcgcgcgagaacggcagcaaacacgccgccgggcttaagcattcgatttaa

SEQ ID NO: 425492 - DNA, 339 bp, Serratia marcescens
atgaaaaagatcgacgcgattatcaagccgttcaaactggatgacgtccgcgaagcgctggccgaagtgggcatcaccggcatgacggtcaccgaagtgaaaggcttcggccgccagaagggccacaccgagctgtaccgcggcgccgagtacatggtcgactttctgcctaaggtgaagatcgagatcgtggttgccgacgacatcgtcgacacctgcgtggaaaccatcatgcagaccgcgcagaccggcaagatcggcgacggcaaaatcttcgtcttcgacgtggcgcgcgtggtgcgcattcgtaccggcgagcaggacgaagaagcgatttaa

SEQ ID NO: 425493 - DNA, 1623 bp, Serratia marcescens
atgagcagatcactttccatcgccctggcccagctgaacctgctggtcggcgacattgaaggcaacaccgaacgcatgttgcaaatcgtgcaggagcagcagaaggcgggagccgatctggtcatgttcagcgaactggcgctgtccggctacccgccggaagatctgctgtatcgcaatgacttctatcagcgctgcgacgcgcagctgctgcgcctgcagcaggcctccgccgagaccgcgatcctggtcggccacccgtggcgcgaaggcgacaagctgtataacgcgctgtcgctgtttgccgaaggccgcctgctgacccgctacttcaagcagcagctgccgaactacggcgtgttcgatgagaagcgctatttccacgccggcaacgacacctgcgtggtggaactgaaaggctaccgtctggggctgctgatttgcgaagatctgtggttcccggagccgattgacgccgccaaggcggccggcgcggaaattatcctgtcgatcaacgcctcaccgtataaccgcgaaaagccgtatatccgcaaaacgctgatggccggccactgccagcgcacccagctgccgctggtgtacctcaatcaggtcggcggccaggatgagctgatcttcgacggctgctccaaggtcttcgacgccgccggcaccatgacccaccgtctggcggccttcgacgagcaggtgacccgcctggaattcaacgagctggccgtggtgccgatggccgatccggccgctgagctgccgcagctggcgcaggtgtaccaggcgctggtgttggcggtgcgcgactacgtgaccaaaaatggcttcaaaggcgcggtgctcggcctgtccggcggcatcgactcggcgctgacgctggcgatcgccgtggatgcgctgggcaaagacaaggtgcaggcgctgatgatgccgttccgctataccgcggacatcagcatcgccgacgccagggaagaggcggaaatcctcggcgtggagttcgatatcgtctccatcgaaccgatgttcgacgcctttatgggccagctgtcgccgatgttcgccggcaccgagcgcgacaccaccgaagaaaacctgcaggcgcgttgccgcggggtggtgctgatggcgctgtccaacaaacgccgcagcatcgtgctgaccaccggcaacaagagcgaaatggcggtgggatacgccacgctgtacggcgatatggccggcggtttcgacgtgttgaaagacgtgccgaaaacgctggtgttcaagctgtccgaataccgtaacaccgtctcctacgtgatcccgcagcgggtgatcgatcgtccgccgtccgccgagctggcgccggatcaggtcgatcaggacagcctgccgccatacgatatcctggacgcgatcctggaaggctacgttgagcgcgacaaatcggttgccgatctggtggccgaagggttcgacgaagcgatcgtgcgcaaggtgatccgcctggtggacatcaacgaatacaagcggcgtcaggccgccgtcgggccgcgtatcaccgcccgtaacttcggcaaagaccgccgctaccccatcacatccggttttggccgcaaaaattggtaa

SEQ ID NO: 425494 - DNA, 1341 bp, Serratia marcescens
atgaccgcacgcaaaccggccaacctgctcttggttgacgacgatcccagcctgctgaagctgctgggcatgcgtctgaccagcgaaggttttcacgtcaccaccgccgaaagcggccaggaagcgctgcgcctgctggcgcgcgaacagatcgatctggtgatcagcgatctgcgtatggacgagatggacggcatggcgctgttcgccgagatccaaaagcatcagccgggcatgccggtgatcattctcaccgcgcacggttcgattcccgatgcggtggccgccacccagcagggggtgttcagcttcctgaccaaaccggtggatcgcgatgcgctgtacaaggcgatcgacgaagcgctcgcgctgtcggccaccccggccggcgacgacgcctggcgcgaagatatcgtcacccgcagcccgctgatgctgcgcctgctggagcaggtgaaaatggtggcgcagtccgacgtcagcgtcttgatcaacggccagagcggcaccggcaaagaggtggtggcgcaggcgatccacgccgccagcccgcgcgccggcaaggcgttcatcgccatcaactgcggcgcactgccggagcagctgctggagtccgaactgttcggccacgccaagggcgcctttaccggcgcggtcagcagccgcgaagggctgttccaggcggcggcgggcggcacgctgttcctcgacgagatcggcgatatgccgctgtcgctgcaggtgaagttgctgcgcgtgctgcaggagcgcaaggtgcggccgctgggcagcaaccgcgatctggacattgacgtgcgcatcatctccgccacccaccgcgatctgcaaaaggcgatggcgaagaacgagttccgcgaagatctctactatcgcctcaacgtggtgaacctgaagatcccggcgctcaacgaacgcgccgaagatatcccgctgttggccaaccacctgttgcgcgaagcggcccagcggcacaagccgttcgtgcgcagcttctcgaccgacgccatgaagcggctgatgaccgccagctggccgggcaacgtgcgtcagctggtcaacgtcatcgagcagtgcgtggcgctgacctcggcgccggtgatcggcgaagcgctggtggagcaggcgctggaaggggaaaacaccgcgctgccgaccttcgccgaagcgcgcaaccagttcgaattgcactacctgcgcaagctgttgcagatcaccaagggcaacgtgacccaggccgcgcgcatggcgggccgcaaccgcaccgagttttacaaattgctgtcgcgccacgagctggacgccaacgattttaaagaatga

SEQ ID NO: 425495 - DNA, 873 bp, Serratia marcescens
atgtacacatggtctaagcgccttcgtctttcacagaccgaaggttcaccgcgtgccacgcacaggacgccgctcggcaaacgcccgatcggctggttgggcgccgtcttctttatgccgctgttgctggcgggctgcgtcgatcgcgccgtcagcggcggcctgaacgctcagcagcaagaggcgatcccggataccaaggtgatcgattaccgcaccgcggcttgcgataccctgtggcagttggacgacaaggacgcgctggataacgcgctctactggctgcgcgcgatggactgcgccgatcgcatcgggtcgacccaggcgcgcgcgctggcgaaaacggtgcctggcgacagctggtccggcgttttcaaacagagcatcctgctgggcagcgcgcagccgacctccggcgagcgccgccagatgatcgacaggatcaacagctaccgaatggagttccccggctcgttgcggccgctgacgcagctgtggcgccagcagcagatgctgcagatcacgctgttcgatgaaaaagcgcgctatcagcatctgcaggagagcagcgacagccagatcgattcgctgcgccagagccaggcgcgtttgcaatcgcagctgcaggacacctcgcgcaagctggaaaacctgaccgacatcgagcgccagctctcttcgcgcaagcagctgcaaggggaaatcccggaaaacaacacaggctcgcaaaagggcgaagccgccggtaaaaacggcgcggccgccaaaggggcggagccgcaggacgaaccggaaaagggcaccgcgctgccggttgaaccggaagacacctatacgccgccccctgccaataaggagtctcacgcgcaatga

SEQ ID NO: 425496 - DNA, 1437 bp, Serratia marcescens
atgatttcgttgaaaagatggcgtttattcccccgttcgctgcggcaattggtgctgctggccttcctgttggtgctgctgccgctgctggtgctggcctatcaggcctaccagagcctggatcacctcagcgcgcaggcggcggacatcaaccgcaccacgctggtggacgcgcggcgcagcgaggcgatgaccagcgtggcgctggagatggagcgcagctatcgtcagtactgcgtgctggtcgatcccacgctgcaaaagctgtatcagaaccagcgcaagcagtattcgcagatgctggacgcccatgcgccgattctgccggacgagcgctattatcaaacgttgcgccagctgctgacccagctggcggcgatcaaatgccataacagcgggccggatcaagaggcttccgccttgctcgagtcgttctcgcgctccaacgccgaaatggtgcaggccacgcgcgcggtggtgttctcgcgcggccagcagctgcagcaggccatcgccgagcgcggccagttcttcggctggcaggcgctgctgctgttcctggtcagcgtgctgctggtggtgctgttcacccgcatgatcatcgggccggtcaaggccgtggagcggatgatcaaccgtctgggggaagggcgcgcgctgggcagcaccgcgtcgttcaaagggccgcgcgagctgcgttccctggcgcagcgcattatctggctgagcgagcggctggcgtggctggaatcgcagcgccacgagttcttgcgccatatctcgcacgagctgaaaacgccgctggccagcatgcgcgaaggcaccgagctgctggccgacgaggtggcggggccgctgacttccgatcagaaagaggtggtgacgatcctcgacaacagcagccgccatctgcagcagctgattgaacagctgctggattacaaccgcaaactggccgatggcccggcggcacatgagaacgtcgagctgcgcgaaatggtcgatttggtggtcgccgcgcacagtttgccggcgcgggcgaagatgatttccaccgaaattgcgctggaggcggaaatctgctgggcagagcctacgctattaatgcgcgtgctggataatctctattccaatgcggtgcactacggcaaggaatccggtaacatttggatccgcagccgtcaggttggacaacgggtgcaaatcgacgtcgccaataccggcacgccgatccccgaggctgaaagagccatgattttcgagccttttttccagggtagtcaccagcgaaaaggggcggtaaaaggaagcggactggggttgagcatcgctcaggactgtatccgtcgcatgcgcggtgagctgcaactggcgacggtcgccggtgcagacgtctgcttccgcattgaattgccgttaaccgccgagaatgaataa

SEQ ID NO: 425497 - DNA, 3891 bp, Serratia marcescens
atggaaattctgcgtggttcgcccgctttatcggcttttcgcattaccaaactgctgtcccgctgccaggacgctcacctgcccgtcagtgatatctacgccgagtacgtccactttgccgatgttagcgcaccgctcagtgccgaagaacacgccaagcttcagcggctgctcaagtacggcccttctctcgccgaacacgcccccgaaggccggttgctgctggttacgccgcgtccgggcaccatttctccctggtcttccaaagccaccgacatcgcccacaactgcggtctgcagcaggtcgtgcgcctggagcgcggcctggcgttctacgtcaaggcgcccgagctgacggaaacccagtggcggcagctcgccgcgctgctgcacgatcgcatgatggaaaccgtcttcagcgaactgcaacaggccgaacagctgttcgcgcaccatcagccggcgccgtatcagtcggtcgacgtgctgggcgcagggcgcgccgcgctggagcaggccaacgtccggctcggcctggcgctggcgcaggacgagatcgactatctgctgaatgcctttaccggtttggggcgcaacccgacggatatcgaactttatatgttcgcgcaggccaactccgagcactgccgccacaagattttcaacgccgactggatcatcgacggcgaacagcagcctaaatcgctgttcaaaatgatcaagaacacctatgagcagacgccggactatgtgctgtcggcgtataaagacaacgctgccgtgatggaaggctcgcaggtcggccgcttcttcgccgcgccggagaccggcacctacgattaccatcaggaagacgcgcacatcctgatgaaggtggaaacccacaaccacccgacggcgatctcgccgtggccgggcgccgcgaccggctccggcggcgagatccgcgacgagggggctaccggccgcggcgccaagccgaaggccggcctggtgggcttctcggtgtccaacctgcgtattcccggctttgaacagccgtgggaacaggatttcggcaagccggaacgcatcgtcaccgcgctggatatcatgaccgaaggcccgctgggcggcgcggcgttcaacaacgaattcggtcgtccggcgctgctgggctacttccgtacctatgaagagcgcgtcaacagccacaacggcgttgagctgcgcggctaccacaaaccgatcatgctggcgggcggcatcggcaacatccgtgccgatcacgtgcagaaaggggaaatcaccgtcggcgccaagctggtggtgttgggcggcccggcgatgaatatcggcctgggcggcggcgcggcctcgtcgatggcgtccggccagtccgacgccgatctggacttcgcttcggtgcagcgcgacaacccggaaatggagcgccgctgtcaggaagtgatcgaccgctgctggcagctgggcgatcagaacccgatcctgtttatccatgacgtcggcgccggcggcctgtccaacgccatgccggagctggtgagcgacggcggccgcggcggccgcttcgagctgcgcgatattctcaacgacgagccgggcatgagcccgctggaagtgtggtgcaacgaatcgcaggaacgttacgtgatggcgatcgccccggcgcagatggcgcagttcgacgagatctgccgccgcgagcgcgcgccttatgcggtgatcggcgaagcgaccgaagaacagcacctgacgctcaacgaccgccacttcgacaaccagccgatcgacatgccgctggacgtactgctcggcaagacgccgaaaatgacccgcgacgtcacccgcctgcaggcgagcggcgaggcggtgcagcgcgagaacatcacgctggccgacgcggtgaaacgcgtgctgcatctgccggccgtggcggagaaaaccttcctgatcaccatcggcgaccgcaccgttaccggcatggtggcgcgcgaccagatggtcggcccgtggcagatcccggtggccgactgtgcggtcaccaccgccagcctggacagctattacggcgaagcgatgtcgctcggtgaacgcgcgccggtggcgctgctggacttcgccgcctccggccgcctggcggtcggggaagcgctgaccaacctggccgccacagagatcggtagcctgaagcgcgtgaagctgtccgccaactggatggccgccgccggccacccgggcgaagacgccggcctgtacgaagcggtaaaagcggtgggcgaagaactgtgcccggcgctgggcatcactatcccggtgggtaaagactccatgtcgatgaagacccgctggcaggaaggcaacgaacagcgtgaaatgacctcgccgctgtcgctggtcatcaccgccttcgcccgcgtggaggacgtgcgccacaccgtgacgccgcagttgcgcaccgataagggcgacagcgcgctgctgttgatcgatctgggcaacggccataacgcgctgggtgccaccgcgctggcgcaggtttatcgccaactgggtgacaaaccagccgacgtgcgcaacgttgcgcagctggcgggcttcttcaacgccatgcagcagctggtggccgatcaagcgctgttggcttaccacgaccgcgccgacggcggcctgctggtgacgctggcggagatggccttcgccggtcactgcggcgtggacgtcaaccttgacggcctcggcgatgatgcgctggcggtgctgttcaacgaagagctgggcgcggtgatccaggtgagcgccgaacgtctcgatgacgtgaagcaggcgttcgctcagcacggtctgaccgacaatgtgcatcacatcggcagcgtgcaggccggcgatcgtttcgtcatcacccaacacggcaaggcgctgtacagcgaaagccgcaatacgctgcgcacctggtgggcggaaaccacctggcagatgcagcgcctgcgcgacaacccggcgtgcgccgatcaggaacatcaggccaagcaggatgaacaagatcccggcctgaatgtgaagctgaccttcgcaccgcaggaagacatcgccgcgccgtatatcgccaagggcgctcgcccgaaagtggcggtgctgcgtgagcagggggtgaactcccacgttgaaatggcggcggcgttccaccgcgccggctttgacgcggtggacgtgcacatgagcgatctgctggcggggcgccgcgatctgcaggacttccacacgctggtggcctgcggtggcttctcttacggcgacgtactgggcgccggcgaaggctgggcgaagtccatcctgttcaacgagcgggtgcgcgacgagttcgaagcgttcttccaccgtccgcagacgctggcgctgggcgtgtgcaacggctgccagatgatgtccaacctgcgcgagctgatcccgggcgccgaacactggccgcgctttgtgcgcaacctgtcggatcgcttcgaggcgcgtttcagcctggtggaagtggcggccagcccgtcgctgttcctgcagggcatgaccggttcgcgcatgccgatcgccgtttcccacggcgaggggcatgttgaagtgcgcgatgcggcgcatctggccgcgctggaaagccacggcctggtggcgctgcgtttcgtcaacaacgccggtcaggtgacggaaacttacccggccaacccgaacggttcgccgaacggcattaccgccgtgaccagcgccaacgggcgcgccacggtgatgatgccgcacccggaacgtgtgttccgcaccgtcagcaactcctggcacccggaagagtggggcgaggacagcccgtggatgcgcatgttccgcaacgcccgtaagcagctgggctaa

SEQ ID NO: 425498 - DNA, 1518 bp, Serratia marcescens
atgagaaaagtcgcggttatcgtcgccggcgtacctgtgccaccactggataactatttgaaacgtcttaaaataaactacatcctcatcggcgttgtcaccctgcttctggctctcgcgctgtggcccaatatcacctggcgcagcggccagggcgggcaactccaggagatcatttcccgcggcgagttgcgtatcagcacgctgaactccccgctgacctatttcaacaccaagcaagggccgggtgggctcgactacgaactggcgaagcgcttcgccaactacctcggggtgaagctggtggtgatcccccatcagaacatcaatgacctgttcgacgatctggacgacgacgacgccgacctgctggcggcgggcctgatctacaaccaggagcgcctcagccgcgcgcgtaccggcccggcctactactccgtttcccaacagctggtgtaccggctgggcaccccgcggccgaaaagtttcgccgacattaaaggcaagctggcggtcgcttccggttccgcgcacgtcagcaccctcaagcagctcaaacaggataaatacccggatctcgcctgggagtcctccagcgatctcacctccaaagagctgctggagcgagtggccgacggcaagctggactacaccctcggcgattcggtgaccatcgcgctgctgcagcgcatccatccgcagctggcggtggcgttcgacgtcaccgacgaagagccggttacctggtatctgaaacgcgacggcgacgacagcctgtacgcggcgatgctggacttctacagccagatggtggacgacggcaccctggcgcggctcgaagagaaatacctcggccacgttggcagcttcgactatgtggacaccaaaaccttcctgtcggccatcgactcggtgctgcccaacttccgcccgctgttcgagaagcacgccaacgagatcgactggaagctgctggcggccatcgcctatcaggaatcgcactggaatccgcaggccacctcacccaccggcgtgcgcggcctgatgatgctgacccgcgccaccgccgacggcctcggggtcaacgaccgcctcgatccggaagagagcattcagggcggcgccctttacctgcagcggctgatggccaaggtgccggacagcgtgccggaagacgagcgcatctggttctcgctggcggcctacaacatgggctggggccacatgctggacgctcgcaagctgaccaagacgcaaaaaggcaatccggacagctgggtcgacgtcaaacagcgcctgccgatgctcagccagaagcgctactacccgcagctgacctacggctatgcgcgcgggcgtgaagcctacaactatgtggaaaacatccgccgctaccaggtcagcctggtgggctatctgcaggaaaaagagagaaaggcggcgcaagcggccgccgagcaggaggcgttggggaaaggctacccgacggtgatgccggaactggcgctcaactactga

SEQ ID NO: 425499 - DNA, 507 bp, Serratia marcescens
atgactgaatataacgatgagtactggatgcgtcaggcattgcagctggccctgcgcgcgcaggaagagggcgaggtgccggtgggtgcgctgctggtgctggacaatcaggtcatcggcgagggctggaaccgcccgatcggccgacacgatcctaccgcacacgccgagatcatggcgctgcgccagggcggcgtggtgctgcaaaactaccgtttgctgaacgccacgctgtacgtcacgctggagccttgcgtgatgtgcgccggcgcgatggtgcacagccgcatccgccggctggtgtatggcgccgccgacgagaaaaccggcgcggccggttcactggtggacattctgcgccatccgggcatgaaccatcaggtggagatcgtctcgggcgtgctggcggaggagtgcgccgccaccctgagcaatttcttccgcctgcgccgtgaacagaaaaaagcgctcaggctggcgcagcgggcggcggataagccggaataa

SEQ ID NO: 425500 - DNA, 1065 bp, Serratia marcescens
atgaaactcagtaaaaagaacgccgtcgtggtgcgcaaggcgctggacggctgggttggggaaggcgccttgacgcccgcacaacggcagcagctgctgcagcatgtggccgtgcagcctttcgactggcggcggctggcgcgctatgcgtttctcgccgcgctggcctcgctgctgatcgccgtcaccagcctgttcgccgacagcgaactgcttgcatggctcagcggactgttccgcttcgacgcgccggtacgcatggcgatcgccggcgtactggcagcgctggcctacgtctgggcgctgcgtcgccgccggcgccacccggaaaaacgctacggcaatgaggcggctctgtttgtcgccgtgttgcttaccgcctgcgccttatggcagctgggggtctggctggataacggcagcggccgggtttccgtgctgctgctgttcgccgcgctgctgtacggcgcgatcggctggttcagccgctccgggctggtgtggtggttcgccctgctgtcgctcggcaacgccttcggcgccgagaccggctacctgtccggctggggcgcctactggcttggcatgagctacccgattcgttttatcgcctttggcgcggtgctgatcgccgccgcgctgctgctgcggccgctgttggcgcaacgcggcctgcagcgggtgtcgctggcgatgggcctgctgtatctgtttatcgccctgtggctgctgtctatcttcggcaactacggcgatctcgacagctggtaccgcgcgcgccagatcgagctgttccactggagcctgctgttcgggctggccgccctcgccgccatttggctgggattgaagcatgacgacgccatgctgcgcggcttcgggctgaccttcctcggcattaacctgtatacccgcctgttcgagtttttctgggacagcatgccgaagacgattttcttcgcgctgctcggcctgagcctgtgggcgttggggcattatgcggagaagatttggcagttggggcgccagccgcacgacgtgaccgacgaccgatcgcggtactga

SEQ ID NO: 425501 - DNA, 657 bp, Serratia marcescens
ttgagcgacaagcagcaacaaccggccgcagaggggcgccgcgtggtctttttcgatctggacggcaccctgcatcaggaggatatgttcggcagtttcttgcgctttctgctgcgccgtttgccgctgaacctgctgctggtgataccggtgctgccgccgatcggcctggcgctgctgctgctggggcgcgccgcgcgttggccgatgagcctgctgctgtgggcgattactttcgggcgctccgaagcgaagctcaaggcgctggagcggcagtttatcgaggcctttcgccagaaggtgaccgcgtttccggtggtgcaaatgcggctgcggcagtatctggacgagcacgatgccgaagtgtggctgatcaccggctcgccggaacggctggtggagcaggtgtatcacgattcggcgtttctgccgcgggtgcggttgatcggcagccgcatcacgcgccgctgcggcggttgggtcttgactctgcgctgcctggggacgcaaaaagtggtgcagctggagcagcggctcggcgcgccgctaaagctgtacagcggttacagcgacagcaagcaggataatccgctgctgttcttttgcgagcaccgctggcgggtaagtaagcagggcgagctgcagcagctggaataa

SEQ ID NO: 425502 - DNA, 1368 bp, Serratia marcescens
atggacaagacaacggcattggcgacacagatcctggcgggcgtggggggcgagggcaatatcctcaaactggagaactgcatgacgcgggtacgcgtcgaggtcagcgacgaacagcgtctggatctggccgctctcaagcagctgtccggcgtgaagggctatatcaaacagggtgagcagcatcagtttatcgttggcccgggcgccgccgccaaggtggtggacgccatgcgcgcattgctgagcggtagcgcgcagcccgtcgtcgccgtcggtgacgcggcccgcatcaaggcgcaggccaagcaaaaatacgctgcgccgatgagcggtgcgctgaaaaagctggccgatgtttttattccgctgatcccggcgtttatcgcctcgggcctgatcaccggcatcatcaacctgctgaaacggcccgacatcgccggccaactggcggtggactacccgaacgtgctggggttgctggcgatcttcggcagcgcggtgttcgccatcatgaacattctggtcggggtcaacgccgcgcgggtgttcggcggctcccaggcgatgggcggcgtgatggcgggcattctctccagcccggcgctggcgcagatcaccttgttcggcgaggcgctgcagccggggcgcggcggggtgatcgccgtgctgctggtggtggcgttgatgtgctgggtggagaaacgcctgcgcacgctgctgccggaatcggttgagctgatccttaatccattgctgaccacgctggtcaccgcctcgctggcgatcctgattctgcagccgatcggcggcattatctccgacgccatcgcccacggcgccaatctggcgatcgacaagggcgggctgctggtgggggcgctgctctcggggctgttcctgccgctggtgctctccggcctgcaccaggggctggtgccgatccacgtcgagctggtgcaggcgcacggttccaacccgctgctgccgatcctggcgatggccggcgtcgggcaggtaggggcggcgctggcggtgctgttgaagacccgcaacgcgcggctgaagaaggtgatcaaaggggcgttgccggtcggcattctcggcatcggcgagccgctgatcttcggggtgaccttgccgctggggcggccgtttatcggcgcctgcctcggcggggcggtcggcggcgcgctgatcagctactggaaggtggcgacggtaatcaccttcggcatttcggggctgcctttggcgttgaccatcgtctcaggtaaggtgatgttgtatctggcggggatgctgattacgattgtcgccggttttctcttcacctggatgatggggttcaacgatcccgaggagtag

SEQ ID NO: 425503 - DNA, 894 bp, Serratia marcescens
atgaacttaggcgcactggtatcggaaacccgcaacccggccaccatggggctggatgagatgtcgacgctggagatggtccgctgctttaaccaggaagaccgcaaggtgccggaggcgatcgaaaaggtgctgccggcgatcgcgcaggcggtcgatttggccgcggcggcgttgaaggccggcggccggctgatttatttgggcgccggcaccagcggccgattgggggtgttggatgcctccgagtgcccgccgaccttcggcgtgccgcacggcgtggtggtgggcttgatcgccggcgggccgggcgcactgctcaaggcggtggagggggcggaagacgacgaagccctgggcgaagccgatctccgggcgctgaacctcactgccgtcgatatggtggtggggttggcggcctcagggcgcacgccttatgtgattggcgcactgcgctatgcgcgcgggctgggctgcccgacggcggccatctcctgcaacccggattcgccgatcgcgcacgaagcgcaggtggcgatttcaccggtggtggggccggaggcgctgaccggttcgacgcgcctgaaatccggcaccgcgcagaagctggtgctcaacatgctgtcgaccggcgcgatggtcaagctgggcaaggtctatcagaacctgatggtggacgtgaaggccaccaacgtcaaactggtggatcgcgcctgccgcatcgtggtggaggccaccggcgccgaacgcgctcaggccgaggcggcgctggcgcagaccggcttcgaggtcaagccggcgatactgatgattctggccggcgtcagcgccgaagaggcgcagcagcggctgcagcggcacgacggctatctgcgcgcggcgctggcgcgttaa

SEQ ID NO: 425504 - DNA, 849 bp, Serratia marcescens
atgagtacccttctgcgcatacgccagatgtatccgacactggcgcaaaacgaccgcaagctggcggactttttgctgaacaacgccgagcaggcgcggcatctcagctcgcaaaagctggccgagctggccggcatcagccagtcgagcgtggtgaagttcgcccaaaagctgggctataagggctttccggcgctgaagctggcgctgagcgaaacgctggcccagccgcaggccgagccggtggtgaccgttcacaaccacatcctcagcagcgacacgctgaaaatcgtcggtgaaaaactgctggcggaaaagcaggcggcgctgcgcgcgacgctggacatcaacagcgaagagcggctgcatcaggcgctggacatgctgcgccaggctcgccgggtgatgctgatcggcatcggcgcctccgggctggtggccaaggatttctccttcaaactgctgaaaatcggcgtgatggcggtggccgaaccggacatgcacgtccagctggcggcggttcaggcgctggacaaacgcgatctgctgctggctatctctttcagcggcgaacggcgtgaaatcaatctggcggcggaagaggcgcgccaggccggcgccagggtattggcgctgaccagcttttctcccaacggcctgcagcagcgcgcggaccactgcctctataccatcgccgaagagccccacacccgcagcgcggccatctcttccagcacggcccagtacgccctcaccgacctgctgtttatggcgctgatccagcacgatctcgatcatgcccgcgatcgcatcaaacacagcgaacagttaatgaaaaagttggtttga

SEQ ID NO: 425505 - DNA, 1545 bp, Serratia marcescens
atgaatacacacactgttattttagataagttgcggcactccgtggctcacccgaccctgcgcacttttttattttacgccattattgctttgatattgatcaaagcgatgggatacagcggtggaaaaggcattgatattctttttattgcacttatcttgctattattatctaaccattcgcttacccgctacggcctgattattccgtttattctgctgtgcgcgctgtatgcgccggtcggggccatttacgggtctccgtcagcggccgtggtgtctgccctgctgcaaaccaacagtacagaagcgagtgagttcctgcataccctcccagccaggtgttatctgctgcctgtcgtaatatttaccatgcttattattttaaaaaggtttatttggcgacaagcactaccaaaaaaaatcatattgcctttgctggcgttatttgcggttatcgtcatcaccagaatattcagcggtggcttggttaagcttaaattacctgacttctttttatccacctactccgcttacgatcaatatcaacagcaaattgatgaattaaacaccggcgtttcagaaccgtactcttggtcgatcacctctggcgcaccgaagaatgaaaactatgtcattatcgtcggcgaaagtatgcgcagggatcatatgtccttatttggttatccggtgtccactacaccgtttctggataatgccaagggacggttttacagtaattatatttccaccgcgccgaatacattcgaatccctcccccgcacgctggctttaagcaacggccacagcattgccctcggagataatatcatcaccctggcaaaagctgccggcctcaatacccactggctgtccaatcagggcatgttcgggcaattcgatacgccggtatcaaaaatcgccatgttcagcgataaccattacttcctgaagaaaggcgactatcaatcgcgcaacaccgatgatgatgcactgctgccgatatttgaccaattattgagccgccaggggcaaggcaacctgtatgtgctgcatctgatgggctcgcacgccgacttttgcgagcggcttaacggcgaaccgccgagcgtcgagtcgccgaataaggagctggcctgctacctctctacctatcgcaagactgatcgttttatcgagcaggtttatcaaagtctgaaacagaccggcgcgccgtttaaactgttctatttctccgatcacggtctttcccataaggatatcggcggcatacgttctctgcgtcacagcggcgatacccggcagaattaccaggtgccgttgctggtgctgagcgatcgcgaccaacagcaccagatcattgatgatcccttgagcgcgttcgattttatcgggttgtttgctcaagaggcgggaatacgggttacccatccggaggtgatgcctacgatgcgtatggcggataccgataagcgctgggtgtttgacgggcagagaagggttgatttcgatcagttggctgacgacccacctgagttaccctaa

SEQ ID NO: 425506 - DNA, 261 bp, Serratia marcescens
atggcactgctgattaccaagaaatgcatcaactgcgacatgtgcgagccggaatgcccaaaccaggcgatttcgatgggcgatgagatttatcagatcgataccgatcgctgcaccgagtgcgtcggccattacgatacgccgacctgccagcaggtttgcccgatcgacaacaccatcatcaccgatccgcagcatcgcgagaccaacgaacagctgtgggacaagttcgtggtactgcaccacgccgatcgcatttaa

SEQ ID NO: 425507 - DNA, 381 bp, Serratia marcescens
atggcggtgctcgggctgggaaccgacatcgttgagatggcgcgtatcgaagcggtggtggagcgcagcggcgatcgcctggcgcgccgcgtgctgagcgacgccgagtgggcgctgtatcagcagcaccagcagccgattcgctttctggccaaacgtttcgcggtgaaagaggccgccgccaaggcgttcggcaccggcattcgcaacggcctggcgttcaatcagttcgaagtgttcaacgatgcgctgggcaagccgaatattcgtttgcacggccgcgccgccgagctggccggggagatgggggtcaccgcgatccacgtttcgctggccgatgaacggcgctacgcctgcgcgacggtgatcgtcgaaagctga

SEQ ID NO: 425508 - DNA, 732 bp, Serratia marcescens
atggctgatttgctgctgggcgtcaatatcgatcacatcgccacgttacgtaacgcgcgcggaacccaatacccggatccggttcaggcggcattcattgccgaacaggcgggggccgacggcattaccgtgcatctgcgcgaagaccgccgccacatcaccgaccgcgacgtgcgcctgctgcgccagaccatccagacgcgcatgaatctggagatggcggtgaccgacgagatgctggacatcgccattgagctgaagccgcatttctgctgcctggtgccggagaagcgcgaagaagtgaccaccgaaggcggcctggacgtcgccggccagctggacaaaatgagcgtggcggttgagcgcctggtgcaggcgggcattctggtctcgctgttcatcgatcccgatcatcgccagattgacgcggcggtggcggtgggcgcaccctatatcgagatccataccggcgcctacgccgaagcgcagggcgagctggcggtacaggccgagctgcgccgcatcgcggtagccgccgcctacgcggccgagaaagggctgaaggtcaacgccggccacggcctgacctaccataacgtgcagccgatcgccgcgctgccggagatgcacgagctgaacatcggccatgcgattatcggccaggcggtgatgagcgggctgccggccgcggttgccgacatgaaagtgctgatgcgggaagcgcgccggtaa

SEQ ID NO: 425509 - DNA, 732 bp, Serratia marcescens
gtggacggctgggagcgcgctttcgtcctgcatgggcggccgtacagtgaaaccagtctgatgctggatctgtttaccgaaggtcatgggcgggtgcgcttgctggcgaaaggcgcgcgcagccgccgctccaatctgaagggttgcctgcagccctttactcctctgttagtgcgctggggcggccgcggcgaagtgaaaacgctgcgcaacgccgaagcggtctccctcggtttacccctcagcggcatgatgctgtacagcggcctgtacgtgaacgaactgctggcgcgcgtgctcgagcaggaaaccaactactcggtgctgttcttcgattatctgcaatgcctgcaggcgctggcggcggaagacagctcgccggagcaggcgctgcgccagttcgagctggccttgctgcaccacctgggttacggcctcgatttcctgcactgcgccggcagcggcctgccggtggatgacgccatgacctatcgctatcgcgaagagaaaggctttatcgccagcctggtggtggatcactacagcttcaccgggcgcgaactgcgcgcgctggcggagcggcagtttcccgatgccgagacgctgcgcgccgccaagcgtttcacccgcatggcgctgaaaccctacctcggcggcaagccgttgaagagccgcgaactgttccgccagttcgtgcgcaaacagccgaatacgccggtcgacgacgcctga

SEQ ID NO: 425510 - DNA, 909 bp, Serratia marcescens
atgagcgaagtaaaacaacactgcgggtttatcgccatcgtcggccgcccgaacgtgggcaaatcgacgttgctgaaccaactgctggggcagaaggtttccattacgtcgcgtaagccgcagacgacccgtcaccgcattatgggcatcgacaccgatggcgcctatcaggcgatctacgtcgacaccccagggctgcacatcgaagaaaaacgcgccatcaaccgcttgatgaaccgcgcggccagcagctcgatcggcgacgttgaactggtgatcttcgtggtcgaaggcaccaactggaccgccgacgacgaaatggtggtcaacaagctgcgcagcctgcgctgcccggtattgctggcgatcaacaaggtcgataacgtcaccgacaaatccaagctgttgccgcacatcgcgttcctcagccagcagatgaacttcctcgacgtggtgcctatctccgccgaaaaaggcatgaacgtcgacaccatcgccggcatcgtgcgcaagctgctgccggaagcggagcaccacttcccggaagattacatcaccgatcgctcacagcgctttatggcctccgagatcatccgcgagaagctgatgcgtttcctgggcgaagagctgccgtactcggtgacggtagaaatcgaacagttcgtggccaacgatcgcggcggctacgatgtgcacggcctgatcctggttgagcgcgaaggccagaagaaaatggtcatcggcaacaaaggcgccaagatcaaaaccatcggcatcgaagcgcgccaggacatggaacagatgttcgacgccaaagtgcatctcgagctgtgggtgaaagtgaaatccggttgggcggacgacgaacgtgcgctgcgcagcctgggctatgttgacgatctgaagtaa

SEQ ID NO: 425511 - DNA, 681 bp, Serratia marcescens
atgaaccccatcgtaataaacaggctgcagcggaagctgggctacacttttcaacagcaggagcttttactgcaggctttgactcaccgcagcgccagcagtaaacacaatgaacgtcttgagtttctgggtgactcgattctgagctttgtcatcgccaatgcgctctatcaccgctttcctcgcgtcgacgagggcgatatgagccgcatgcgcgccacgctggtgcgcggcaacacgctggcggagatggcgcgcgagtttgacctgggcgaatgtctgcggcttgggccgggcgaattgaaaagtggtgggttccgccgcgagtcaatcctggcggatacggtggaggcattgatcggcggcgtgttcctggacagtgatatccagaccgtcgagcgtctgattttggactggtatcgcagccggttggacgaaatcagccccggtgataagcagaaagacccgaaaacccgtttgcaggagtttttgcaggggcgtcatctgccgttgccttcttatttggtagtgcaggttcgcggtgaagcgcacgaccaagagtttaccatccactgccaggtgagtggtttgagcgagcccgtggtgggcaccggctcgagccgccgtaaagccgagcaggcggcagcggaacaagcgctgaaaaagctggagcttgaatga

SEQ ID NO: 425512 - DNA, 978 bp, Serratia marcescens
atggcgaatatgtttgccctgatcctggcgttggccaccctggtcaccgggatcatctggtgcttcgagcgcttcaaatgggcgccggcccgccgcgcgaagatcgcggcggtcaacgcacagaccgcgggcgccgtagacgataaaacgctggcgaaagtggcgaagcagccaggctgggtggagaccggcgcatcggtgttcccggtgctgctgttggtctttgtggtgcgttcgtttatttacgaaccgttccagatcccgtccggctcaatgatgccgacgctgttgattggcgatttcattctggtggagaaatatgcctacggcattaaagatccgattacccagaccacgctcattgaaaccggccatccgaagcgcggcgatattgcggtatttaaatatccgctggatccgaaactggattatatcaagcgcgtgatcggcctgccgggcgaccgtattacttacgatccggtgaataagcgcgttaccgtgcagccgtcctgcaacagtgggcagtcctgcgataccgcgctggcggtgacctacgccgacgcgcagccgagcgacttcgtgcagctgttcagccgcagcggcatgggcgaggccagcaacggcttctaccagatcccgctgagcgataacgtgccgccgggcggcattcgcatgcgcgagcgccaggaaagcctcggcaacgtcacgcatcgtatcctgaccgtgccggacgcgcaggatcgggtgggcgcttactatcaacagccgggcaaaccgctggcggagtgggtggtgccggccgggcattatttcatgatgggcgacaaccgtgacaacagcgcggacagccgttactggggctttgtgccggagaagaatctggtgggtaaagccacggccatctggatgagctttgaaaagcaggaaggtgagtggcctaccggcgtgcgtttcagccggatcggcggcattcattaa

SEQ ID NO: 425513 - DNA, 1800 bp, Serratia marcescens
atgaagcatatacgaaatttctccattattgcccatattgaccacggtaagtcgacgctgtctgaccgcattatccaaatctgcggtggcttgtctgaccgtgaaatggccgcgcaggtgctcgattccatggatctggagcgcgagcgcggcatcaccatcaaagcgcagagcgtgacgctggattataaggcgctggatgggcagacctatcaactcaactttatcgacacccccggccacgttgacttctcctatgaagtttcccgctcgctggcggcctgcgaaggcgcgctgctggtggtggacgccggccagggcgtcgaagcccagacgctggccaactgctacaccgcgatcgaaatggatctggaagtggtgccggtgctgaacaaaatcgacctgccggccgccgatccggatcgcgccgcgcaggaaattgaagacatcgtcggcatcgacgccaccgatgcggtgcgctgctcggccaaaaccggcgtcggcgtgcccgacgtgctggagcgcctggtgcgcgacatcccgccgccgcagggcgatcccgatgcgccgctgcaggcgctgatcatcgactcctggttcgataactatctgggcgtcgtgtctctggtgcgcgtcaagaacggcacgctgcgcaagggcgacaagatcaaggtcatgagcaccggccaggtgtacaacgccgaccgcctgggcatcttcacgccgaagcaggtcgatcgcgacgtgctgaactgcggcgaagtgggctggctggtctgtgcgatcaaagacatcctcggcgcgccggtgggcgataccctgacgcaggcgcgtcagccggcggataaagcgctgccgggcttcaagaaagtgaagccgcaggtgtacgccggtctgttcccgatcagctccgacgattatgagtccttccgcgatgcgctgggcaagctgagcctcaacgacgcttccctgttctacgagccggaaagctccaccgcgctgggcttcggcttccgctgcggcttcctcggcctgctgcacatggagatcattcaggagcgtctggagcgtgaatacgatctggatctgatcaccaccgcgccgacggtcgtctacgaagtggaaaccaccggcaaagaagtgatctacgtcgacagcccgtccaagctgccgccgttgaacaacatccaggagctgcgcgagccgatcgccgaatgtcacatgctgatgccgcaggaatacctgggtaacgtcatcaccctgtgcgttgagaaacgcggcgtgcagaccaacatggtctaccacggcaaccaggtggcgttgacctatgaaatcccgatggcggaagtggtgctcgacttcttcgaccgcctgaagtccacgtcgcgcggctatgcgtcgctggattacaacttcaagcgcttccaggcttccgacatggtgcgcgtggacgtgctgatcaacaacgagcgcgtggatgcgctggcgctgatcactcaccgcgacaactcgcagtatcgcggccgtgagttggtggagaagatgaaagatctgatcccgcgtcagcagttcgacatcgcgattcaggcggcgatcggcacgcacatcatcgcgcgttccaccgtgaagcagctgcgtaaaaacgtgctggcgaaatgctacggcggtgacgtcagccgtaagaaaaagctgctgcagaaacagaaagacggtaagaaacgcatgaagcaggtcggcaacgtcgaactgccgcaggaagcgttcctggccattctgcacgtcggtaaagacggcaagtaa

SEQ ID NO: 425514 - DNA, 837 bp, Serratia marcescens
atgatcgataaagggcaaatgctgagccggcacgatttttcaaaggtcaactggggcattctggcggcggcggcgctgctgtttagcgcgggggcggcgctgttggtgctgccgctgctgagcagcattgatgagagcgaggtcatcacgctattgcaggccggcgcgggcacgattttactcggttgtacgctgctggcgctgcggcattatctgcgtccgacgctgacctatcgcctgtacgagcacggcgtgcgggtctttgacggccaccatcacaaagagcgcttcatcccgtttgagaagatcggcgatatctatcgctttcgcggcggccaggcttttggcgggctgtttgacgtcacggcgttccgcgccggcgtggatcagccctggtgtacggttttcagcaatgtcgcccattcgtggcggctggcagacgtgatcgtcgaccaacagctgcagcagcgcgggccgctggcgctgaatgcgctctatcaaggggagacggtgtcgtttcacaccgttgagggcgacgcgcgctggctgtggcaactgctgctcggcaagcggcaaggcacgccgaccgaaacgctgcggctgagcgccaccctgctgaccacggaacggggcaacgtgccgctcgagcagatccgcgcggtggaaaaccatccgcagcgcggcatccgtttgctcgacggccagggaaatgtgctgttcgcgattaactacgattcgctgctcagcgccgatctgttcatcgcgctgctggagcatatgatccacaaccgcatccccgcctatcacaacccggcgatgacgcggccgtcggtttaa

SEQ ID NO: 425515 - DNA, 477 bp, Serratia marcescens
atgatgaaagagtgggccacggtggtttcgtggcaacagggcgtagcgctgctgcgctgtgaacccaaggccggctgcggcagctgcaccgcgcgttccggctgcggcgcgcgcgcgctgaacgagctggtgccggaaaccgagcatcagctgcaggtgcatatcgatcagccgctcgaacctgggcagcgcgtcgaggtcggcattgcggaaggcagcctgctgcgctccgccatgctggtttacctgacgccgctgctgggcatgatgctgggcggcacgttgctgcaatattgtttcggcagcgacgcctcggcggccgtcggcgccgtactgggcggcgcggcggcctttatgctggcgcgtcggttggcccggcgtctgggcgagcaggccgattatcagccggtggtgctgcagattgggttgccgcctaccgcgatgcgcatgcaggcggaaaattccccgctgatttaa

SEQ ID NO: 425516 - DNA, 960 bp, Serratia marcescens
atgaagcaaatctggttctccgtttgtttattgacgggcagcctgctctattccagcatcgccccggcgcagccaactgcgtccggggcgttattgcaacagatgagcagcgccagccgttctctcaattacgagctcgcctacatcagcatcagcaagcagggaatcgagtcgttgcgctatcgccatgcggtgatcggcaatgtgccgctcggccagctgctgcatatggacggcccgcgccgcgaagtgttgcagcgcggcggcgggatcagctacttcgaacccggcctggagccgttcacgctcaccggcgatcacatcgtcgatgcgctgccggcgatcgtctatgccgatttcacccgcctggccaagtactacgactttatctccgtgggcagcacccgcatcgccgatcggccgtgtgaagtgctgcgcgtggtggcgcgcgacggttcccgctacagctatatcgtctggatggacgaggacaccaagctgccgctgcgggtggatctgctcgatcgcgacggcgaaacgctggagcaatatcgggtgatctccttcgcggtcggcgccgacgtgcagggcgcgatgcaggggctgctcaaagccaacctgccgccgctgctgtcgctcccggcggtggaaaacgtcaagctcagctggagcaccggctggctgccggccggggtggacgaggtggcgcgcaatcgccgcaaattgccgaacgtcgccgtgccggttgaatcccggctctacagcgacggcctgttcagcttctcggtcaacgtcagcccggcgggcagcggagccgggcagcaatactaccgtcaggggcgccgcaccattcagaccgaagtgcgcgcgggcaacgaaatcactatcgtgggcgaattgccgccggctacggccaagcgcatcgccgacagcatttctttcaaggtatcgccgcaatga

SEQ ID NO: 425517 - DNA, 654 bp, Serratia marcescens
atgcagaaagaaaagctttccgctctgatggatggtgaatcgttcgacagcgagctgttgagttctctgtcgcaagatcgaacgcttcaacaaagctggcagagctatcacctgatacgtgacacactgcgaggtgatgtcgggcaagtgatgcatctcgacatcgccgatcgcgtagccgctgcacttgagaaagaacccgcccggctggtgccttccgccgttcaggaatctcagccgcagcctcacacctggcagaaaatgccgttctgggacaaagtgcgtccctgggcgagccagattacgcaaatcggtatggcggcctgcgtgtcgctggcggtgatcgtcggcgtgcagcagtacaaccagccttctgcgccatcgaacgcgtccgaatcgccggccttcaccacgctgccgatcatgggccaggcctcgccggtcagcctgggcgtcccggccgacagtttctccaccggcagcggccaacagcagcaggtgcaggaacagcgcaagcgtatcaacgccatgctgcaggactatgaactgcaacgtcgcctgcattcggatcagctgcagcttgagcaaggcaacccgcaacaggccgccattcaggttcccggaactcagtctttaggaatgcaacagcagtaa

SEQ ID NO: 425518 - DNA, 636 bp, Serratia marcescens
atgtatggctggcagtacaattttacgcgtggagacggatttggggagagtttacctcggatgagcgagcagttaacggatcaagttctggtcgagcgggtccaaaagggcgatcagaaatcgtttaacctactggtagtgcgctatcagcataaggtggcgagtctcgtttcccgctatgtgccgcagggcgatgtgcccgatgtggtgcaggagtcgtttatcaaggcctatcgcgcactggaatcgttccgtggcgacagcgctttttatacctggttgtatcgaatcgccgtgaacacggcaaagaattatctggttgctcaggggcgccgtccgccatccagtgatgtggacgccaacgatgcggaaaattacgaaagtgcgggcgcactgaaagaaatttcgaaccctgagaacttaatgttgtcagaagagctgagacagatagttttccgtaccattgagtcgctccccgaggatcttcgcatggcgattaccctgcgggagttggatggtctaagctacgaagagatagccgccatcatggattgcccggtcggaaccgtacgttcgcgtattttccgcgcccgggaagctatcgataataaagttcaaccgctgatccagcgttag

SEQ ID NO: 425519 - DNA, 1638 bp, Serratia marcescens
atgaaattcactcttcttctgcacacatcatacgttatgcaaccatcatctgaacatgtaagcgatgtactgatcgtcggcagcggcgctgcgggcctgtcactggcgctgcgcctggcgcagcattgcaaggttaccgttctcagcaaggggccgctcagcgagggggccaccttttacgcccagggcgggatcgccgcggtgttcgatgagacggacagcattgcctcacacgttgatgacactttgattgccggcgccggcctgtgcgacaaagaggccgtcgaattcatcgccggcaacgcgcgccactgcgtgcagtggctgatcgatcagggcgtgctgttcgataccgaggtcaacgcgcagggcgaagagcattatcacctcacgcgcgaaggcggccacagccatcgccgcatcctgcacgccgcggacgcgaccggtaaggaagtagagaccacgctggtggggaaagcaagcgctcaccccaatatttgcgtgatggagcgccgcaacgcggttgaccttatcacctcgaacaaaatcggcctgccgggcacccgccgagtggtgggcgcgtacgtctggaaccgcgagttggagcgggtggaaacctaccgcgccaaaacggtggtgctggcgaccggcggcgcggccaaggtataccaatacaccaccaacccggacatctcctccggcgacggcatcgccatggcctggcgcgccggctgccgggtcgccaacctggagttcaaccagttccacccgacctgcctgttccatccgcaggcgcgcaacttcctgctaaccgaagcgctgcgcggcgaaggggcttacctgaagcgcccggacggcagccgctttatgccggatttcgacccgcgcggcgaactggccccacgcgatatcgtcgcccgcgccatcgaccatgaaatgaagcgcctgggcgccgactgcatgtacctggacatcagccacaagccggcggagttcatcacccagcacttcccgatgatccacgagaagctgctgacgctgggcttcgatctgacccggcagccgatcccgatcgtcccggcggctcactacacctgcggcggcgtgatggtcgatcagcacggccgcaccgatctcgacgggctgtacgccatcggcgaggtcagctataccggcctgcacggcgccaaccgcatggcgtcgaattcgctgctggagtgcctggtgtacggttggtcggcggcggaagacattctgcagcgcctgccgttcattcagcaggccaaacagctgccgcactgggatgaaagccgggtggacgatgcggacgaacgggtggtgattcagcataactggcacgagctgcggctgttcatgtgggattacgtcggcatcgtgcgcaccaccaagcggctggagcgcgccctgcgccgcatcaacaccctgcaggcggaaatcgacgagtactacgctcacttccgcatctccaacaacctgctggagctgcgcaatctggtgcaggtggcagagcttatcgtgcgcagcgccatggcgcgcaaagagagccgcggcctgcactacacgctggactacccggatttactgccggaagcgctgccgaccatattgcagccttaa

SEQ ID NO: 425520 - DNA, 780 bp, Serratia marcescens
atgctacgccagttttatagccaggtggtgagagtgagcaagcgttcgaaagccgattttaccccgcgccgcgggggttttacctttaaacaattctttgtcgcccacgatcgttgcgccatgaaagtgggcaccgacggggtgctgctcggcgcctgggcgccgctggggcaggcgcgccgggtgctggacattggcagcggcagcgggctgatcgcgctgatgctggcgcagcgcagcggcgacgaagtgaccattgacgcggtggagctggacgaagccgccgccggccaggcgcgcgaaaacgcggcggcatcgccgtggccgcagcgcatccgcgtgcatgcgcaggatattcaccattatgcgcagcggcatgccgctgagtatgatctgatcgtcagcaatccgccgtatttcgagccggcggtggcctgccgcgaccaggcgcgccacaacgcgcgctacaccgaaaccctgacgcacgaggcgctgttggcctgtgcggcacagctgctggcggcgcaggggacgttctgcgtggtgctgccgcacgatatcggcgccgaattcgaacgcctggcgcagcaaagcggctggcacacggcggcgaaagtgaacgtcagcgatcgggccgatacgccgctgcaccgggtgctgctggcgctgacgcggcgggaaacgccgctgcaggcgcaggcgctggcgatcaagcaggccgacggcagctacaccgacgatttccgccggttgatcgctgacttctacctgttctactga

SEQ ID NO: 425521 - DNA, 1323 bp, Serratia marcescens
atgacagcaaccactttttccgaactcgaactcgatgatcgcctgatcgacgcgctgcgcgacaaaggctacgatcgccccaccgccattcaggccgctgcgatcccgccggcgatggacgggcgcgacgtcttaggttcggctccgaccggcaccggcaaaaccgccgccttcctgctgcccgtgctgcagcacctgctggactttccacgcaaaaaatccggcccgccgcgcgtgctgatcctgacgccaacgcgtgaactggcgatgcaggtcgccgatcaggcgcgtgaattggctgctcatacctcgctggatatcgccaccatcaccggcggcgtcgcttacatgaaccacgcggaagtgttcagcgaaaaccaggacgtggtggtcgccaccaccggccgtttgctgcaatacattaaagaagagaacttcgactgccgcgcggtggaaaccctgatcctcgacgaagccgaccgcatgctcgacatgggcttcgcgcaggacatcgaaaccatctccgccgaaacccgctggcgcaaccagacgctgctgttctccgccacgctggaaggcgaagcgatccgcgaattcgccgagcgcatcctgaaagagccggtggaagtggaggccgatccgtcgcgccgcgaacgcaaaaagatcctgcagtggtactaccgcgccgatgacgtgcagcacaaaaccgcgctgctgatccacctgctgcagcagccggacgtgcagaaatcggtgatcttcgtgcgcaaacgcgagcgcgtgcacgagctggccacctggctgcgcgaagcgggcatcaacacctgctatctcgaaggcgaaatggtgcaggccaaacgcaacgaagcggttaaacgcatgatggatggccgggttaacgtgctggtggccaccgacgttgccgcgcgcggtctggatatcctcgatatcacccacgtgttcaacttcgacatgccgcgcacggcggacacctacttacaccgcatcggccgtaccggccgcgccgggcgcaaaggcaccgccatttcgctggtggaagcgcacgaccatctgctgctgggcaaagtgggccgttacctgaacgagccgctgaaagcgcgcgtgatcgacgaactgcggccaaaaaccaaggtgccgaatgagaagagcaacggcaagccgtcgaagaaagtgctggccaaacgcgcggaagataaagcgaagaacaaagaaaaggccaaggtaaaagtgcgccatcgcgacgccaaaaacgtcggcaaacgccgtcaggcgaaggccaaaccggccggcgacgcggaataa

SEQ ID NO: 425522 - DNA, 756 bp, Serratia marcescens
atgcctgaagggcgtcgcttgcggtgggcgctggcgatagccttactggcgctggtcgcggtgaccggtttactgatgatggctaaggagcaacagatggggcaggagatttcgccgtttgacggccacagcaatctggcgctggctcaggcggtggcgcgcggcgatacgcagggcatccgtgcgcaggccacgcaggatcgtttgcgcgagcggggcgatcggcaggtcacgctgttgcagtgggcggtgctttcgcagcagccggatagcgtgcaggtgttgctggatctcggcgccgacccggcggcggcggggctggacggcaacagcgcgctgcacaccgcggcgatgttgcaagacgcgcagtacctgcggttgctgctgaccgaaggagcaccggtgaacgtgcgcaatgccgttaccggcgccacgccgctcgcggcggcggtgctggccgggcgcgaagagcagctgcggctgttgctggcggccggggcggacaccaccttgagcgatcggctgggggataccccgctgcatctggcggcgaagattaacgcgccgcacttggcgctgctgttgttgcaggccggggccgatgcccgggcgcgcaaccagcagggctttgcgttccagttttatttctcgcaaacgccggcgcatttgcagaatgacgagctgaaggcgcagttccgcgaactggacaaatggctgcaggggcaccgcctggccacgcactacgcgcagccgtaa

SEQ ID NO: 425523 - DNA, 963 bp, Serratia marcescens
atgagtatgcctttaagttttacctctgcagtatccccggtggccgcgatccctacacctcgcgccgctgccgagacggcgacggcggcgctgcccgcggcaacgccggcaaatccggcgccggtggcctctccctctcagaacacgctcaatgcgcagaatctgttgaatacgctggtcggcgatatctcagcggcggcgccgacggcggcggcagcgccgggcgtgacgcgggggcagcaatcgcaggagggggattatgcgttggcgctgttggccaaggacgtttattcactcaatggccagggtgccgccgggttcaaccgcctgagcgacagcgcgctgctcggttttggcatcgatcccgccagcctgcacgacgcgggcagcggtttccaggccgggatttacagcaacgacaagcagtatgtgttggcgttcgccggtaccaacgactggcgcgactggctgagcaacgtgcggcaggcgacgggctatgacgatgtgcagtacaatcaggcggttgccgctgccaaaagcgccaaggcggccttcggcgatgcgctggtgatcgccggccattcgctcggcggtggtctggcggccacggcggcgctggcgactggcaccgtcgcggtcaccttcaacgcggccggagtgtcggattacaccctgaatcgcctgggcatcgatccgacggcggcgaagaaagatgccgaagccggcagcattcgccgctacagcgagcaatatgacatgctgaccagcacccaagaatcgacctcgctgatcccggatgccatcggccacaacatcaccctggccaacaacgataccctgaccggcatcgatgactggcggccgagcaagcatctggatcgcagcctgagggcgcacggcatcgacaaggtgataagctcgatggcggaacaaaagccgtgggaggcgaaggccaatgcctga

SEQ ID NO: 425524 - DNA, 384 bp, Serratia marcescens
atgattaccggtattcaaattaccaaagcgaacgaccaggcgctggtgaattctttctggctgctggacgatgaaaaagcggaagctcgctgcgtgtgcgccaaggccaactacgcggaagatcaggttgtcgcggtgagcgatctgggccagatcgaataccgtgaagtgccgctggaaatgcagccgaccgtgcgcgtggaaggcggccagcacctgaacgtcaacgtgctgcgtcgcgaaaccctggaagacgcggtcaagcacccggaaaaatacccgcagctgaccatccgcgtgtccggctatgcggtgcgcttcaactccctgacgccggaacagcagcgcgacgttatcgcccgcacctttaccgaaagcctgtaa

SEQ ID NO: 425525 - DNA, 684 bp, Serratia marcescens
atggccacctccctcacctggcatgacgtgatcggcaaagagaaagagcagccctattttgttgaaacgctcgcctttgttgccgctgaacgccaagccggtaagaccatttatccaccgcagaaggacgtgttcaacgctttccgctataccgagctggcggacgtcaaagtcgtcatcctcggccaggatccctaccacggccccaatcaggcgcacggcctctctttctcggtgcgccccggcgtgccggcgccgccgtcgctggtgaacatgtataaagagctggcgactgatattcccggtttcgaacgcccggatcatggctatctgcaaagctgggccgaacagggggtgctgctgctcaacaccgtgctgacggtggaaggcggccgcgcgcactcgcacgccaacctgggctgggaaacctttaccgataaagtgatcgccgccctgaacgagaaccgcgaaggcgtggtgttcctgctgtggggctcgcacgcgcagaagaaaggcaactttatcgaccgcaaccgccaccatgtgctgaaggcaccgcacccgtcgccgctctccgcccaccgcggcttcctcggctgccgccacttctcgcaggccaatcagctgctggagcaacaagggctcacgccgatcgactggatgccgcgcctgccgcaggcgtag

SEQ ID NO: 425526 - DNA, 585 bp, Serratia marcescens
atgagtagtaaagaacagaagacgccaaacgagcaagtctcggaagaaatggaacaacacgctcaccacgaggatacgctgccggaagcggcggaaggcgtcgatctgcgcgatgcgcgtatcgccgaactggaagcccaactggcggaagctcagcagcacgagcgcgacagcctgctgcgcgccaaagccgaagcggagaacatccgccgccgcgccgaactggacgtcgagaaagcgcacaagttcgccctggagaaattctccggcgatctgctgccggtgatcgacaacctggagcgcgcgctggatctggcggataaaaacaacccggaactggccgcgatgatcgaaggcatcgagctgacgctgaaatcgctgctggacgtggtgcgtaagtacggcatcgagatcgtcggcgacgtcaacgtgccgttcaacccggaagtgcatcaggcgatgagcatgatggaatccgccgatcatcagccgaaccacgtgatgatggtgatgcagaaaggctatacgctgaacggccgcctgctgcgccctgcgatggttgcggtctccaaagccaaggcgtaa

SEQ ID NO: 425527 - DNA, 879 bp, Serratia marcescens
atgaataaaaaattcgcctgtattggcattgttggccacccgcgtcacccttcagcgctggcaacccacgagatgctgttccactggctggtcgcccgcggctattcggtgatggtcgaacgccagatcgctcatgatttagggctgaaagacgccgtgaccggcagcctggcggatatcggccagcgcgccgacctggcggtggtggtcggcggcgatggcaatatgctcggcgccgcgcgcgtgctggcgcgctacgacatcaaggtgatcggggtcaaccgcggcaacctcggcttcctcaccgatctcgatcccgacaacgccctgcagcagctggcggacgtgctggaaggcgagtacatcgacgaacagcgtttcctgctggaaaccatcgtgcataaagagcaccagcagtgccgcatcagcaccgccatcaacgaagtggtgctgcaccccggcaaagtggcgcacatgatcgaattcgaggtgtacatcgacgatcgcttcgccttctcgcagcgctccgacggcctgatcatcgccacgccgaccggctccaccgcctactcgctctccgccggcgggccaatcctcaccccgtcgctggaggcaatcgcgctggtgccgatgttcccgcataccctctccgcccggccgctggtgatcaacggcgacagcaccatccgcctgaagttttcgcagatcggcagcgatctggagatcagctgcgacagccagatcgcgctgccgatccaggaaggcgaagaagtgctgatccgccgcagcgatttccacctgaacctgattcacccgaaggactacagctatttcaacacgttaagcaccaaactgggctggtcgaaaaaattgttctaa

SEQ ID NO: 425528 - DNA, 1662 bp, Serratia marcescens
atgctggcgcaattaaccatcagcaactttgctatcgttcgtgagttggaaatcgattttcaaccgggtatgacggcgatcaccggtgaaaccggcgccggcaaatccatcgccatcgatgcgctggggctgtgcctcggcaaccgcgccgacggcaacgtggtgcgcctgggagccgcccgcgccgacatctgcgcccgcttctcgctggcggacaccccgtccgcgcgcgaatggctggaacagaaccagctggacgacagcaacgaatgcctgctgcgccgggtgatcaatgccgacggccgttcgcgcggctttatcaacggcaccgccgtgccgctgtcgcagctgcgcgagctggggcaacgcctgattcaaatccatggccaacacgcccatcagctgctgctcaagccggagcaccaaaaatcgctgctcgacgcctacgccgacgaacccgccctgctggcggcgatgagccaggcctaccaacgctggcaccagagctgtcgcgagctggcgcaccatcagcagcagtccatcgagcgcgaagcgcgcaagcagctgctgcaataccaattgaaagagctgaacgaattcgcgccgcaggccggcgagttcgaacagatcgacgccgagtacaagcgcctggccaacagcggccagctgctgaccctcagccagcagacgctgcagctgctggccgacagcgacgagaacaacatgctcagccagctctacagcgccaagcacctgctgctcgagctggccgggctggacgataagctcagcggcctgctggacatgctggaagaggcttctatccagatcagcgaagccagcgacgagctgcgccactacgccgatcgcatggatctcgatcccaatcgcctgcacgagctggaacagcgcctgtcgcgccaaatcagcctggcgcgcaaacaccaggttgcaccggaagagctgccgcagctgcatcagcagttgctggatgagcagcagctgctttcacagcaggaaagcgaccatgaacacctgaacgaggcggtcaccctgcatcaccagcaggcgctggcgctggcggagcagctgcatcagaaacgcctgcattacgccaccgagctgaccacgctcatcaccgacagcatgcaggcgctctccatgccgcacggcaagttcaacatcgacgtgcgtttcgagccgcagcatctgagcgccgaaggggccagccgcaccgagttctacgtctccaccaacccggggcagccgctgcagccactggcgaaggtcgcctccggcggtgagctgtcacgcatcgcgctggcgattcaggtgatcaccgcccgcaagatggaaaccccggcgctgatcttcgatgaggtggacgtgggtatcagcggcccgaccgccgccatcgtcggccgcctgctgcgccagctcggcgaatccacccaggtgatgtgcgtgacccacctgccgcaggtggccggatgcgggcatcaacacctgttcgtcagcaagcagaccgacggcacggtcaccgaaacccagatggcgccgctggataaacgcgcccggctgcaggagctggcgcgcctgctcggcggcagtgaagtcacccgcaatacgttggcgaacgccaaagaattgctggcggcataa

SEQ ID NO: 425529 - DNA, 339 bp, Serratia marcescens
atgcgctgtaaaacgctgactgccgccgctgtagttcttgtgatgctgactgcaggctgttctacttttgaaaaggtggtttatcgtcctgacatcaaccaggggaactacctgacgtcgaccgacgtggcgaaaattcagaaagggatgacccagcaacaggtcgcttacacgttgggcaccccaatgctgcaagacccgttcgggactcagacgtggttctatgtgttccgtcagcaacctggccatgaagacatcacccagcagacgctgacgctgaccttcgacagcgcaggcgtgttgaccgacatccagaacaaaccggcgctgaccaagtaa

SEQ ID NO: 425530 - DNA, 285 bp, Serratia marcescens
gtgtctgacatccaggtcgaggtggtgtacgccttgccggagcgccagtacctgcgcaaggtgaagctggccgagggcagcagcgtcgagcaagcgatccaggcttcgggcctgctggagctgcgccaggatatcgatctcaagagcaacaaaatcggcatctacagccgcccggccaagctgggcgatacgctgaacgacggcgaccgggtggagatctaccggccgctgatagccgatccgaaagagctgcgccggcaacgggcagaaaaggcaaaaaaataa

SEQ ID NO: 425531 - DNA, 435 bp, Serratia marcescens
atgccccagatcagtcggtctgcattagtgccgttcagcgccgagcagatgtatcagttggttaacgatgttcattcttatcccgattttctgccaggttgcaccggcagccgggtgcttaacgctacctccaacgaaatgaccgccgcggtggacgtcgccaaggccggtatcagcaagaccttcaccacgcgcaatacgctgttggataaccagagcatcaatatgcagctggtcgatggcccgttccgcaagctgatgggcggttggcagttcacgccgctgagcgaagaggcctgcaaggtggagctgcacttggacttcgagttcaccaacaaactgattgagctggcgttcggcaaggtgttcaaagagctggcgggcaacatggtgcaggcattcacccagcgggcgaaagaggtctacagtgtctga

SEQ ID NO: 425532 - DNA, 483 bp, Serratia marcescens
atgacaaagaaaaaagcacacaaacccggttccgccaccattgctcaaaacaagcgcgcgcgtttcgaatacttcattgaagaagagttcgaggcgggcctgtcgctgcaagggtgggaagttaaatcgctgcgtgcaggcaaagccaacctcagcgacagctacgtgacgttccgtgacggtgaagcctatctgtttggcgccaccatcaccccgctcaacgtggcttcgtcgcatgtggtgtgcgatccgacgcgtacccgtaaactgctgctgaaccgacgcgagctagataccctgctcggccgcgtcaaccgcgatggctacaccgtggtggccttgtccctgtattggaaaaatgcctggagcaagatcaagatcggcgtagccaaaggcaagaaagagcacgacaaacgcgatgacatcaaagatcgcgaatggcagacggcgaaagcccgtatcatgaagcacgccaatcgttaa

SEQ ID NO: 425533 - DNA, 135 bp, Serratia marcescens
atgaagaagcgtttttccgacgaacaaatcatcagtattctccgcgaggccgagcagcactgtcttcatcccatcgtactcctatgttttgtcatcatttctgattacttagtgaacacgccccttgaactgtaa

SEQ ID NO: 425534 - DNA, 717 bp, Serratia marcescens
atgagtggaaccccacataacaacaaagtaacctatgatggcttcaactgtaacggaggtaagccgcccgaagccaataccagttggagtcatgtaaccaatgcatgggaatggaacgacctcaaattaaaccccggctcgatatctgactggtttcctgaagaagtgaaagaagcactggaaaataatatctgcatcatttgtggggaaaagaattgtccctatatcaaaaatagcagagactaccaaaatctcattaactctctgaaaagtgggaacgtggaagaagctaaaaaagtctatagaacaaagtttgcaccacttcggagaataaacaaagctgaagtgatgaaaggactgcaaaaagcccgcgacgcaagaaataacggcgtttgtaccgtgccttacatcggtccaattcaacacaaacgcgtcattgctgcgcctggtgtgtggagtgagtggattgagttattaaactcctttgctaacgaaaattcccctaacgtctataccgtcaattttaatccttcatcgaatatggagtcatcttttgatgtggagataaaatacccggaacatagtggaatgaaaaccattaacacaatgggaccaggatcatacacaataaaagccacaggaatcggaaatacttacatcagggtaaagtcacattcaaaccctgtaactgtcacctttgaatttccagagaaatag

SEQ ID NO: 425535 - DNA, 1662 bp, Serratia marcescens
atgtcttccataaccaaaactccacctgccgcatcgccgcgtggcgcgatgctgaacctgatcagacggctgcatttttatatcggcctgctggtcgctccttttattctggtcgctgcactgaccggcacgctgtatgtgttgacgccgcagcttgaagaggcgctgtatcgcgatgcgcttttcaccgaaccgcacggacaggcgagatcgctggctgaccagatcgccgccgcccgccgtgcggcgggtgacgagacgcgcatttacgccgtgcgcccggcacccggcgcaatggacaccacgcgcgtacagttcgcgagtgccgatctgggcgcttccgagtcgcgcgcgctgtttgtcgacccttacactctggcgatcaagggcgatatgacggtgtacggcacctccggcgtgctgccgctgcgcacctggctggataagttgcacagcagcctgctgctcggcgatctggggcgcaactacagcgagctggcggcctcctggctgtgggtggctgcgctgggcggcgtggcgctgtggctggcgacgcggccgaagcgcaagctgaaaaaggcgaaagggggcttcgccgccagccgccattggcatatcacgctgggtgtggcgctgctggccgggctgctgttcttctcggctaccgggctgacctggtcgcagtgggccggcggcaacatcgacgcgctgcgggccaacctgggctggctgacgccgcaggtcaacaccagcctgcaggccgatacgccgcagacgccggccgatccgcacgccgagcaccgcgggatgatggcgggcatgaagatggccccagccgcgcagagcaatgcgctgaacggcgactgggatcgggcgctgtacgccgcgcgcgccgctggaatagacgccgccaaggtcgagctgcgccagccgaaaggcgagggcaaagcctggacggtgaccgaagtggatcgcagctggccgacgcaggtggacgcggttgccatcgcgccgcaaagcttcgccgtcgtcgaccagctgcggttcgacactttcccgctgatcgccaagctgacccgctggggcatcgacgcccacatgggcattctgttcggcttgccgaatcagctgctgctggcggcgttcggccttgggctgtgcttgatgatcgcgctgggttaccgcatgtggtggatccgccgcccggcggcgggggcgcagcatccggtgcatacgctggtcgccgcctggctggcgctttccctaccggcgcgcgccggcacgctgctggtggcagcggcgctgggttattgcctgccggtgatgggcgtgagcctcgcggcgttgctgctggcggacgtgtggcgctggcgcggccaacggcaaagccaccgggacgaaacgccggaagcggccgccagacgcgccgaggtgcgtaagttccgcgcggcggtggcgacggtggctgtggcggtcggctgcgtgatgggccgagcgatcctcggcggcaccgtcgagcaattccagctgccgatcggcacctggagcgcccagatggtgatcatgcagagcctgatggtgctgctgtatacgctggtgttcaccctgctgctttccattccgctgtggtatttctttctgggggagaaagaggggcggtga

SEQ ID NO: 425536 - DNA, 366 bp, Serratia marcescens
atggcggtgctgttgctgtttgtggcgccggtggtgtcgaaatcgctgatgcaccaccagatgatgggcggcatggcgcagacggacgccgctatgccgcacaacatgcacgcgatgacgatgcccgccgccgagcatgccggccaccacggcatggatcctgcggaaatgattttctgcggttattgcgagctgctgatccacgtgccgctgctgctgtggacattcgtcccgctgctgtggctgatggcgcgcatcgcgcgcctgcctagcgcgccgcgcatcgtttctccgccccttcggcgccttgttctgcggccgagcccgcgcgggccgcccggccaaccgtttttccctattgcttga

SEQ ID NO: 425537 - DNA, 453 bp, Serratia marcescens
atggacatgatttcggtgcggcaagcgcccgagctggcgccgcgcgccattgcgtattttcagcggcactgggccacggcagagacgctgatgatgtatgaagacgccatcaaccgcagcctcggcgccgccaacccgctgccgcagtggtacctgctgatggaaaatgaccaaatcctcggctgcgcggggcttatcaccaacgactttatcagccgtggggagttgtatccctggctgtgtgcgctctatgtagaggaagcgcagcgcggccggggccacggcgccaaactgattgagcatgtggcggcggaaacccgccgactgggcttcccgcagctgcacctgtgcaccgatctggaggggtattacgagcgcagcggcttcgtttacaacgggctcgggtatcacccctggggcgaagcctcgcgggtctattcgcgggcgttgtga

SEQ ID NO: 425538 - DNA, 735 bp, Serratia marcescens
atgacgcaaaacatctatgacaatcaggcctttttcgacggctatgcgcagctcagccgctcgcagcacggcctggacggcgcgccggaatggcccgccatccgccgcatcctgccggatttgcagggcaaaagcgtggtcgatctcggctgcggctacggctggttttgccgcagcgcgcgcgaacagggcgcagccagcgtgctggggctggacgtctcggaaaaaatgctggcaaaagcgcgggagatgaccgccgacgcgggcatcgcgtatcgtcggcaggatttggcgcagctgcagctgccgccggaaagttacgatctggtctacagctcgctgacgctgcactacctcgaggatctggccgcgctgttcgccacggtttacgccgcgctgaaacccggcgggcagttcatcttcaccgccgagcacccgatctacaccgccccggcgcagcagggctggctgaccgacggcaacggacagaagtcctggccggtgaacggctaccagcgagaaggccagcgcgtttccaactggctggcggaaggtgtcatcaagcagcaccgcacgctcggcggctatatcaacccgctggcgcagcaaggctttatcatccagcatttgaacgaatggggccccagcgcgcagcaaattgccgctaatccggcgctggacgaagagcaggagcgcccgatgatcttcattctcgccgcccgcaaacccgcctga

SEQ ID NO: 425539 - DNA, 498 bp, Serratia marcescens
atgaccattgagatttacccggcgcaaaaaagcgacgccaaactgattctggatatgattatcgagctggcggtgtacgaaaaggcgcgcgagcaggtgctggctggcgtggaagatatcgaacgcagcctgtttgggccgggcgcctgttccgaagcgctgatttgtacggtgaacggcgagccggcgggttatgcggtgttctttatgagttactccacctggctgggtaaaaacggcatctatctggaagacctgtacgtggcgccgaagcatcgcggcgcgggcgccggtaaaaagctgctgcggcacatcgcccagctggcgtgcgaacggcagtgcggccgcctggagtggagcgtgctggactggaaccaaccggccatcgatttctacctcagcatcggcgcgcagccgcagggcgagtgggtgcgctatcgtatggaaggcgaggcgctgacgcacttcgcggcgcacggggcggcgctgccggcataa

SEQ ID NO: 425540 - DNA, 918 bp, Serratia marcescens
atgcatctggatttgaagcgcctcgatctcaacctgctgctggtgttcgaagcggtgtatcggctgcgatcggtgacgcgcgccgcggcggagctggccctcagcgcatcggcgctgagccacgcgctgatccggctgcgcaaggcgctggcggacgagctgttctaccgggtcggcaacgacatgcacccgacggtgtatgccgacagcctggccccgaccgtcagcgaaagtctggcgctgctggccaaagggctgcatccgcgcccgcgcttcgttcccgccgaaagccgggagagcttcaccttcgccattaccgattacaccgccttcgcggtatttcccgcgctgatggcgcagatgcagcgcctggcgccggggctgtcgttccagctgcgctattccgagcgcaaagtggcgctgaacgatctgctggcggggcgcatcgacttcgcgctgggctttaccgaaaccgacggcgaaagctacccggagatcgacgaggtgagctggctggaggatgagtatgtggcgatttgttcacccgccttcagcgtcaaatacggcgaactgacgctggaaaactacctgcgggcgcgccatctggtggtgacgccgtggaacgaacagcgcggcgtcattgactatcagctcgataagctggggctgcagcgcgatatcgccatccgcacgccttcgctgctgggagcgccgttcatcgtcgccgacagcgaactggtgatgagcatgccgcgctacgccgcgcaaaaattgcggcaggcggcggcgctggatatccaccccctgccgtttccggtgccgccgtatcagatcaaaatctacctgcaccgcaaaaacggccggccggaggcctgccgctggttgcggcaacagctgcaggcgctggcggcgctataa

SEQ ID NO: 425541 - DNA, 516 bp, Serratia marcescens
atgccgggattattgatgttttatgtgggcggtacggcgccgggcgccaatattgagctgcacgacgtgcagttcgcggcggcggatcggccggaagaggcgtatccgctgctgcgtgaaaagtggttcggcgataagcgcaaggtgcatgtcgacggctatgcgcgcatcgactgggcggacggttacgacgtgagcctggagcctgcgccgttcgccggtgaagagaagctgtttttcgtcaacgtgggcggctaccgcagcgatgagctggcggaattgcaccagttcggcctgtttgtggcgcgttccgccgacgaggcgaaggacaaagccaaacgggtgctgctgacggacagcgcgcagcagcacaaggatgacctggccgaggtggacgactgcctgctgctgcaggcgctgcagggctaccacgtgcatctgcgggccaacccgcacggcaaaccggcccggccgctgtggcaggggtatctgccgatcggcgaacccgcgttatag

SEQ ID NO: 425542 - DNA, 183 bp, Serratia marcescens
atggcattcaatatcggtgattttgttcaacgcaccaccggcggcccaaagatgaccgtggtggcgatcgacggcgaaaccctggtttgcagctggaatgaactgggcaaagagcagcgcacggaggtgcaggccggcgacgtggcgttgtaccacgaagacggcgatttcggcgtctgctga

SEQ ID NO: 425543 - DNA, 279 bp, Serratia marcescens
atggatcataaaatactggcggacgagaagcgtttttatatcaatgacgaacaaggcaagctgatcgccgagatctctttcgtgccgagcggcgacaagctgaccattatcgatcacacctgggtggatgagtcattgaaggggcagggcgtcggtaaaaagctggtggcgctggtggtggagaaaatgcgcgcggagcagcgtaaaatcattccgctgtgcccgttcgccaaacacgagttcgataccacgccggcctatcaggacattcgcgcctga

SEQ ID NO: 425544 - DNA, 231 bp, Serratia marcescens
atggacgaggaattgaccgccgccggttaccgccgttattccggcgataagattgacgtttattttaaccgtgcagtttgccgccattccgccaactgcgtgcgtggcaacgcggctatttttaccttgaatcgccgcccgtggattatgccgggcaatgccgagccggccgaagtgaaacgcgttatcgacacctgccccagcggcgcactgaaatatagggagaaataa

SEQ ID NO: 425545 - DNA, 414 bp, Serratia marcescens
atgggtgatagctcaaaagacggcgtcattctgctgtcccgcatattactgatgattctgtttatcattttcggctggatgaaattggtcaacttcggtgcgaccgtcacggcgatggaaggctatggcacgccgatgccttatttggcggcgatcgttgccgtgctggtggagtttattttcggcatcgcgcttattctcggtctgtttactcgccctatcgcggtcattttcgccctgtatgtgttgggcaccgcgtttatcggccatccgttctggaaaatgaccggcatggaaatgatgggcaacgaaatcaacttctttaaaaacatcagcatcattggcggcttgctgttgctggcggtaaccggcgccggccgttattcgctggactataaaatatttaataaataa

SEQ ID NO: 425546 - DNA, 573 bp, Serratia marcescens
atgagcgagcaggaaaaagacttttttgaacaggcgatggcggacgtggtgccgctggcgagcgggcggcagacgctgtacctcaagccgcaggagacggtagacaaaagcgcgcggcgcgaagcgcagcggctgcggcaggaaaacttcctcagcaccgatttcctcgaggtgatcccctgtgaacagccgctggagttcaaaggggaaggcattcagcagggcgtgctggacaagctgcgcaacgggcgttacccgccgcaggcttcgctgaacctgttgcgtcagtcggtcgaagccagccggcaggcgctgtttcgcttcatcttgcaggcggaggcgcaaaacctgcgttcgctgctgatcgtgcacggccgcgggcggcagaacgaaagccatccgaatatcgtgcgcagttacgtcgccaaatggctggcgcagtttgaacaggtacaggcgttttgccgcgccttaccgcgcgacggtggcgagggcgcctgctatgtcacgctgcgtaaatcggtgcaggccagggcggaaaactttgagcgccacgccaagcgcagccgttga

SEQ ID NO: 425547 - DNA, 336 bp, Serratia marcescens
atgacaatgcgcgagctggaaatccagtttcaaaatgcgatgaatgagttgcagagcagcttcgaacggcaacaccgcgaatggcagcagagctaccaggcgctgcagcaactgctggaagaagccaaacagcgcgaagccgcgctgcgggcgcagaatgaacaactggcgcgcaaactgagcaccgccagttcggtgccggagcagcatgcgctggtgaagcagatcaaaatgctcggcgcccatctggatgcgctggccaaagacgcggccaccttcaatcaccacctgcgccaacagggcgcggtcggtaatttcagcggcgaacagcattga

SEQ ID NO: 425548 - DNA, 447 bp, Serratia marcescens
atgacctggatcatcctcgccgccctgatcgtcgtatttatcatcggttaccgcatcctgacgtccgacacccgcaaagccatcgattcgctggcccatctgctgagggtcaagccgatgctgattgaatcgatgatccaggagatgggcagccgccaaagccagacctttatccgcatgctgaacaacggctacaccgaagagatgcaccaggcggcttatctgctgttcatctacctgacgttcatcaaacaggcggacgacgagcagattgccctatggcgcgacgtgctgctgcgcgccggcctgtcgccggagctgcacgccgagcacaccgaagcggcgctgttttacttcgccgagctggatatcgatgcgtttgaactggcgcagttccgccgcgcctacaatgagcgtttcaaccgcgaagcgttggcccacggctga

SEQ ID NO: 425549 - DNA, 339 bp, Serratia marcescens
atgtatttacggccggatgaagtggctaaagtgttggagaataccggctttgagcgtgattatgtcaccgaccaggcctatggctaccgcaagggtacacactacgtgtatgtgaatcgcgaagcgcggatgggcagaaccgcattggtgatccacccggcgctgaaagagagaagcgtgcatttcgccacgccgacctctccggtgcgcaccagcgagcagtatctggagtttcccctggatttaagcagcgacgccccgaaccagcgttacggcatcgcacacggcttcagctcgcgcgaagcgctgtcgcgctacctctacagcatgttcctgtaa

SEQ ID NO: 425550 - DNA, 1182 bp, Serratia marcescens
atgaccgcagaaaataacctccagctgaaccgacgcattctgtccgtggtgatgttcaccttcgtctgctacctgaccatcggcctgccgctggcggtgctgccgggatttgtgcatgaccacctgggttacaattcggtgctggcgggcctcatcattagcgcgcagtacttcgccacgctgttcagccgcccgcacgccgggcgctatgccgatcagctggggccgaaaaaggtggtgttgttcggcctggcgtgctgcggcgccagcggcctgttttatgcgctggcgttcggcgttgacggttacccgtggctcagcctgctgttgctgtgcgtggggcgggtgtttctcggcgtcggtgaaagcttcgccagcaccggttccacgctgtggggcatcggccgggtcggagcgatgcacaccgcgcgggtgatttcctggaacggcgtcgccacctacggggcgatggcggccggggcgccgctcggcgtgtacctgaatcagcagtggggattggccggggtggcggcgctgatcgtgctggcggtcgcggtggcgctgctgttggcgagcggcaagccggacgtttcgatcgccgccgggcagcgcatcgctttccgcgcggtgttcggccgcatctgggcctatggcctcgggctggcgatgggcaccgtcggctttggcgtgatcgccacgttcatcaccctttactacgccgacaaaggttggagcggcgcggcgttttcgctgacgctgttcagctgcgccttcgtcggcatccgcctgatcttcagcaacgtcatcaaccgccacggcggtctgaaggtgacgctggcgtcgtttctggtcgagatcgtcgggttgctgttgatctggcaggccggcgaaccctggatggtgcaaaccggcgcgttgctggccggcgccggtttctcgctggtgttcccggcgctgggcgtcgaggcggtgaaacaggtgccgccgcagaaccagggcacggcgctcggcacctattcggcattcctcgatctggcgctgggcatcaccgggccgctggccgggctgctgattgggcaagcgggcgtgccgtcgatctatctggcggcggcgctgctggtggcgctcggggtgctgctcaccctgcgtctgctgcagcgcagccgagccattcaggaatag

SEQ ID NO: 425551 - DNA, 897 bp, Serratia marcescens
atgctgaatttgcagcgcctggcgatcttcgctgcggtagtggaagcgggcagctttaccgcggcggcggcggcgctggggcaaaccaaggcggtggtgagctttaacgtcaagcagctggagaacgagttgggggtgtcactgctggcgcgcagcacccggcggctgtcgctgaccgacgccggcgagcgcttttaccagcgcagcctgcagctgctgcaggaggcggaaaacgtgctggacgacgtgcgccgcgatcaccacgggctgagcggcgtgctgcgcatcaccagtacgccggagtacggcgcgcaggtggtggtgccggcgctggcggcgttttcgcggcagcatccgcggctgcgcatccagcatgtgtcttcttcttatcacgccgatctgatctcggagcgctttgacgtggcgatccgcctgggccagctggcggattccagccaccgcgcggcgctgatcgacagtttcgccatttttccggtggcgtcgccgggttacctggccgagcgaccgattcattcgctgaccgagctggcgcaggcgcagtggatcgcccatagccggctcagttcgccgctcagctggcaggtggccacgccgcagcgcgaagcggtgctgttcaaggtggcggacgctgcgacgctcaccggcgacagcgccgcggcattgctggcattcgccctgcatggcgccggggtggcgctgctgccggcgtggctggcgcagcccgaaatcgacgccggccggctgcagcggttgctgccggatcaccgtttccccgagcagagcatctacgcgctctacccgaatacccgccacgtgccggaaaaggtgcgggcgtttatcgattttctgcgcgcgcgggtggcggccaaccgttag

SEQ ID NO: 425552 - DNA, 1386 bp, Serratia marcescens
atgtcttatcgcagcaaagtggcaatcgtctatctgctcggctttttcgtcgatctgatcaatatgtttatcgccaacgtcgcctaccccgccatcggccaggcgatgcgggcgtcggtcagccaactggcgtgggtcagcaacggctatattctcggcctgacgctggtgatcccgctcagcgcctggctggcgcagcgcatcggtgggcggcgggtgttcctgctgtcgctggcgctgttcatgctggccaccttcggcgccggcaacgccgacagcatcggcgcgctgatcggctggcgcaccctgcagggcatgggcggcggcttgctgatccccatcggccaaacgctgacctatcagctgtaccgcagccatgaacgcgccgggctgtcggcggccatcatgttggttgggttgctggcgccggcgctgtcaccggcgctgggcggctggctcgtcgatcggctggactggcgctgggtgtttttcgccaacctgccgctggcggccctggccctggcgctggcggcgctgtggctgcgcgcggaaacgtcggcgacagcggtacgtaaaccgctcgacggcaaagggctgctgagcgcctgcgcggcgttgacgctgctgctgctcggcctgacccggctgagcgaggccggccatcaggcttccggcgcggcgctgctggccgccggcctgctggtgctggcgtactatctgcgccatagcctgcgcaccccgcaaccgttgctgaacctgcggctggtcggcgatccgctgctgcgcaacgccatgggggtttatttgtgcattcccggcctgttcatcggcgtcagcctggtggcgatgctgtatctgcaaaaccagctggggatgcccgccgcccaggtcggcggcctgatgctgccctgggcgctggcgtcgttcctggccatcacgctgaccggcaaaacctttaaccgcctcggcccacggccgctgctgatcgccggctgcctgttgcaaggcgccggcatgctgacgctggcgcagatcgaccaggccgggcaacacgcgtggcagatcgccgccttcgccctgatgggatttggcggcagcctgtgcagcagcaccgcgcagagcagcgcgttcctgcagatccccgacgctcagctggcggacgccagcgcgctgtggaacatcaatcgccagctcagtttttgcctcggcgtggcgctgctcagcctgctgctgaatctgctgctgaccgggctgccgcccgcggcggcctaccgaacctgcttcattctggcgggcgccagcgtatttatcccgctgctgctgtgcctgcgcctcgccaaccgcgccatcgtgcgccaactcaacgctcaacaggatgctttatga

SEQ ID NO: 425553 - DNA, 381 bp, Serratia marcescens
atgaacccgtattttaccgaagtgatcgacgcccacatcgccattgaacgctggctgggcaaaggggctggagaagagcaggcgctgctggcgcgctttacgccggatttcagcatgatcgcgctgagcggcgctccgctggattttgccgcgctgtgcgcctttttccgcgcgcatcgcgccgccaaaccgggattggaaatcgagatagaagagatgaagctggtggccgaatggccgacgggcgcggtagtcagctaccgggaaaagcagagcctgccggggcaaagcgccacgctgcgctattccacggtggtctttgaacgtcagcccaacgcgctcggctggcggcatttgcacgaaaccgccgcggcgcaataa

SEQ ID NO: 425554 - DNA, 309 bp, Serratia marcescens
atgtttaagaaagcggaaagaacagaacgcgatatcgatcaggacgtcactctgttggccgatacgctggatgaagtgttgcgcgagtccggtgacaagaccaaagaggaactgaaagagctgcacagcaaggcgaaaggcgtgctgcgcgacgcgcgagcgcggttcaatggctccaccagtctgacacagcatgcgcgcgatgcggttgatcaagccgatagctatgtgcgtgacaaaccttggcagggcgtagggatcggtgccgccgtcggcatcgtgctcggcgtgctgctggcccggcgttaa

SEQ ID NO: 425555 - DNA, 1431 bp, Serratia marcescens
atgccatctttcctgacttcgctgcggctggacagtcggctcgccgaaccgctgtaccggcagatttacctgcggattaaaggcgccatcgcccagggcagcctggcggcgggcagccggttgccctcggtgcgcgggttggcgagcgatctgggcgtggcgcgcgccacggtggaaagcgcctacgcgcaacttattgccgaaggtttcttgcagagccgcgggcaggcgggcacctatgtttcaccgcagctgccgtacgtgccgccgggcgcggtatccgccgcgccgccgctggcggcgatagcgccggatccgctgcagccgcagggcatgctgcagcctttccagctgggcgtgccggcgctggatgcgtttccgcgggcgctgtggcaacgcattgtcgcccgccggctgcgcgcttccacggtggcttccctggcgctgccgccggccggcggcctgcctgagctgcgtgaggcgatcgcccattatctgcatttgtcgcgcggcatcagctgccggccggagcaggttttcctctgcgccggttatccggcgttgttggattgggtggtggagacgctgttgcacgccggcgacgcggtatggatcgaagatcccggctatccggttacgcgcccgctgttgcgggccgccggcgtcaggccgctcgccgtgccggtggatgaacaaggcatggacgtggccgccggtatgctgacggcgcctgaggcgcggctggcggtggtgacgccgacccatcaaagcccgctcggcgtctcgctcagcctggcgcggcgcatggcgctgctcgactgggcgcagcagcgcggggcctggatcctggaagatgactacgacagcgagtttcgctatcacgggcggccactgccgccgctgaaaagcctcgatgttcaggggcgggtgctgtacgccggcaccttcagcaaaacgctgttcccggcgctgcgcatggcttatctggtggtgcccgtcggtctgacggagacattcgcgtgcagcagtcggctgcgtggctgcggttgcccgccgctgctgcaggccggcgtggcggattttatccggcaagggcatttctaccgccatctgaaacgcatgcggccgctgtaccgccagcggcgcgagtggctgacgcaggcgttggagcggcagctgggggcgtggctgagggtggtgccgcagcagggtggcattcagctattggcccggctacgtgacggggtggcggatacgccgttggcggcgcaagcctggcaactggggttggcggcgcaggcgttgtcggactggcgaatcgatcatcctgcggggcaggggttactgctggggtttgccaatttcactcggcaagaggagacggaacgggcggtgcaggggctggcgcagctgttcaaacgcctaaattaa

SEQ ID NO: 425556 - DNA, 432 bp, Serratia marcescens
atgattaagcaacgtttgaactatgccgaattggcgcccgccccgtacaaaaatatggtgagcgcgctgatggcgctggagaaaggcgccctggacaaggcgaccatcgagttgatgtttatgcgcgtttcgcagatcaacggctgcgcctactgcctggatatgcacggcaaagcgctgcgcgaaagcggcttcagccatgccaagctggatacgctggcaggctggcgcgtcagccatgagttcaacgagcgcgagcgcgccgcgctggaatgggccgagtcggtgacgctgatcgccgccaccggcgcgccggacagcgctttcgaggcgctgaaggcgcacttcagcgatgctgagatcgccgatctgaccttcgccatcagcatcatgaacgccttcaaccggctggccgtcagcatgcgccagtaa

SEQ ID NO: 425557 - DNA, 231 bp, Serratia marcescens
atgagcattattatttacagtaagccggactgtgtccagtgcaacgccacctatcgcgcatttgataaacaggggattgattatcaggtggtcgatctcacccaggatcagcaggcgctgaaccacgttaaatccttaggttatcagcaagttccggtaattatcgccggagacgatcactggtccggtttccggccggacaagatcggcgcgctggcgctcacctgctga

SEQ ID NO: 425558 - DNA, 405 bp, Serratia marcescens
atgaatccgctggtttatttctccagcaactcggagaacacccatcggttcgttgagaaactgggcctgccggcgatccgcattccgatcgccggtgcccgcagcaaattgctgatggaacacccctttatcttgatcgtacccagctatggcggcggcagcgccgtcggcgcggtgccgatccaggtgatccgctttctcaacgttccgcaaaaccgttcatacctgcgcggcgtcatcgccgccgggaacaccaacttcggcgcggcgtacggcatcgccggcgacatcatcgccaaaaaatgccaggtgccttttttataccgctttgagctgctcggcactacgcaagacgttgaaaacgttagacagggagtaaccgcattttggcaacgacagaactga

SEQ ID NO: 425559 - DNA, 2145 bp, Serratia marcescens
ttggcaacgacagaactgaccaggcccgaaacgggcgcgctggattaccattcgctcaacgcgatgctcaatctttacgatgcggaaggccggatccagttcgataaagatcggctggcggcgcggcactacttcctgcagcacgtcaaccaaaacaccgtgttcttccacaacctggaggaaaagctgcgctatctggtggaggaaggctactacgagccgcaggtgctggcgcagtacgaattcccgtttatcaagcagctgtttcagcaggcctacgccaaaaaattccgcttcgagaccttcctcggcgccttcaagtactacaccagctatacgctcaaaaccttcgacggcaagcgctatctggaacgctacgaagaccgggtgtgcatggtggcgctgacgctggcggcgggcgacaccgccctggcgcaggatctggtggaggagatgatttcgggccgcttccagccggccacgccgaccttcctcaactgcggcaaacgccagcgcggtgagctggtctcctgcttcctgctgcgcatcgaagacaatatggaatcgatcggccgggcggtgaactccgcgctgcagctgtcgaaacgcggcggcggcgtggccttcatgctgagcaatattcgcgaggtgggcgcgccgatcaagcgcatcgagaaccagtcctccggcgtcattccgatcatgaaaatgctcgaagacgccttctcctacgccaaccagctcggcgcgcgccagggggccggcgcggtgtatctcaacgcccaccacccggacattctgcgttttctcgacaccaagcgcgaaaacgccgacgagaagatccgcatcaaaacgctgtcgctgggggtggtgatcccggatatcaccttcgagctggcgaagaacaacgaagagatgtacctgttttcgccctacgacgtcgaacgggtgtatggcgtgccgttttcggagattgccgtcagcgagaagtaccgcgagatggtggacgacaagcgcatccgcaagtcgcgcatcaacgcgcgcgagttcttccaggtgctggcggagatccagttcgaatccggctacccctatgtgatgttcgaggacacggttaaccgggagaacccgatcgccgggcggatcaacatgagcaacctgtgttcggagatcctgcaggtcaaccgcgccagcacgtatcacgaggatctgagctacgatcgcatcggcaaggacatctcctgcaacctcggctcgctgaacatcgccaaaaccatggacgcgccggacttcggcaaggcgatcgagaccgcgatccgcgcgctgaccgcggtggccgacatgagcgatatccgctcggtgccgtcgatcgccgaaggcaaccgcagcgcccgcgccatcggtttgggccagatgaacctgcacggttacctggcgcgcgagcgcatcttctacggctcggaagaaggcatcgacttcaccaacctctatttctataccgtggcctatcacgccatccgcgcctctaaccggctggcgatcgagcgcggcggcgccttcgacggctttgagcattcccgctatgccagcggcgagtacttcgataagtacaccgagcgcgactggctgccgcagaccgagcgggtgcgcgagctgttcgccgccgccggcatcgccattccgaaccgcgacgactggcgcgcgctgcgccagtcggtgatgctgcacgggctgtacaaccagaacctgcaggcggtgccgccgaccggttccatctcgtacatcaataacgccacctccagcatccacccgatcgtttcacgcatcgagatccgcaaggaaggcaagatcggccgcgtttactacccggcgccctacatgaccaacgacaacctggcgtattaccaggatgcctatgagattggcccggaaaagatcatcgatacctacgccgccgccacgcaacacgtcgatcaggggctgtcgctgacgctgttcttccgcgataccgccaccacccgcgatatcaaccgcgcgcagatctacgcctggcgcaaaggcatcaagaccatttactacatccgcctgcgccaaatggcgctggaaggcaccgaggtgcagggctgcgtgtcctgcgcgctgtga

SEQ ID NO: 425560 - DNA, 972 bp, Serratia marcescens
atgacgaccgtaacatcggcgccgctggtgcgcgccatcaactggaacatcatcgaagacgacaaggatctggaggtgtggaaccgcctgacctccaacttctggctgccggagaaggtgccgctgtccaacgatatcccctcctgggccacgctgacgccgaaggagcagcagctgaccattcgggtgttcaccgggctgacgctgctggacaccatccagaacaccgtcggcgcgccggccctgatcgccgatgcgctgacgccgcacgaagaggcggtgtactccaacatcagctttatggaggcggtgcacgcccgctcgtacagctcaatcttctccaccctgtgccaaacgccggacgtggacgacgcctaccgctggagcgaggaaaaccgcgcgctgcagaagaaggccggcatcattctggcgcactatcgcagcgacgatccgctgttgaagaaggttgccagcgtgttcctcgagtcgttcctgttctattcgggcttttacctgccgatgtactggtcgagccgcgccaagctgaccaacaccgccgatctgatccgcctgatcatccgcgacgaggcggtgcatggctactatatcggctataaattccagaaagggctggagaaagtggacgccgcacggcgccggcaggtgaaaaactttgccttcgatctgctgcaggatctgtacgacaacgaggtgcgctacaccgaggagctgtacgacggcgtcggctggacggaagacgtgaaaaccttcctgcactacaacgccaacaaggcgttgatgaacctcgggtatgaggcgctgttcccgccggcgatggcggaggtcaacccggctatcctgtcggcattgtcgccaaacgccgatgaaaaccacgacttcttctccggttccggttcgtcttacgtcatcggcaaggcggtcaacaccgaggatgaggactgggatttctga

SEQ ID NO: 425561 - DNA, 288 bp, Serratia marcescens
atggcaaatgtcgagttggcgccagaggtcagggatgatatcgaacgtattctcgctcatttggctcactatggcgctgcggattcagggcggcgcattcaggaaatcatccaggcgattgcggtattggaacataatccattgatcggacgagcccttggcgcagggctgcgtgaattgattattgggcagcaagctcgcggttatttggcgctctacaaatatatccctgatatcgatacggcgtttgttctggcgatccgtagtcagaaagaacaagggtattga

SEQ ID NO: 425562 - DNA, 288 bp, Serratia marcescens
atgtcgacgacgaccatccgtattccagatgagcttaaagcccgcgtcaccgccgtcgccgagcaggctggcgtgacgactcacagctttattttgcaggcaatagcggagaaaacgcagcaagaagagttgcgccgcgactttgagaatgaagcggaaaaacgctatgccaagataattgcgacgggagagacggtctcttggaaagagatgcgcggttatttggaaaattacgcagcgggtaacactgacgttgttaaacctccggttaaaaaattggggcgctga

SEQ ID NO: 425563 - DNA, 195 bp, Serratia marcescens
atggcgggcgacaatcagcaatcccagcacggcgtaagatcgccctgcgtcagcctgtgccgcatcgacgatgaaacccagcagtgccggggatgtcggcgcacgcgggcggagatcgctgcctggccgaccgccggcgacgcggagaaacgcgccatctggcggcggcttgagctgcgtcaatcggtgaaataa

SEQ ID NO: 425564 - DNA, 741 bp, Serratia marcescens
atgaaccagaaaactccccccgtcgctatcgtcaccggcgcatcgcgcggcatcggcgccgccatcgccgagcgtctggccgccgacggctttaccgtcatcattaactattcaggcaacccggcgccggccgatgagctggtgcgcaagatagaacagcgcggcggccgcgccttgagcgtcaaagccgacgtcagcgatgcatctgcggtcgcccggctgttcgacagcgccgaacaggcgtttggcggcatcgacgtgctggtcaataacgcgggggtaattgcgttggcgccggtggcggacatgcgcgatgaagacgcggatcgcctgatcgacatcaacctgaaaggcagcttcaacacgatgcgtgaagcggcgaagcgcctgcgtgacaacggccgtatcatcaacttctcctccagcgtggtggggctgctgcagccgggttacggcatgtatgccgccagcaaggcggcgatcgaggcgttgaccagcgtgctggcgaaagagctgcgcggccgcaatatcacggtaaacgccgtcgcgccggggccgaccgccaccggtttgttcctcgatggcaaaacgccggagcttatcgatcggctggcgaagatggcgccgctggagcggctgggaacgccggacgatatcgccgcggcggtggccttcctggccggcaccgacggcggctggatcaacggccaaaccctgcgcgccaacggcggcatcatctga

SEQ ID NO: 425565 - DNA, 945 bp, Serratia marcescens
atgttctggaaacgttgtctgctgggcgcggcgctggccgttatgtcattacaggccggcgccgccgcgccgcaggccaaaaccccgacgccgggagtttaccgcatcatgctgggcagttttgaagtgaccgcgttgtctgacggtatcattcgcctgccggcggacaaactgttgctgaacaccacgccgcagcagatcgccgccgggttggccgagcggcatcaaaacctgccggtggtcacctcggtcaatgcctatctgatcaataccggcgacaagctggtgatgatcgacagcggcgccggccagctgctgggcgacggcctgggcaagctggtggataatctgcgcgcggcgggctatcagcctgagcaggtggatgagatctacctgactcatatgcacccggatcacctcggcggcctgacgcacgacggcaaggcggtattccccaatgcggtggtgcgcgccgccagccaggatgcggacttctggctgagcgccgaccggttgaaacaggccaaggcgcagaacaaaggcaatttcgaaaaggccatggcggcgatcaagccttaccaggcggcggggcactttaagccgttcaacggcgacggcgagctttcgccgggcatcgccgcctttgccgctcacggccatacgccaggccacagtgtctatcaggtgaccagccagggcaaaaagctgctgttgctgggggatctgatccacgtggcggcggtgcagatgccgcatccgaaggtggctatcagctttgacagcgacgccaaggcggcggtcgctcaacggctgcgggtgttcagcgacagcgcgcggcagaacgagctggtgggcggcgcacacctgtcgttcccgggattgggctacctgaaccgccagggagaagggtacagctgggtgccgctgaattacggcgcgttgtaa

SEQ ID NO: 425566 - DNA, 972 bp, Serratia marcescens
atgaactatcaattcgaaaatctggtctttgaaggcggcggcgtaaaaggcatcgcctatggcggtgcgctggaattgctggaagccaaaggcatcatgccacagatcaagcaaacctccggcgcctcggcgggcgctatcgccgcgctgctggtcggcctgggctgcagctcggccgacgtaaccaaaattctgtcggcgatggattttaaaaaattcctcgattataacggcggctttttcggtacgctccacgatgcctatcgcctgttcaatcaatacggcatcgcgcccggcgattatttctatcaatggtcgcgcgatattatcaagcaatataccggcaagccggatattaccttcgagcagttcgaagcgatgaaagcggcgaaagggttcaaatcgatttactttatcggcgccaacctcaacagcggccagcgcgaggtctattcgcatcgcactacgccgcgcatgaaagtggcggacggcctgcgcatttcgatgtcattcccattcgccttcgtggcgaagaacaacaccctgggcgacctgtgcatcgacggcggcatgatcgacaactacccggtgcggctgttcgactatgacttctccgccacgccgccttacatcgacgcttcaagccagcgcatcaacacccgcacgctgggccttcgcctggactccgccggcgaaatcgcccaggccgccgggcaggccggcccgcgcacgcaggtcaacaacctgtttgatttcaccctggcggtggccaacgtgatgctggacatccaaaccaaggtgcacctggacagcgacgactggaaacgcaccgtgtatgtcgacacgctcgacgtcaacacgttggatttcgacatcagcgaggagaaaaaacgcgcgctgatcgaatccggccgccgcggcgtagagcgctacttcgcctggtacgacgccgccatgaaacaggcggcataa

SEQ ID NO: 425567 - DNA, 1356 bp, Serratia marcescens
atgagcacaacagatgattcttacctcgtagccaaagacaaggccgccgatattcctctgcgtgagaaatggtggcggatactggacaattataaagtagggattattccgttaccgttctttattctggccggcgtattgattctgctcgactgcctggaaggcaagctgccaagcgatatcgtggtgatggtggccaccctggcgttcttcggcttcgcctgcggcgaattcggcaaacgcctgccgctgatcggcaaaatgggcgcggcggcgatctgcgccacctttattccttccgcgctggtgcactacggtttgctgccggacgtggtggtggagtcgaccaccaagttctacaaatcgaccaacattctttatctctatatctgctgcatcatcgtcggcagcatcatgagcatgaaccgccaggtgctgatccagggcttcctgcgcatcttcattccgatgctgtgcggcgagatcgtcggcatgctggtggggatgggcgtcggcatggcgctgggcctggagccgttccagatcttcttcttcctgatcttgccgatcatggccggcggcgtgggtgaaggggcgatcccgctgtcgatgggctacgcggcgatcctgcacatggagcagggcgtggcgttggggcgcattctgccgatcgtgatgctcggtagcctgaccgccatcgtcatcgccggcctgctcaaccagttgggcaagcgttatccgcacctgaccggcgaaggcagcctgatgccgagcaagcagggcgacagcgacatgaacgcggtggaaaaaatcagcggtaaggtggacgtcagcaccatcgcctgcggcgcgctgctggccatcctgctgtatatggtgggcatgttgctgcaccgcctgatcggcctgccggcgccggtgggcatgctgttcgccgccgtggcggtgaagctggcgcacggggtgtcaccgcgcattcaggaaggctcgcaggtggtgtacaaattcttccgcaccgccgtgacctatccgatcctgttcgcggtcggggtggccatcacgccgtggcaggagctggtggacgcgttcaccgtacagaatctgatcgtgatcgtcacgaccgtcagcgcgctggtggcgaccggtttcttcgtcggcaagaaaatcggcatgcatcctatcgatgtggcgattgtctcctgttgccagagcgggcagggcggcaccggcgacgtcgcgatcctcaccgccggcaaccgcatgtcgctgatgccgttcgcgcagatcgccacccgaatcgggggcgctatcaacgtctcgctgtcgctgctggtgttggccaagttcttcgtataa

SEQ ID NO: 425568 - DNA, 1593 bp, Serratia marcescens
atgcggctcaaactctcatttcaaatcaagctgtttctgtgcctggtggccttctcctgcctgctgctgacctgcatcggcgcctacacctattaccagctggatgcgcaactgcaccgcgatctcggcgcccgcgcgcaggtgcaggcgcgggaaatcgccctcattccttcgctggtcgatgcggtggaaaacaacgacgccgccagaatcgccgcgctgatgaaaaaaatccgcgccagcagcgacgccagttatatcgtcatcggcgataatcacgcccgccatctttatcattccgaatatgaaggccgcctgggcacaccgatgatcggcggcgataataaagaggtgctggaagggaaaagcattatttccattcgcaagggcggcatcggcgtttcattgcgcagcaaggcgccgatcctggatgaaaataatcgcgtcattggcatcgtttccgtcggctatttgaaatcgcacatcgataatttaaatgccaggacgctgacgcaaattatcggctccatcgtcctgctgctgatcgccctgttcgtcttttcctggctgctgtcgaaaaacctcaagcgccagatgttctggctggagccgaaagagatcgcgctgctggtgcgccagcaaaaagcgctgctggaagccatctatgaaggggtgatcgccatcgatccagagctgcggatcatcaccatcaaccatgcggcgcgcgagctattggatctgcaccaacccgccgccggcttgctgggccggccgatcggcgacgtcattcaggcgcagccgaacttcttcgccgccgcgcagctgggccaggatacgcacgacgaggtgtgccgcttcaatcacgtgcgggtgatcgccagccgagtgcgcatcatgcaggagcaggagctgcaaggctgggtgatcagcttccgcgacaagaacgacatcaataccctgagcagccagctcagccaggtgaaacgctatgccgacaacctgcgcatcatgcgccacgaacagctgaactggaccgccacgctggccgggctgctgcatatgcagcgctacgacgaggccatccgctacgtggaggcccagtcggagggcgcgcaggagatcctcgatttcatctcgcagcgcttcagttcggcggcgctgtgcggcctgctgctgggcaaatattccagcgccagagaaaaaggcatcgagctacgcttcgatccggcctgccagctgcggcagatcccggcggcgctgaatgagaccgaactgatgtcgatcgtcggcaacctgctggataatgcggtggaggcgacgctgcactgcccggccccgcacgacgcgatcgagctttatatcagcgacggcagcgacgagctggtgatcgaggtggcggatcgcggcaccggcatcgccgaggagattcgtgatacgctgtttgaacagggcgtcaccaccaaagcggataaaagcgaccacggcatcggcctgcatctggtcgccagccacgtggcgcaggcgcacggcagcatagaagtgtcggacaacgagccgcacggcgcgatattctctatatttatccctaaataa

SEQ ID NO: 425569 - DNA, 687 bp, Serratia marcescens
atgtcacaccaagcactggacgttctgatcgtggaagacgagccgcaactggcgacgctgcacgcggagttcatcgagaaaaatttcaacctgcgggtggtggcttacgccgccacgctggccgaagcgcgggccaaagccaatgcgcatcagccgcggctgatcctgctggataactttctgccggacggccagggcatcgagctgatggaagagccggcggtgaagaaccccgcctgttcggtgatcttcatcaccgccgccagcgacatgcacacctgcagccaggcgatccgcaacggcgccttcgactacatcatcaagccggtatcctacaagcggctgcgcaattcgctcgaacgcttcatgcagttcgtgcaaacccagcgcaccttcaagatcatcgatcaggacaacgtcgatgcgctgtacaacctgcagtcgaagcagttctccagcgagccaagcgccaaaggcatcgaaaccaataccctcgagctggtgcaggcgctgtttatcgcccagccggcggtggcgcatgcggtggaagacgtggtggagcaggtcggcatcagcaagaccaccgcccgccgttatctggaatattgcgtcgccacccagttcgtgcgggtagagatgctgtacggcaatatcggccatccgcggcggctgtatcgcaaggcctga

SEQ ID NO: 425570 - DNA, 1203 bp, Serratia marcescens
atggcaattaaactcgaagtaaagaacctgtataagatatttggcgaacacccggaacgcgcattcaaactgctggataaaggtctgacaaaagatcggctgtttgaaaaaaccggcttatcgctcggcgtaaaagacgccactctggccattgaagaaggcgagatatttgtcatcatggggctctccggttccggcaagtccaccctggtacgccttctcaatcgtctgatagaacccacccgcggccaggtgctgattgacggtgaggacatcgccaaaatatccgacgcggcgctgcgcaccgtgcggcgaaataagatcagcatggtatttcagtcattcgcgctgatgccgcacatgaatgtcattaataacaccgccttcggtatggaattagccggcataccgctgcaggagcgccaggaaaaagcgctggatgccctgcgtcaggtcgggctggagaattatgcgctgtcttatccggatgaattatccggcggcatgcgccagcgcgtgggattagcccgcgccctggccaataacccggatatattattgatggacgaagccttctcggcgctcgatccgttaattcgtaccgaaatgcaggatgagctggtgaaattacaggcccagcatcagcgcaccatcgtgtttatttcccacgatctggacgaagcgatgcgcatcggcgatcgcatcgccatcatgcagggcggtgaggtgatccaggtcggcacgccggacgagatcctgaacaacccggccaacgactatgtgcgcaccttcttccgcggcgtggacatcagtcacgtattcagcgccaaggatatcgcccaacggcgcccggtgacgctgatccgcaaaacccccggttttggcccccgatcggcgctgcagctgctgcgcgatgaggaccgtgattatggttatgttgttgaacgcggaaagaaatttatcggcgtggtgtcgatagagtcgctgaaaaaggcgctgtccgccaatcaaacgctggacgatgccctgctcgaggctcctgccgccgtgccggccgacacgccgctcagcgatctgatttccctggtcgcccaggcgccgtgcgcggtgccggtagtgtgcgaagaacataactatctcggcatcatctccaaggccatgctgctgcaggcgttggacaaggagggctccgccaatgagtga

SEQ ID NO: 425571 - DNA, 1107 bp, Serratia marcescens
atgagtgatactacgcaaacccaagatccctgggctaccgcaccggccgataccggcgccgcacccgcaaacgatgccgccgccaacgccggcgacgcctggtccagcgcgccgccgccggccacccatgacgccgccgcgtcaggtgccgattggctcagcagcgccccggcgcagccggaacacttcagcctgctcgatccgttccacaaggcctgggtgccgttcgatacctgggtcacgcagggcatcgactggctggtgctgcacttccgcccgctgttccagggcatccgcgtgccggtcgacatgatcctgagcggcttccagcaactgctgctgggcatgccggcgccgatcgccattctggtgttctcgctgctcgcctggcaggtctcgggcctcggcatgggcgccgcgacgctgctctccctggtcgccatcggcgccatcggcgcctggtcgcaggcgatggtcacgctggcgctggtgctgaccgcactgttcttctgcatccttatcggcctgccgctcggcatctggctggcgcgcagcaagcacgccgccaaggtgattagaccgctgctcgacgcgatgcagaccaccccggccttcgtctatctggtgccgatcgtcatgctgttcggcatcggcaacgtgccgggcgtggtcgtgaccattatcttcgcgctgccgccgatcgtgcgcctgaccattctcggcatcaagcaggtgccggaagatctgatcgaggccgccgagtccttcggcgccagcccgcgccagctgctgttcaaggtacagctgccgctggcgatgccgaccatcatggccggcgtaaaccagacgctgatgttggcgctgtcgatggtggtcatcgcctcaatgatcgccgtcggcgggctgggccagatggtgctgcgcggcatcggccggctggacatgggcctggccgccgtcggcggggtcggcatcgtgatcctggcgatcattctcgatcgcctcacccaatcgctggggcgcgatcgccgcagcaaaggcatcggccgctggtaccgccgcggccccatcgggctgctgactcgcccgttcatcaaacaagcctga

SEQ ID NO: 425572 - DNA, 1002 bp, Serratia marcescens
atgcgcactacgggcatctgggctctcgccctgacgacgctgattggctcacagagcgtgagcgcggcagatttacccggcaaggggatcgcggtacagccggtgcaaagcaccatttccgaagagaccttccagacgctgctggtcagcaaggcgctggaaaaactgggttacgacgtgaaggaaccgcgtgaagtggattacaacgtcgcctacacctcgatcgcctccggcgacgcgacctttatcgcggtcaactgggatccgctgcacgccgatcagtacaaggccgccggcggcgacgccaagttctaccgcgaaggcgtctacgtcaacggcgccgcgcagggctacctgatcgacaagaagaccgccgagcaataccacatcaccaacgtcgagcagctcaaggatcccaagatcgccaagctgttcgacaccaacggcgacggcaaggccgatctgaccggctgcaccccgggctggggctgcgaagcggtgatcaaccaccacatcaaggcctacggcctgagcaacaccgtcgagcacaaccagggcaactacgcggcgatgatcgccgacaccatcacccgctacaaagagggcaaaccggtgctgtattacacctggacgccgtactgggtcagcgatgtgatggtgccgggccgcgacgtggtctggctgcaggtgccgttctcctccctgccgggcgagcagaagaacgtcgacaccaagctgcctaacggcgccaactacggcttcccggtcaacaccatgcgcatcgccgccaacaagcagtgggccgaagccaatccggcggccgccaagctgttcgccatcatgaagctgccgatcgccgacatcaacgcgcaaaacctgcgtatgcatgaaggccaggcttcggaagccgacatccagaaccacgtcaacggctggatcaaggcgcatcaggcgaccttcgacggctgggtgaaaaccgccgccgaggcggcgaagccgtaa

SEQ ID NO: 425573 - DNA, 879 bp, Serratia marcescens
atgaacctgaaacagatacgctatgcgctggcggtggcggaggaacagagcttcacccgggcggcgcagtgctgccatacggtgcagtcggcgctcagccaccagatcgccaaactggaagaagagctgggctgtacgctgtttgagcgcacctcgcgtcgggtgcgattgacccccgccggccaggctttcattccctcggcgcagcggctgctggcggcacagcaggcgctggtggaagaggtgaccgccgccggggatgcggtgtccggcatcttgaccatcggcaccatttcaaccataaacgcgattgatctgaccgaaaagctcgacaagtttcatcgccactatccggcggtgaacatccgcctgtacgtcggcatgagcgaagccctgctggaggacgtgcgtcagcagaagtgcgatatggcgttcgtcggcatctggcccggcgatgtcgatttgctgccgatgtcgcaccggcagttgaccgatgagccgctggtggcgttggtggcgccgcagcatccgctggccaaccgtgagcgggtgaatctgcaggcgctggcggaagtgccgctggtggatttctacagcggcaccggtgcgcggcgccaaaccgatcgcgccttccaggcggcgggcatccgccggcacgtcagttttgaaatcgatcatatcgaatggttggagaatctggtgcggcgcggattggcggcgggcatcgtaccgatctcgaccgcgcaacgcctaagcacgctggtgtcgattccgattgaagacgggccgcgacgccaggtgtattgcatctggccgcagcccttgtcaaacgccgccgcacgttttttacagttcagcggcattgatatggcggggtag

SEQ ID NO: 425574 - DNA, 1200 bp, Serratia marcescens
atgaaccaacaaaacgtccacccgggcctcagcccggcgctgaccgtgctgatcgccatcgctaccggcctggcggtcgccagcaactattacgcgcagccgctgctggaaaccatcgccaccggcttcaatctgtcggtcaaccaggccggctttatcgttaccgccgcgcagctcggttacgccaccggcctgctgctgctggtgccgctcggcgatatgttcgagcgccgcgggctgatcgttttcatgacgctgctggccgccgggggtatgctgatcaccgccacctccgccacgctgccgatgatgatcctcggcaccgcgctcaccgggctgttctctgtggtggctcagatcctggtgccgctggccgccacgctggctcacccggaaaagcgcggcaagaccgtcggcatcatcatgagcggcctgctgctcggcatcctgttggcgcgcaccgttgcgggcgcactggcgtcgttcggcggctggcgcaccatctactgggtcgccagcgtgctgatgatcctgatggcgctgatcctgtggcgcgcgctgccgcgctataagcagcactccgggctgaactacccgcagctgctggcctcgatcttcagcctgttctgccgcacgccgctgctgcgcacccgcgccatcctcggcgccctgtcgttcgccaacttcagcgtgctctggacctccatggcctttctgctcgccgcgccgccgttcaactactccgagggggtgatcgggctgttcggcctggtgggcgccgccggggcgctggccgcttcgcgcgccgggcatctggcggacaagggcaaggccgggctgaccaccaccgtcggcctggtgctgctgctgctgtcatggatacccatcgcgttggctaaacaatcgctgtgggcgctgatcgccggcatcctgatcctcgatctggcggtgcaggcagtacacgtcaccaaccagagcgtgatgtaccgcatcatgccggacgcgcgcaaccgcctgaccgccggctacatgaccagctactttatcggcggcgccctcggttcactgctctccgcctcggcctatcagcatgccggctggaacggcgtggccgccgccggcggggtgttatgcctgctcaacctgctgacctggtggctcggcaagcaccacgatccgcaggggccggcgacaatctga

SEQ ID NO: 425575 - DNA, 747 bp, Serratia marcescens
atgcaaagccaagctgcagacagcctcaatccgcccgccgtcagcgccaccttcgccaacggcgtcgtcgacagtttgccgatcgtcatcgggtatgtcccggtggcgttcgccttcggcctcagcgccgtcaaactgggcttttccccgctggaaagcattttcttctcctgcatcatctacgccggcgccagccagttcgtgatcaccgccctgctgagcgccggaatgtcactgtgggtctccgcgttgacggtgatggcgatggacgtgcgccacctgctgtacggcccggcgctgcgtcaccgcatcgtctcgcgcatgtcgcccggcaaaacggcgatgtgggcctttggcctgaccgatgaagttttcgccgccgcgaccgccaggctgatgcgcaataaccgcagctggagcgaaaactggatgctgggcatcgcgctctgttcctggctctcctgggtcgccggcaccgcgctcggcgcgctgttcggcaacggcccgctggagcagttcccggtgatcgaagcctcgctggccttcatgctgccggcgctgtttctcagcttcctgctggccgccttccgccgcccgcagagcctgactatcgccgccgcgctggccggcgcgctgctcggcgtggtgctgttctccattccggtcgccattttggccggcatcggcgccggttgcgtcgccgccctgttccagccagcccctgcggaggccccccatgaacactga

SEQ ID NO: 425576 - DNA, 348 bp, Serratia marcescens
atgaacactgatgtgctggcgatcggtctggtggtgggctgcgccaattacctgttccgttatctgccgctgcggctgtcgccggcgcgcgcgcagcccggcctcaaacgcggtaaaaccgccctgctgctcgacagcatcggcatcgcctcgatctgcgccctgctggtggtctccagcacgccggtggtgatgcgcgaaccggacaagctgctgccgacgttggtggggttcgccgcgctggcgctgtgcttctaccgcagcaaaagcatcattctgtcgacgctgctcggcgcgacggcctttggcgtcacattaaagctgttaatgcttttcggtccgggctga

SEQ ID NO: 425577 - DNA, 519 bp, Serratia marcescens
atggaaagctcgtttgcccccatagaacaaatgctgaatttccgcgccacgcggcagaaagatttcccttatcaggaaatcctgctgacccgcctgtgcatgcacatgcaaggcaagctgctggaaaaccgcaataagatgctcaaggcgcaggggattaacgaaacactgtttatggcgctgattaccctggatgcgcaggagagccacagcatccaaccttctgagctaagctctgccttgggctcctcgcgcaccaatgcgacccgcatcgccgatgagctggagaaacgcggctggatcgagcgccgggaaagcgacaacgatcgccgctgcctgcatctgcatctgacaccgcagggggaagagtttctcagtcaactgctgccgccgcagcaccaatgtctgcatttcctgtggtccacgttgaccgacgatgagcaaaaacagctggaacagctgacgcgcaaattgctggcacgtctggatcaaatggaaatcacagaacagttaccctaa

SEQ ID NO: 425578 - DNA, 1452 bp, Serratia marcescens
atgcgatccccatttaactggagattcaccccgctgttcgccgtgttgctgctggccgggtgtgcttcgaccgataatattgccccgcaatccacgctgatggatccgcagagcctgcagttggctcagccgaaagtcagttcgctggccgtcagcccgcagtggtggcgcgccctcaaggatccgcagttggataccctgatgacgcaaacgctgcaaagctcgccgaccctgcggcaggccgccgcccgcgtgcgcgaagcgcaaagcgtggtgggcgaagccagcgccgccaacgggccgaacctggatctgaacgccagcacccagcgccagcgcgtgccgcaaaacgtcaatatggggttggggtatccgcataagccaatctattcaagctccaactcgctggggttaaacctggcgtacgagttcgactggtggggcaaataccgcaaccaggtgaacgccgccaaagcgcaggtcaacgccgcgcgcgccgagcaggaacaggcggcgctgacgctgaccagctcggtggcgtccgcctactatcagctgcagagcaatctggcgctcgagaagctgctgcagcaggaagtgaacaacaatgagcgcctgaccgcgctgcgccaacagcgctatcaggccggcctgaccggcgtcgacgtgccgcaacaaacccaggcgcagtccgacgtcgccaagcagcagatcctgcagctgcagtcgcagatcgagcagctccggcaccaactcgccgcgctggcgggccaggggccgaacgccatgcagcacctgcgtcaggtgccgttgcctgcagacaacctgatggcgccgcaaggcgagctgacggcggatctgctgggcaaacgcccggacatcgccgcgcaacgccagctggtggagtcttacagccagcgcgtcagcgccgcacgtaaagagttttaccccagcctgaccatttcagccttcgccggcctgatgaccaccaataccagtggcaccagcccgaatctgtttgaagcggccagccaggcctggaacgtgatgccggcgatttcgctgccgatcttccacgccggggcgctgcgcagcaagctgggcgaggaatccgcgctgtatgacgaagcggtggaatcctacaaccaaaccatcctgaatgcggtacaggaaaccgccgacgccatcaccatccagcagagttctgcgcaacagcagctgcaggcggcgtccgcggcccagtcgatgcaacaggtgtatcaggtcgccaacgcccgttaccaggcagggattatcgggcgcgacgatctgttgaccagccagacgcagctattgcagcagcaacaggcggagttgaatgccagcagcaacttactgcaggcgaagataggactgatccgtgcgctgggcggtggctatcaggccccggccgcagcggattcgaaagcataa

SEQ ID NO: 425579 - DNA, 1173 bp, Serratia marcescens
atgagcgcaagcgcggaaatccaaaacccgcagcagccgagcggcaaaaagaagcagcgtaaattttggctgctgttgctgacggttattttcattgttataggggtggcttacttagtgtattggttcctggtgctgcgtcatcaccaggaaaccgacgacgcctacgtctccggcaaccaggtgcagatcatggcccaggtgtccggcagcgtgaacagcgtcaatttcgacaacaccgactacgtcaagcagggcgacgtgctgctgacgctcgatccgaccgatgccgagcaggcgtttgaacgcgccaagaccggcctggccaacagcgtgcgccagacccaccagctgatcatcaacagcaagcagtatcaggccaacatcgccctgcgcaagaccgatctgagcaaggccgagaacgatctgaagcgccgcgtggtgctgggcagcgttgacgccatcggccgcgaagagctgcaacacgctcgcgatgcggtcgacagcgccaaggccgcgctggaagtggcggtgcagcaatacaacgccaaccaggcgatggtgctgaataccccgctggaacagcagccggcgatccaacaggccgccgcgcaaatgcgcgacgcctggctggcgctgcagcgtaccaaagtgatcagccccattaccggttatgtctcgcgccgcagcgtgcaggtcggcgcgcaaatcgccgccggttcgccgctgatggcggtggtgccggccgatcacatttgggttgacgccaacttcaaggaaacccagatcgccaacatgcgcatcggccagccggcgacggtggtcagcgatgtctacggcgacgacgtggtgtatcagggcaaagtggccggtatcgacatgggcaccggcagcgccttctcgctgctgccggcccagaacgccaccggcaactggatcaaagtggtgcaacgtctgccggtgcgtattgagctcgacgccaagcaggtggccgaccatccgctgcgcatcggtctttctacgctggtgaccgtcgacaccgccaacctggacggccgcgtgctggccgacgtggtgcgcgacaaaccgctgtaccagagcgacgcgctggccttgaacctggcgccggttaatcagctgatcgccgacgtgatccatgcgaacgccggctaa

SEQ ID NO: 425580 - DNA, 1539 bp, Serratia marcescens
ttgccacagaaaccgcttgaaggcgcccagctcgcctggatgacggtcgcgctcgccatggcgaccttcatgcaggtgctggactccaccatcgccaacgtggcgatccctaccattgccggtaacctcgggtcttccaactcgcagggcacctgggtgatcacctcgttcggcgtggcgaacgccatctcgatcccgatcaccggctggctggcgaagcgcatcggcgaagtgcggctgttcctctggtccaccgcgctgttcgtcctcgcctcctggctgtgcggcatctccaacagcctcggcatgctgatcttcttccgcgtgatccagggcgtggtggccgggccgctgatcccgctgtcgcagagcctgttgctgaacaactacccgcccgccaagcgggcgatggccctggcgctttggtcgatgaccgttatcgtcgcgccgatcttcgggccgatcctcggcggttacatcagcgacaactaccattggggctggatcttcttcatcaacatcccgatcggcgccttcgtgatcgtggcggcgatggcgacgctgaaggggcgagaaaccaaaaccgagatcaaaccgatcgacaccgtcggcctggtgctgctgatcgtcggcatcggttcgctgcaggtgatgctcgatcagggcaaggagctggactggttcaactcgaccgagatcatcaccctgaccgtcgtggcggtggtggcgttgctgttcctggtggtctgggagctgacggacgaccacccggtggtggatctgtcactgttcaagtcacgcaacttcaccatcggctgcctgtgcatcagcctggcctacatgctgtacttcggcgccatcgtgctgttgccgcagctgctgcaagaggtatacggctataccgccacctgggcggggctggcgtcggcgccggtcgggctgatcccagtgctgctgtcgccaatcatcggcaagttcggcaaccggctcgatatgcgccggctggtcaccttcagcttcatcatgtatgccgtgtgcttctactggcgcgcctatacgtttgaaccgggcatggacttcggcgcgtccgcctggccgcagttcgttcagggcttcgccatcgcctgcttcttcatgccgttgaccaccatcacgctgtccggcctgccgccggaacgcatggcggcggcgtcgagcctgtcgaacttcacgcggacgctggcgggttcgatcggcacctcgatcaccaccaccctgtggacgcagcgcgaatcgcagcaccattcgcagctgacggagttcgtcaacccgtacaacccacagtcgcaggagatgtaccggcagttggagcagctcggcatgagcaagcagcaggcgtcggcctatatcgccaacgagatcaccgcgcaaggcctgatcatctccgccaacgagatcttctggctgtcggccggggtattcctggtgctgctggcgctggtgtgggtggcgaaaccgccgttcagctccggcggcggtgggggcggcggcgctcactaa

SEQ ID NO: 425581 - DNA, 1089 bp, Serratia marcescens
atgaacgattcatttagtggcaagaacggtaaagtcaaagtgatgtacgtccgcagtgacgacgacaacggcgacgaccgcaacaagaataaacgtccggccggcaaaggccgtccggctgacggtgcgcgctccggccgcaccggtcaagacaaggcgcgcggcggcaacgatcgccgcggcgccgactcccgccgcagtgaaagcgatcgtcctcgccgtccggcgcgctctgaagatcgcggtggcaacgagtcgccgtggagaaccgtctcgcgcgcgccgaatgaagagccggcgttcgatcacggcggcatcagcggcaaaagctttatcgatcctgagcagttgcgccgccagcgtgcggaagaaacccgcgtttacggtgaaaacgcctgtcaggcgctgttcgccagccgcccggaagcgatcgtgcgcgcctggttcgtgcagtcggtcaccccgcgcttccgcgaagcgctgcgctggatggcggccaaccgcaaggcttaccacgtggtggatgaggaagagctggccaaggcttccggcaccgagcaccacggcggcgtgtgcttcctgatcaaaaaacgtcagggactggacgcgcagacctacctgaaaagcgccccggcgaccgactgcgtgctggcgctggaagaagtgggcaacccgcataacctgggcgccatcgtccgttcgtgcgcccacttcggcgtcaacggcgtgctgctgcaggatccggcgctgctggagtccggcgcggcggtgcgtaccgcagaaggcggcgctgagcatatcaaggcgatcaacgccgacgatttcctgtcggtgctggataccttccgcaaggcgggttacaccatcgttaccacctccagccataaaggcaccgcgctggcgcaggccaagctgccggccaagatggtgctggtgctgggccaggaacgtgacggtctgagcgacagcgcctggcagcagggcgacatgaacgtctcgatcggcggcaccggcaaggtggaaagcctgaacgtttccgtggcgaccggcattctgctggcggactggtggcgtcagaatcaggcgtaa

SEQ ID NO: 425582 - DNA, 420 bp, Serratia marcescens
atgaatacagtttgtgcagcttgcaatgccaccaaccgcgtgccggaagaacgtctggcggacaacgcgaaatgcggccgctgcggccatgagctcttcgacggtgaagtgatcaacgccaccgccgccacgctggaccagttgctgcaggacgatctgccggtcgtggtcgatttttgggcgccgtggtgcggcccgtgccgcagctttgcgccgatctttgaagacgtggccgaagagcgcgccggcaaagtgcgcttcgtgaaagtgaacaccgaagccgagccggagctgagcgcccgtttccgcatccgcagcatcccgaccatcatggtgttccgtcagggcaagatggtcgatatgctcaacggcgcgatgccgaaagcgccgtttgacaactggctcaatgagttagtgtga

SEQ ID NO: 425583 - DNA, 690 bp, Serratia marcescens
atgaccgacaacgccgtacttcgcctgcgccaattccgtttagaccgcgccacccgccccttcctggcgcgcggttgccgggtggcgcgttgtcagggttgcctgctaccgcataaaaactgcctgtgcgacaccattcgcccgcagcaggccggcagccgtttctgcctgatcatgttcggcgccgagccgctcaaacccagcaacaccgggcgcctgatcgccgatatcctgccggacacccaggcgttcctctggtcgcgcaccgagatcgatcctgctctgctggcggccattaacgatcctacgcggcagccttatgtggtgttccccgcttcctacgccgacgccgaacggccggtgttcagcgaactgcccgccggcggcaaaccgccgctgttcatcatgctggacggcacctgggcggaagcgcgcaaaatgttccgtagaagcccgtacctcaatcaattcccggtgttttccctcaacgtcgacgcggcatcggactaccagctgcgcgaagccagccgcgccgagcaacactgcacggcggaagtggccgccgccctgctgcaacaggcgggcgatctgccggccgccgacggattgaatcagcatttccgctatttccgtcaacagtatctggcgggaaaaccgacccggccggaggcaccggtcacagcaatgtag

SEQ ID NO: 425584 - DNA, 2649 bp, Serratia marcescens
atgagccagcgagggttagaagcgctactacgtcccaaatcgatcgccgtgctgggcgcgtcgcagcagcccggccgcgccggcaacctgatgatgagcaacctgctggccggcggtttcggcgggcccatcttgccggtcacgccgcgctacaaggcggtatgcggcgtgatggcctaccccgacgtcgccagcctgccgctgacgccggatctggcgatcatctgcacccacgccaaacgcaatctggcgctgattgaagcgctgggtcaacgcggctgcaaaaccgccatcgtgctctcttcgccgccggaacagttcgccgagctgaaggcctgcgcgcagcgctacgccatgcggctgttgggccccaacagtctggggctgctggcgccgtggcagggcatcaacgccagcttctcgccggtgccgatccaaaagggcaagctggcgtttatctcgcagtccgccgccgtggccaataccattctcgactgggcgcagcagcgcgaagtcggtttctcctatttcatcgcgctgggcgacagcctggatatcgacgtcgacgacctgctcgactttttggcgcgcgacagcaagaccagcgccatcctgctgtatctggaaaacatcagcgacgcgcggcgctttctctccgcctcgcgcagcgcctcacgcaacaagcccattctggtgatcaaaagcggccgcagccaacaggcgcagctgctgctcaacagccagctggggcttgacgccgcctatgacgccgccatccagcgcgccggcctgctgcgcgtccaggatacccatgagctgttctcggcggtggaaaccctcagccatatgcatccgctgcgcggcgagcggctgatgatcgtcagcaacggggcggcgccggcggcgatggcgctggacgaactgctcggacgcaacggcaagctggccacgctgagcgatgagagcctggcaacattgagcgacgcgctgccggagttcatccgcgccggcaatccgctcgacctgcgcgatgacgccacgccgcagcgcttcctggcggcaatcgaagcgctgctcgacagccacgactatgacgcgctgctgttgatccacgcgccgagcgcggcggcgccgggcaccgccacggcggaacggctgatcgacgcgctgcatcgccatgcgcgcggcaagcgcatcacgttgctgaccaactggtgcggcgaatactcttcgcaagaggcgcgccggctgtttaccgaggccgccattcccacctaccgcaccccggaaggcgcggtgaccgcctttatgcatatggtggaataccgccgcaatcagaagcagctgaaagagacgccggcgctgccgatcggcctgaccgccaacaccgccgacgcccaccgccttatccatcaggcgctggccgaaggcgccacccagctggatacccacgaggtgcaatccattctgcaggcctatgacctgagcaccctgccgacctggatcgccgaagacagcgccgaagcggtacacatcgccgaacagatcggctacccggtggcgctgaagctgcgttcgccggatatcccgcacaaatcggaagttcagggcgtcatgctctacctgcgcaccgcgaccgaagtgcagcgcgcggcggaggcgatcctcgaccgcgtaaagcgcacctaccctcaggcgcgcatccatggcctgctggtgcagagcatggctaaccgcgccggcgcccaggagctgcgcatcgcggtggagcaggatgcgattttcggcccgctgatcatgctgggcgaaggcggcgtggaatggcgccaggaaaatcaggtggcggtcgcgctgccgccgctgaacatggcgctggcgcgttatctggtgctgcaggcggtgaaaggcggcaagatccgcggccgcagcgcgctgcggcctttggatatccccgggctgagccgcctgctggtgcaggtctccaacctgatcctcgactgcccggagatcgcccggctggatattcacccggtgctggcctccggcagcgaattcaccctgctggacgtttcgatgcagctcgcgccgttcagcggcgatccgcaggcgcggctggcgattcgcccttatccgcatgagctggaagaaaccatcgcgttgaaagacggcagccaatgcttgttccgcccgatcctgccggaagacgagccggcgctgaagcatttcattgaccgggtgaccaaggaagacctctattatcgctacttcagcgagatcaacgagtttacccatgacgatttggccaacatgacgcagatcgactacgatcgagaaatggcctttgtggcggtgcgcgcagacgagatcatcggcgtgactcgcgcgctgtccgatccggacaacaccgacgccgaattcgccgtgctggtgcgttccgacctgaaaggcctgggcctgggccgccagctgctggagaaaatgatcgcctatgcgcgcgcccatggcctgacccgtctgagcggcatcaccatgccgaataaccgcggcatgatcgcgttggcgcagcggctgggctttggcatcgaggtgcagcttgaggacggcatcgtcaatctgacgctgccgctgcaggccgccgacgcgcagtga

SEQ ID NO: 425585 - DNA, 1356 bp, Serratia marcescens
atgttgtcaaaatttaaacgtagcaaacatcaacaacaccttgcacaactgcccaaactcccccagacggttgctgatgttcgtacgttgtacgcgccgtccgattttcgcaccacgctgctggacgccatcgccaacgctacccaacgcatctatctggtggccctgtatctggagcatgacgacgccgggcgcgagatcctcaacgcgctgtatcaagccaagcagcggcggcccgagctggaaatctgcgtgctggtcgactggcaccgcgcacagcgcggccgcatcggtgccgccgccgccaataccaacgccgactggtactgcgccatggccggccaacatcccgagcagtcggtgccaatctacggcgtgccggtcaatacccgcgaagcgttgggcgtactgcacctgaagggctttgtggtcgacgataccgtgatctacagcggcgccagcatcaacgacgtttatctgcatcagcatgagaaataccgttacgatcgctaccagctgatcaccaacgaggtgttggccgataccctgatcgattacatcaagcagcatctgctcaccgccggcgccgtacagcgcctcgatcgcagcgatcggccgaaaagcccggagatcaaaaacgagacccgcctgttccgtttcgccctgcgccgcgccggctatcacttccgcggcaaggccggcaacgatgagttggcggtgacgccgctggttgggcttggcaagcaaagcgtgctgaataaaaccattcatcacctgatgtcgtgcgccgaccagaaactgacgctatgcaccccttatttcaacctgccggcgctgctggtgcgcaatatcatttatctgctgcgccagggcaaacaggtggagatcatcgtcggcgacaagaccgccaacgacttctatattccggaagaccagccgttcaaaatcatcggcgcgctgccctacctgtacgagatcaacctgcgccgttttctgagccgcttgcagcgctatatcgacaccgggcagctgatcgtgcgtctgtggaaggatggcgataacagctatcatctgaaaggcatgtgggttgacgaagagtggcagctgattaccggcaataatctcaacccgcgcgcctggcggttggatctggaaaacgccattctgatccacgatcccaagcaggaaatgcgcgagcagcggcaaacagaactggagtgcatccgcactcacaccaccgtggtcggccattatcaggaactgcaaagcattcagcagtacccgatcaaggtgcgcaagctgattcgccgtctgcggcgtatccgcatcgatcggttgattagccgtatcctgtaa

SEQ ID NO: 425586 - DNA, 1311 bp, Serratia marcescens
atgacagaaacaacctcggttcttgaggatgaacgcggcgtcgaacagggggcgctggataacaaaaaacgcatttttgccatcgtcggggcttcatcaggcaatctggtggagtggtttgatttttacgtttactccttctgctcaatctattttgctgcctcattttttccggcgggcaacagcaccacacagctgctgcaaaccgccggggtgttcgccgccggcttctttatgcgacctatcggcggctggctgttcggctacatcgccgacaaacacggccggaaaaactcgatgctgctttcggtctgcatgatgtgcgccggatcgttggtgatcgcctgcctgccgacgtatgagtcgatcggcagctgggcgccggcgctgctgctgatcgcgcgattgttccaggggctgtctgtgggcggcgagtacggcaccagcgccacctacatgagcgaggtggcaatcaaggggcggcgcggcttctacgcgtcgttccagtatgtcacgctgatcggcgggcaactgctggcgctgctggtattggtgatcctgcagcaaatattgtccggtgaagagctgaaggcctggggctggcgtatcccgtttgcgctcggtgcgctgttggcggtggtggcgctgtacctgcgccgctcgctgaatgaaacctccgatgcgaaaacacgtaaccaccaagatgccggttcgctgacggggctatggaaaaaccgcaaggcgtttgtgatggtgttgggctttaccgccgccggttcactgaccttttacacttttaccacctatatgcagaaatatctggtgaacaccgccggtatggacgccaagctggccagcggcatcatgaccgccgcgctgttcgtcttcatgctgctgcagccggcggcaggcgcgttctcggacaaaatcggccgtcgcagctcgatgctgatcttctcggcattggccaccctgttgacggtgccgatcctgttcgccctgaaaggggtgagcaacccctttatggcgttcggcctgatcgtactggcgctgttcgttgtcagcttttacacctcgatcagcgggctgcttaaagccgagatgttcccgccggaggtgcgtgcgttaggggtaggcttgtcttatgcggtagcgaatgccctgttcggcggttcggcggaatatgtcgcgctgtcgcttaaatcgttcggcgtggaaaatgccttcttctggtatgtttccggcatgtgcctgctggcgttgctggtctcgctccggctgcatcgtaaaggcaaggaaatacagctgtaa

SEQ ID NO: 425587 - DNA, 321 bp, Serratia marcescens
gtgattcgcaatcactttagcgagctcagtagcttattcagtatttacttcggtcaggattatgatctgtttactgatgccgaaacggccgagggggtgattgacggcttccttgagcaaaacggtagccaggtcatccgcgatatcctcgaggaagccaaaaaatttcaggccacctatgcggggcgtataaacgagggcatggcggagcatttttcagatgaatttatgccggagagctggggcactacagcggtaggggtctttgccatattgcaacgaaaagcagagcaaaagctggagcagcttaaacgaatttaa

SEQ ID NO: 425588 - DNA, 300 bp, Serratia marcescens
atgaaaaccagcgaacttgatgacctgatagtcatttattttggccaagattatgacctgataaatgcagagggcgatattactgcgctgatcgcagagtacattcgtctggcgactcatcagcagcgcgaggctttggtcaatgagatcgatgagctactggcgcaggataatgtggagtcattattcaaccaacgtttcggctttaccttcagccctgagctatggggaaccacggttcccgcattcctgcaacaggccagaagcgctgcagtgaaagcgctttgggcaccatcgtga

SEQ ID NO: 425589 - DNA, 828 bp, Serratia marcescens
atggcgaatgaagatgagttgcgtattgccctgtcgccggtgcagcttgcggcggtactgtctgatgaaagcgtcactgaaggtgaaacgttcagtaaccgtctgcttggcggtttggggcttgccggcggtgtcgttgagctgatgggggcggcggtgttgtgctatgcgccggatccgacgtttatcaccaaagttgggtgtgtggtggtgggaacgcatagcctggacagcatcaaggccgcttccaatcagatgattaccgggcatccaacaactaccgatacttatcagtctgccgttgtgttggcgcaaacactgggggccgatcgggaaacggcctataacgtcggtttaacggtcgatattgccgtgccttttgtctttgccggagcggttggtgctgccagagtcgcatccgtgcgcatgggccgggttaagctgattgagcatgagtccgttagcggtaaatatccgggcgggcacacattggctcggcatataaacatcgctccggaagcgcttattgccaggctagccaggcgcccgaaactgatcgcggcaagtaccttcagatcggtaaaggaggccgaaaagtatgtatctgtcacggtaaaggcgaaccgtgcagatattgtgaattggatgaagtacgcgtctcccggcagccgtttgagcgtgtatcacaatttcacagaatcagtgggttatggcgtgttacgcggcagcactgacgtctatcaatgtcatcgggttggcgtcgtgattgaatttacccgctataatggcaaaccttactttatccttagcgccttccctgcgagataa

SEQ ID NO: 425590 - DNA, 309 bp, Serratia marcescens
atgacaaaggttcccactacagaatccgttgcaagcaccctcaccctctatcgccaactgtttaaccacctcgatctcagcactttcaatccctcagagctcttagacctggccgcactctctgccgaacaggcggaaggtctgtgccacggcctgatgctgttcggccatttactgcaaaaacacccgcagttggataccgaaggctgggaacaaatgaatcactacctcaacgctacggcacatctgattcctgcgttgtgtaacctgtatgggcgggcgttgcgggagatggaagcctgcggctaa

SEQ ID NO: 425591 - DNA, 1119 bp, Serratia marcescens
ttggcaactgcaatagaggcgttatcttcaaaagaattcgttttaaaagccatcgaagaatataaaaaaattggccgagatgaattcttaaaacaacataaaataaagcgatttaaaaaattcacccttatttataatggcgagaagtacgacatccgaggcattgccgctagagcatacagtgagcaacatggctatccatttaagggaatcaacgccgataatggaacagaaaaagccatccaatttctcaaagatctcggttttgagaccgtcgaaacaccgcatccttttgattatttaaccgaaggcaaactatacacacgcaaagcgcttatcgagctctacggcgggcagttgcaaggcggtatctggaccccacgggaattcccggtgatctttatcttcaccggagaaagtggcgaaacctacggctacaaagatggatggacagctgaaggcagcttctcttatacgggagaaggccaaaaaggccctatggaatttattcggggtaataaatccatccgcgaccataaaaaagacggcaaagacatcttcctgttcgaagacaacaagaaagaaaaaggcgttcgctatcttggcatgtttgagtgcgattcttgggatcacattcagtgcttagacttcgaaaataacatgcggcaaggcattacctttaacctgttcaaagtctcgtcactgcacgcgattgaagaagaaacagaaaccgatgaagccgatacacagacagagacgctcgaacagttacgcaagaaggcactgcagtcctcacagcaatcgggccagcgccaacaaagcgacagcaagaaatcctggttcaaacgcagcgaagacgtaaaaaaatacgtgctcaagcgcgccaatggcatctgtgaagcctgcgagcagccggcaccgttcaagaaaaagaatggcgatccctacctcgaaccccatcacactaaacgcctagccgacgaaggccccgatcacccgcagtgggtgggcgccatctgccctacttgccaccgacggattcacagtgggatggatgggaaagaggtgaataagaagttgatggtgaagttggagttgaaagaggcagctaccggttaa

SEQ ID NO: 425592 - DNA, 3300 bp, Serratia marcescens
gtgagtcgatcagaatacatttatctaattaagtgtacttcttggctagctaaattcctctcccgcagaggattgaagcaaccagaccgccgcccattatatgaataccacgcaacgagtgatgagtatgatgagttgaagcggttgttgagagctatagggctacccgatggctacaggagtgataaaggatatgcagccagcttcacgttattctgctcagagtggtatagaagagattatgaaagggagtgtggatgggcatgggagcctatttataagactatcggtatatcagcatcttcttcggaaatggggaaaataattcctaaaggtctggatggatattggggacgtcctgtgcggttttacgatacagaaagacggaattttttaggatccttatttagtgaaggcggtctacctttcaggttgctaaaggaatctaatagccgctttcagtcgatgttctctctcattctcaatcaatacgatcaggcccaatcttctaacatttcaacgtttgctttagttcatgcggcggtagaaaaatcatccctgccagtcgttttcaaagaggatacttcagttgagcttattagtcggatggctgaacagttagtgtctcttgtgcaaatttatgacctgagtaaccacaccgaacccgtaaaagagcttgatcgtgttcatcctaagtggcgggacagcttccccgttccgcttgatgatgatacggggaccagtttccttaatggacttttacgagcagcttctactgaatccaaacctcgccttcaaaaaaatagaacaaccctatgtcagttcttatggtcagagaatcatcctgaagctttacagtcgcttatttctcttccagaagagctgagtttttcgattgatagtgaaccttctacaacacgtttcgagcttgccatctatgaagatggtaacgaaattgcgagcctggggcctgcctatgcaacgttgagtaattcacaggcgaaaatgagagttcgtaagcgtgaaattaagttttttcgaaaaaagcccgctgccagcttgtttattgtggcgagagcaggagggatgcttgtcggaaccagactgttggagggaagtgaggttgccgttggcgatgtgccattagtttttgtttttgataaaagtgaatggttgctacaagggcaagcatcttgcagtgtacgtggcagtcatgtgctcattgtattgccaaaggatggttgtctggcctcagagctcgaggattgtgaaaccgatttttcggctttgggatgccgcgctctgattgtcaaaggacgcctggatatcctgattgaaggcggtgaaacgtatcggataaagacaagaagagagcagattatccagacagggttctctttccaggggaagcggttaaactggacaagctacccggatgagctcttccttggtgttcctggcatttcccaaaattctgagaatctattaacgcatcattataaactttttttcaacggcacatttatagataattgtgatgtgcaagagaaaatgggtgctcagtttatttcagtacgtaacgagaataatgaaacgttactgcgcaagaaaataggtattcttcccaatgattttggtctggaaacaaaaaatggagaacaagcaaacgaaggctctatcattattaccaccaaacatccttgtttgtatagtttgaaagaaaaatcattggagattgataggaagcgattaccaggtagtacagaaataataatgaaaactgagggaatccctccagcatcgattttattacaaataacgccaaaccttgctgcaaatcctattgttatttctctccctttccctgcccgaggttgccttgtcttcgataaagacgacaaacctctaccaaaaaatttaacgattaacgatcttctgggagccagagcataccttttcggaaaaaatggtgagcctacgcgataccaacttgaactgcgtttacgctcccgtagcggaatgcaggcatggtatgagtggcgctatagtgcgggagaaagcccggtagagcttactttatatagcttaagagagcatattgacaatttactttccctagagaaagggattgatcaaacggtggatatgcgtattgagggcggaggtagttcctttacctggcaaatcaggcgctataaatatagccttgagtatgatcgggaaatgcagcttcttcttgctaattcagtgagcaatcgtacggggcagatcccttcccccgttattatgttactcagtgagcccgaaagaaaagcaataccacttgtatcgagaatgagcgaaggtgtaccggttggtgaattcgaattaagttcgacaatacaaaataatggcccatggctagttgttcccaaacaaggtgcagaagcttcatttcggccttgttacattgcaggtgagccggtaatccaaagcgagactacggcaatacagtccctgcaaaaagcgacgcagctttttaatcctcgggcggatgtaaataccattacgttagttctggaacaaatggcaagcgaccctgcacattcaggttggcagttcttacgtaacttatacgatcagtttggatatttaccactggctacctttgaggtatggcgtgccttggtccagcatccacaggcattggcaatgtcactgtttaaatttgagatgtccattgattatctcagccgtattgaaagcgagtttcctgttttctgggagttttttcctatcactgaggttaaacatgccgcgatgcgttttcgagcgtttctgactcataaaggtgctccggaggaaatgcagataaagttgctgggtcgaatgttccagcaattagggactgcatttccaacttatgccagcgaggtgcaaacatggttcgatcagggaagattaccaccagcttttccgacacaaatgataaaaggcatcattcatgagtggtatcaggaactcttacgtgaacacggtgaatctcgttggccagagtttggcgggccgggtcttttccgttggtacacgtcgcaacaagatcctgttatagagatttcacccgataccagctaccgatattctgttactttgctccccatatttgctgccgctgttgcctgcggtaaaacaacatttgacagcgtttttgaaaataaacctggtgccgtatttttcttaagacaagtcagagattttgactcgcgatggtttaatgccattttccagtattgcttattgcgtaatgtggctgaaaaataa

SEQ ID NO: 425593 - DNA, 132 bp, Serratia marcescens
atgttctgggaggtagccgtgtcattcctgatctggcgccgtgccagcatctttctctatccctggatgagcttgagcatatccctgattctgatggagcgggtattagccttgagcgttacaccgcgctga

SEQ ID NO: 425594 - DNA, 4326 bp, Serratia marcescens
atggcggtgcggatgcagcaggaagcggagcgcagccgtttgcgtggtagcgttgtggatattctctcttggcatcaacgacaaaaagtagtcaacaaacctaacgagcaggccaatgtcaaagaaatgattgatatggccgagcagggaaaaatcaggattaaaaacttactacagtggggaatgcctgatgcggcgaaacaagcggaagcagaattagcccttcttgaacaggctatacaacaagccactggcggaaaagtcgatacggttttgatgtctctctcctggcctgaaatggtcaaggaattgaaagataaggcggatatcaaaggtcctatcctacagtataaccactatctcaagcctgaaatcttcactgaaaatggtggccctttaaaactcgctgaaatgctgcttttccgtgaatttatgcggcgcccgaaacgtaccaatagcctggaaacgcaaggattggttcaggtgggttatcaggggctggagaaggcgcatagcctccctgctcattggcaagataaagggttaaccctggatgactggcgtgattttcttaagattacgctggatttctatgtcagggaaagcaacttcacccagctggacgaagatctgaaaaactggatcggtagccgtttctcttcaaaatttgtccgtaaccccgattcgaaagagcctgatgacaaccaggttaaacgctggccgcaaattcgtcacggtaacgtcacgcagcgtctggtcaaacttttgatcctcggcgctaaattcagcagcgtaaatacggtcacaatcgatatcgttaatgcgtggctaaaagaggcatggcttcagttgacggggtcactagcggtattgaaatctgacggcaaccgtttttatttacctaaagagcatctgacattctctctggtaaaaaaagcctacatttgcccggtaaccaataaattactggcgacggctttcagagacctgacgccttatctgccaatgcatattcagtttgaacggctgaccagtgcacaatatgacgcctttgtcgcccaggcggtgacgctgcctgagatttggcagcacgatcgttctcaggatgattatgtcgatgggttaagacaagttcgtgactggctgggtcaggaccctctggtggcgcaattacgttcgcaaaacctctggacggacattaacgatcgcgtcgttgaaggtggattttactaccgcacggcagagcattccgcccagcaatcatccgaacgtctgcaaagttatgaacgtatgtttaaaaacggacagcttaacgttctcaactgttcaaccaccatggaaatgggcgtagatattggcgggatttctgccgtggtgatgaataacgtcccaccgcaccccgctaactatctacagcgtgccgggcgtgccgggcgaagcaaagagtcccgcgctatttcttacacgttgtgcaaaggcaacccgcacgatcggcaggtttttactaaccctctctggccgtttgaaacggtgatccctgcgccgatggtggcaatgaattctgagcgtctggtacagcgccacgttaattctctgctgctgtcagactatttgtgccatgtcatcggtgaaaccgaaaaagaacgcaccagccttaatagtcagtggttctttggtgaagagtttgaacagtcggtgtgtaaccgtttcaaagcctggctggagcgtccgacgctgagcattgacgcggctttagttcgattggttaaaggcaccgcgcttcatggcgttgcggcagaaaagctgcgggataaaacgtgcgatgcgattgcggcgctgcagaagcgctggctgggaatttatcgcgatcttgttaagcaggaaagtgaatcacagcccaatacgccgtatcgcaaacgtctggagctggagaaaaaacggcactgcggcgagtatctgctgcgcgatttggcggctagaaccttcctgcccggatatggcttcccaacggatgttgtcacttttgataacttcactatggaagattatatccgcgagaaaacgtacaaagtccgtaataagagcgatcgtgaagataacgtctcgcgttataaaggcttgccttcacgtaacctttccgtagcgatccgggagtatgcgccgggtgcggagattatccttgatggacgggtcttccgctcagctggggtgtctctgcactggcataatattaatgctgataccaatgaagctcagcgtctggatagtgcctggcgttgtcacaaatgcggtacgttaggctatgaggaaggtattggcggctcgggagatttgttctgtaccaatgatgcgtgcggtgagcgcatcacgccggaaaaccgacgtcaggttttacagcctgcgggttttgtgacggatgcgcatgctccggtgaccaataacattgagaccatgaaattcattccggttgtaccggcctgggtatttgttaaggccgagcgtgtaccgctgccgaacccgttgatgggctttatggcttccggggcggacggtaatgtgttccagcaaagtatgggggaaggcggtcacggctatgcgctgtgcctgagctgcggccgtgcggagtcgatgctcaacctcacggatgcgcctaaatccatggaaacacactatccgccacgtccaggaaaggccgaccgggatagccagaatcagcggattatctgcccaggttcaacggcgctgaataaaaatgtcacgctgggagcgctggccagaacggatgtcttcgagctgattgtccgccgcccgcaggacggagagtatatcgctgataacacggaagaaggtcgtattgttgcaatgacgctggccgtggcgctgcggcgctcgctggcgagcgtgctgggcgtttccgcagcggagctgggctacgcggtgcgtccggtcaggctggagaacgagcaatccgttctggcggtgcagctgtacgatattatcagcggcggtgcgggctttgcttccagcgcgccattgcatattgaggccgtgctgaagggaatggtgaagcaactgggctgccaccactgcgataccgcctgtagcgagtgcctgctcgattcacagacccgccacgatcacgatctactggatcgtaaagcggcgctggcctggctgggggcggatttcagccactatattggtttgccggatgaggagaaattctctctggctgatgcgcaatattgcccagggagcattgaagatactctgcgacgggctatcaacgatggtggccgaaagctcacgctgtggatgagtgggccgttgaatgagtgggatctgtatgcccgtcagttccgcacagcgatccagaactaccggctaaaagatgatgttgaggtggtgctggttattccgcgaaacattgacgatccggagatccttctggaactcgcgcagtttacggcgataggcgtgcagctgtgccagtctgagctggatacggatacgccgctcgttgcgcaggtggcgtttgacgatcgcctgatgacattaatttctcgcagccatgaagctaccatccccgggccgaactggcatctgaatagccagatggttattcgcagccatttgcaggggccgatagcgctttataaaaccgagttgccatccgaggatgcgggcagcaaaggcctggttaacgatattgaaatccataagcagcttaacggcccggtttctcagtttggccagcgcttctggaacctgctgaccgagtctcaggatgatattcagcgcctgctgacgaaatgccgggtgacgcgtatccactatagcgatcgctatctgcaaaaccccgtagcgctggcgttgttaggcgggttgttgaagacgttgaaaccgatgctgacgcaagaggcggaagtgacgattgatacgctgttcaggagtaaagagcgaccggggaacaaaccgttccatgactggatgagtgaagcagacttccaggatttcgccgaccagtggtttgcggcatccatgggtcgagccgtggagattcaggcgttcaactctggccgcgacattccgcaccaccgtaagctgatggtgagttttgataatggccaagcgctgaaaatccgctttgatcaggggatgggatactggcgtattaactttgcgcgagcctggcgtaattttaactttaatgacgacgtctctttccagctggggaatatggcgcaagcctgcgcagaaggcctggtagtgaacagcgaggagagctgggcaaccgatgtgctggtgcaggttatcgccccttaa

SEQ ID NO: 425595 - DNA, 339 bp, Serratia marcescens
atgactaccgtccattctattgcagatccgtgcgatccagaagcctccctaacaaataaccgtcatcttaccgtgagttatgggagtcgttatccggattacacccgtatccccgcgcttaccatgaaaggccagtggctggaagccgccgatttcgccaccggtaccgaagtggatatgaaagtgatgaatggctgtatcgtgctgaccgcaaagccgccgcagccggaagactctactctgcttcagtcttttcatcgggtgggcaagctgtccgcccgtaagcagcggcaggtacaggactttatcgacgtgatttcaggtaaacgttccgcctga

SEQ ID NO: 425596 - DNA, 1422 bp, Serratia marcescens
atgagtagggggaaattgccagaaggatgggctagcgccccagtatcggcggtcacaaccctaatccgaggggtcacgtataaaaaagaacaggcaatcaattatctaaaagatgattatttgcctcttatccgtgcaaataatattcaaaatggcaagtttgatactacggacttggtttttgtgcctaaaaaccttgttaaagaaagtcaaaaaatatctcctgaagatattgttattgcaatgtcttcagggagcaaatctgtagttggcaaatccgcacatcagtatataccatttgaatgtagtttcggcgcattttgcggggcattgcgtcctgaaaaatacatcctcccgagttttattgctcatttcacaaaatcttcattttatcgaaacaaaatttcatcgctgtctgctggtgcaaatatcaacaatattaaaccggcaagctttgatttaataaatataccaatcccgtcacttattgagcaaaaaatcatcgccgaaaaactcgacacgttgttggcgcaggtagatagcgccagatcacgtcttgagcaaatcccgcaaatcctgaaacgttttcgtcaggcagtgttggctgcggccacgagtggaaaactaactgaagaatggcgaagcaaaaatataaatgcacctaaattctctgctagctctgattgcttaaaacattttcgaaatgctaaattaccagttattcctgaaagttggcaatggttgcatttcgatcagattgcagaaatagcatcaaacttaaaatcaccacttgatttcccaaatactactcatatagctccaaatcacatcgaatcatggactggtaaagtatttggttatcaaacaatatttgaagatggtgtgactagcgctaaacatgagttttacaaaggtcaaattatttattctaaaattcgaccatatttatgtaaggtggctattgcgacttttgatggtctatgtagtgccgacatgtatccgattaatagcaaaatagatactcattttctttttcgctggatgctgaccacaacatttaccgattgggcttcgaatgcagaaagccgaaccgtacttcctaaaataaatcagaaagatttaagtgaaatcccagtacctacaccaccactcctcgaacaactcgaaatcgtccgccgcgtcgagcaactcttcgcctacgccgacaccattgaaaagcaggttaacagcgccctgacccgcgtcaacagcctcacccagtcgatcgtggcaaaggccttccgcggcgagcttaccgcccagtggcgtgctgaaaaccctgatctgatcagcggtgaaaacagcgccgccgctctgctggaaaagattaaggccgaacgcgccgccagcggtggtaaaaaaaactcgcgtaaaaaagcctga

SEQ ID NO: 425597 - DNA, 1590 bp, Serratia marcescens
atgaacaataacgatctggtcgccaaactgtggaaactgtgcgacaacctgcgcgacggcggcgtctcctatcaaaactacgtcaatgaactcgcctcgctgctgtttttgaaaatgtgcaaagagaccggccaggaagcggactacctgccggaaggctaccgctgggatgatctgaagtcgcgcattggccaggatcagatgcagttctaccgtaacctgctggttcagttaggctctgatgagaaaaagctggtgcaggcggtgttccataatgtcagcaccaccattgagcaacccaaacagctgactgagctggtcagctatatggacgcgctggactggtacaatggcgaccacgggaagtcccgcgacgacttcggcgatatgtacgaagggctgctgcaaaagaacgccaacgaaaccaaatccggcgcgggccagtacttcaccccgcgtccgctgattaaaaccattatccatctgctgaagccgcagccacgtgaagtagtgcaagaccctgctgcgggtacggcgggctttttgattgaagccgaccgttacgtaaaatcacagactaacgatctcgatgaccttgacggcgatacccaggatttccagattcaccgcgcgtttattggcctcgaactggtgcctggcacccgtcgtctggcgctgatgaattgcctgctgcatgacattgaaggcaacctcgaccacggcggcgccatccgtctgggtaacacgctgggcagcgacggcgaaaacctgccgaaggcgcatattgtcgccaccaatccaccgtttggcagcgccgcaggtaccaacatcacccgtaccttcgtgcacccgaccagcaacaaacagctgtgctttatgcagcatattatcgaaactctgcacccctgcggccgtgcggcggtggtggtgccggataacgtgctgtttgaaggcggcagaggtaccgatattcgccgtgacctgatggacaagtgccatttgcacaccatcctgcgtctgccgaccggcatcttttacgcccagggcgttaaaactaacgtgctgttctttaccaaaggcacggtcgccaatccgaatcaggataaaaactgcaccgatgacgtgtgggtgtatgacctgcgtaccaatatgccgagcttcggcaagcgcacgccgtttaccgagcagcacctgcagccgtttgaaaccgtctacggcgaagatccgcatggcttaagcccgcgtaccgaaggagagtggagctttaacgccgaagagagcgaagtcgcagatagtgaagagaataaaaacactgatcagcatctggccaccagtcgctggcgtaagttcagtcgcgagtggatccgcagcgctaaatccgattcgctggatatctcctggttgaaggataaagacagtatcgacgccgacagcctgccggagccggacgtgctggccgcagaggcgatgggtgagctggtacaggcgcttggcgagctggatgcgctgatgcgtgagctgggcgcgggggatgaggccgatgcgccgcggcagttgctgaatgaagcgtttggtgaggtgaaggcatga

SEQ ID NO: 425598 - DNA, 3513 bp, Serratia marcescens
atgatgactaaatctaattttgagttcttaaagggcgtcaacgatttcacctatgccatcgcctgtgcggcggaaaataactacccggatgatcccaacactacgctgattaaaatgcgtatgtttggtgaagcgacggctaagcatcttggcctgctgctggatatgcccctctgtgagaatcaacacgatcttctgcgtgaattaggcaaaattgcctttattgatgacaacatcctttctgtattccacaaattgcgcagagttggtaaccaggcggtacacgaataccataatgacctggatgatgcccagatgtgcctgcgcctcggattccgtcttgccgtttggtactaccggttggtgaccaaagattacgatttcccggtgccggtttttgtgctgcctgagcacggtgaggctcgctatcacgccgaagtcctcacgctcaaacagcagttggagcagcagtcacaggaaaaagtacagagccaggcggagctggaagctcagcagcagcgtttaattgccctcaatggttacattgctgttctcgaaggcaaacagcaggaaaccgaagcacaaaccaaagctcgcgtggccgcactggaagcacagctcgccgccaaaaatgccgagttagcaaaacagaccgaacaggaacgcaaggcataccataaagagattaccgaccaggctatcaagcgcacactgaatctcagtgaggaagagagtcgcttccttatagacgcacagctgcgtaaagcgggctgggaggccgacagcaaaacgctacgctttgccaaaggcgctcgaccggaacccggtgtcaacaaagcgatagccgaatggccgacgggtacagatgaaacgggtaaaacaggctttgccgattacgtgctgttcgttggccttaagcccattgccgtcgttgaagcaaaacgcaaaaataccgatgtacccagcaagctcaacgaatcttaccgctacagcaaatacttcgataacgccttcttacgcgacacgctgctggagcactacgctcctgatgaagtacacgaagctgtaccgaactatgaaatcagctggcaggacaccagcggtgaaaagcgttttaaaatccccttctgttactccaccaacgggcgcgaataccgcgcggcgatgaagaccaaaagcggaatctggtatcgcgacgtccgccacactaccaacatgtcgaaagcgctgccggagtggcatcgcccggaagagctgctggatatgctgggcagcgacccacagaaacaaaaccagtggtttgttgaaaaccccgggatgagcgagctggggctgcgctattaccaggaagatgccgttcgcgcggtagagaaggcgatagttaacggtcagcaacaaatcctgctggcgatggcgaccggaaccggtaaaacccgtaccgccattgccctgatgttccgcctgatccagtcgcagcgtttcaaacgcgtcctgttcctggtcgatcgccgttcgcttggcgagcaggcactgggatcgtttgaagacacacggattaacggcgacacctttaacagcattttcgatatcaaaggattgaccgacaaattcccggaagacagcaccaaaattcacgttgccacggttcagtcactggtcaagcgtacgctgcaatccgatgaaccgatgccggtcggccgctacgactgcattgtggttgacgaagcacaccgcggttacattctggataaagagcagaccgaaggcgagctgcagttccgcagccagctggattatgtttccgcctatcgtcgcattctcgaccacttcgacgcggtaaaaattgccctgaccgccacgccagcactgcatacggtagatattttcggtgaaccggtttaccgctacacctaccgtacggcggtgatcgatggctacctgatcgaccaggatccacccattcagatcgtgacccgcaacgcgcaggatggggtctatctgtccgagggtgaacaggtggaacgtctggacccgcaaggtgagctgatcaacgacacgctggccgacgatcaggactttgaggtcgccgattttaaccgcggcctagtgatcccggcgtttaaccgcgcggtatgcggtgagttaaccaaatacctggatcccaccgggcagcaaaaaacgctggtattctgcgtgactaacgcccatgccgatatggtggtggacgagctgcgcaccgcatttaagaaaaagtacccgcagcttgagcacgacgccattattaagatcaccggtgatgctgataaagacgcgaagaaagtgcaaagcatgatcgtccgtttcaacaaagagcggctgcctaatatcgtggtcaccgtcgacctgctgaccaccggcgtcgatatcccatctatctgtaatatcgtgttcctgcgcaaagttaaaagccgcattctctacgagcagatgaagggccgcgccacgcgtctgtgcccgtcggtagggaaaaccagctttaagattttcgactgtgtggatatctacagctcactggaaagcgtcgactccatgcgcccggtggttgtgcgtccactggtggagctgcaaacgctggtcaacgaaattaccgactcggaaacctacaaaaccctcgaagcggatggccgtagtttcgccgaacacagccatgaacagctggtcgccaaactacagcggatcatcggcctcgccacctataaccgcgaccgcagcgaagcggtggataaacaggtccgccgcctggatgaactctgtctggatgcagcaggcgtcaacttcggtggtctggcctcgcgcctgcgtgagaaagggccgcactggagcgctgagattttcaataaacttccaggctttatcgcccgcttggaaagactgaaaaccgatatcaatgccctgcgtgacgcgccgatcttcctcgatattgacgatgaggtggtgagcgtcaaatcgctgtacggcgattacgacacgccgcaggattttctcgaagcatttgatgatttggtcaaccattcccctaacgcccagccggcgctgcaggcggtgatcaatcgcccgcgagacctcactcgcaaaggcctggtggagctacaggagtggtttgaccgccagcattttgaagagtcctccctgcgcagtgcctggaaagagacgcgcaacgaggatatcgctgcccgacttatcggccatatccgccgtgcggcggtggggaatgcgctcaaaccatttaaggaacgtgtcgatcacgcgttggcgcgtattaaaggcgagaacgactggagttctgagcagttaagttggcttgaccgtttagcccaggcgctaaaagagaaagtagtgctcgacgacgatgtcttcaaaaccggtaatttccaccggcgcggcggtaaaccaatgttacagcgcacctttgacgataacctcgacagcgtgctggataagttcagcgattacatctgggatgagctcgcctga

SEQ ID NO: 425599 - DNA, 1323 bp, Serratia marcescens
atgcgtcgttcgcaacaacggttagctatctggatgaacggtattccggtgggatactgggaaaagcgtagaggtgaggatcggcttgagtatctgccagagtggattgccgatagtcaggggaggcctttgtcgctttctttgcctttcacgccggggaatcagccttatcgcggtaacgtggtgcgcgattatttcgataacctgctgccagatagcgaggggatccgccgacgtttggctatgcgctatcatgccgaaagtctggaccctttcgacttattggccgaactgggccgcgactgtgttggtgccatacagcttctcgatatcggtgagcaacctgcggatatattttccatcaggcaacgcccgctggcagaggcgcaaatcgccgaaatgctccgcaatactgccacgacgttaccggggctgcagggccaggatgacgatctgcgtttatccatcgctggcgctcaggaaaaaacggcgctgctgtggcatgacaaccagtggtgtttacctgagagaaatacgccgaccacgcatattttcaaattagcgctaggcctggtcggaaacatgcgggccgatatgcgcacgtccatcgagaatgaatggctctgctccctgattgttgaaaactatggtgtgccagtagcaagtacccatattgcgcagtttgaagatcaaaaggcactgatcgttgagcgttttgacagaaaattatcaagcgacaaacagtggtggatccgactgccgcaagaggatatgtgccaggctctgggcgtttcgccgctgaggaagtatcaatcagacggtggccccggtattaccgatattatggaaattctgagtcgttcggaacaggctgaaacagatcgcaggcacttctttaaagcgcagattattttttggctgctggccgcgacagatggccacgcaaagaatttcagtcttgcgcacttaccgcaaaatcgttaccacctgacgccactgtacgatgtgctatcggcctggccgctgattggcccgggcaataaccagatagcctggcagaagtgcaaactagcgatggccgttcgcgggagcagtaaccattacctgcttagccagatccgacgccgccactggataaaacacggtgaaataaccgggttaggccaacaggaggttgaatccattattgaagagctgctggcagcaaccccgggagtgattgatcgtgtcattggactgctacctgattcgttcccagccgaattagcggcatgcatttttgatggtatcaggcagcagtgcgcgcggttggtagggcgatag

SEQ ID NO: 425600 - DNA, 297 bp, Serratia marcescens
atgaataccgtctatccgttaaaaacactaagccagctacgccctttgctggtggggtttcgtaaagcaaaaggtctgacgcaaaaagacgtttcggagaggctgggcgtcactcaacagacctatgcgcgcctggagtcaaatcctgcatcagccagtatggagcgcctttttagggtgtttaatgtgctggggattgaaatggtgttttcctcagagcttgcctcccgggaatgtgaaacggaagaaacctctacaactcgtatagactcgcctgcaagacgggaacagtggtga

SEQ ID NO: 425601 - DNA, 381 bp, Serratia marcescens
atgaaaaaattcctcttactctttattcctctttttatctctggttgccctatgggggataaagtcaatttacgcccggcaaaagcaacggccgtcggcagcaagatctgcgtttttgtcgataagaatgacatggaaagagaagagtccattctgaaggtagccatatggaagtatgacaatgataattatgtctatgaaaaatcatatgccaacaccccggtagtgttggaaccggggaagtgtgttcctggagtcgatgagtatgattttatccctggtgaaggatacagtgttattgtcagtacgcctttgcatccttatgaggccgggtttattgtgtggaagcgaggtgaagaggttatgttggagccgtattag

SEQ ID NO: 425602 - DNA, 522 bp, Serratia marcescens
atggagccgcaacaggaagggatcacgcgggcgttaacgccgggcgaagtcaatctggcgcgttcggtgtttggcagcaccattttctatcagaacgtcttagtccactgcgacagctacctgccgtttgggttgcagaatcagtacacggcgatgagcccgaatggggagctgtaccttcgtagggctttataccgacctgattttacggtgcatcatttggcacagcacctgtttatccacgagatggcgcatgtctggcagcatcaaagaggcatgtggatgcgtacacgtgggcttctcagttgggcggtgagctatcaatatcggctcgatcggttgctgttgcgtgagtatagtatggagcagcaagcatcgataattgcagactatttctatctcaagaagtttggcgttagcgattttatcggtttatacggtaggaattactcagggatagtagacagaagtacattgtcaaaatttcaacccataatcagaagcgcagggctgccactatga

SEQ ID NO: 425603 - DNA, 3492 bp, Serratia marcescens
atgttgacgactaaaatcgagcaagcccgaactgcacttagcggtcgctgcgtggtctcaatgtcgggttccagtccatcagcgcgtcatcctggctcggcgtccacgcaatcctcccaagtttcgtcccgggatgcgccagcaacggtattgcaacagcgaccaaaggctaatccagctcctatcgtgcaacagcaattcggcgaagaccagatcgacctaggtccactcccctctttctctccaacaggtaagtcgaatgatgcgcgcgcgatactggcagcatggacagccctcgaagcactatcgcctcaaggttataaacgcccagaggatatgacaaccggcgaccgctccaaggttgctctattggagcgaggtgttccatggggaccaaatgtccgcagcaagcccagctataagctttatttcgaggtcatccttggcgccatcgctctcgacaaggcgacggacgagctggtcaaggtttttggcgaggatgaggagcgttcacgcccggacggtaagaaagcggccatcggttcgatcctgatcgacaaggaaggttatgtgcttgaggacaaaggcgtcgctgtttccagttttgcctgggcactcaagcaggctctcgatctgaagcttgggagcttagggaattggccgaatgttgagccgcgcattatcgagcatctggatcgaatggttcgccgtcacaacgaggatggagaacccataccgatcgatttggatgtcgttcttaacgcttataaatggcttgtgtctcagttcggtgtacccaagcatttggttgagccacccacatttgcgattaaggtgtttcatcatttcaaagccaagacgccgcctgaaccttcgttactgaattctttctatcttgaagatctcggtgaagcaactaaattgctcgagacgggcaaagccggaaccggtttgcgccgctacatgggaattggtaggcctgaccagaaaatcgacgtgctatcgcccatttccgcagttgagccgttcgtcgcaccgtcgctcatgccgcaggctcgttggccttcgaaaggcggccatccattggtgctgcttcaacaggctgccgtgaatgcggcacgtgctgagctgaatgatgctccaggtatcatcggcgtcaatgggccaccgggtaccggaaagaccactcttctgcgggacatcgtcgttgggtgcattcttgatcgggccacggcgatgtccggcttcaacaaaccgcaggatgccttttctacaacaggcgagaagctggcattcggttccaatgccttcctgcacttctacaagttacatgcatccttgaaaggccatgagatcgtcgtagcgtcctccaataacaaagcggtcgagaacgtcagtaaagagcttcctctcaaagaagcaaatggtcgccatgaacagattgcctacttccggtctatcagcgacctgattgcgaaccccaaacgggctggctatttcgaagccgagggtgacaccccctccgatcctatcgaaacctggggactgatcgccgcagcactcggcaagagcagcaaccgaggagcgttccagcaaggtttctggtggaatgaggacggcggtttccttacctacctgaaagcagctcgcggcataaacgtcatgcgtgagataaaggacgaacgaactggcgcaatcattgatcgcattatgcccagcgtggtcatcaatgagcggcccagcacaaacgaaacggatgcggcttcggcttggctgaaagcgcgaaccgcattccttaaactcaaagagacggtagacgccgaaatcgcaagcattgaagtgatgcgccgggatatccgggcgcttaagggggcggccaacgaacttcaaatattgaaacaacgccgtccgagcctgaatgaaaccgtcgaagaggcacaccagattgctgaatcctgccaacgagagcatgagaaggcaaaatcgcagatcgagcaggacaagatcatgctcgacagccatcttgcttgccgcccaggtttcttctcccgtttgttcgcgactgcggcctggaagtcgtggagatcgacattgcagaagctctctgcgaccttgcagcaatcagtcttacgagcgcaggggacggacagtgccctggagcttgcaagaactgagtggagcaatactgagtcccagttacagcaactcgaccaggaaatttccagcaaatgtcaggctgtctcgaaattgaaggcgaccgaggaacaggcacgaaaccgcatgggagacagggtcgttgatgagagatttttcgagcgcgagcacgaggctatccacctgactgcaccatggcttcccgatgaggttcatcgcctgcgggaggatcttttcgccgctgccctgacggtgcataaaacgttcatcgatgcttcggccaaccgcttgcaacacaatctcgggctattgatgtcgggcatggcggctggtgccttccagtctcctgctcaccgtgaacttctccctgatctttggtcgagccttttcatggtggtgcctactgtgtccacaacgtttgcctctgtatggaccatgtttggggatctgccaccagagagtattggctggcttctgattgatgaagcaggccaggcggttcctcaagcggcagttggagctatcatgcgggcaaagcgctccatcgtggtaggcgacccgttgcaaatcccacctgtggtatcgctacccgagaagctgaacgccgaaatctgcaagttcttcaacattgaccagatcgaatggtctgcccccgccgcatctacgcagacccttgctgatcaggcatcgcgcttcaaatccaccttcgtcatggatgtaggtgatcgagaagtcgggctgccactgctcgttcacaggcgttgccagaacccaatgttcgatgtttctaactccatcgcctatgccgggcagatggtccatgctgtcgggcctaaaaaacctggatctatcggctcggctttggggagatctcactgggtggatatcaatggcgatgctgagacgaagtggtgccccgacgagggcgaagcggttgtacgaatgctcaaagagctggcagcaacgggcattacaaatccggacgtatttatcattacaccattcaagatcatagagcagaacatgcgtcggcgtctcgacagtgaaactgatctgctacgggcgttcggcgtaaagttggatgagtggtgccgtgatcgtgtaggcacgatccacacgttccagggccgagaggcggacactgtcatcctgttactgggtgctccgaaagcgagtcagcaaagggcgcgtcaatgggcggcaagcccaccaaatataatcaatgtagccgtctcgcgcgccaagcaaaacctgtatgtggtcggctcggctgctgcatgggcaggggcgggaactagtctgcaggtcctgcatcggcaattggcgcaatcagtctga

SEQ ID NO: 425604 - DNA, 1347 bp, Serratia marcescens
atgcaacatttccaagctcactctaccgatgatttgcgtcatttaatcgctgaatatgggaaaaatgcgttatttcgtggacaaaccacccattacggccaaccaggtcatccctctgttgtcgcatcctccgatcgtcaaatatgtcatcctgatacaatgttaaaatggtgtacttactctcgaaatgtccttgagactttccttggcaggcataaaaacgagccccattttgtccaagctctgctccagcattatggatggcggtcgttttacgttgattgttctgcaaatcccgcagtcagcacatggttcgcaagtcatatataccgcgaagataaacatattgaaatgagtgaagactgtgatgaagagcctgtcttactcctcaaacgcctcgcatcatatgattttgaggacggtgacggtcatctgtacattatcgacaaagaagaggccttaaaaatcggattagccgatctatcttctgtgacgcttcctggttgtcgccctcgtacagtcgctcaggaagcttggttactaggaccattattaggaaatcccgtcccccaacaatgttttcgtgctcagatcacagccccgcgttcagtcttacgggactatgcattttcctcgggctttacttgcatagatgatgtatttccatccatagtagaagatccaattctcaatgctttactgagtttaccttggagggaaatcaaagaagtatgggatcctaatttccctattccttgcttcagacgaaccctgagcctccctgaatatcaggatagtttcgtaaaaattgcatggcctcgcaccgcattttttcggggaacacgtctgtctgaacggtttagttcggtcgatggaaatgcttctggtggaattattattccagttccggacgttgttttttttggaactgcacctgaaactatccctcttcgttttcctgaacttgaagccctattgcttaagtttggctcagtcatttttgaactggatgaacttatccagcacaccagtatgcaaaacctcacttcctaccaaaaaggtgtcggtgtcgtaatgattgaatctgaccttattcaggtatcagaactcatggttgaacaccccggacaagaaatgacagctacgggattagtctatggctggtattaccgaaaaagtgaaagcggattatggtcaagagtagcgcatcctgatgaatgtccctgtgatgatgcctttacacacaatcggcatttatcagcactgaaaattgctgaggattttctccgtagctcgtcatttgtgcgggaaaagaattatcaagctcggatgggcgttggaaaatga

SEQ ID NO: 425605 - DNA, 2199 bp, Serratia marcescens
atgagcagtgcctacgatagcctcgatcaccgcgtccgtaagtgggtttacaagcaggggtggtctacattaaggcccttgcaggagagttctatcccggcaattttagcccgtgatcgagacgtgctaatcagtgcaggtacagcggcgggtaaaacagaggctttctttcttcctgcctgttcggcagttgcagatctcacgaatggatttggcatcgtctatatcagtccgttgaaggcgttgattaacgatcagtaccgtcgtcttgggagccttggagatgcattggaaatgccagtgactccctggcacggggatgtaccacaaagcaaaaagaagaaggctcggacgaaccctgctggcattttactgattacacctgagtcacttgagtctttgctcataaattcaatgggctggctcaaacaggcgttttcttcagtcgcatacatcgttattgatgagtttcatgcttttattggctcagagcgtggtgtacagctgctttctctgctcaatagaattgaccatgtgctaggacgccaggtaaatccaattccccgcgttgcgttgagtgccacgctgggggaactggagaaagtgcccgaaatgttgcgcccggacaaacgactcccctgcgtaactgttacagatagtaatagcacggccactcttcaggtacaggtcaaagggtacttggagcgagtgatccaaaaagaggaagaacttcagagttcagctgaacatgacgtttgtgctgacatttttaaactttgccgtggcgattctcatttggtctttgcaaacagccgaaagcgcactgaaagcattgcggcaacgctgagcgacatgtgtgaggaacaaattgttccgaatgaatttttcccccaccatggttcccttgccaaggaattacgtgaggcgcttgaatctcgtcttcagaaaggaaatttgcccacaacagctgtttgtacaatgacacttgagttgggaattgatatcggtaaggttaagtcggttatccaagttacgcctccgcattctgtttccagtttgcgacagcgtatggggcgttctgggcgacgcgattccccatcagtactcagaatgctaattacagaaaatgagcttactatgagtagcagtatcgttgatcacctacggttgcagttgatccagtcgatggcaatgatcagattgatgatctctaaacaatggtttgaaccagctgatgctcaacagatgcattactctacgctgatacaccagattcttgctattacggcacaatggggcggagttcgtgccgatcagctctggtcacaactatgccaaacagggccgtttagaaatgtagatttaaacgatttcaaaagcctgcttaaacatatgggaacgtgtggcctgctcactcaacttgctagcggcgaaatggttgttggggcagagggggagaaactgactaaccattacactttttatgccgtgtttaatacaccagaagagttccgtattgtcaccggaaacagaacccttggaacgatacctgtggactccccactgctaccagaccaacacatcatcttcggtgggcggcgatggaaagttacagagatcgagacagagaaaaaggttatctatgttgaggcgaccaaaggcggtcagccaccacaatttagtgggggaggaatgtctattcatgatgcagttcgtcaggaaatgctcgctatctatagggaaggtgattaccgcatagcaataggtagcaagaaagtagattatgccgatactgccgccagaaacctatttgctgaaggctgtagtaactttcagcgttataacctgcaaaatgagtattttattacgagtgggcaacactgttacgtaattccctggatgggggataaagttgtgaatacgattacagccttgctaatacgttgtcgttttaaagccaattcattcgcaggtgttatagagattgatgatgcaaatgtagcaactgttcaacaggcgcttaaaaaaatgctgttgtcaggcttaccatctgcatttgatcttgccgaggatgttccagaaaagttcttggataaatacgacgagtttttaccagaatcccttcttgcgaaaggatttggggaaaaagcgtatgacattgaaggcacttgtatttggttgaggcagcaccttaattaa

SEQ ID NO: 425606 - DNA, 1317 bp, Serratia marcescens
atgtctgtaacacgtataagagtgaaagaacgtgacgctattattcagtcacttaagtcaggtgtaacgccaaggataggcattcagcatatccaggttggccgcgtgaatgagatcactgccctccaccaagatattgagaggattgctgacggtggtgcaagcttcagacttatcatcggtgaatatggttctggtaaaacgttctttctgagtgttgtacgctctattgcgctagagaagaagctggtgtcagtcagtgcagacctttctcctgacagacgcattcactcatcgggaggtcaggctcgtaatctctattctgagcttatgaaaaacatgtccaccagaaacaagccggatggtaatgcgttacttagcgttgttgaaagattcgttacggaggcaagaaaggaagcggacactgacggctccgaggtttcatcagttattcataaacgcctggcagctctgtcagatatggtgggtggatatgactttgcgaaggtcattgatgcattctggcgcgggcatgagcaggataacgaaacgctaaaatccaatgctattcgctggttgcggggagagtacactaccaaaactgatgcccgtaacgatctcgacgttcggactattatctcagacgcttcattctatgattctttgaagctgatgagcctttttgtccgccaggcaggctatgccggtcttttggtcagcctcgacgaaatggtgaacctctttaagctgaataatacgcaagcaagaacagcgaactacgaacagattttgcggatactgaatgactgcctgcaaggctcagccgagaacattggttttatcctcgggggtacgccagagtttcttttcgatccgcgtaaaggtctttacagctatgaggcgctccagtcgcgtctggcggaaaaccggttcgcgcaaaaagcaggagtgattgactactcatcccccactttgcatcttgccagcctcacccctgaggaactgtatattttgctgagaaatcttcgtcatgtttatgcaggtggagatccagagaattatctggtaccagatgaggctctgactggattcctgcatcactgtagtaaaaccattggagacgcttacttccgtaccccccgtaataccataaaaggtttcctggacatgctggccgtgctggaacaaaacagaacgatgaactggcaaacactaatcgagggtgtggcgattgaagaggacaggcccagcgatatggatgacgccactacggaggaaagcgatgacgacgacggactggcgaacttcaaactatga

SEQ ID NO: 425607 - DNA, 2310 bp, Serratia marcescens
atggagttattgaagtttctggcggcgattttagtaatttacttgttgttttttagaaagaaaaaacgtaaatctccaaagtcttatgcttcaagccctgtgaaagcaccgccaaaagaatggctcgctgacatcaagaaaaaagaggcggttgtgcgaaatgatgatagtgaagacgataaccttgcaacttttacattgagcggtggccggggtgttgaagttcgggtgacaaccaatcattaccggaacacctccaaatcagcaggtgcactagctcgatgggtacttccgggtgagatgataactgtagctggtgtaacaattagcggtggccacatttacgtggggcaacgtatgaagccctccggtcaagaatcaggcggctattatgacgatggaagtgaggcatcattaattgatgacacatgtaagataaaacctacttcttatctttacgaggacagttcattaggatactggcccagtttttcatctctttccccagaagcacgcggtgcgtatgtcagttggcttgccagcgataggtctgatccatcgtgtcctatcggctatgtttttatctacctctatggcctggaaagaaaagcgctcgtagattccactgacccaaaattccctgatgctgagttccgtaatctgttcaatgaagtcgctcggttaagatcggtattcattgagaaccgctccttccgtggatattcgacccaattactcgaagccatgtctattctgcgcccgaacatggacttagccactgagctcgatagcaattcaggtttcagcaacagcatgcaatttaagctggctctggcaaaaactgtacatgaaggagttcctgtatcagctgaaatggcgttgaactgggtaataaaccacaccgagtattcgctgcgtactccggctcgccgctgtgctaaagagtttgctgcgcttttcaaacggcgttacaccctcaaatatggtgaagggatggtcgttaaggcgaataaaacgcgcctaaggttagattacacaccagcaagtcctagtttgcgaggtgttcgacttcctgttcccgacctgcctgatccaagtgcgttgaagagccctgtccagaaaattatggctcttgccgacatatgtacggatgaacttgatgcttatagtcgctaccttggtaggaaaggtacgtcagtcaatgatacggctgcaattatcttgctcccttcagagatcgttaatgaaagcgcagaaaaaatattaagctcattcaaacgctgggctgatgaggcgatcctcgtcaaggaggggttagtctcagttgctgacttttgggcacatatgaatgccagttgccccaataagatcaataaaaaagaggccgatttgatgcaggcctttgctctgaagatgggttacggtgtggcacctgacccgtattatcaccatgtgaaggcggatgttgatggtgtacttgttctattccccgccgccgaagatggacgcttctcaccttctcctgaatttatctcagccgtcatgacgctcagattaggggctatggtcgccttgattgacgattctcttgatcaagctgaacagaaagtgcttgagaatgccatcaacaacaatcctggcttcaccgatgatgaaaaacgctctctacatgcgtatttaacgtggcaacttcataccccagccaatatgacaggaatgaaaagcaggattgagttgatgggggccgcggaaaaagctgctgtgggtaaggttatcattagtgttgcctgttcggatgggacgatagcgcctgccgaaatcaaacagcttgagaagatttattcaagtttggggctggatccctcatctgtctcgagcaatatccatcagcattccgcaactgaacatgatctcgtctcgtctgtaccaactgatcagacagcagcagggttcacactggatgctaatgtacttgcccgccacgaatctgccacggatgatgttcgtaaattgctgaacacaattttcaccgaagaagaaccggaagagccagaaagcgctccagcctcatcaacggaggcgggggggcttgactccgcacatagccagctttatcgcagtttgctggagaaagaacagtggtcccgaaaagaggcgacagaattgtgcggaaatttgaatttgatgctcggcggtgcgcttgaggtgatcaatgactggtcctatgcggtggttgatgctccagtactggacgatgccgatgatgatatctgggttgacctggaaattgccaaagaattagagggatag

SEQ ID NO: 425608 - DNA, 2334 bp, Serratia marcescens
atgagcgcccagttcgtttcccagaccgtacgcaccgccaccggccactggccggtgatactcccggccctcggcatcgccttgcagccgaacggcaagtcacagccgtgcccgacctgcggcggcaaagaccgcttccgctttgacaaccaggacgggcgcggcacctggttctgcaatcagtgcggggccggtgatggcctcaacctggtggaaaaagccctgtcgctgtctgccagagcggccgccgaacaggtggctgccgtgatgggagagaacgccaacgccttgccaccggccgctgagactggtcattcaacgaaagataaggccgaggcccagcgcaaggccgccaggcaggcactggctctggtggctgccgcgcagtcccagaccggcaacgcctacctgagcgccaaaggctggccggaggcagaaaccctgaccttgcacggccagccgctgcgcgtcggcggtatcaccttccggcccggcgacctgctgttgccgttgcacaataccgggggcgaggtggtcaacgtgcaactgattaacgccagcggggacaagcgtatgttggcaggcgggcaggtgaaagccgcctgttacaccctgagcggcccggacaacgcggttatctggctcaccgaaggttatgccaccggcctcaccgtgcaccgcctgaccggtgaaacggtgtgcgtggcgctcagcgccaacaacctggcggccgtggcagagcagctgcgcagccactacccggatgcgcggctgctgctggcggccgacaatgaccgcagcggcaccgggcagacccgcgccgccgaggcggccacacgcaccggcggtgtcctggcgctgccgacagacatcggcgactggaacgacgtctactgtcagcagggcgctgagtccacgcgcgcccagctccaggcgttcagccagccgccgcagcccagtccgttcgacacgctgagcgatgctgacctgaaagccatgagcgccagcgagaaagccgaactgctagccgagcactacggcaacaccctggcggtgccgccggtaggggaagagctgtgccgctatacgcgcggcgcctggcaggtgctgccacaccggcaactgagccgggagattgccgcgttgttccagaaggtgcgcgcaccgttctccgccgccggtatcaacagcattttggacaccctcaagctgatggtgccgcagatgggcgagcctgctcgccggttgattggttttcgtaacggggtgtttgataccgtcagcggccagttcagcgctcaccggcaagaacactggctgcgcaccgtcaacagcgtagactacacgccgccgcgtgccggtgagaatctggctgaccatgcgccgcacttctggcattggctgacgcgggccgccgggggcaaccacgacaaacaagagcgcatcctcgcggcgctctttatggtgctggccaaccgctacgactggcagctgttcctcgaagtgaccggccccggcggcagcggcaagagcgtaatggcggccatcgcccggctgctggcgggagccgataacaccacttcggccaccatcgacaacctggagtcggcgcgcgaacgtgcctcggtggtcggctactcgctgattatcctgcctgaccaggaaaagtggagcggtgacggggcgggtattaaggccatcaccggcggcgatgcggtcgccatcgacccgaaatatcgtgacgcctacgcggcgcacattcctgcggtgattttggcagtcaacaacaaccccatgcagttcagcgaccggagcggtggcatctcgcgccgccgcgttattctgccgttcccggaggctatcgcccccgaagagcgcgatccgttgctgctggcgaagatcaccgaagagctggcggtaatagtgcgccacctgatgcagcgtttcgccaacccgaatgatgcgcgtgcactgctccaggcgcagcaaagttcggcggaagccctggaaatcaaacggcatgccgatccgctggtcgatttttgtggttacctgacggtgctgggtaccccggaagggatgatgatcggcaacgccaacatcaccccgccgaatccacgccgctacctgtatcacgcctacctgtcgtttatggcggcacggggctatcagcacgtgatgaacctgacggcgttcggccaggcggtgccgcagacgctgaaagagtatgagcatacgctgctgaaacgccgcaccaagcagggaatacaaaccaatctgatattgagtgacgagtgcgaagcggactggctgcctaagtgcggggcggtgtga

SEQ ID NO: 425609 - DNA, 336 bp, Serratia marcescens
atgaacactgcatcctgtttaccgattgaagtccgtaccgccgttttccgccgcgccgtggcgcaggcctatctggatacctgcgccttttaccgggtgagcctggggtacacgctggacgagctgcagatgacgattgccctgcgcctggaggggcactttgtgcgtcagtacggcgtggatgacggcatggacatggcgtgcaccctgctgagcgacatggtgcagccggacgttctggtggccgcaccgcgcctgaccgcgctggggcaaaagatgatggacgagctgtgctgcgaccgcctgtcggcatcgcagaacgccaccgtacactga

SEQ ID NO: 425610 - DNA, 264 bp, Serratia marcescens
atgaacaccctggccgaccgctattaccgcgacacccattaccctatcccgcacgccgattttctgcgtcttcagcatgcgcacgccaccggcgtgctgttccttgacctgctggataccctcgacctcggcgggctgcgtcccgatgccacgcaacaggcgtcgtttgcctcggtcattgccttgctgaccgaccagctcggccacgtcgtcaacacctgtgaatcccaaatccttgcccgcatggaggccaccgccgcatga

SEQ ID NO: 425611 - DNA, 192 bp, Serratia marcescens
atggctacgaccctcaccccgactcatcctacattctgctttttgtttgcggccgtgcgccgttctgcgctgactgccgccccgcgtatcgtgcgcaccgtggcggattctgagcacaacgctcgccgcctgctggcccgtgattacgtgttgtcctttgccgggcgtctgccggttaaggcggcagcatga

SEQ ID NO: 425612 - DNA, 246 bp, Serratia marcescens
atgatgcagctaaccttgggtcgccagcatttcaccctcgatgagcgcgacgcgctgtttgtggcggaagctattctgttgcagcgtaaagagcctggcgtcgtcttgccggagcaccgcagtgaaaaacacggcgttattcgtctggcgagtcgccaggccgagccgcgcctgttccgtgccgggccggtgccgctgacctgcgcggcggccgatactcgcaacgacccgcttaccgactgttga

SEQ ID NO: 425613 - DNA, 264 bp, Serratia marcescens
atgttgaccgttttcacccacacaccatctaccccgtcgccggtgcatcctagcggttacaccccgcgagagcgctttatccgcctgccggaagtgctttacaccaccggtctatcccgctccaccgtgtacgagatgatgagccgtaagcagttcccggcccaggtctcccttggtggtaaaaacgtcgcctggctggcctccgaggtcgaacagtggatggatgaacgtattgccaaccgtcaccagggggccgccgtatga

SEQ ID NO: 425614 - DNA, 726 bp, Serratia marcescens
atgagcaccaccgccttaccgaaatacatcaccgataaactgcaagccctgcgtgacgctcgtgccgcccacgacaaaaactaccaggcgttgaccgacgtcgtgacaggcattgcccgctgccaccaacagaagaaagacaccgaagtgcagagccaggaggcagaaagccagtggcgcaccctgtttcgcaaactgcgcggagaaatgacgccggaactgcaagcgcagcaccacagtcggatttccaagcgggagctggcgaaagagttcgacggcctgattgaggagatggagctggacaaaatgcagcttcacctcagctgcggcggtacagccccgaaggtggtgaacgcgcacaaagacgccctcacgacctttgcagctcacgcgatgcatcaggcagtggatgcgctgagcacagcgcttatcagccctgacgttatcaaggcgtgcgcactggcttcacgggcttacggcgtctatgcggacaatccgatgaaaatgattgagctacaggtactgggcacgctacaaggccgcattcgcgctaccatggctacacaaaatatagaccacccggtgcttaatgagattggcctgacgataccgcaagaaaccggcgtattgccgaaactggaaagcagtcctgccaaacgcacgcaggttgccttagaactgaaggaaaaaagtcaacgcatgcaccagaagggggccaaatcatga

SEQ ID NO: 425615 - DNA, 255 bp, Serratia marcescens
atgatgcgctgcccgctgtgcacccatgcatcctatacccgtaccagtcgctatatcacggagcggacgaaagaggcgtattaccaatgtcagaacctgacctgttcttgcacattcaagacggtggaaagcgtcgataaaatcctgtgccaaccgatacaagcgcaaccggtcgatgagaacgccttgccaccaccggagaaacggacgttgaaccgctatcgccgttacaacagcaatcctaccctgcactaa

SEQ ID NO: 425616 - DNA, 1602 bp, Serratia marcescens
atgctgacgtccatatattgtaaaaaattagttcgtgaaactttggtgttcggcccaggtctcaatactatattaggccctcggagtggagcaaactccattgggaaatcctcagttttatatctaatagattttgtttttggaggagatggttttttaaaaaattgtgttgatattattaatcaaaaagggcatgtaaaagtttatgctaatttcgaatttaacaacgtttgttaccgattctttcgaagcactgaatttccaaatgtcgttcaatactgcgttgggaatgaagagaaaacaattgctgaatatagggattttctctctgaacagtatggcctgactgaaagtgcaccaacctttaggaatattacatctcgattttctagaatatggagaaaaggtaatgaagatcctgataatccattacacaaccatccatctgaaagctacgcagaaattaaagagtttttaataaaaacattcggttatgcagatttgttcgatgagatgcacaaaaataaaaaagaacaagagagcttaaggagcagtcttgattcagcaataaagaaagggctaataagcaaggccactaaaaaagaagtgcgtgctttaatgtctgagctcataactattaatgaaaagattaattacataaaagatgattttggtagtttcatttcaggtattgaatctattgtaaatgaaaaaaacattgaattgataaaagataaaaatagcttccaaaagcaacgttctgttttgaatagcaagattgaaagattgaaagccaaccttcttcatgcaggaaccataaagggtaagtatttcgaaaaactaatagatttcatacctaccgttaatattgataagctaactcaagtggagtcattccactctggagtcactaagatattgacgagcaaaatcaaagaagaggtaaaggttcttgagtttcaagtgaatgatattgaccaatcgctgattaacatagatgaacaaatcaaagcatctgctgggaagcttgataaaccaaaagagttaattgacgaagttctttcacttaccatacggaaaaaagatattgagagaacaatccattttacagaaatgaaaaatgatattgatgaaagtgtgaaaactttacgtgctgaaattgatgagagagtgggtagtgtattaatgggtattgaaaaaactattaatgaaaatataaatattgtttgctctgagatatataagaatagcaaaatttatccaaggttatgcttgaataaaaaaagctacgtctttgaacattatagcgattctggcactgggaagtcatattctgatttgctgatatttgacatttctttcctgaggaatacatccctacctattttgattgaagattctttaatatttaaaaacatagagtctaaaacaaatgaagcgattgtcgaatgtcttgctcagagtaggaagcaaatttttgtagccatggatcagttaagccttttgagtgaacgaaccaggataatactgagaagctctagattcatgcgagtaagtagaaagatgcccgcattcggagaactgtggaatttaaaagactaa

SEQ ID NO: 425617 - DNA, 756 bp, Serratia marcescens
gtggcagggaaaagaggatctatcactgaaaatatgaatatagccttatgtaatgaggtgaatggcatctgtccgaaatgcaataaagcactattaaagaaaagcggtaaaagccatgttaaggtatatgaagtagctcatatatatcctcactcccctagaccaagcgaaattaatttattaaaaaatgaaaaaaggctaacgactgatgttgatgatctaggtaatcttattgctttgtgtaaggattgccataaagtcttcgataaccctcgtacagttgagggttaccgagaaatgtgtaagataaaaacagtatcctctcaaaacgcagaaataagaaggaacttatcaacttttcacttaactgaagaagtgaaggagttaatagaaaagctagcaagtaaaattaataaagcacaagcaaatctagattttgacgctaagactattgataaaaaattacctgatgacgatgattttttattaaggtttaaagtccaaggttttgttaattatttttacgtcgatattaaacaactttttcaagaactggataaagatattcctggtacctctgagttagtttattccgaggtcaaaactcattatctaagtttaaagcgaagtgggttagataaagagaaggctttcgatgctctagtgagttgggttcatcttacatgtcaaaaaaagaacaaggtcgcatctgaggttttaatctcgttttttgttcaaaattgcgaggtgttctag

SEQ ID NO: 425618 - DNA, 768 bp, Serratia marcescens
atgatcccgtctgaacgccgcgattatatctatcgctatgtgcatgaataccagctggcgagcatcagcgcgctgtcggagctgatgagcgtctcccacatgacggtgcggcgcgatatccgcgtgctggaggagcaaggcaaggtggtcagcgtcagcggcggcgtgcgcctgagcgaggcgctgcgccaggagctggcctattgcgagaaggcgcagctgcaccatcgccacaagcgcgagatcggcaaatacgccgccggcttggtggaagacggccaggtggtctatctggacgccggcaccaccaccttcgagatcgcccgcagtctggcggagcgcttcaatctgacggtcgtcaccaacgatttttccatcatccagcacctgatgaatcgcccgcagctcagcctgttccacaccggcggccaggtggatcagcgcaactactcctgcgtcggcaacagcgccgccatgctgttgcgcagcctgaatatcgacgtggccttcatcagcaccagctcgtgggatctggaacacggcctctccacgccgcacgaggagaaggtgctggtcaagcaggcgctgctggaggtcgcccgccgccgggtgctggtctccgacagcagcaagtacggcaaatacggcatgttccgcgtctgcccgctggaggcgctgagcgacatcatctgcgacgccgcgctgccgccggaggcgcagcagctgctgcgcgagcgcggtctgcaactgcacaacgtccaactctga

SEQ ID NO: 425619 - DNA, 966 bp, Serratia marcescens
atgaatatcgtcatcaccggcggcgccggttttctcggccagcggctggcgaaagcgctgctgcacggcagttgcccgctggccttcgacacgctgatcctggcggacatcaccccgccgcccgccccgctaccggatgcgcgtctgcagtgtctggcgctcgatctgtcgcagcccggcgcggcggcgcggctgatcgacgccgactgcggcgtgctgttccacctggcggccatcgtcagcagccatgcggagagcgatttcgatctcggcatgcaggtcaatttcgatgccacccgccaattgctggaagcggcgcgccaccgggcgccgggcatgaagttcattttcaccagttcgctggcggtgttcggcggcgagctgccgccggtgatcgacgatcgctgcgcggtcaccccgcaatcctcctacggcgcgcagaaggcgatgtgcgagctgctgatcaacgactatgcgcgcaaaggcttcgtcgatggccgcgtgctgcgcctgcccaccatcagcgtgcggccgggcaagccgaacaaggcggcctcgtcgttcgccagcggcatcatccgcgaaccgctgcacggcgagcaggcggtgtgcccggtagacgccgagctggcgctgtggctctccagcccggccgcggtggtgagcaacttcatccacgccgccacgctgcctgcttcggcgttcggcgcgctgcgcacgctcaacctgcccggcatcagcgtgcgcgtgcgggagatgctcgaagcgctgcgcgcggtggccggtgacgccgtcgccacacgggtgcgattcgagccggacgccgccatcaaccgcatcgtcgccggttggccgggcgagttcgacacccggcgggcgcagcagctgggctttatcgccgatgaaagcttcgagcaggcgatccgcgcctttatccgcgacgacatgccgcaaggcgggggctga

SEQ ID NO: 425620 - DNA, 1383 bp, Serratia marcescens
atggcgatgtataccccaatcatcgggctggcggtggcggtgtttgcgctgattttcctggtgctgcgcacccgcgtgcatgcgctgatcgccatgctgatcgccgcctccatcgccggcattaccggcggcatgggtgccacgcaaaccgtcgacgccatcaccaagggcttcggctccacgctcggcagcatcggcatcgtcatcgggctgggggtgatgatgggccgggtgctggaggtctccggcgccgccgagcagatcgcttacagctttatcaagtggctgggcaaaaggcgcgaggagtgggcgctggccatcaccggctatatcgtcagcatcccgattttcgtcgattcggcgttcgtcatcctttatccgctggtcaaggcgctggcgaaaaagggcaagcgcaacctgctgacgctcggcgtcgcgctggccggcgggctgatcctcacccaccacgcggtgccgccgacgccggggccgctgggcgtggcgggcatcttcggcgtggatatcggtgccatgatgctggccgggctggtgctggccattccctgcgtgatcggcatcgtgctgtatgcgcgctggctgggcgcgcgctacccggactttatgccgcaggaagaggaagcgccgcaggatctgcgcgccgcgcatcagcagtatctggcggagaaagagggcaaggcgctgccgagcctgatgttgtcgctgctgccgatcctgacgccgatcgggctgatcttcgtcaacgcggtcaacaatatgctggctaagcgcgagggcatgggctggctggcggagagcctgtggggccaaagcttcgcgtttctcggctcgccgatgatcgcgctggcgatcagcgtgctgctggcggtgtacaccctgatgccgcacgccaataagcacgacacgctggagcggctggaagaaggcctgcagaccgccggcatcatcctgctggttaccggcgccggcggcgcgctgggggcggtgctgcgcgagagtggcgccggcacgcagttggcggaacaggtcgccgggctgccgatctcgccggtgctgatcccgttcgtcatcgccacgctggtgcgggtgatacagggctccggcacggtggcgatgatcaccgccgcctctatctcggcaccgatcgtcagcctgctgcccggcgtcaatatgctggcggcggcgcaggcggccaccctgggcgcgctgttcttcagctacttcaacgacagcatgttctgggtggtcaaccgcatgatgggcatcaaggacgtgcgccaacagatgatggtgtggtcggtacccaccactatcgcctgggctatcagcctgtgcggcgtggtgttgctggactggctgctgtaa

SEQ ID NO: 425621 - DNA, 714 bp, Serratia marcescens
atgaatgaaacaaccagacgcatggccaggttgatcgacctgagcgcggtgcaggccaccaataccgaggaagacgtgcgccactgcgccgcgttggccagccgctatcgcatcatctcggtacacgtgctgccgtgctggacgcgtttcctcagcaccctgctgccggagcgcggccaggcggacgtgatgattggcgggccggtcggctttcccggcggcgggcagaccaccgatctcaaggtgcaggaggtgcgccagctgatcgccgagggcgcgcgcgaggtcgatatggtggtgaacatcggcaaggtgctgtcgggggattacgactatgtgcgcgaagatctgcgccgggtagccgaggccgccgcgccggtgccggccaaagtcattctggagacgcactatctgaacgagcagcagatccgtcgggtgtgcgatatcgccgtcgaagtcggcatggcctgggtgaaaacctccaccggctgggcaccgaccggcgccacggtagagaaagtggcgatcatcgccgatcagttgcgtggccgcatccagatcaaaggggccggcggcattcgcgatctggacacggtgcgcgcgttgtatcggctgggcgtacgccgctttggcatgagcgcggcggccacccagcgggtgctggagcagcttgaacaggatccaggcctgttcccggaactgaacgataactaa

SEQ ID NO: 425622 - DNA, 1530 bp, Serratia marcescens
atgaaagatttacttcttacccttgatatcggcaccggcagcacccgcgccgggctggtcaccaacaccggggaaatccttggcttcgcgcagcgcgagtacgagcagatcacgccgcaggccggttggtcggaacaaccgccttcactgtggtggcagagtgtctgccaatgtacgcaggagctgtacgcgcgctacgccgaatactggccgcgtatcgccgccgtcggcgcctgcgggcagatgcacggcacagttttgctcgatgccgacggcgagctggtcgtcgatcgcgccatgctgtggaacgacaaacgcgcgcagccgcaggtggcgcgctttagccaccaacagccgccgcagccctggcttgaactgttgaacaatccccccaccgccgcctggccggcgttcaagttggcctggctgcgcgagcatcacccatcgcagtgggagcgcatcgctacggtgttgatgccgaaggattacgtcaatttccggctctgcggtgtacgcgccaccgactacagcgaagcctcctgctattacctgatggacagcgccacgctgcagtggtcgccagaggcgctgcggcagttcgggctgcgcgccgatcagctgcccgccctccatctctccagcgaggtgattggccacattacgcccgcagcggcaagcgttaccggtctgccgccgggggtgccggtggtggcgggcacggcggatatggccgctaccctgctcggctccggcgtctatcaggccggcattgcctccgacagcaccggcacctccacgctgctcaccgtggtctcggaacacccgctgctctccgccggcgtcaacaacctgcacctggccaactcggcctggggcggttttaccctgctcgatgccggtggcgacgccatgcgctgggcgcgttcggcgctgagcgccggccaactcagccatcaacagatgctcgatatggcggccgaggtgccgccgggcgccgaagggctgctgttcctgccctacctgaccggcgagcggctggcggaacacaccaactcgcgcgcgcagttcttcggcctgcagcgcaagcataggcagccgcatctctaccgcgcggtgctggaaggcgtagcgctggcctccctgcgtaatctgcagcagctcaggcgccacgcgcaggagccggaggcaatgatcgcttcgggcggcggcgcacgcagcccgctgtggctgcagatcaaggcctcggtctacaacctgccgttgctgcagacgcgcaatcaggagaacggcaccaccggctgcgcgatcgtcgccggggtcggcgtcgggctgttcagcagtttcgcccagggggtgagccgcaccgtcagcatcgagcgcgaatttacccccgatccgcgccagcacgaacactacctgcgctgcttcgagctgttcgaacagctctaccgccaggcgcaacccctctacgaacagcttgacgttattagctcgttctctttttctccggatgaaggaacaccgcaatga

SEQ ID NO: 425623 - DNA, 1332 bp, Serratia marcescens
atgagcgactctctgattaacaagggcgacatcgcgcagcacgccgcggccgaaagtatcgaccgcagcgcttatctgcccgccacgccctggctgcagctgatgctggtctgctgcctgttcgccctgtggggcatggccggcaacctgaacgatattctgatcgcacagttcaagaagggattcgatctgtcggatacccaaaccgcgctggtgcagtcgatcttcttcctcggctactttgtgatggcgctgcccgccgcagcggtgatcaaacgctactcgtacaaggtggcgatcgtgatcggcctgtgcctgtacgcactcggctgtttcctgtttattcctgcggcgcagatcatgacctatggcgctttcctggcctgcctaggggtgatcgctaccgggctgtcgttcttggaaacctccgccaatacctactccagcctgctggggccgctggaaacctccacccagcgcatcaacttctcgcagatcttcaactcgctggggatcatttttggcgtcttgatcggccagcagctggtgttcggcaaaaacgatcccagccacgccgagctgctgcaaatgccaccggctgtggccgaagcggcgcgcacccagatggtgtcgcaggtggtcacgccttatctgatcatcggcagcgtactgatcgtgttggcactgatcttcgtggcggtgaaattccccgcctgcaaaacccaacgctcgcaccagggagcgggcaagccgctgatgcaatcgctgaagatcctgctggcgctgccgcgcttccggctgggagtactgtcgcagttcctgtatgtcggcgcgcaggtagggctgtggagtttcaccattcgttttgtgcagatgattgaacagggagcaaccgagcattcggccacctactggctgctggccacgctggtctgttactcggccggcaaggtggtcaccaccgcactgatgaaaaagttcagcccggcgcggttgctcggcgtgttctgttcggtatgtgtgctgctgttgctgctggccgtcaacatccaaagcctgctggcggtggtggcgatcatgggcgtcaacttctgcatggcgctgtgctggccaaccaactttggcctgacgatcaaagggctgggcgaagaaactcaggtggccggttcgatcgtagtgatgtcgatcatcggcggcgcggtggtgccgttactcatgggcatcatctccgatctcaacggcggcgatatgcagatcgccttcgcagtaccgctggtctgcttcgcctacgtcgccttctatggcttctactgcgcgcgcaaggggatttga

SEQ ID NO: 425624 - DNA, 393 bp, Serratia marcescens
atggcacaccggattaacggattgatgcacgtcggtctgcgctgcgccgatatcgaacgagccgccggcttctatcgctcgctcggtttcgaaccccggcaaacgttggcgctcggcggccccgtcgccgtacagtttttgcagttgggtgagctaacgctggagttataccagctacccgacgaagggctgactcgccccgccaacacctatggtatcgaccatatcgctttgcgggtcatcgatctggcggccacgcaacgttggctggcggagctggggtatccggtgattgaagggccgacgctgcagccctgcggtgccaacggcgtgcgttatctgatgatcgccgggccggacggtgagcgggtggagttcagccagccgctgtaa

SEQ ID NO: 425625 - DNA, 645 bp, Serratia marcescens
atgtttaatatttacagcaccaactacgcatcaatgagcaccgaaaaatcagcagatctttatgttttaaggaaaaacgtctttaaagacaggctgcaatgggccgtgaactgttcagacggcaaggagctggatgagtttgataatgataagacaaactatatatttggcgtaaaagacaacatgataatttgtggtacgaggatgattgatatgaaacacaagaatatgctgaacagcgcattttcctctttctttcatgacgtcgtcattccagaggggaatttcatcgagtccacacgatttttcgtcgataaggaaaggacccagtctctgctgggccgccggttccctgtgaccctggcgttgttcttgtcgctgatcaactatgcgcggcaacatggttatgacggcatattggcagtctccagccacccgatgttccatatcatcaaaagctccggctggaacgtcacgcagttgaagacaggcatgtcggaaaagaacgagcccgttcatttgctgttgggccacgttgaccgtcagagccaggaggcattaaaaaacagaatattcaaaaagttgaatacgcaagacgaacacatgctaaacgcctggccgttgagcgacgaacctgcgttctaa

SEQ ID NO: 425626 - DNA, 717 bp, Serratia marcescens
atggaatatgaagaaaatatcagtcacattatcagcaagcatctggaagcagcattaggcgatttcggcgagcttatctgggcctacgtggtgttatccaagaaagatatgtcatgtatctttggcgtcaccaattaccccggtgaatgggtaaagcaatataaagagcaagggctgcaatataccgatccggtggtcattacggcgctcaatcgcctgacacctttcgcctgggatgagaatctcatggctggcgccggcttccgtttttctgagttgttcgagcaagctcgcgaattcggcgtagccgatggctataccttcgtgttgcatgactttaataataatctggtgaccctttcctttaccctcgctgccgagcgcaaggcggaaaccatgcagatgctgaatcagcataaaggcgatatttcgttgctgctggcatcgacccatgagatgtatttaacgctgacttcactgtcggaaaaaaacaccgcgcgccaggaaaaaaacgcccgtttcacagagagagaaaacgagatcctctattgggccagcgtggggaaaacctaccaggaaatgggcatgatcctggggatcaaaacctgcaccatcaagtttcatatggggaacattgtcaaaaaactgggggtggcgaatgcccggcatgctatccgtttagggatggaacttcagctgattaaaccggtggggtga

SEQ ID NO: 425627 - DNA, 759 bp, Serratia marcescens
atgttcgcagaagagcgccaggaaaaactcctcgccattctcaaggagaagcgcaagctctccgtgggggaaatgagctcgcgctttaacgtctccggcgccaccatccgcaccgatctgcgcattctggaagacgccggcatgctgacgcgcacccacggcggcgccattctgcgcacccgcgccagcttcgaggtcggttccgatcagcgtgaagaggtgaacctcagcgccaaggagcaaatcggtcaattggccgccggcctggtggaagacggcgacatcatcgtattggacaccggcaccaccaccctgcagatcgcccgccatctgcgccagcgccacaacctgaccgtggtcaccaacgatttcatgatcgccaagagtctggaagacgtcgaatctatccagatcatcctgctgggcggcatcgtcaaaaagggttatcactgcgcggtcgccatcagcggccgttcgctgctggatacgctgaacatcgacaaagcttttatgggcgccaacgcgctatcactgaaacagggcgcctgcgtggccgacatcatgctggccgaaaccaagcgcgcgatggtggaacatgccaatcaggtgatcgtggtgtgcgatcactccaagctgagcaacacctcgctggcgcagttcgcctcccctgcccagatcgacaccctggtgctggatcgcctgccggaagacgcgcaggcctatcaggatgccggcatcgcgctgctgagcgtcagctaa

SEQ ID NO: 425628 - DNA, 1071 bp, Serratia marcescens
atgtttggcgtattagaccggtatatcggtaaaacgattttcaacaccatcatcatgacgctgttcatgctggtgtcgctgtccggcatcatcaagttcgtcgatcagctgcgcaaggtcggccagggcgaatacaccgcgttgagcgccggcatgtacaccctgctgagcgtgccgaaagacatcgagatcttcttcccgatggcggcgctgctcggtgcgctgctcggcctgggccaactggcgacgcgcagcgaactggtggtgatgcaggcttccggcttcacccgcctgcagatcgccggctcggtgatgaaaaccgccattccgctggtgctgctgaccatggcgatcggcgagtgggtggcgccgcagggcgagcagatggcgcgtaactaccgcgcccagcagatgtacggcggctcgctgctctccaccaagagcgggctgtgggcgaaggacggcaacgacttcatctacatcgagcgcgtctccggcgataaagaactctccggcgtgaacatctaccacttcaacgatcagcgtcgcctggagacggtgcgctatgccgccaccgccagcttcgagaacggggtgtggcagctttcgcaggtggatacctcggatctgaccgacccgaaacaggtgaccggcacccagacgctgaccggcgaatggaaaaccaacctgaccccggacaagctgggtgtggtggcgctggatccggattcgctctccatcagcgggctgcacaactacgtgaagtacctgaagcagagcggccaggaggccagccgttaccagctcaacatgtggagcaaaatcttctcgccgctgtcggtggcggtgatgatgctgatggcgctgtcgttcatcttcggcccgctgcgcagcgtgccgatgggcatccgcgtggtgaccggcatcagcttcggcttcctgttctacgtgctggatcagatcttcggcccgctgagcctggtgtacagcatgccgccggtgctgggcgcgctgctgccgagcatgctgttcctgctgatcagcgtgtatatgctgctcaaacgcaagtag

SEQ ID NO: 425629 - DNA, 1095 bp, Serratia marcescens
gtgatcatcataagatatctggtacgggaaacgctcaagagccaaatcgccatcctgttcatcctgcttctgatcttcttttgtcagaacctggtcagggtgttgggcgatgcggtggacggcaatatcccgacaaacttagtcctctccctgctggcgctgggcgtgccgaaaatggcgcagctcatcctgccgttgagcctgtttctcggcttgctgatgacgcttgggcggttgtataccgagagcgaaatcaccgttatgcacgcctgcgggctgggcaaacgcaccctgattatcgccgccatgatcctggcgctgttcacctctgcgatcgcggcggtgaacgtgttttgggccggcccctgggcttcgcgctatcaggacgtggtggtgaacgaagccaaggccaacccgagcatcgccgggctggcggaagggcagttcaaaccctcgcaggacggcaatgcggtgctgtttatcggcaacgtgaagggcagcaccttcaacgacgtgttcctggcgcagctgcggcctaacggcaaccaacgcccgtcggtggtggtggccgagcacggcaacatcgtgcagcagaaagacggctcgcaggtggtgacgctcgacaagggcacccgctttgaaggcaccgcgctgctgcgcgacttccgcattaccgacttcaacgactacaaggcggtgattggccaccgtaccgtggcggcggacaacaccgaatccgaacagatgtcgatgcagacgctgtgggagtccgacgatccggatgcgcgcgccgagttccactggcgcctgacgctggtggtgtcggtggcgctgatggcgctgctggtggtgccgctcagcgtggtgaacccacgccagggccgcgtgctgagcatgctgccggccatcctgctgtatctgatcttcttcctgctgcagacctcgctgcgctccaacgccggcaagggcaagctggatccgatgctgtggctgtggctggttaacggcgtttacttcgcgatcgcgctggcgctgaacctgtgggataccgtgccgatgcgcaagctgcgcgcacgcctgagaggagcggcctga

SEQ ID NO: 425630 - DNA, 1512 bp, Serratia marcescens
atggagttcagtgtaaaaagcggtagcccggaaaaacagcgcagtgcctgtattgtagtcggcgttttcgaaccgcgccgcctgtcccctatcgcagaacaactcgacaaaatcagtgatggttatatcagcgcattgctgcgccgtggcgaactggaaggcaaggtcgggcagacgctgctactgcaccatgtgcccaacattctctccgagcgcatcctgctgatcggctgcggcaaagagcgcgagctcgatgagcgccaatacaagcaggtgatccagaaaaccatcaataccctcaacgacaccggctcgatggaagcggtctgcttcctgaccgagctgcacgtgaaaggccgcaatacctattggaaagtgcgtcaggcggtggaaaccgccaaagagacgctctacaccttcgatcagctgaaaagcaacaaggtggagccgcgtcgtccgctgcgcaaaatggtgttcaacgtgccgacccgccgtgagctcaccagcggcgagcgcgctattcagcacggcctggcggtggcttccggcatcaaggcggccaaagatctcggcaacatgccgccgaacatctgtaacgccggctacctggcctcgcaggcccgccagctggcggacgccttcagcacccacatcaccacccgcgtcatcggcgaacagcagatgaaagagctgggcatgaacgcctatctggcggtcggcgccggttcgcaaaacgagtcgttaatgtcggtgatggaatataagggcaacccaaatccggacgctaagccgatcgtgctggtaggcaaagggctgaccttcgactccggcggcatctcgatcaaaccggccgacggcatggacgagatgaaatacgacatgtgcggcgcggcgaccgtgtacggcgtgatgcgcgtggtggcggagttgaacctgccgctgaacgtgatcggcgtgctggccggctgtgaaaacatgccgggcggccgggcttaccgtccgggcgacgtgctgaccaccatgtccggccagaccgtcgaggtgctgaacaccgacgccgaaggccgtctggtgctgtgcgacaccctgacctacgtcgagcgcttcgagccggagctggtgatcgacatcgccaccctgaccggcgcctgcgtgatcgccttgggccaccacatcaccggcctgatgtcgaaccacaacccgctggcgcacgagctgctgggcgcttccgagcaggccggcgaccgcgcctggcgcctgccgatggccgacgagtactacgagcagctggactccaacttcgccgacatggcgaacatcggtggccgccctggcggcgccatcaccgccgcctgcttcctgtcgcgcttcacccgcaagtacacctgggcgcatctggatatcgccggcaccgcctggcgctccggtaaagccaagggcgcgaccggccgcccggtggcgctgctgtcgcagttcttgctcaaccgcgcgggcctgaacggcgacgattaa

SEQ ID NO: 425631 - DNA, 450 bp, Serratia marcescens
atgaaacaggcgacgttttatttgctcgacaacgcggaaccgtctggtgcgctcagcgcccatgaggccgtggcctgcgccgttgccgccaacggcttccgttccggcaaacgggtgctgatcgcctgcgagagccaggagcaggcccagcggctggacgaagcgctgtggcagcgcgagccgcatgaattcgtgccgcacaacctggccggcgaagggccgcactatggcgcgccggtggaactgtgctggcccggcaagcgcggcaacgccccgcgcgatctgctgatcgccctgctgccgcagtttgccgattttgctaccgctttccatgaagtggtagacttcgttccttacgaagacactctgaaacagttggcgcgcgaccgttacaaggcctatcgcagcgtcggcttccatttgaccacggctacgccgccaactcactga

SEQ ID NO: 425632 - DNA, 2877 bp, Serratia marcescens
atggaaaagacaaacagtcagctcgacaccgcatacgacccaaaacagatcgaacagaagctgtacgatcattgggagaatcagggttacttcaagccgaacggcgacaccagccaggaaagcttctgcatcatgatcccgccgccgaacgtcaccggcagcctgcacatgggccacgcgttccagcagaccatcatggacaccatgattcgctatcagcgcatgcagggtaaaaacaccctgtggcaggcgggcaccgaccacgccggcatcgccacccagatggtggtggagcgcaagatcgccgcggaagaaggcaaaacccgccacgactacggccgtgacgcgtttatcgacaagatctggcagtggaaggcggagtccggcggcaccatcacccgccagatgcgccgtctgggtaactccgtggactgggagcgcgagcgcttcaccatggacgaaggcctgtcgaacgcggtgcgcgaagtgtttgtccgtctgcacaaagaagacctgatctaccgcggcaagcgcctggtgaactgggatccgaagctgcgcaccgccatctccgatctggaagtggaaaaccgcgaatccaaaggttccatgtggcacctgcgctacccgctggccgacggcgcgaaaaccgccgagggcaaagactacctggtggtcgccaccacccgtccggaaaccgtgctgggcgataccggcgtggcggtcaacccggaagatccgcgctataaagacctgatcggcaaagagatcattctgccgctggtcggccgccgcatccgcatcgtcggcgacgaacacgccgatatggaaaaaggcaccggctgcgtgaagatcaccccggcgcacgatttcaacgactacgaagtcggcaaacgccacggcctgccgatgatcaacattctgaccttcgacggcgacatccgtcaggaagcggaagtgttcaacaccctgggtgaagtctgcaccgactactgcaacgaaatcccggccgagttccgcggcctggagcgcttcgcggcgcgtaaagcggtggttgccgccttcgataatctgggcctgctggacgagatcaaaccgcacgacctgacggtgccttacggcgaccgcggcggcgtggtgatcgagccgatgctgaccgaccaatggtacgtgcgcaccgcgccgctggccaaagtggcggtggaagcggtcgaacagggcgaaatccagttcgtgccgaagcagtacgaaaacatgtacttcagctggatgcgcgacattcaggactggtgcatctcgcgtcagctgtggtggggccaccgtatcccggcctggtacgacgtgaacggcaaagtctacgtgggccgcagcgaagaagaagtgcgcagcgagaacaacctgggcgccgacgtggtgctgacccaggacgaagacgtgctggacacctggttctcgtccggcctgtggaccttctctaccctgggctggccggagcagaccgaggcgctgaaaaccttccacccgaccagcgtgatggtcagcggcttcgacatcatcttcttctggatcgcgcgcatgatcatgctgaccatgcacttcatcaaggatgaaaacggcaagccgcaggtgccgttcaagaccgtctacatgaccggtcttatccgcgacgacgaaggccagaagatgtccaagtcgaaaggcaacgtgatcgatccgctggacatggtcgacggcatctcgctggaagatctgctggaaaaacgcaccggcaacatgatgcagccgcagctggcggagaaaatccgcaagcgcaccgagaagcagttcccgaacggcatcgagccgcacggcaccgacgccctgcgcttcaccctggcggcgctggcctcgaccggccgcgacatcaactgggacatgaagcgcctggaaggctaccgcaacttctgtaacaagctgtggaacgccagccgcttcgtgctgatgaacaccgaagcgcacgactgcggcttcaacggcggcgagaaagtgctgtcgctggcggatcgctggatcctggccgaattcaaccgcacggtgaaagcctaccgcgaagcgctggacacctaccgcttcgatctggcggccaacatcctgtacgaattcacctggaaccagttctgcgactggtatctggagttgaccaagccggtggtgagcaacggcagcgaagcggaacagcgcggcacccgccacacgctgatcaccgtgctggaagcgctgctgcgcctggcgcacccgatcattccgtttatcaccgaaaccatctggcagcgcgtgaagccgctgaccggcacgaccgcagacaccatcatgctgcagccgttcccggcctacgacgccgcgctggaagacgagcaggcgctgaacgatctggagtggatcaagcaaaccatcatcgccgtgcgcaacatccgcgccgagatgaacattgcgccaagcaaagcgctcgacgtgctgctgcgcaactgcagcgccgacgcccagcgccgcgtgcaggagaaccaaagctttatcgcccgtctggcgcgcctggaatccatcgcgctgctgccggccggtgagaaaggcccggtctccgtcaccaagctggtggacggtgccgagctgctgatcccgatggccggtttcatcgacaaagacgccgagatcgcgcgtctggcgaaagagatgggcaagctggatgcggaaatcgccgcgatcgaaggcaagctggcgaacgaaggcttcgtggcgcgcgcgccggaagcggtggtcgccaaagaacgcgatcgtctggcggcctgcaaagaaggcaaagtgaagctgcaggaacagcaggcgaccatcgccgcgctgtaa

SEQ ID NO: 425633 - DNA, 504 bp, Serratia marcescens
atgacaacagcaaccccggcgcgcctgctggtgcgccccatcacggcggaagacaatgccgccattgctcacgtcattcgcgaagtctccgccgagcacggcctgacggcggataaaggctataccgtctccgatcccaatctggacgccctgtatcagctctacagcctgccgcgcagcgcttactgggtgatcgaggtagacggccaggtcgccggcggcggcggcatcgcgccgctgcagggcggcgcagacgatatatgcgaattgcagaagatgtatttcctgccggtgttgcgcggcaagggattggcgaaacgcctggcgctgcaggcgctggatttcgcccgccggcacggcttccgctgttgttacctcgagaccaccgccagcctgacgcaggccgttgcgctgtacgaacatctgggcttcgaacacatcgaccacgcgatgggcgctaccggccacgtcgattgcgaagtcaccatgctgaaaacgctgtaa

SEQ ID NO: 425634 - DNA, 1608 bp, Serratia marcescens
atgtcggaaaatacctttgattacatcatcgtcggcgccggttccgccggctgcgtgctggcggcgcaactgatccgccgcacccaggcgcgggtgctgctgctggaagccggcggcgacgacaataacctgttcatcaagatgccggccggcgtggccaagatcatcgccaaaaagagctggccctacgagactgagccggaaccgcacgccaacaaccgccgcatgcagatcgcgcagggcaaggtgctgggcggcagcagttcggtcaacggcatgatctacctgcgcggccagccgcaggactacgacgactgggccgagcgctacggctgcaccggatggagctaccgggaggtgctgccttacttcaaacgcgccgaggccaacgaaagcctgtcggacgactaccacggcgccgacgggctactgccggtcagcgaaaaccgctaccgccacccgctcagcatggcgtttatccgcgccggccaggagctgaacctgccctaccgcaacgacttcaacggcgacagccagcacggcgtcggtttctaccaaaccaccacccacaacggcgaacgcgccagcaccgcccgcacctacctgaaggcggtgcgcgacgaacggcggctggtggtaaaactgaacgccctggcgcatcggctgaccttcgagggcaacgtcgccaccggcgtggtctacagccagaacgacggcgcggaagtgaccgcgcgcgccaccaaagaggtgattgtcagcgccggcgcggtcggttcgccgaagctgctgatgctgtccggcatcggcccgcgcgaccacctgcagcagctgggcatcgaggtgcgggcggatctgccggtgggcaaaaacttccacgaccatctgcacatgtcgatcaacgtcagcacccgcgagccgatcagcctgttcggcgccgatcgcggcctgcaggcactgagccacggcgcgcagtggctggcgtttcgcagcggcgtgctctcgtccaacgtgctggaaggcgccgccttcaccgacagccagggcgacggccggccggacgtgcagatccacttcctgccgctgctggacagctgggacgacgtgcccggcgagccgctgccgaacattcacggcttcacgctcaaggtcggctacctgcagccgaaggcgcgcggcgaagtgctgctgcgcagcagcaacccgcacgatccggtcaagctgcacgccaactacctcggccacccagacgatttggccggcagcgtgcgcgcggtgaagttcggcctgggcttcctgcaaaccgcggcgctgaagccgctgatcaaagatctgctgatgccgcagccggagtggacgcgcgacgaagcgcagctggaagagttcgtgcgcaacttctgcaagacggtgtatcacccggtgggcagctgccgcatggggccgtcgccgcaggacgcggtgaccgatccgcagctgcgggtacacggttttgaacagctgcgggtgatcgactgctcggtgatgccgcagctcaccagcggcaacaccaatgcgccgaccatcatgctggcggaaaaggcggtggatctgttactgggcgccccgcagtaa

SEQ ID NO: 425635 - DNA, 765 bp, Serratia marcescens
atgacataccaatccctgttagccccgattttaagcttcctgcactgtgaaactcctgacgcctggatcgacgccgcgcgccgtccggaaaacctgcagctgttgctgactgaccacctggtgtgcgagctgaaggccgcgcagaccggcatgtggctgatccgccgctacgtggcggacaaagagagcggcgacgcgctgttggcgctgctgcggccctacgaggcgtttctgcacgaagcgcagggcgcgccggacacgctgttccgccagggccagttcacccgcaagatcctgccgaaaaacggctcggcctacggccaggatctggcggatcgcatggtgctgttgatcaaggaagagttgcatcacttctcgcaggtgctggagatcatgcaggcgcgcgggatcccgtatcgcaagatcaccgccagccgctacgccaagggtatgatccgcgagatccgcacccacgatccggcgacgctgatcgacaaactgatctgcggcgcctacatcgaagcgcgatcctgtgaacgcttcgccaaactggcgccgcacctggacgacgagctgaatcgcttttacgtctcgctgctgcgatccgaagcgcgtcactatcaggactacctgacgctggccgaacagatcgccggcggcgacatcagcgaacgggtggcgcatttcggccgcctcgaggctgagctgatcctgtcgccggacagcgaactgcgctttcacagcggcgtgcccgccgccgcctga

SEQ ID NO: 425636 - DNA, 426 bp, Serratia marcescens
atggcaaaccgcgaattgctggaagaacaacgtgaagagacccgcctgatcatcgaagaactgctggaagacggcagcgatccggacgcgctctacaccatcgagcaccatctgtccgccgagaaatttgaggttctggagcaggccgccgttgaagccttcaagctgggctacgaagtgaccgacgccgaagagctggaagtggaagacggttcgatggtgatgtgctgcgacgtgatcagcgaagtcggcctgaacgccgaactgatcgacgctcaggtcgagcagttggtggcgctggcggaacgctgcggcgtcaactacgatggctggggcacctacttcgaagatccgaacggtgaagacggtgaggatgacgaagacggcgactacatcgacgaagacgacgacggcaaacgccactaa

SEQ ID NO: 425637 - DNA, 1020 bp, Serratia marcescens
atgagcaccggcaatgcgttctaccaacgtcactttctgagattaatggatttcacccccgccgagctgcaggcgctgctgaaactggcggccgatctgaagcaggccaagaagcaggggcaggaacagcgccggctgcagggcaaaaacattgcgctcatcttcgaaaaagactcgacccgcacgcgatgctctttcgaagttgccgcattcgatcagggcgcgcaggtcacttacctcggcccgagcggcagccagatcggccataaggagtcgatgaaagacaccgcccgggtgctgggccgcctgtacgacggtattcagtatcgcggctacggccaggcgctggtggaaaccctggcgcagcacgccggcgtgccggtgtggaacggcctgaccgacgagttccatcccacccaattgctggcggacctgctcaccgtgcaggaacaccttccgggcaaggcgctgagtgaagtgaagctggcgtacgtcggcgacgcgcgcaacaacatgggcaacacgctgctggaagccgccgcgctggcgggcatggatctgcggctggtggcgccgaaggcctgctggccgcagccggagctggtggccgagtgccaggcgctggcgcagcaaaccggcgcgaaactcaccatgatcgaagacatcgccgaaggggtgcaagacgccgacttcctctacaccgacgtgtgggtgtcgatgggcgaaccgaaagaaacctggcgggagcgtatcgcgctgctgcggccgtatcaggtcaacatggcgatgctgaagctgaccggcaacccgaacgtgaagttcctgcactgcctgccggcgttccacgacgatcaaaccacgctcggcaagcagatggcgcagcagtacgatctgcacggcggcatggaagtgaccgacgaagtgttcgagtcggcgcacagcgtggtgttcgatcaggcggaaaaccggctgcacaccatcaaggcggtgctggtcgccaccctgagcgaaaccctctga

SEQ ID NO: 425638 - DNA, 1569 bp, Serratia marcescens
atgaaagccaaactcttgccgctgttcctgctcaccgccctgcccgccgccgcgttagccgccacgccgccgaatacgctggtggtggtgcaatcgctggatgacatcgtcagcctcgatccggcggaagccaacgaactctccagcatccagacggtgcccagcctgtatcagcggctggtgcaggcggatcgcgacgatccggccaaggtagcgccggtgctggcggaaagctggcagagcgatgcggcggccaaaacgctgacggtgaaactgcggccgcaggcggcgttcgcctccggcaacccgctgaccgccgacgacgtgatcttttcctacagccgcgcggtcaagatgaacaagtcgccggcgttcatcctcaacgtgctcggctggcagccggacaacatcgacgcgcagctgaagaagatcgacgaacatacggtgcagctgcgctggacggcggacgtcagcccggcggtggcgctgaatattctttcgacgccgatcgcctcgatcgtcgacagcaaggcggcgctggccaacgtcaaagacggcgacttcggcaacgcctggctgaaaatgcactccgccggcagcggcccgttcaagatgcgcgtctatcagccgcatcaggcgatcgtgctggacgccaaccccaccacgccgggcgacaagccgcagctgaaaaacatcatcattaaaaacgtgccggatccggccacccgccgcctgctgatccagcagggcgacgccgatatcgcccgcgaactgggcgccgatcagaccgacacgctgaaaaaccagccgggcgtcaaggtgctggagatcccgtccgccgaacaaaactacctggtgttcaacaccggcaacggcgccaatccgctgctaaacaacccggccttctgggaagcggcgcgctatctggtggattatcagggcatcacgaaggatctgctgaagggccaatacttcgtgcaccagagcttcctgccggtcgggctgccgggcgcgctggagaccaacccgttcagctacgatccggccaaggcgaaagccatcctggccaaggcgggcatcacccacgccacctttacgctggacgtagagaacaagccgccgttcatcaccatcgcgcaggcgctgcagggcagcttcgccgccgccggcgtgaaggtcgagctgctgcctgcggcgggcagccaggtttactcccgcgtgcgcgccaggcagcatcaggcggcgatccgcctgtggatcccggattatttcgacgcccactccaacgccagcgccttcgcctacaacgacggcaaaagcagcacggtggccgggctgaacggctggcagatcccgcagttgaaccagcagacgctggcggcgctggccgaagccgatccggcaaagcgccgcgcgctgtacaccgccatgcagcaggaactgcagcgcagttcgccgtacgtgtttatcgatcaggccaaaaccgaagtggtgctgcgcgacaacgtcaaaggctaccagcaggggctgaacgccgacatggtctattacgatcgcgtcagcaaatag

SEQ ID NO: 425639 - DNA, 936 bp, Serratia marcescens
atggccaacccgctgtatcacaaacacatcatctctattaacgatctcagccgcgaggatctggagctggtgctgcgcaccgccgccggtctgaaagccaatccgcagccggaactgttgaaacacaaggtgatcgccagctgcttcttcgaagcctcgacccgtacccgcctgtcgttcgagacctcgatgcaccgcctcggcgcctcggtagtcggtttcgccgacggcagcaacacctcgctcggcaagaaaggcgaaaccctggccgacactatctcggtgatcagcacctacgtggacgccatcgtgatgcgccatccgcaggaaggcgcggcgcgcatggccgctgaattctccggcaacgtgccggtgctcaacgccggcgacggcgccaaccagcacccgacccagaccctgctggatctgttcaccatccaggaaacccaggggcgcctgagcaacctcagcatcgccatggtcggcgacctgaagtacggccgcaccgtgcattcgctcacccaggcgctggccaagttcgaaggcaaccgcttctacttcatcgccccggacgcgctggcgatgccggcctatatcctgaaaatgctggaagagaaaggcatcgagtacagcctgcacagcagcattgaagaagtggtgccggaactggatattctctacatgacccgggtacagaaagagcgcctcgatccttccgagtacgccaacgtgaaagcgcagttcgtgctgcgcgccgcggatctggccggcgcgcgcgccaacctcaaggtgctgcacccgctgccgcgcatcgacgagatcgccaccgacgtggataaaacgccgcatgcctactacttccaacaggcgggcaacggcatcttcgcccgccaggcgctgctggcgctggtgctcaacgcagatttggctctttaa

SEQ ID NO: 425640 - DNA, 465 bp, Serratia marcescens
atgactcacgacaacaaactgcaggtcgaagcgatcaaatgcggcacggtgatcgaccacattccggcgcagatcggtttcaaactgctgacgctgttcaagctgaccgccaccgaccagcgcatcaccattggcctgaacttgccctccaacgcgctgggccgcaaggatctgatcaagatcgagaacaccttcctgaccgagcagcaggccaaccagctggcgatgtacgcgccgaaggccacggtaaaccgcatcgataactacgaagtggtgcgcaagctgaccctcagcctgcctgaccacatcgacggggtgctgacctgcccgaacagcaactgcatcagccgcagcgagccggtggcgtcgagcttcagcgtgaagccgcgcgacggcgaagtgcacctgaagtgccgctattgcgagaaagagttcgagcatcaggtggtgttgcaggccgactga

SEQ ID NO: 425641 - DNA, 387 bp, Serratia marcescens
atgtcacgtaatatcagcactgaactcgccccggcagccattggtccttacgtgcagggcgttgatctgggcagcatgatcatcacttccggccagatcccggtcgatccgaaaaccggcgccgtcgccgacgacgtggccgctcaggcgcgccagtcgctggaaaacgtcaaagcgatcgtcgaagccgccggcctgatcgttgccgacatcgtgaaaaccaccgtgttcgtgaaagatctgaacgacttcgccaccgttaacgccgcgtacgaaaccttcttcaccgagcacagcgcgccgttcccggcccgctcctgcgtggaagtggcgcgtctgccgaaagacgtgaagatcgaaatcgaagccatcgccgtgcgtcgttaa

SEQ ID NO: 425642 - DNA, 2988 bp, Serratia marcescens
atggcacctagcgtattggattattttatccaacaagcttcccgttatccggaaaaaaccgccgtcgtcggcgataataaacatctgacctaccgtcaattggatgaagccagcagcgcactgtgcacgcgcctgaaacaggaaggggttcggcccggcgatgccgtgccgctggtcgcgcagcgcacggtggaattgccgattggcatgatggcgatcgccaaggccggagcctgttatattcccattgacgcccgctatcccgaacggcgcattcgcaatattatcgaacaaagtggctcgccgataatcctcttcagcaaccatgatgctcgtgtaaatatcgacaacctcccgcgcaaagtcctttccattgataatatttccctgactaaagtttccataactgtattttcccctccgccctccgatgcgcttgcctatattattttcacctccggcaccaccggcgcgcccaaaggcgtcatgatcgaacaccgttcgctgttaaacctgctcctctggcataaccaacgtttcgcgatggatgaacacagccgttccacgctgattgccggcgtcggttttgacgtggcgcaatgggaaatctgggcgccgctgatctgcggcggcaccctgtatctgccgcacgaggagacccgcctgcagccggacgcattgctggccttcttcgcccggcatcgcctcacccacgcctttgtccctacggtattggtgccggaggtcatcggcgcgccgcagcccgccgggctggcgctgaaatacctgttcaccgccggtgaaaagctgaatccgctcgagctgcgcggcatcggctatgcagtggtggattactacggcccgacggaggccaccatcttcgccacctgcaaccgcgtgcgctgcgcgacgcaaaacccgccgtccacgattggccggcccatcgccgatacgcaggtattcatcctcgacgagcgcctgcggccggtaaccgacggcgaatctggcgagctctgcatcagcggcctctgcctggcgcgcggctacctgaacgccccgcagctgaccgccgagcgttttgtcacttcgccgcacgtcggcggccagcgcttgtaccgcagcggcgatcgggcgcgccgcttgcctgacggccgcattcagtacctggggcgcctcgacgcccaggtcaaaatccgcggcaatcgcgtagaactcggtgaaatcggcagcctgatgacgcaggtctccggcgtaaaaaccgccatcgccctcgtcaatcaaacggacaatccgagcgacaagcggatcctggcgtttttgaccggtgaagatcccggcggcgatctcattgcacgggttaaacggcagcttcaggatcagctgcccgcctactctctgcccgccgagtaccggcatctggatcggttgccgatcaacgccaacggtaaaatcgaccaggcggcgctgttggccctggcgcccgaggctcggccggcccctgctgaaccgctcgacggccaccagcggatcgtcgccgatctgtggcgcaggctgctgaaaatcgatcatatccgcgccgacgatgatttcttcgcgctgggcgggcattcgctgctggcggcaaacctggcaaaccaactgggtaaagcgttcgcggtcaaaacctatgtgcgtgatatctatgcatacccgaacctgaagacgctggcgcaggcgatggcgcaacgccagggacaagaacaaacgtctgaacctcaagacggcgagccggcacgcgccttgctggatgacgtgtatttgccgtcggatctcgtcatcgatccgacgttcgatacgcggcaaatcagcgcgccgcgcgccattttgctgaccggcgccaccggcttcgtcggcgcgcacctgttggccgatctgctgcgcaccaccgacgccgagctgtactgtctggtgcgcgacggcgccaaactgccgccgagacagcggctggaggcggtgctgcagcgctaccggatcgcgttgagcgccgggcagcgcgcacgcctccatatcctgcccggcgacgtggcggaacaccatttctcgctggccccggcggcttaccgggtgttaagtcaggatatcgatctgatttaccattcggccagcgcggtgaattttatccagccttacgcctacatgaagcgcgacaacgtacagggcctgcgggaaatcattcgtttcgcggcgcatagccgcaccaagccgctgatgctgctgtcgaccatctccgtttacagctgggggcatctgcacacaggtaagcgggtgatgcgggaaagcgacgatatcgatcaaaacctgccggcggtcagccgcgatatcggctacgtgcgcagcaaatgggtgatggagaaaatcgccgatctggcggcgaagcaaggcctgccgctgatgacgttccgcctgggctacgccacctgccacagccgcaccggcgtcaacgccgattaccaatggtgggcgcggctggtgagaacctgcatcagcagcggcacggtgccggatttacgggatctgcgcgaagggttgaccacggtggattacatgacccgggccatcgcccacgtctctcgcaacccgcaggcgctggggcagaaattcaacctgatccatcaaggtgacaataatctgacgctgcgtgagtttttcagcctgctggagcgcgagttcggttatcgctttcatcctctgcccttcgcacagtggcgggcccaatgggaaaacgacagcgacgcgccgctgtacccgctgctcagcctgttcaaggatcctatggtggacgagctatcgacggtggagctctatcaagacacctatcggtgggactgccgcaacctgcaacgcttcctgcagggcagcggcatcgatgagccgcgcttcacccgccagctgctgctgaattacctgcagcacgccatcgggtatgcgccgctgtcgcttcgggcgtaa

SEQ ID NO: 425643 - DNA, 2391 bp, Serratia marcescens
atgcacagacctttccgttatacgctactggcttcatcgttatggttttcttgcggcgcgctggcgcagccggccggcgatctgccgctgatgccctggccgcagcaggtggaagtgacgcaaccggcgggcaagctggtgctggatcaccgtttgtctctgacgctgcagggcgacgatctgggcgacgcgctgccgcgctggcgccagcgcatcgaactgcagaccggctggacgctggtgccgatggaagaagcgaacggcgcggcgatcaaggtggtgatcaaggaccgggtggcggcgcagccgctgccgggcagcgatgagagttaccggctggcggtcacgccgcagggcgccacgctgaccgccaacacgcgtttcggcgcgctgcgcggcatggagaccctactgcagctgctgcagaccgacgggcaaaataccttcctgccgctggtggatatccgcgacgtaccgcgttttccgtggcgcggcgtgctgctggattcggcgcgtcatttcctgccgctgccggacattctgcgccagctcgacggcatggcggcggccaagcttaacgtgttccactggcacctgaccgacgatcagggctggcgctttgcctccgagcattatcccaagctgcaacagcaggccagcgacggccagttctacacccgcgagcagatgcggcaggtggtggcttacgccacggcgcgcggcattcgcgtggtgccggagatcgacatgccggggcatgcctccagcattgcggtggcctatcccgacctgatgagcgcgccggggccgtatcggatggagcgcgaatggggcgtgcataagccgacgctcgatccgacccgcgacgaggtgtatcagtttgtcgacacgatcgtcggcgagctggcggcgatcttccccgatccttatctgcacatcggcggcgacgaggtggacgccagccagtggcgggcgtcgccgtcgattcaggcgtttatgcagaagaacgggctggcggatacccatgcgctgcaggcctacttcaaccagaagctggaaaagatcctcgagaagcaccagcggcagatggtcggctgggacgagatctatcatccgtcgctgccgcgctcgatcgtcattcagtcctggcaggggcaagactcgctgggcgccagcgcgcaggacggctatcagggcatcctctccaccggtttctacctcgatcagccgcaaagcaccgcctatcactaccgcaatgaaattctgccgcagccgctggggatcgagacggcggtgcaacctggcgagcaggcgcaaagctggggcttcagcatgccgcgcctgaagggcagcgcggtggagggcagcttcacgctgatcgagggcaagcagggctggcgcggctttatcgatttcaacggcaaatcgcgccgcgcggtgcacgacattgtctggcgcacgccgcagcaggtgacgttccgcgtcgatacctggatgggtgacacgcggccggtgttcacgctgcagcaggacaagctcagcggctatacgttggtcggcaacgtgcgttaccccaccagcggcgacaagctggcggcggtgccggcgggcaagatgccggtggtgccggacgagaaggggcaggccaacattctcggcggtgaagcggcgctgtgggcggaaaacgtgcgcgcgccgcttctcgatctcaagctgtggccgcgcgccttcgcggtggcggagcggctgtggtcggcgcaggacgtcaccgacgaaaacaacatgtaccggcggctggcggcgatcgacgcctggtcggtggtgtcggtcggcctgcagcagcacgcggaaacggcgcgcgaattcacccgattaagcaacagcgtgcagatcgtgccgctgcagatcctggccgaggcggtggagccggcgcagtattacacccgccagcacctgaagttccaggccggcaactatcaccagttcgaaccgctgaaccgctttgccgatgcgctgccgccggagagcggcgcggtgcgcgacatgcaggcacaggtcgcagccttgttgaaggataagcgcgataaggcggcggcgcaggcgctgcgcgaacggctgcaacgctggcaggcgaacggcgcggcgctgcagacggcgatcgcgggcaaccgcacgctgcgcgatctggcgccggtggcgcaggacgtcgatgctttggccacgctgggcttaacgctgctggatcgccatcagcaggacaaaccgctgagccgggccgaggccgaacaagcgcagcgccagctggatgcggcggcgcagacgcgcgacgaggtggtgattgcggcggtgtacccgctggaggcgctgctgcgggggcttaaaatggagtga

SEQ ID NO: 425644 - DNA, 2709 bp, Serratia marcescens
atgaaactgaaaaaactcccccgtcagctgctgggcctgttcgcccgcggccttccgcgccgtttggtgcgccgcgacagcctgctggacggcgtcggcggcgctgcgcacgatatgccggccggcctggcgcaacagcggctggaatgcgccgccgcagagacgatgcagctgtttgagcgtttccacagccacccggaaggcatcaccgcccatgaggcggagcaggtgcgccggcgctgcggcgagaacgtcatcgacgatcagcagaaagaggcctggtggcaacacctctggcactgctaccgcaacccgttcaacctgctgctgaccgcgctcggcatgatctcgtacgccaccgaggatctcaccggcgcgctggtgatcgcgctgatggtgctgatctccacgctgctgaacttcatccaggaggcgcgctccaaccgggcggccgatgcgctgaaagcgatggtgagcaacaccgccacggtgatccgcagcgatgcgctcaccggcaagagcgaacacgtggagctgccgatcgcgcaattggtgccgggcgatatcgtcaagctggcggccggcgacatgatcccggcggatctgcgcctgctgtcggccaaggatctgttcatcagtcaggcggcgctgaccggtgaatcgctgccggtggaaaaatccgcggcgccgcaggcgctggcggccgatccgctcgactgccagaacctgtgcttcatgggcaccaacgtggtcagcggcaccgcgctggcgatggtgatctgcaccggcggcggcacctatttcggccagctggcgcagcgcgtcaccagccaggagcagcagccgaacgccttccagagcggcatcagcaaggtcagctggctgctgatccgctttatgctggtgatgacgccgatcgtgctgctgatcaacggctacaccaagggcgactggtgggaagcggcgctgttcgcgctgtcggtggcggtcgggctgacgccggaaatgctgccgatgatcgtcacctcgacgctggccaaaggggcggtgaagctgtcgcgccagaaggtgatcgtcaaacgcctggacgccatccagaacttcggcgccatggacattctgtgcaccgacaagaccggcaccctgactcaggacaagatcgtgctggagcgccacaccgatgcgttcggcgctggcagcgagcgggtgctgcgctacgcctggctgaacagcttctaccagaccgggctgaaaaacctgctcgacgtggcggtgctgagctgcgcggagcagaatcggcagccggcggcgttgcaaaactaccgcaaggtggatgagatcccgttcgatttcgtacgccgccgcatgtcggtggtggtggccaaggacaacgagtatcacgagctggtgtgcaagggcgcgctggaagagatgctggcgatttgcagccacgtgcgccacgaagacgaggtgatcccgctgagcgaggcgctgttggcgcgcattcgccgcatcaccgacgatctcaaccagcaggggctgcgggtggtggcggtggccaacaagatcctgccggcgcaaacccatgaatacggcgtggcggatgagtcggatctgatcctcgaaggctacgtcgccttcctcgatccgccgaaggaaagcaccgcgccggcgctggcggcgctgaaacagaacggcgtcacggtgaaaatcctcaccggcgacaacgagctggtggccgccaaagtgtgccgggacgtcgggctggaagccgatagtctgctgcgcggcagcgagatcgaacagatggacgacgagcagctggcgcaggcggcggcgcgcaccacggtgttcgccaagctgacgccgctgcacaaagagcgcatcgtcaaactgctgcgccgccaggggcacgtggtgggctttatgggcgacggcatcaacgatgcgccggcgctgcgcgcggccgatatcggcatctccgtcgattcagcggtggacatcgccaaggaggcggcggacattatcctgctggaaaaaagcctgatggtgctggagcagggggtgatcgaagggcgccgtaccttcgccaacatgctgaaatacatcaagatgaccgccagctccaacttcggtaacgtgttcagcgtgctgatcgccagcgccttcctgccgtttctgccgatgctgccgctgcacctgttgattcagaacctgatgtacgacatctcgcagatcgccatcccgttcgataacgtcgacgacgatcagatcacccagccgcagcgctggaactccgccgatctggggcggtttatggtgttcttcgggccgatcagctcgatcttcgacgtgctgaccttcagcctgatgtggtgggtattcaaggccaatacgccggaaatgcagacgctgttccagtccggctggttcgtggaagggctgctgtcacaaacgctgatcgtccatatgatccgcacgcgcaaaattccgtttatccagagccgcccgtcctggccgctgtgcatcatgacgctggcggtgatcgccaccggcatcggcctggtgttctcgccgctggccggcttcctgcagctgcaggcgctgccgctcggttacttcccgtggctggtgctgatcctcgccggttacatggtgctgacccagtgcgtgaaaggctggttcgtgcgccgctacggctggcaataa

SEQ ID NO: 425645 - DNA, 948 bp, Serratia marcescens
atgcaaaaccggctgaccatcaaggacatcgcacgcctgagcggcgtaggcaaatccaccgtctcacgggtgctgaacaacgaaggcagcgtgagcccgcagacccgcgaacgggtggaagcggtgatccgtcagcaagggtttaccccctccaagtcggcgcgcgccatgcgcggccagagcgacaaagtggtgggcatcatcgtttcccgtctcgattcgccgtcggaaaaccaggcggtgcgcaccatgctgccgctgctgtatcagcagggtttcgatcctatcgtgatggagagccagttcgaaacccgcctggtgcaggagcacctgcacgtgctgcgccagcgcaacgtcgacggcgtgatcctgttcggctttaccgggctgaccgcggcgatgctcaaaccgtggcaggaaaaaatggtggtgatcgtgcgcgaatacgacggcttttcgtccgtctgctacgacgacgccggcgcggtgaacctgctgatggatcgcctgtatcggcaagggcaccggcacatcggctatctgggggtgcagctcagcgacgccaccaccggccagcgccgctaccaggcctatctcgacgcctgcgagcgcctcaagctcacgccgcgcgccacgctgggcgagctgagctaccagagcggtttccaacacgccgccgaagtgattgatacacacaccagcgcactgatctgcgcctccgacagcatcgccctgggggcgataaagtacctgcagcagcagccggcgcgcgccattcaggtatgcgccatcggcaacaccccgctgctcagcttcctgttccccgacaccctgtcggtggagttcggctacggcagcgccggcctgctggcggcgcagcagctgctggcgcagctcagcggcgaacaggggatccgccgcctggtggtgcccagcaaactttcctga

SEQ ID NO: 425646 - DNA, 1416 bp, Serratia marcescens
atgagcaaagtaaaacagcaggatattgatcgcctgattgttttggtcggcggccgcgagaacatcgccaccgtcagccattgcattacccggttgcgtttcgtcctcaacgaccccagcaaggccagccccaaggaaatcgaagagctgccgatggtcaaaggctgcttcaccaacgccgggcagttccaggtggtgatcggcaccgacgtcggcgactactatcaggcgctgatcgccagcaccggcgtcaacgaggccgacaaagaacaggccaaggtggccgcgcgtcagaacatgacctggaccgagcgcaccatctcccacttcgccgagatcttcttcccgctgctgccggcgctgatcagcggcggtctgatcctcggcttccgcaacgtgatcggcgatatcccgatgtccggcggccaaacgctggcgcagatgcacccggcgtggaaaaccatttacgacttcctgtggctgctcggtgaagcgatcttcatgttcctgccggtggccatctgctggtcgacggtgaaaaagatgggcggcaccccggtgctcggcatcgtgctgggcgtcaccctggtgtcgccgcagctgatgaactcctacctgctcggccagcaaacgccggaagtgtggaacttcggctggttcgtgatccagaaagtcggctatcaggcgcaggtgatcccgtcgatcctggcgggcatggcgctgggctggatcgaaacccggctgaaaaagatcgtccccgactacctctatctggtggtggtgccggtggtttcgctgctgctggcggtgttcctggcgcacgcgctgatcgggccgttcggccgcatgatcggcgacggggttgcctgggcggtgaaagcggtgatgaccggcagcttcgccccggtgggcgccgcgctgttcggcttcctgtatgcgccgctggtgatcaccggcgtgcaccagaccacgctggccatcgacatgcagatgatccagagcatgggcggcaccccggtgtggccgctgattgcgctgtccaacatcgcgcaggcctcggcggtgctcggcatcatcatcatcagccgcaaggccaacgagcgtgaaatctcggtaccggcggcgatctccgcctatctcggcgtgaccgaaccggcgatgtacggcatcaacctcaaataccgtttcccgatgctgtgcgcgatgatcggctccgcgatcgcgggcctgatctgcggcctggacggcgtgatggccaacggcatcggcgtcggcggcctgccgggcatcctgtctatcaagccgcagttctggctgatttactcgctggcgattctggtggcgatcgtcatcccgctggtgctgaccatcatggtctacaaacgcaaggccgcccgcggcgagctgccggtttaa

SEQ ID NO: 425647 - DNA, 1665 bp, Serratia marcescens
atgagcaacccaaccccctggtggcagaacggcgtcatctaccaaatttatccgaagagttttcaggacagtaccggcaacggctacggcgatttggccggcgtgacccggcggctggactatctgcaggagctgggcgtcgacgccatctggctgacgccggtctacgtatcgccgcaggtggacaacggctatgacgtggcggactactgcgccatcgatccggcttacggcaccatggcggacttcgagcagttggtcgccgccgcccaccggcgcggcatccgcatcgtgatggacatggtgttcaaccacacctcgaccgagcacccgtggttcaaggccgcgcaggatcgccacagcccgtatcgccagttttacgtctggcgcgacggcgagggggatacgccgccgaacaactggcgctccaagttcggtggcaacgcctggcagtggcacgccgacagcggccagtactacctgcacctgttcgccgccgagcaggcggatctcaactgggaacacccgccggtgcgcgaagagctgaagaaagtgtgtcagttctgggcggataaaggcgtcgacggcctacgcctcgacgtgatcaacctggtgtccaagcagcaggatttcccgtccgacagccagggcgacggccgccgcttctacaccgacggcccgcgcattcacgagttcctgcaggaaatgagccgcgacgtattccagccgcgcggcctgatgacggtgggcgagatgtcttccaccacgcttgagcattgccagcagtacgcggcgcagagcggcgaagagctgtcgatgaccttcaacttccaccacctgaaggtagactacgccggcggcgaaaaatggacgcgggcggcgccggattacgtggagttaaaacagatcttccgccactggcagcaagggatgcataaccgcgcctggaacgcgctgttctggtgtaaccacgatcagccgcgcatcgtgtcgcgcttcggcgatgaaggcgcactgcgggtgccggccgccaaaatgctggcgatggtgctgcacggcatgcagggcacgccttatatctaccagggtgaagagatcggcatgaccaaccccggcttccgcgccatcgagcagtaccgcgacgtggaaagcctgaacatgtacgccgaactgagcgcccagggccgcagcgacgccgaactgctggcgatcctggcggacaaatcgcgcgacaacggccgcacgccgatgcagtggagcgccgcgccgcacgccggtttcaccatcggcacgccgtggatcggctgcgccgagaactacccgcagatcaacgccgacgcggcgctggccgatctcgactcggtgttttacgcctaccgccagctgatcatcctgcgcaagcagtatccgctgctaacccacggcgactatcaggatctggcgccggatcacccggcgctgtggtgctatcagcgcagctggaacggccagcgcctgctggtggtggccaacctgagccgcgaaccgctggcctgggcggcggagggcgtggaagcctccgcgcagtggcgtccgctgatgagcaactacagcgactcggcggatcagccgcaagcgctgacgctgcggccgttcgaagcggtgtggtggctgctcgaagactga

SEQ ID NO: 425648 - DNA, 525 bp, Serratia marcescens
atgtcacgcattttagtgttaactgcccaccgcacccccgacgagtcgcgcatcaaccaggcgctgatcgaggccgtgcgcccgctgcctaacgtgaccgtgcacgaactgatccgcgcttacccggattaccgcatcgacgtggcgcgcgaacaggagctgctggaaagccacgatgcggtggtgatgatgttcccgtttttctggtacagctcgccggcgatcctgcgcgaatggcaggacgcggtattaacctatggtttcgcctacggcagcgagggcaccaaactgcacggcaagccgctgcagttggtggtgagcaccggcggcaacgcgcaggcctacacgccggcaggctacaaccgctatccggtgcaggatctgctgctgccgttccacgcgctggctaacctgaccggcatggattatctgccgccgcacctggtgcagggcgtgagcgacatgagcgatgagcagttggcgcaagcggccgccggggtggtggcgctgatggggacattgtag

SEQ ID NO: 425649 - DNA, 915 bp, Serratia marcescens
atgtcgctgccctttgacgtgcaccgcctgctgccggccttcctcgccgccgcgcaggcgcaaaatttctccgccgccgcccgccagctgggcgtcacgccggcggcggtcagcaaaaatatccgcgcgctggaagagaagctggcgctgcggctgtttcagcgcaacacccacaacgtgctgctgaccgacgagggcaaagcgctgctggcgcaggtggcgccgctgtggcaggcgttggcggcaacgctggaaagcgccggcggcgagcggcaggcgccggccggggtggtgcgcgtcagcatgatccccggcttcggccgccagatgctgatgccgttgatcccgcaatttctggcgcgctacccgcagatcgatctcgatctgtcgctggatgcccgggtggtgaatctggtgggcgaaggcttcgacgtcggcatcggcagccgggtcgatcccgacagccggctggtggcgcgcccgctctacccgatgcacatggcgctggcggcgtcgcccgactatctggcgcggcgcggtgaaccgcaaacgccgcacgatctgctgcggcacgactgcctgctgcaccgcaaccccagcaacggccgccacgtcaaatggcagctgcgccatcagggcgaaacgctggcgctggatctgaacggccgattggtggtgagccgcccggaaatgttgctggatgcggcgctggccgggctgggcatcgtcaacctggcgcgctggtacctcgaaaaacacttcgagcagggcacactgcggccggtgctggcggagtgttggccgcgcccggtgcagctgtggctctattacgcctcggcggatctgccgccgcgggtgcgcgtctgggtcgattttctgctggcgcattttcgcgatcggccagtgagcgattga

SEQ ID NO: 425650 - DNA, 2172 bp, Serratia marcescens
atgaacgctccctcggggaacaaggagtacaacgtgaaaccagtagtgattaagcgggacggttgccaggtaccttttgacgaagcgcgcatcgcgcaggccatcgagcgcgccgcgctggcggtgggcgtggtcgacgccgactactgcgccaccgtcgcccgcgtggtcgctcagcgcatggagccgcagccgcgcgtcgatatccacgagatccagcaggcagtggaaaaccagctgatggccggcgaatacaaacagctggcgcgcgcctatatcgaataccgccacgatcgcgacgtggcgcgcgagctgcgcggccgcctgaaccaggaaattcgcggcctggtcgagcagagcaaccgcgcgctgctgaacgagaacgccaacaaggacagcaaggtgatccccacccagcgcgacctgctggcgggcatcgtcgccaaacactacgccaagcagcacatcctgccgcgcgacgtagtgctggcccatgagcgcggcgaaattcactaccacgatctcgactactcgccgttcttcccaatgttcaactgcatgctgatcgatctgaaaggcatgctgaccaacggcttcaagatgggcaacgccgaaatcgagccgccgaagtcgatctccaccgccaccgccgtgaccgcgcagatcatcgcccaggtcgccagccatatctatggcggcaccaccattaaccgcatcgatgaaattctggcgccgttcgtcgacgagagcttccgcaaacacctgcaggtggcggaggaatggcagatcccggacgccaaaggctatgccatggcgcgcaccgagaaagagtgttacgacgccttccagtcgctggagtacgaggttaacaccctgcacaccgccaacggtcagacgccgttcgtcaccttcggcttcggcctcggcaccagctgggagtcgcgccttatccagcgctcgatcctgaaaaaccgcatcgccgggctgggcaaaaaccgcaagaccgccgtgttccccaaactggtgttcgccatccgcgacggcctcaaccaccagtacggcgatccgaactacgacatcaagcagttggcgctggagtgcgccagcaagcgcatgtacccggatatcctcaactacgatcaggtggtgaaggtcaccggctcgttcaaaacgccgatgggctgccgcagcttcctcggcacctacgagcaggacggcgagctggtgcacgacggccgcaacaacatcggcgtcatcagcctcaacctgccgcgcatcgcgctggaggcgatgggcgatgagtcgcgcttctgggcgctgctggatcagcgcctgcagctggcgaaaaaggccctgatgacgcgcatcgcccggctggaaggcatcaaggcgcgggtagcgccaatcttgtacatggaaggcgcctgcggcgtgcggctcaaggccgacgataacatcgccgatatcttcaagaacggccgcgcgtcgatctcgctgggctacatcggcctgcacgagaccatcaacgcgctgttcggcggcgaaaaccacgtgtatgacgacgaagcgctgcgcgccaaagcggtggcgatcgtcgcgcgcctgcgcgccgccgtcgacgcctggaaagacgagaccggctacggcttcagcctctacagcacgccgagcgagaacctgtgcgatcgcttctgccggctggacaccgccgatttcggcgtggtgccgggcgtcaccgacaagggctattacaccaacagcttccacctcgacgtggagaagaaggtcaatccgtacgacaagctggacttcgaagcgccctacccgccgttggccagcggcggcttcatctgctacggcgagtacccgaacctgcagcacaacctgaaggcgctggaagacgtgtgggactacagctacagccgggtgccttactacggcaccaacacgccgatcgacgagtgctacgagtgcggcttcaccggtgaattctcctgcaccagcaaaggcttcacctgcccgaaatgcggcaaccacgactcggccaaggtctcggtcacccgccgggtgtgcggctacctcggcagccccgatgcccggccgttcaacgccggcaagcaggaagaggtgaaacgccgggtgaaacacctcggcaacgggcagctcggctga

SEQ ID NO: 425651 - DNA, 465 bp, Serratia marcescens
atgaattatcaccagtactacccgatcgacgtcgtcaacggccccggcacccgctgcacgctgtttgtcgccggctgcgtgcaccagtgccccggctgctacaacaaaagcacctggcggctcaactccggtcagccgtttaccccggcgctggaagaccgcatcatcgccgatctgaacgatacgcgcgtgccgcgccaagggctgtcgctctccggcggcgatccgctgcacccggccaacgtgccgagcatcttaaagctggtgaaacgggtgcgcgccgaatgccccggcaaggatatctggctgtggaccggctaccggctggcggagctggacgcgcagcaaatgcaggtggtggacaggatcaacgtactgatcgacggcaagttcgtgcaggatttgaaagacccggcgctgatttggcgcggcagcagcaaccaggtggtgcataggttgcgatga

SEQ ID NO: 425652 - DNA, 276 bp, Serratia marcescens
atgcgtatcgaatgggataatgcagcgctacgggacagggaacgtatttttgagtttctttatattttcaatccacaggcggcagtgcaggctgataacgagatagataaagcggtaaagcgcctgctggatcatcctgagttaggtaagccttggtatgggaaggcacgtaagctgctcattaacaaggcctccctgttgctggtgtatatcatcgtcgatgatgttattaaggttttctcgattgcccaccagcgtgagaaatttccaaattag

SEQ ID NO: 425653 - DNA, 288 bp, Serratia marcescens
atggaaagtcgcatccagtttcgcatcgaaaatgaaaccaagcgtttggcgcaaaaggccgccgaggctaaaggaacgacattaagtgaagcctgtcgccgcttggcggagcaaatggctgatgagcaacgggccgcagaggaacacgaaaactggttgaaagataaggtagatgcagctttttcccgtctgcatgagggtaatgctgtttaccttagccaacaagaagtagaagaaagcatggatgcctttaaggcaaaaattagagcgaaatacgaccgaaaatag

SEQ ID NO: 425654 - DNA, 1059 bp, Serratia marcescens
atgccgcaacctctgaacgcccctgaacccgccccacgcgcctggccgctgtggaaaccgatcctgtttctgctggtggtggccgtcggcctctactacgtcaaatggcagccttactacggcaaggcgttcgtggcggcggacagccactcgatcggcaaatcgatcctggccgacggcgccgcgaacccctggctggcggcctggcagtacgcgctggtctacttcaccgcggtgtggaaggcggcgctgctcggggtgctgttaggttcgctggtgcaggtgctgatcccgcgtgactggctggtgcgcacgcttggccaccggcgtttttccggcaccgtgctgggggcgctgatcgcgctgccgggcatgatgtgcacctgctgcgccgcgccggttgccgccggcatgcgccgccagtcggtatccagcggcgccgcgctggccttttggctcgccaacccggtattgaatccggcgacgctggtgtttatggggtttgtgctcggttggccgttcgccgccatccgcctggtggcgggtgtagtgatggtgctgggcatcgcctggctggtgcagcgcgtgaccgccaacgatccgcaacccgccgcgccgcagccgccggtggtgatgatggcgcagaacgacgagcagccgttccttgcccgctgggggaaagcgctgtgggcgctgttttggtcgaccatcccgatctacgtgctggcggtgctggcgctgggcgcggcgcgggtctggctgttcccgcacgccgacggcgccatcgacaatagcctgctgtggatcatcggcctggcgatcgtcggctgcctgttcgtgatccccaccgcggcggaaatcccgatcgtgcagaccatgatgctggcgggcatgggcgccggcccggcgctggcgctgctgatgaccctgccggcggtcagcctgccttcgctgctgatgctcaacaaggccttctccgcccgggcgctgtgcctgacggcggcgctggtggcgctgtgcggcgcactgaccggcttggtggggatggggttggtgtaa

SEQ ID NO: 425655 - DNA, 729 bp, Serratia marcescens
atgatggagttatctagacatccgaccacttaccccacccgctatcagcagatcgccgcgcagctggaacaggagctgcgcacgcagtaccgctgcggcgactacctgccttcggaacagcagctggccgaacgttaccaggtcaatcgccacacgctgcgccgcgcggtggatcaactggtagaacgcggctggctgcagcgccgccacggcgtcggcattctggtgctgatgcgcccttacgactacccgctgcacgccaatacccgcttcagccagaacctgttcgaacagggcagccaccccaccagtgagcgcttactcgccgtcttgcgcccgtgcaatgggcatgtcgccagcgcactttcgcgtgaagaaggcgaaatggtgatccacctgcgcaccctgcgccgggtcaacggcgtgccgatgagcgtgattgaccattatctgcccgatctggactggtggccggcgctgcagcagttccacagcggttcgctgcaccagtttatcgaacaacacctccagcaggcgctgacccgccgccagacgcgcatcagcgcgcgccgcgcgcaggccaaagagagccggctgctggagatcgccacccacgcgccgctgctgtgcgtgcgcacccttaacgtccgcagcggcggcgaagacgtggcggaatactccgtcagcctggcccgcgccgacatgattgaactgacgatggagcactga

SEQ ID NO: 425656 - DNA, 444 bp, Serratia marcescens
atgcacgccttagagtcgagacaacgctggatgtcggtgctggcgcacagccggcccgagcagctgcgcagccactggcaggcgctgaacctcagcccgggttaccgcagcatccgcgcgccggagatcggcctggcccagctgcaggggcgcatgggcgctaccggccgccgcttcgtgctgggggacatgacggtcacccgcgcggtggtgcagctggacaacggcggctacggctacagctatatcgccgggcgcgacaaggcgcacgccgagctgtgcgcgctggccgatgcgctgctgcaacagccggaacacggcgaacgcctgcaacaacagctgatcgcgccgctggccgcgctgcagcacgagcagcgccagctgcgcgcccgggcgatcgccgccagccgggtggacttctttacgctggtgcgaggggattaa

SEQ ID NO: 425657 - DNA, 582 bp, Serratia marcescens
atgagtttattgaccggttttgaacaaccgatagaccaatcgcagcacactttccgtttgattcttaaagccttgagcgaaccgggccaccgggtgacgctgccgaacggcccggcctgggcgccgctgaacgccgccagcaccgccgcgctgctgacgctggccgatcaggaaacgccgctgcagctgtgcgctgcgcttaaaagtgagcaagtgctaacaaacattcgttttcacagcggtgcgccgctggccgccacggcgcaggaggtctgttttgccctgttcgatgagcagctgcaggccgccgatctgcaggcgttaccgcacggcacggaaatctcgccggagtttggcgccacggtcatcgtgcagctcggcgagctggagaacggcgccgcgctgcgcctgaccggccccggcatcgagaatcatcgcctgatagcgccgcgcctgccgccggcgctgctggattatttggtcaaccgcccgcagcgcttcccgctggggctggatattttgctgacctgcggcgatcgcctgctggcgatcccgcggaccacccgcgtggaggtgtgctga

SEQ ID NO: 425658 - DNA, 1086 bp, Serratia marcescens
atgtacgtagcggtaaaagggggcgaaaaagccattgaggccgcccatcagctgcaggaacagctgcggcgcggcgacgacgcgctgccggcgctcggcgcggaacaaatcgaacagcagctggggctggcggtggatcgggtgatgaccgaaggcggcatctacgatcgcgagctggcggcgctggccatcaaacaggccagcggcgatctggtggaggcgatcttcctgctgcgcgcctatcgcaccaccctgccgcgcctggcggtcagcgagccgctggccagcgaaaacatgcggctggagcggcgcatttcggcggtttacaaggacttgcccggcgggcaggtgctggggccaacctacgactacacccaccggctgctggacttcgcgctgctggcggaaggcgaggcgccgcgcgcgccacaggccgacgaaccgctgccggacaactgtagccacgtattcgatctgctgtgccgccagcagctggcgcgggaggaacaggacgacggcagcacgccggacgacatcacccgcaacccgccggtttacccctgctcgcgctcggcgcgcctgcagcagctggtgcgcggcgacgaaggttttctgctggcgctcggctacgccacccagcgcggctacggccgcaaccacccgttcgccggcgagatccgcaccggccacgtttcggtggagatcgtgcctgaagagctcggtttcgccatcgatatcggcgaaatcctgctgaccgagtgcgaaatggtcaacggctttgtcgatccaaaggaccatccgccgcacttcacccgcggctacgggctggtgttcggccgcgccgaacgcaaggcgatggcaatggcgttggtggatcgcgcattgcaaagccccgactacggcgaaggcgtcgccggcccggcgcaggacgaagagttcgtgctggcccacgccgacaacgtcgaggccgccggcttcgtctcccatctcaagctgccgcactacgtcgacttccaggccgaactggcgctgctcaagcggctgcgacaggaatacagcgagcgtcaggaggcccgcgatgagtga

SEQ ID NO: 425659 - DNA, 861 bp, Serratia marcescens
atgagtgaagtattgaccggctataacctcggttatctggacgagcagactaagcgcatgatccgccgcgccatcctcaaggcggtggcaatccccggctaccaggtgccgttcggcggccgcgagatgccgatgccctacggctggggcaccggcggcattcagctcaccgccagcgtcatcggccgcgccgacgtgctgaaggtgatcgaccagggcgccgacgacaccaccaacgcggtgtcgatccgccgcttcttccagcgcgtcgccggggtggccaccaccgagcgcacgccgaaggccacgctgatccagacccgtcaccgcattccggaaaccgcgctgcgcgaagaccagatcctgatctatcaggtgccgatcccggagccgctgcgctttatcgaaccgcgcgaaaccgagacccgcaagatgcacgcgctggaggagtacggcgtgatgcaggtgaagctgtatgaagacatcgcgcgctacggccatatcgccaccacctacgcctatccggtgaaggtcaacgatcgctacgtgatggatccgtcgccgatcccgaaattcgacaacccgaaaatgcacatgatgccggcgctgcagctgttcggcgccgggcgcgagaaacgcatctacgccctgccgccgttcaccaaggtggagagcctggacttcgacgaccatccgttcagcgtgcagcagtgggacgaaccctgcgcgctgtgcggctcgcgccacagctacctggacgaggtggtgctcgacgatcggggcaaccgcatgttcgtctgttcggacaccgactactgccggcagcagctggcgcaatcttcgcaagaggcgcagcactga

SEQ ID NO: 425660 - DNA, 789 bp, Serratia marcescens
atgacttccacccctttgagcaccaccccgctgctgtcggtgaaccggctcacccacctgtacgcccccggcaagggcttcagcgacgtgtcgttcgacatctaccccggtgaagtgctgggcatcgtcggcgaatccggctccggcaaaaccacgctgctgaagtcgatctcggcgcggctggcgccgcagcgcgggcagatcctttaccgcccacaggcgggccaggaacaggatctgtacgccatggcagagagcgatcgccgccgcctgctgcgcaccgactggggcgtggtgcaccagcacccgctcgacgggctgcggccgcaggtctccgccggcggcaacatcggcgagcggctgatggccatcggccagcgccactatggcgaaattcgccgccaggccggccagtggctggaagacgtcgaaatcccgctgtcgcgcctcgacgatctgccgaccaccttctccggcggcatgcagcagcggctgcagatcgcccgcaacctggtcacccaccccaagctggtgtttatggatgagccgaccggcgggctggacgtgtcggtgcaggcgcgtctgctcgatctgctgcgcaacctggtggtggagatgcagctggcggcggtgatcgtcacccacgatctcggcgtggcgcggctgctggcccaccgtctgctggtgatgaaacagggcgaagtggtggagagcggcctgaccgaccgagtactggacgatccgcaccatccttacacccagctgctggtttcttcggtgctgtcgtaa

SEQ ID NO: 425661 - DNA, 705 bp, Serratia marcescens
atgactatgcaaatccgagttgaacatctcagtaaaacctttgtgctgcaccagcagtacggcacccgcctgccggtgctgcacgacgccaacctgacggtccacggcggcgaatgcgtggtgctgcacggccactccggcagcggcaaatccaccctgctgcgctcgctgtacgccaactacctgccggacagcggccatatctggatccaccaccaaggcgactggctggacatggtcagcgccgatgcgcgccagattctggcggtgcgccgccatacgctgggctgggtcagccagttcctgcgggtgatcccgcgcatcagcgcgctggaggtggtgatgcaaccgctgctggaacagggcgtcgaacgcgccgagtgccgtgaacgcgccgaggcgctgctcgctgcgctcaacgtgccgcagcgcctgtggccgctggcgccgtccaccttctccggcggcgagcagcagcgggtgaacatcgcgcgcggctttatcgtcgattaccccatcctgttgctggacgaaccgaccgcctcgctcgacagccgcaacagcgcggcggtggtgcagcttatcgaacgcgccaaggcgcgcggcgcggcgatcgtcggcatttttcacgatgaaggcgtccgccagcaggtcgccgaccggctttatgacatgcaggcgccgcaggcgctggaggtcctctga

SEQ ID NO: 425662 - DNA, 1137 bp, Serratia marcescens
atgatcgtcaataacgttaagctggtgctggatgaccaggtggtgcaaggctcgctggagatgcaggacggcgtgatccgcagcttcaccgacggcccgagccggctgccgcaggcgctggacggcgacggcggctggctgctgccggggctgatcgaactgcataccgacaacctggacaagttcttcaccccgcgcccgaacgtcgactggccggcccattcggcgatgagcagccacgacgcgctgatggtggccaacggcatcaccacggtactggacgcggtggcgatcggcgacgtgcgcgacggcggccaccggctggaaaacctgcagaagatgatcgacgcggtgatccacagccagcgcgccggggtgaaccgcgccgagcaccggctgcacctgcgctgcgagctgccgcacgagagcacgctgccgctgttcgaacagctgatggacaagccgggcgtgtcgctggtatcgctgatggatcactcgccgggccagcgccagttcgcctcgcgcgaaaaataccgcgaatactatcagggcaaataccacctcaacgaccagcagatgagcgagtacgaggagcagcaggtcgccctgtccgcccgctgggccgcgccgaaccgcgaggcgatcgccgcccactgccgcgcgcgccgcatctcgctggccagccatgacgacgccaccgccgcgcacgtggccgaatcctgcgcgctgggcagcgccatcgccgagttccccaccaccgaggcggccgcccgcgcctcgcaccagcagggcctgcaggtgctgatgggcgcgccgaacatcgtgcgcggcggttcccactccggcaacgtggcggcgcaccacctggcagcgctgggggtgctggatattctctcttccgattattacccggccagcctgctggacgcggcgtttcgcctcgcggcggacgaacgcaacgcctacgacctgccccaggcggtgcgcatgatcacccgcaacccggcgcgggcgctggatctgcaggatcgcggcaccattgccgaaggactgcgggcggatctggtgctggcgcggccgcacggcgagcacgtttacgtgcagaacgtgtggcgccagggcaggcaggtgttctga

SEQ ID NO: 425663 - DNA, 570 bp, Serratia marcescens
atggcgcggctcatctacctgatggggccttccggcgcaggcaaggacagcctgctggccgcgctgcgggccgacgccgaccgcgcaccgctggtggcgcaccgttatatcacccggccggcggacgccggctgcgagaatcacatcgcgctgagcgaaccggaatttctgcgccgccgcgccaaggggctgttcgcgctcgactggcaggcgcaccagcagcactacgcgttcgggatcgaagtggatctttggctgctgcaagggatcgacgtggcggtcaacggttcgcgcgcccacctgccgcaggcgcagcagcgctatggcgcacagctgctgccggtgtgcctgcaggtcagcgccgcgatcctgcgccgccgcctgcaggatcgcgggcgagaaagcgccgaacagatcgagcagcggctggcgcgggcggcggaatatcagcagagtctgcccgccggctgccgggtgctgcacaacgatggcccactcgacgacaccctggcggcgctgctggcgctgctgcctaccgccacccgacaagctcaggacgcaacgccatga

SEQ ID NO: 425664 - DNA, 603 bp, Serratia marcescens
atgaacgactttgcccagccgaaaatcggcgacaacgtgacccttaaccgcacccggctcggccaatatgtgcatctggccgacgatgcgatcctggaagaagtggagataggggactactcctataccgccgggcacaaccagattttttacgccactatcggcaagttcgtctccatcgcctcctatgcgcgcatcaatcccggcaaccacccgacctaccagcgtatcgcgcagcaccactttacctaccgcgcctccgaatacgggctgggggaagacgacgcggcgttcttcgactggcggcgcgagcaccacgtcaccgtcggccacgacgtgtggatcggccataacgccatcctgatgccgggcgttagcgtcggcaacggcgcggtgatcggcagcgcggcggtggtcaccaaggatgtggagccttacagcatcgtcgccggcgtggcggccaagaagatcggcatgcgctttgacgacgcgctgatagaacgcatcgaacgcagccagtggtggcactgggatcacgccacgctgcaggcgcggctggcggattttcgcgacatcaaccgctttgcccagaagtacctttaa

SEQ ID NO: 425665 - DNA, 783 bp, Serratia marcescens
atgcaactgacctttctcggcaccggcggcgcgcagcaggtgccggtgttcggctgcgactgcctgatctgccaacgggcgcggcgcgagccggcatttcggcggcgagcgtgcagcgccatgcttaactatcagggggaaacgaccttattggatgcgggattgccggctttggagcggcgattttcggcggggcaaattcaacgttttttactgacacattaccacatggatcacgttcaggggttatttcctttgcgttgggggtgcggaaattccattccggtatatggcccgccggatgaacagggctgcgacgacctgttcaaacaccccggcattctggcgtttcagccgccgctggcgcccttcgccaccgtcgaactgggcggcatgcgcatcaccccgctgccgctgcaacactccaaactgacccacggctatctgatccaggcggcaggcgctgcgctggcctacctgaccgacaccgtcggcctgccgccggccaccgccgactatctgcaaaacgtggcgctggatctgctggtgctcgattgcagcctgccgcctcagccgcaggcgccgcgcaaccacaacgatctgacccgcgcgcaggagacgcagcggttgctgcagcctaaacgcacgctgctgacgcacatcagccatcatctcgatctgtggctgctggacaacgaactgcccgccgagctggagctggcgttcgaccacctcagcgtcagcctcggtagcagtgcagccgatccgactccagcaccctga

SEQ ID NO: 425666 - DNA, 633 bp, Serratia marcescens
atggcgcgagcactgttagtcggcgcaaccgggctggtggggcgcgagttgctgcagctgttgcaaagcgatccgcagataacggccatcgtggcgccgacgcgcacgccgctgccgccgcacggcaagctgaccaatccggtcggcgatgcgctgttcgagctgctgagtagcctgcagcagccggtcgatctggtgttctgctgcctgggcaccacccgccgggcggcgggtagcgccgatgccttccgctacgtcgattaccagttggtggtggagagcgcgctgaccggccgccgcttgggggcgcagcactgcctggtggtgagcgcgttgggcgccaacgcggattccaccttcctgtataaccgcaccaaaggcgagatggagcaggcgctgcgcgaacagcactggccgcgcctgacgctggtgcggccttccatgctggtgggcgagcgccccgcgccgcgcctgatggagcgcctcacgctgccgctgttcaggctgctgcccggcaaatggcgcgccgtctccgccaaagacgtggcgcaaacgctgctgcagcaggcgtttacgccgggcgaaggggtcagggtgctggagtcggatcggctgcactgctaccgaggctga

SEQ ID NO: 425667 - DNA, 441 bp, Serratia marcescens
ttgaataccccagaacaacggcagcagattgcggatttcatcggcaaacaacacgtcttgacgctgtgcgccggcgacggcctcgacatgtggtgcgccaactgtttttacgtgttcgacgccgcggcgatggcgctgtggctgatgaccgaaccgcacacccgccacggcgggctgatgctgaacaacggccgggtggttggcaccattgcgccgaagccgaaaagcatcgcgctgatccgcggcgtgcagtatcgcgccgaggcggtgctgctgagcggcgaagaagccgaggcggcgcgcgcgcgttactgcaagcgcttcccgatcgccagggcgatgaaggcctcggtttggcggctggatctgcacgaggtgaagatgaccgacaacaccctcggcttcggcaagaagctgcattgggcgcggtctatactttaa

SEQ ID NO: 425668 - DNA, 990 bp, Serratia marcescens
atgaaaaaattaaaaattgccgccaacacccaaaccctcggctgctttgaaactgaacgcgacatcgtcgatgtgcatcacagcgatttcaatgatgtcgccgccatcgtgctgtcggtagacgacgtcacgcacggcatggtggcgcgcattgaagagcacggcctgaacattccgctgttcgtcgccgtctgctgcgaagaagagctggataacgccgtattgccggcgctgcacggcgtgtttgaactgtgcggcaagaatacccagttctacggcaaacagctggaggccgccgccgccaaatatgagagcgagctgctgccgccgttcttcaacacgctgacgcagtacgtggaaatgggcaacgccaccttcgcctgccccggccaccagggcggcgagttcttccgtaaacatccggcgggccgccagttcttcgacttctacggcgaaacgcttttccgctccgatatgtgcaacgccgacgtcaaactgggcgatctgttgatccacgaaggcgcgccttgcgccgcgcagcagcacgccgccaaggtgttcaacgccgacaagacctacttcgtgctcaacggcacctcggcctcgaacaaggtggcgaccaacgccctgctgacgcgcggcgacctggtgctgttcgaccgcaacaaccataaatccaaccaccacggcgcgttgatccaggccggcgccacgccggtttatctggaaaccgcccgcaacccgttcggctttatcggcggcatcgacgcgcactgcttcgacgaacgctacctgcgccagcagatccgcgaagtggcgccggagaacgcgccaacgaagcccgcccgttccgcctggcgatcatccagctcggtacctacgacggcaccatctacaacgcccgccaggtggtcgacaagattggccacctgtgcgactacatcctgttcgactccgcctgggtgggctatgagcagttcattccgatga

SEQ ID NO: 425669 - DNA, 1179 bp, Serratia marcescens
atgatgaaagactgctcgccgctgctgctggagctgaacgaaaacgatcccggtatcatcgtcacccagtcggtgcacaaacagcaggccggcttctcacaaacctcgcagatccacaaaaaagacaagcacatcaagggccagagccgctactgcaaccacaagcgcttcaacaacgccttcatgctgcacgcctccaccagcccgttctacccgctgttcgccgcgctggacgtcaacgccaagatgcacgagggcaagagcggccagcgtctgtggcaggaatgcgtgcgcgtggggatcgaagcgcgcaaaatgctgctggacacctgtacgatgatcaaaccgttcgtgccggatcagatcgacggcaaaccgtggcaggcctatgacaccgcggcgatggccaacgatctgcgcttcttcaacttcgtgcccggcgaaaaatggcacgcctttgagggctatgccgaatcgcagtacttcgtcgatccgtgcaaactgctgctcaccacgccgggcatcgataccgccaccggcagctacagcgaattcggcatcccggcgaccattctggccaactacctgcgtgaaaacggcatcgtgccggaaaaatgcgatctcaactcgatcctgttcctgctgacgccggcggaagacatcgccaagatgcagcatctggtggccctgatcgcccgcttcgagcagcacatcgagcagaactccttgctcagcgaggtgctgccagcggtctataaaaaccaccagcagcgctacaaaaactacaccatccgccagctgtgccaggaaatgcacgacctttacgtcagctacgacgttaaagaactgcaaaaagagatgttccgcaaaagttatttcccgcgcgtggtgatgaatccgcaggacgccaataccgagttcgtgcgcggcaatgtggaattggtctcgctggctaaagccgagggccgcatcgctgccgaaggcgccctgccttacccgccgggcgtgctgtgcgtggtgcccggtgaaatttggggcggcgccgcgcagcgttatttcctggcattggaagaaggcatcaacttattgccgggattcgcgccggaattgcagggcgtttatatccaacaggatgaggacggctggaaccgcgcttacggctacgtcatgaaaaattaa

SEQ ID NO: 425670 - DNA, 1317 bp, Serratia marcescens
atgagtaagtccaataataaaatgggggtcgtgcaattaacgatcctgaccgccgtgaatatgatgggttccggcataattatgctgccgaccaagctggccgaagtgggcacgatttcgatcgtttcctggctggtgaccgccgtcggctcgatggcactggcctacgccttcgccaaatgcggcatgttcagccgtaaatccggcggcatgggcggctacgccgaatacgccttcggcaaatcgggcaactttatggcgaactacacctacggcgtttcgctgctgatcgccaacatcgccatcgccatttccgccgtcggctacggcaccgagctgttcgacaccaccctcagcccgctcgggatctgtatcgccaccatcggcgtgctgtggctggcgaccgtcgccaacttcggcggcgcgcgcatcaccggcaaaatcagcggcatcaccgtctggggcgtgatcattccggtggtgggcatctcggtcatcggctggtactggttcagcggcagcgcctacgtcgccgcctggaacccgcatcaggtgccgaccttcgaagccatcggcgcctccatctcaatgaccctgtgggcgttcctggggctggaatccgcctgcgccaacaccgatgtggtggaaaacccggagcgcaacgtgccgatcgccgtactgggcggcaccctcagcgcggcggtgatctatatcatttcaaccaacgtgatcgccggcatcgtgccgaacatggatctggccaactctaccgccccgttcgggctggcgttctcccacatgttcaacccgacggtcggcaagatcatcatggcgttgatggtgatgtcctgcgtcggctcgctgctcggctggcagttcaccatcgctcaggtgttcaaatcctccgccgacagcggcttcttcccgaaaattttctccaagctgagcaaggccgacgcgccggttaaaggtatgctgaccatcgtcgtcatccagagcggcctgtcgctgatgactatcagcccgtcgctgaacaagcagttcaacgtgctggtgaacctggcagtggtgaccaacatcatcccttacatcctgtcgatggcggcgctggtcattattcagaaagtggcgaaggtgccggacaacaaggcgcgcatcgccaatatcatcgccggcatcggcgcgctgtacagcttctacgcgctctacagctccggtgaggaagcgatgatgtggggcgccatcgccaccttcctcggctggacgctgtacggcatcgtctcgccgcgcttcgagctggcgggaaaaaaggggtaa

SEQ ID NO: 425671 - DNA, 306 bp, Serratia marcescens
atgaccgacacctcccccactccctggcacctctacatgctgcgtttaccgagcggcatgctgtataccggcatcaccaccgacgtggcgcgccgcctggcgcagcatcaagccggcaaaggcgccaaggcgctgcgcggaaaaggagaactgacgctggcatttcactgccaggtgggggatcgctcaacggcgctgaagctggaataccgcgtcaaacagctgagcaaaatacaaaaagagcggctggtgaatcacccgccgctgtcgttggagtatctattgccggtcgttaaaagcgattaa

SEQ ID NO: 425672 - DNA, 504 bp, Serratia marcescens
atgctgatccgcgtagagatcccggtagacgcggcgggcatagacgccttgctgcgccgcgcctttggccgcgacgacgaagccgatctggtgcagcagctgcgcgaagacggcctgctgacgctgggcgtggtcgccactgacgacgaaggcggggtggtgggttacgccgcgttcagcccggtggacgtggccggcgaagatcgccaatgggtggcgctggcgccgctggcggtagatgaaagcctgcgccgccaggggctggctgaaaagctggtgtacgaaggtttggattcgttgaacgaattcagctacgccgcggtggtggtgctgggcgatccggcctactacggccgcttcggttttaaaccggccgccgcctatggcctgaactgccgctggccggacacggaaagtgcgttccaggtgtatccgctggcggaagacgccctgaatggcgtcagcggcgaagtggctttttcggcgccgtttaatcgcttttaa

SEQ ID NO: 425673 - DNA, 528 bp, Serratia marcescens
atgaccgtgttggaaaaactacgagcacgccttgtgcgccaggggccgtcgctgctgcgcatcccgctgaaattcacgccgttcgccctgcagcgccaactgctgcaacaggtgctgagctggcagttccgccaggcgttggcggatggcgatctggaatttctcgaatcgcgctggctgaagatcgaagttcgcgatctggcgctacaatggtttatgacggtagaaaacgacaaactggtggtcagccagcacgccgaagcggacgtcagtttcagcggcgacgccaacgatctgatcctgatcgcggcgcgcaagcaagatccggatacgctgttctttcagcgtcggctgcagattgaaggggataccgaattgggcctgtatgtgaaaaatttgatggacgccatcgagctggaaagcatgcccgcgccgctgcgcatggggctgttgcagttggctgattttgtcgaagcagggttgcaggagggcacggcgtcggcttcccgtgtggcggtatcatgctga

SEQ ID NO: 425674 - DNA, 996 bp, Serratia marcescens
atggagctgctttgtcccgccggcaacctgccggccctgaaggccgcggtggataacggcgccgacgccgtttacatcggcctgaaagacgataccaacgcgcgccacttcgccggcctcaacttcaccgagaaaaagctgcaggaagcggtcgattacgtgcatcgccacggccgcaagctgcatatcgccatcaacaccttcgcccatcccgacggctacgcccgctggcagcgcgcggtggatatggcggcccagctgggcgccgacgcgctgattctggcggatctggcgatgctggaatacgccgcccagcgctacccgcagctggagcgccacgtttcggtgcaggcctccgccaccaacgaggaggcgatccgtttctaccagcgcaacttcgaggtaggccgggtggtgctaccgcgcgtgctgtcgatgcatcaggtgaaacagctggcgcgcaccagcccggtgccgctggaagtgttcgccttcggcagcctgtgcatcatggccgaggggcgctgctatctctcctcctacctgaccggcgaatcgccgaacaccgtcggcgcctgttcgccggcgcggttcgtgcgctggcagcaaaccccgcagggcatggagtcgcgcctgaacgacgtgctgatcgaccgctaccaggaccatgaaaacgccggctacccgacgctgtgcaagggccgctatctggtggacgacgtgcgctaccacgcgctggaagagcccaccagcctcaatacgctggagctgctgccggagctgctggccgccaacatcgcctcggtgaagatcgaaggccgccagcgcagcccggcttacgtcagccaggtggcgtgcgtctggcgccaggcgatcgaccgctgccaggccgatccggccgcctaccgtgccgacgccgcctggatggagacgctgggcgcgatgtccgagggcacccagaccacgctgggcgcctatcaccgcaaatggcagtag

SEQ ID NO: 425675 - DNA, 879 bp, Serratia marcescens
atgaaatacgcactggggccggtgctctactactggccgaaaaacgacatcgcggcgttctatcaacaggcgacggagagcagcgccgacatcatttacctcggagagagcgtctgcaccaagcggcgcgagatgaaggtcggcgattggctggcgctggcgcgcgaaatcgcccgcagcggcaagcaggtggtgatctctacgctggcgctgctgcaggcgccgtccgagctgaatgagctgaaacgctatgtggagaacggcgagttcctgtttgaagccaacgatctgggcgcggtgaacatggcggcggaacgcggcttgccgttcgtcgccggccacgcgctgaactgctacaacgcctataccctgcgcctgctgcgccgccagggcatgatgcgctggtgcatgccggtcgagctgtcgcgcgactggctggccaacctgctggcgcagtgcgacgagctgggtttccgccacgatttcgaggtggaggtgctgagctacggccacctgccgctggcctattcggcgcgctgcttcaccgcccgctcggagaaccgcggcaaggacgaatgcgaaacctgctgcatcaagtatccgcagggccgcatgatgcgctcgcaggagcaacaacaggtgttcgtgctcaacggcattcagaccatgagcggctactgctacaacctcggcaacgagctgccgagcatgcaggggctggtggacatcgtgcggctgtcgccgcagggcgccgagacgctggcgcaaatcgatgacttccgcgccaacgaacgcggcgaaaagccgctggccttgaccgatcacgccgactgcaacggctactggcgccgcgtggcgggattggagttggtgtcttag

SEQ ID NO: 425676 - DNA, 1140 bp, Serratia marcescens
atgaagctctattggcaaaccttcgttaaggtgctgctcggcatgctggagcggccggtatggctgatgctgatcctgtcgctgtgcatcatgagcatggtgtacgccaaccgcacggtgtgggatctgccggtgggggtggtcgatcaggaccacagcaccgccagccggcagctgatccgccaactggacgccacctccaagatagcgatcgaaacctacgacagcctggagcaggcgcagcgcgatctcagctggcgcaagctgtttgcggtgatcatcatgccggtggatctggagaagaagatcctcagcgggcagaacatcgtggtgccggtgtacggcgacgccaccaaccgcctggccaacggccagatccaacaggacgtggtggcggcctaccagcagctgctgacggagtacaacaacgggctgctgctgcgcagcggcttcagcgaacggcaggcgcagatactgctgacgccgatactggggcaaacgctggacgtgtttaaccccggcatcagcttcgcggcgatcatctttcccggcctgctggtgatgctgttgcagcactcgctgctgatcgcctgtatccgcgtcaacatcgccatgaagagcatgcccggcggcaaggcgccgctggcggcgcacctcggcgggctgacggcgctgctgccgatctggctgttcctgtcgatcgtgctgttcgtgctgtggccgtgggtattgggctacaggcagacggcgaacatcgccgaactgctgctgctgaccttcccgttcctgctggcggtgctggggctgggcaagctggtgaccgagtgcctgcgcagcgtcgaaatgatctacctgacgctggcgttcatcaccacgccgatcttctacctgtccggcaccatctggccgctgcagtcaatgccggcctgggtgcgcgccatctcctacagcattccctccacctggggcaccaaggcgatcgccggcgtcaaccagatggggctgtcgctgaacgaagtgtggggcgacgtgatgatgatgctggtgctcggcgtggtctacaccctgctgggcttcggcgtcggcttcttgcgcaacagcgtggcgctgcgcgggatgttcaggaagcggcgggcgtag

SEQ ID NO: 425677 - DNA, 1155 bp, Serratia marcescens
atggcaatggaaagagtaagggccggctggcgctgcttcagtcacgcgttcgacaaagagtgtcgcgtcgcctttcgtagcccggtggtgcactggctgagctggatctttccgctgatcctgtttgggctgatcagcagcaacttctccgaaggcacgctgctcgatctgccggtctcggtggtggacagcgatcacagcccgctgtccaaatcgctgacgcggcggctggacgctgggtcgcacgcccacgtcgaggcctacggcggcgggttgccggaatcgctgagccgcctgcgcagcgcgcaggattacgcgttgctgtacattccgccggacttcgaggccaacgcgctgtcgggcaaacagcctagcgtggtgatgtactacaacgcgctgttctacggcgccgggctgtactccacccaggactttggcggcctgatgaacgaaatcaacgccagcacccgcagcatcatcgccacagagatgggcaaatcgctgccgccgctggcggatgtgacgctctcttacggcagcctgttcaacgccagcggcagctatatctattaccagcagttcgccgccaccattcacctgctgcagctgttcgcggtgacctgcatgatctacgtgctggcgcgcagcaaatcgctgctgcaggccaagccgttcagcctggcgctgctcggcaagctggcgccgtacacgctgtgtttcaccaccctgctgatggtggagatcgcggcgctggtgggcatctttgacgcccgcgtcagcggcaacccgctgtttatgctgatgatcggcctgttttacgtgatggcggcgcagagcatcggcctgctgctgtacacctttaccggcagcaccatcaccgcctacagcctgatcggtattttggtcagtatcgcgatgaccttctccggcatggcggtgcctgagctgtcgatgccgctgccggcgcgcatcatttccaacatcgagccgctgacccacgcgctgtacgcgatgttcgacgtgttcctgcggcaggtgcacgccagcgccattttcagcgtgtgtgcgctgctggcggtctacccgctggtggccgcgctgctggtgcgcaatcgcctgccggcgcggctggcaaaagaggggaacgccggatga

SEQ ID NO: 425678 - DNA, 972 bp, Serratia marcescens
atgaaaaaaaagacgctgtttaccctgttgctgatgatggtggcgatcgcattggcggtcctgttccgcgcgcacaatcaggatctgttactgcagggtgaagtggacgcccccgaagtgatcgtcgcttccaaggcgaaaggccgggtggttgaacgcctgatcgaacgcggcgacgacgtgaaaagcggccagctgattatccagctcgacagccccgaactgatggcgcagctgcgttccgcgcaggccacgcgcgacgaggccaaggcgcagctcgatcagtcgctgcacggcacccgtgaagagagcatccgcaacctgcgcgccaatctggcgcaggccgaagcgcagtaccgcaacgcgcaaaacgactacaaccgcaacctgagcgtggccggcaagggctatatctcgaagtccgagttggacgcctcgcgccgggcgcgcgacaccgccttccagcaggtgcaggcggccaaggccaacctggacgaaggcatcaacggcgaccgcgtcgagctgcggcaacaatacgcggcggcgctgcgggcggcggaagagaacctgctgcagatccaggcgcagagcgacgatctgcaggtgaaggcgccggtggacggcgaagtggggccgatcccggccgaagtgggcgagctgctgaacgccggcagcccgctggtgacgctgatccggatgccggacgcctacttcgtgtttaacctgcgcgaagacatcctggcccacgtgcgcaaaggcgacaaggtcaagctgcgggtgccggcgctgaaggacaaaatgatcgacaccgaggtgcgttacatcgcgccgctgggggattacgccaccaaacgcgccacccgcgccaccggcgacttcgacctgaaaaccttcgaagtgcgcctgtatccgtcacagccggtggacggcctgcgtccggggatgagcaccttatggcaatggaaagagtaa

SEQ ID NO: 425679 - DNA, 1014 bp, Serratia marcescens
atgactgaaaacactgccgtaccgctgtcggtactggatttatcgccaatcccgcaaggggccaaagcgcgcgacgctttccactgttcgctggatttggcgcagcacgccgaacgctggggctaccggcgctactggctggccgagcaccacaacatgaccggcatcggcagcgccgccacctcggtgctgctgggctatctggccgccggcacccagagcattcgcctcggctccggcggcgtgatgctgccgaaccatgcgccgctggtgatcgccgagcagttcggcacgctggagtcgctctaccccggccgcatcgatctggggctgggccgcgcgcccggcaccgatcagcgcaccatgatggcgctgcgccgccacctgtccggcgatgtggataccttcccgcgcgacgtgcaggagctgcaaaactacttctgcgacgcgcagcccggccaactggtgcaggcagtgccgggccaggggctgcacgtgccgctctggctgctcggctccagcctctacagcgcgcagttggcggcgcagcttggcctgccgttcgccttcgcctcgcacttcgccccggatatgctgttccaggcgctgcagctgtaccgcgaaaacttcaaaccgtccaaacagctggcgcagccgcacgccatggtgtgcgtcaacgtgatcgccgccgacagcgatagcgatgcgcgcttcctgttcagctcgatgcagcagcagttcatcaacctgcgccgcggatcgcccggcccgctgccgccgccggtggataacatccacgcgctgtggaccgccggtgagcaatacggcgtcgagcaggcgctgcggatgtcgatcgtcggcgatgaaaaaaccgtgcgccacgggctgcaaacgctgctgcgtgaaaccgatgccgacgagatcatggtcaacggccagatcttcgatcaccaggcgcggctgcgttcgttcgagattgttgccggagtgaaaggcgacgtcgtgaagggataa

SEQ ID NO: 425680 - DNA, 240 bp, Serratia marcescens
atgaaagagacgacgatagtgccggactaccggctggacatgctgggcgagccttgcccgtacccggcggtggcgacgctggaggcgatgccgcagctgaagccaggggaaatcctggaggtgatcagcgattgcccgcagtcgatcaacaacattccgctcgacgcgcgcaaccacggctacaaggtgctggatatccagcaggacgggccgaccatccgctatctgatccagcgttaa

SEQ ID NO: 425681 - DNA, 1215 bp, Serratia marcescens
atgagttggcagcagttcaaatctcaatacctggtgcgcttttgggcgccgctgccggcggtgatcgccgccgggatcctttctacctactatttcggcatgaccggcaccttctgggcggtgaccggcgagttcacccgctggggcggccatgtgctgcagtggttcggcctgcaccccgagcagtggggctatttcaaggttatcggcctgcagggcacgccgctggagcgcatcgacgggcgcatgatcatcggcatgttcgccggctgcatcgccgccgcgctgtgggccaacaacatcaagctgcgccagccgcagcaccgcattcgcatcgtgcaggcgctgctgggcggcattatcgccggcttcggcgcgcgcctggcgatgggctgtaacctggcggcattcttcaccggcattccgcagttctcgctgcacgcctggttcttcgcgctggcgaccgccgcagggtcgtacttcggcgccaaattcacgctgctgccgatgttccgcattccggttaaattgcaaaaggtgaaggccgccgcgccgctgacgcagaagcctgagcaggcgcgccgccgcttccggctgggcatggcggtcttcggcctggcggtggcctggtcgctgtggacgctgttcgatgcgccgaagctcggcatcgccatgttgttcggcatcggcttcggtctgctgatcgaacgcgcgcagatctgcttcacctcggcgttccgcgatctgtggatcaccggccgcacccacatggcgaaagccatcatcatcggcatggcggtgagcgccatcggcatcttcagctacgtgcagctcggcgtggcgccgaaaatcatgtgggccggcccgaatgcggtgctgggcggcttgctgttcggcttcggcatcgtgctggccggcggttgcgagaccggctggatgtaccgcgcggtggaagggcaggtgcactactggtgggtggggctgggcaacatcatcggcgccacgctgctggcctattactgggacgatctggcgccggcgctggcgaccgactacgacaagatcaacctgctcgacaccttcggcccgatcggcggcctgctggtgacctacctgctgctggcgctggccttcgccgccatgctgtggtgggagaaacgctttttccgcgcccggcctgaggcgcaggtggtgaatttgaggagcctgccatga

SEQ ID NO: 425682 - DNA, 1923 bp, Serratia marcescens
atgacgactgagtttgaaacctcttttgctgatctggggctgtctgctccaatcatttccgccctgaacgatctgggctatgaaaaaccatctccgatccaggctgagtgtattcctcacctgttgaacggccgcgacgtgctgggcatggcacagaccggtagtggtaaaactgcagcgttctcgctgccgctgctgcacaacctgcaggcagacctgaaagcacctcagatcctggtgctggcaccgacccgcgaactggcggttcaggttgccgaagcgatgaccgatttctccaaacacatgaacggcgtcaacgtggtagccctgtacggcggccagcgttacgacgtgcagctgcgcgctctgcgccagggcccgcaaatcgttgtgggtaccccaggccgcctgctggaccacctgaaacgcggcaccctgaacctctctaacctgagcggtctggtgctggatgaagccgacgaaatgctgcgcatgggctttatcgaagacgtagaaaccatcatggctgagatcccggctgaacatcagaccgcgctgttctctgccaccatgccggaagcgatccgtcgcatcacccgccgcttcatgaaagagccgcaggaagtgcgcatccaatccagcgtgaccacccgtccggacatcagccagagctactggtcggtgtacggcatgcgtaaaaacgaagcgctggtgcgtttcctggaagctgaagactttgacgcggcgatcatcttcgtccgtaccaagaacgcgaccctggaagtggccgaagcgctggagcgcagtggttacagcagcgccgcgctgaacggcgacatgaaccaggcgctgcgtgagcagaccctggagcgcctgaaagacggtcgtctagatatcctgatcgcgaccgacgttgcggcccgtggcctggacgttgagcgcatcagcctggttgtcaactatgacatcccgatggactccgagtcttacgttcaccgtatcggccgtaccggtcgtgcgggccgcgccggccgcgcgctgctgttcgtggaaaaccgcgaacgccgcctgctgcgcaacattgaacgcaccatgaagctgaccatcccggaagtggaactgccgaacgcagaactgctgggtgagcgtcgtctggccaagttcgccgcaaaagttcagcagcagctggaaagcagcgatctggatctgtaccgcgcactgttgaccaaactgcagccggaagaagagctggatatggaaaccctggccgcagcgctgctgaaaatggctcagggcgaacgtccgctgatcctgccgccggatccggtcttcaaaccgcgccagcgccgcgagttcaacgaccgtgacgatcgtcgcggcgaccgtcgcgacagccgcgatagccgtgacggcgaccgtccgcgtcgcgaacgtcgtgacgttggcgaaatgcagctgtaccgcatcgaagtgggccgtgacgatggcgtagaagtccgtcacatcgttggcgcgatcgctaacgaaggcgacatcagcagccgttacatcggtaacatcaagctgttcgcgtcccactccaccatcgagctgccaaaaggcatgccgggcgagatcctgaatcatttcactcgcacccgcatcctgaacaagccgatgaacatgcagctgctgggcgatgcacagccgttcgaacgccgcgagcgtcgtgacggtggcaacggcggcgagcgtcgcggcaacggtcgtccgttcaacggcgaacgtcgcgaaggcggcccacgtcgttccttcggcgaacgtcgtgaaggcggcaacggcggcgagcgtcgtggcggtaactacaaccgtgacggcaaaccggcgccacgccgtgatgatggcgcacctgctgcaccacgtcgtcgtttcggcgacgcgtaa

SEQ ID NO: 425683 - DNA, 885 bp, Serratia marcescens
atgaagcctttcttgcgctggtgttacgttgcgacagcactcatgctggcaggatgcagcaaccatgattggcgtaaagacgaagttttggcaatcccgttgcaaccaacgttgcagcaggaagtgatcctggcgcgcatggaacaaattcttgccagccgggcactgacggacgacgaacgcgcacagcttttatatgagcgcggtgtgctgtatgatagcctcgggttacgtgcattagcgcgcaatgatttctcgcaggcgctggcgatacgtcccgacatgccggaagttttcaactacctgggcatttacttaacgcaggcaggcaattttgatgctgcctatgaagcgtttgattctgtactagagcttgatccaacttacaattacgcgcgtttaaaccggggcatcgcactgtattatggcggccgcttcccgttggcgcaggatgatctgcaggcgttttatcaagacgacccaaacgatcccttccgttcgttatggctgtatctggtggagcgagaaatcgatcccaagaaggccgaggtagcgcttcagcagcgctatgacaaagcggacagagggcaatggggatggaatattgtcgaattctacctgggcaagatcagcgaaaaaacgctgatggaacgcctcaaggcagatgcaacggataacacttcgctcgctgagcatctcagtgaaactgacttctatttgggtaaacactacctgagtctgggggacaaggacaccgcttcggcgctgttcaaactgacggtggctaacaacgttcacaacttcgttgagcaccgctatgcattgttggaattggcgcttttgggccaagagcaagacgacctatcggaatcggaccagcaatag

SEQ ID NO: 425684 - DNA, 2118 bp, Serratia marcescens
ttgctgacaccgatcattcgcaaattccagtatggccagcataccgtcaccatcgaaaccggtatgatggcgcgtcaggccaccgccgccgttatggtgagcatggatgacaccgccgtcttcgttaccgtcgttggccagaaaaaagccaagccgggccagagcttcttcccgctgaccgttaactaccaagagcgtacctacgccgccggccgcatcccgggcagcttcttccgtcgcgaaggccgtccgagcgaaggcgagaccctgacttctcgtctgatcgaccgtccgatccgtccactgttcccggacaacttcctgaacgaagttcaggtgatcgcgaccgtggtttccgttaacccgcaggtgaacccggacatcgttgcgatgatcggtgcttccgcagccctgagcctgtccggtattccgttcaacggcccaatcggcgccgcgcgcgtgggttacatcaacgatcagtacgtgctgaacccgacgaccgatgagctgaaagaaagccgtctggatctggtggttgccggtaccgccggcgcggtgctgatggtggaatccgaagcggacgtgctgagcgaagatcagatgctgggcgccgtggtgttcggccacgaccagcagcaagtggttatcgaaaacatcaacgcgctggttgccgaagccggcaaaccgaagtgggattggcaggcgcctgcggtcaacgaagcgctgcaagcgcgcgtggctgaattggccgaagctcgcctgggcgacgcttaccacatcaccgaaaaacaagagcgttacgctcaggttgacgcgatcaaagacagcgttgttgaaaccctgctggcgcaggacgaaacgctggacgccggcgaaatccaggacatcctgggcaacctggagaaaaacgtggtgcgcagccgcgtactgcgtggcgagccgcgtatcgacggccgtgaaaaagacatgatccgtggcctggacgtgcgcaccggcgtactgccgcgcacccacggttccgcgctgttcacccgtggcgaaactcaggcgctggttaccgcgaccctgggcaccgcgcgcgatgcgcagaacctggacgagctgatgggcgagaagaccgacagcttcctgttccactacaacttccctccgtactccgtgggcgaaaccggcatggtcggttctcctaagcgtcgtgaaatcggtcacggtcgcctggcgaaacgcggcgtattggctatgatgcctaaaccggaagatttcccgtacacggttcgcgtggtgtctgaaatcaccgaatccaacggttcttcttccatggcttccgtgtgcggcgcgtctctggcgctgatggacgccggtgtgccaatcaaggctgccgttgcgggtatcgcgatgggcctggtgaaagaagccgacaactttgtggttctgtccgacattctgggtgacgaagatcacctgggcgacatggacttcaaagtggccggtagccgcgacggtatcaccgcgctgcagatggacatcaaaatcgaaggcatcacccgcgaaatcatgcaggtggctctgaaccaggccaagggcgcgcgtctgcacatcttgggcgtgatggaacaggctatcagcaccccgcgcggcgatatctccgaattcgcaccgcgtattcatactatccgcatcaacccggataagattaaagacgtgatcggtaagggcggttccgttatccgcgcgctgaccgaagagactggcactaccatcgaaatcgaagatgatggtacagttaaaatcgctgcgaccgacggggagaaggcgaaattcgctatccgtcgtatcgaagagatcacggcagagatcgaagtgggccgtatctaccagggtaaagtgacccgtatcgttgatttcggcgcattcgtcgctatcggcggtggtaaagaaggtctggtacacatttctcagatcgccgacaagcgcgtcgagaaagtgaccgactatctgcagatgggtcaggaagtgccggttaaggtactggaagttgaccgtcagggccgcgtgcgtctgagcatcaaagaagcgatggcgccggaagcgggttcacctgcgcctgaagcagaataa

SEQ ID NO: 425685 - DNA, 270 bp, Serratia marcescens
atgtctctaagtgttgaagctaaagctcaaatcgtagctgatttcggtcgtggtactaacgacagcggttctaccgaagttcaggttgccctgctgactgcgcagatcaaccatctgcaaggccacttctccgagcacaaaaaagatcaccacagccgtcgtggtctgctgcgtatggtttctcagcgtcgtaagctgctggactacctgaagcgtaaagatgtagcacgttacaccagcctgatcgagcgtctgggtctgcgtcgctaa

SEQ ID NO: 425686 - DNA, 945 bp, Serratia marcescens
atgagtcgccctcgtcgccgcggccgtgatatccacggcgtgctgttgctggacaagccgcagggtttgtcgtccaacgatgcgctgcaaaaagtaaaacgcctgtacaacgccaaccgggcgggccataccggcgcgctcgatccgctggcgaccggcatgctgcctatctgcctgggcgaagcgaccaagttttcgcaatatctgctcgattccgacaagcgctatcgggtgatcgccaagctggggcagcgtaccgatacctccgacgccgacggccagatcgtgcaggagcgcccggtgaacttcacccaggcgcagctcgacgcggcgctggacaccttccgcggcgatatccagcaggtaccgtcgatgtattcggcgctgaaataccagggcaagaaactctacgagtatgcgcgccagggcattgaagtgccgcgcgaagcgcgcagcatcacggtgtacgagctgcagtttatccgttgggaaggggatgagctggagctggagatccactgctcgaaaggcacctacatccgcaccatcaccgacgatctcggcgagctgctgggctgcggcgcgcacgtgatctatctgcgccgcctgcaggtggcgacttatccgatcgcgcgcatggtgacgctggaacagctgaacgctttgctggctcaggcgcaggaacaggcgatcgcgcccggcgagctgctcgatccgctgctgatgccgatggacagcccggttgagaactatccggaagtgaatttgctgccggtggtggcgggctacgtcaagcaggggcaaccggtgcaagtggccggcgcgccggcttctggcctggtgcgcatcaccgagggtgaagagcgaaaattcatcggcgttggtgacatcgccgaggacggtcgcgtggcgccgcgccgcctggtggtcgagcatttcgactga

SEQ ID NO: 425687 - DNA, 411 bp, Serratia marcescens
atggcaaaagaattcagccgcggccaacgcgtggcgcaagagatgcagaaagagattgcgatcattctgcagcgtgaagtgaaagatccgcgcgtcggcatggcgaccgtttccggcgtagaagtgtcccgcgacctggcgtatgccaaggtttacgtcacctttctgaacgtactgaccgagaaccacgatccggatctggtcaccaacggcattaaagcgttgcaggacgcttccggttacatccgcaccctgctgggcaaagcgatgcgcctgcgcgtggtgccggagctgaccttcgcttacgacaactccctggtggaaggcatgcgcatgtccaacctggtgaccaacgtggtgaagaacgacgccgagcgccgttccgcctcaggtgatgacaaggaggattaa

SEQ ID NO: 425688 - DNA, 2688 bp, Serratia marcescens
atgacgacagatgtaaccgtaaaatcgctggcagcagagattcagactccggttgatcgcctggtacagcagtttgctgatgcagggatcaacaagtccgagtcggactctgttacccagcaagaaaaagaaacattgctggcgcacctgaaccgtgaacacggtagcgcgccgggtaaactcactttgcagcgcaaaacgcgcagcaccttgaatatcccgagcaccggcggtaaaagtaaatcggtgcaaattgaggtccgcaagaaacgcacttatgtaaatcgcgatacgcaggaagcccagttggctgaagcggcagagcaggcacagcgtgaagcggaagagcaggcacggcgcgaagcggaagagctcgcaaaacgcgaagcggaagcgaagcgcgcagccgaagagcaagccaaacgtgaggccgcggagattgctaagcgtaattcagcggaaaaagaaaaagtgaccaatcaacataccgacgaaatgaccaagccagctcaggcggaaaaagcacgccgtgaagccgaagccgctgaactgaaacgcaaagcggaagaggaagtgcgccgcaaggttgaagaggaagccaagcgcgtggcggaagaagcccgtcgcatggccgaagagaacggcgagaagtgggcccaggcagacgcggcaagcgccgcggttgaaagcgccgactatcacgtgaccacctctcagcacgcccgcgccgcggaagacgaaaacgacgccaaagttgaaggcgatcgtcgcagccgcacccgcggcggcaaagccaccaagcagaagaaaggcaacaagctgtccgaatccaaagcggatcgcgaagaagcgcgtgccgttacccgtggcggtaaaggcaaacgcaagcctagcgctctgcagcagggcttcaacaagccggcgcaggtggttaaccgtgacgtggtgatcggcgaaaccatcaccgtggccgagctggccaacaagatggcggtaaaaggttctcaggtcatcaaagtgatgatgaagctgggcgccatggccaccatcaaccaggttatcgaccaggaaaccgcacagctggttgccgaagagatgggccacaaagttatcctgcgtcgtgaaaacgagctggaagaagcgctgatgagcgaccgtgatacgggcgctgcggccgagccgcgcgcgccggtcgtgaccatcatgggccacgttgaccacggtaaaacctctctgctggactacatccgctccaccaaagtggcggcgggcgaagccggcggcattacccagcacatcggtgcctaccacgtagaaaccgagaacggcatgatcaccttcctggatactccgggccacgccgcgtttacctcgatgcgtgctcgcggtgctcaggcgactgacatcgtggtgctggtagtggcggccgacgacggcgtgatgccacagaccatcgaagctatccagcacgcgaaagcggcgcaggtgccattggtggttgcggtgaacaaaatcgacaagccggaagccgatccggaccgcgttaagcaggaactgtctcagtacggcgttatgccggaagagtggggcggcgaagcgcagttcgtccacgtgtccgcgaaagccggtaccggtatcgacgaactgctgcaggctatcctgctgcaggccgaagttctggaactgaaagcggttcgcagcggcatggcgagcggcgtggtgatcgagtccttcctggataaaggccgtggccctgtggctaccgtgctggttcaggaaggtacgctgaacaagggcgacatcgttctgtgcggcttcgaatacggccgtgtgcgtgcgatgcgcgacgaattgggccgtgacgtgacctctgccggtccgtctattcctgtggaaatcctgggtctgtccagcgtgcctgcagcgggtgacgaagcgaccgtggtgcgtgacgagaagaaagcgcgtgaagtggcgctgtaccgtcagggcaagttccgcgaagtcaaactggcgcgtcagcagaagtccaagctggaaaacatgttcgccaacatgaccgacggcgaagtgtccgagctgaacatcgtactgaagtccgacgtacagggttcttgcgaagcgatcagcgactcgctgctgaaactctccaccgacgaagtgaaggtgaagattgtcggctccggcgtaggtggcatcaccgaaaccgacgcgacgctggctgcggcttccaacgccatcatcctgggcttcaacgtgcgtgccgacgcttctgcgcgccgcgtgatcgaagcggaaagcctggatctgcgttactactccgtgatctataacctgatcgacgaagtgaagcaggcgatgagcggtatgctggcgccggaatacaagcagcagatcatcggcctggccgaagtgcgtgacgtgttcaaatcgcctaagttcggcgctatcgccggctgtatggttaccgaagggaccatcaagcgtcacaacccaatccgcgtactgcgcgacaacgtggttatctatgaaggcgagctggaatccctgcgtcgcttcaaagatgacgttaacgaagtccgtaacggcatggaatgtggtatcggcgttaagaactataacgacgtgcgcgtcggcgacatgatcgaagtgttcgaaatcattgagatccaacgctccatcgcttaa

SEQ ID NO: 425689 - DNA, 1509 bp, Serratia marcescens
atgaacaaagagattctggctgttgttgaagcagtttccaatgaaaaatcccttccgcgtgagaagattttcgaagcgctggaaactgcattagccaccgcaaccaagaaaaaatacgagcaggaaatcgacgtgcgcgtcagcattgaccgcagaaccggcgatttcgataccttccgccgttgggtcgccgtagacgaagtgacgcagccaacgcgtgaaatcacgctggaagccgctcagtttgaggatccgagcatcgagctcggcggctacgtcgaagatcagatcgaatccgtgaccttcgaccgtatcaccacccaaaccgccaagcaggttatcgtgcagaaagtgcgcgaagccgagcgtgcgatggtggttgacgctttccgtgaacacgaaggtgagatcgtcaccggcgtggtgaagaaagtgaaccgtgacagcatcgcactggatctgggcaacaacgccgaagcggtgattggccgtgaagacatgctgccgcgcgaaaacttccgtccgggcgaccgcattcgcggcgtactgtacgccgtgcgtcctgaagctcgcggcgcgcagctgttcgtcagccgttccagctcggaaatgctgaaagaactgttccgcatcgaagtgccggaaatcggcgaagaagtgattgaaattaaagcggcagcccgcgatccaggctcccgcgcgaaaattgcagtgaaaaccaacgacaagcgcatcgacccggtcggcgcctgcgtaggtatgcgcggtgcgcgcgttcaggccgtgtcgagcgagctcggcggcgaacgtatcgacatcatcctgtgggatgataacccagcgcaattcgtcatcaacgccatggcaccggccgacgtcgcgtcgatcgtggtagacgaagataactgcaccatggatatcgccgttgaagccagcaacctggcgcaggcgatcggccgtaacggccaaaacgtgcgtttggcttcccagctgctgaaacaacaccgcggcgacgatcgttgggaactgaacgtgatgacggcggacgacctgcaggccaagcaccaggccgaggctcatgccgctattgataccttcaccaagtatcttgatatcgacgaagatttcgccaccgtactggttgaagaaggcttctccacgctggaagagctggcctacgtgccgatcaaagagctgttggaaatcgacggtctggatgaagatacggttgaagcattgcgcgaacgcgccaaagctgcattgaccacgctggccctggctcaagaagaaagcctgggcgacaacaaaccggccgacgatttgctcaacctgccgggtcttgagcgcagcatggcctttaaactggccgcgcgtggggtttgtacgctggaagatcttgccgagcagggtgttgacgatctggctgatattgaagggcttagcgacgagcaagccggcgagctgatcatggctgcacgcaatatctgttggtttggcgacaacgcgtaa

SEQ ID NO: 425690 - DNA, 270 bp, Serratia marcescens
ttggacgtcgaagatccaatcacggtcgcttacaacttggaagtctcctctcctggccttgatcgcccgatgttcaccgcagagcactatacgcgtttcctcggtgaagaagtcagcctggtcctgcgcatggcggtacagaaccgtcgcaagtggcagggtattatcaagtctgtcgaaggcgagatgatcacggttactgtggaagggaaagatgaagtgttcgcgctgagcaacatccagaaagcgaacctggtaccccacttttaa

SEQ ID NO: 425691 - DNA, 249 bp, Serratia marcescens
atgggagcctctttcggagcaggtgcatcaggcacattgttcggttcgagtggttccggtaactttatgacccgcatgactgctgtgctggcgacgctgttcttcgtcatcagcctgattctgggcaacctcagcagcaaccaaagcaagaaaggcagtgagtgggaaaacctgggtcagccagtgaaaactgagcagacaaccgcgccggcagcacctgccaagccgagcagcgatatcccgcagtaa

SEQ ID NO: 425692 - DNA, 1338 bp, Serratia marcescens
atgagcgagcgcaaatattttggcaccgacggcatccgtggcaaggtcggggacagccccatcacgccggacttcgtgctgaagctgggctgggcggccggtaaagtgctggcgcgccacggttcgcgcaaaatcatcatcggtaaggacacgcgcatctccggttatatgctagagtccgcgctggaggccggcctggcggccgcaggattgtccgcctccttcaccgggccgatgcccaccccggcggtggcttatctgacgcgcaccttccgcgccgaagccggcatcgtcatctccgcctcgcataacccgttttatgacaacggcatcaagttcttctcgatcgacggcgccaagctgccggacaacgtcgaagaagctatcgaagccgagatggaaaaaccgctgacctgcgtggagtccgccgagctgggtaaagccagccgcatcatcgacgccgccggccgctatatcgaattctgcaaaggcaccttcccaagcgagctgagcctgaaggggctgaaaatcgtggttgactgcgccaacggggcgacctaccacatcgcgccgagcgtgctgcgcgagctgggcgccacggtgatcgccatcggcgttgagccggacggcatgaacatcaacgaaaaatgcggcgctaccgacgtgcgtcagctgcaggagcgcgtgctgctggaaaaagcgcacgtgggcctggcgttcgacggcgacggcgatcgcgtgatgatggtggatcacctgggcaacaaggtggacggcgatcagatcttgtacatcatcgcccgcgaaggcctgcgtcaagggcaactgcgcggtggtgcggtcggcaccctgatgagcaacatggggctggagctggcgctgaaacagctgggtattccgttcgctcgcgccaaagtgggcgaccgctatgtgttggagaagctgcaggagctgggctggcgtatcggtgcggaaaactccggccatgtgatcctgctggacaaaaccaccaccggcgacggtatcgtggccgggctgcaggtgctgaccgccatggtgcgcaaccacatgagcctgcatgacctgtgcagcggcatgaagctgctgccgcagatcctggtcaacgtgcgcttcgccggcgaacacaatccgctggagtccgacgcggtgcgtaaagtcaccgagcaggtagaggccgagttggccggccgcggccgggtgctgctgcgcaaatcgggcaccgagccgctgatccgcgtaatggtggaaggcgaggacgagcagcaggtgaccgcgctggcgcatcgcatcgccgacgcggtgaaatccgccggttaa

SEQ ID NO: 425693 - DNA, 837 bp, Serratia marcescens
atgcagttaaccgtgcgcgacatgacgctcaatctctcccatccgcaggtgatgggcatcctcaacgtgacgccggattcgttttccgacggcggccgccacaacaccctgaaccaggcgctgctgcacgcgcatgcgctgatttcggccggcgccacgatgatcgatatcggcggcgagtcgacaaggccgggggcggcagaggtgagtgaagaggaagaattggaacgggtcgtgccggtagtggaagcgctggcgcagcgttttgaagtctttatctctgtcgatacctcgaaagcgggcgtgatccgcgaatcagcgcacgccggcgcacacctgatcaacgacatccgttcgctgcaggagccgggtgccctggcggcggcggcggaaagcgggctgccggtctgtctgatgcatatgcaagggcagccgcgcaccatgcagcaggcgccgcactacgatgacctgattgccgacgttcaggcgtttttcgagcaccatatccggcgctgtaacgaggcggggataacaaatcagaaattgctgctcgacccaggcttcggtttcggtaaaaatttggcgcacaactatcagcttctggcgcggttgtcggagtttcatcgtttcggtttgccgctattggtcggcatgtcgcgtaaatcgatgattgggcaactgctgaacgtgccgccggatcaacgggtgatcggcagcgtggcctgcgcggtgatcgcggcgatgcagggcgcgcagattgtcagagtgcatgacgttaaagaaaccgtcgaggcgatgcgtgtcgtcgaggcaacactttcagctaagggacagtag

SEQ ID NO: 425694 - DNA, 1941 bp, Serratia marcescens
ttgagtgacatggcgaaaaacctaattctctggttagtcatcgcggtagtgttgatgtctgtattccagagctttgggcccagcgagtcgaatggccgtagggtggattactctaccttcatgtccgaactgacccaggaccaggttcgcgaagcgcgaatcaacggacgtgaaattaacgttaccaagaaagacagtaacaaatacacgacctacatccctgtcaacgatcctaagttgctggatacgttgttaacgaagaatgtgaaagttgtcggcgagccgcctgaagagccgagcctgctggcttctatctttatctcctggttcccgatgctgttgctgatcggggtctggatcttctttatgcggcaaatgcagggcggcggcggcaagggcgcgatgtccttcggcaagagcaaggcccgcatgctgacggaagaccagatcaagaccactttcgccgatgtcgccggttgtgacgaagcgaaagaagaggtgagcgaactggtggaatacctgcgcgagccgagccgtttccagaaattgggcggcaagatcccgaaaggcgtgctgatggttggcccaccggggaccggtaaaacgctgttggcgaaagcgatcgccggcgaagcgaaggtgccgttcttcactatttccggttccgacttcgtcgaaatgttcgtcggtgtgggtgcatcccgcgtgcgcgacatgttcgagcaagcgaagaaagccgcgccgtgcatcatcttcatcgatgaaatcgacgccgtcggtcgccagcgtggcgccggcctgggtggcggtcacgatgagcgcgaacagaccctgaaccagatgctggttgagatggacggtttcgaaggcaacgaaggcatcatcgtcattgcggccaccaaccgcccggacgtgcttgaccctgcgctgctgcgcccgggccgtttcgaccgtcaggttgtggtcgggctgccggatgtgcgtggccgtgagcagatcctgaaggtgcacatgcgccgcgtgccgttggcggccgacatcgacgcctccgtcattgcgcgcggtacgccgggcttctccggtgccgatctggctaacctggtcaacgaagcggcgctgttcgccgcccgcggcaacaagcgcgtggtgtcgatggtggagttcgagaaagccaaagacaagatcatgatgggtgcggaacgccgctccatggtgatgaccgaagcgcagaaagagtcgaccgcgtatcacgaagcgggccatgccatcattggccgcctggttcctgaacacgatccggtgcataaggtgaccatcattcctcgcggccgtgcgctcggcgtgaccttcttcctgccggaaggggatgcgatcagcgccagccgtcagaagctggagagccaaatctccaccctgtacggcggccgtctggcggaagagatcatctacgggccggagaaagtctctaccggtgcgtcgaacgacatcaaagtggcgacctccatcgcccgcaacatggtgacccagtggggcttctccgagaagctggggccgctgctgtatgcggaagaagagggcgaagtgttcctgggccgttccgtggccaaggcgaagcacatgtcggatgaaaccgcgcgcatcatcgaccaggaagtgaagtcgctgatcgagcgtaactacacgcgtgctcgctcgctgctgatggaaaacatggacatcctgcactcgatgaaggatgcgctgatgaagtacgaaaccatcgatgcgccgcagatcgacgatctgatgaaccgcaaagacgtgcgtccgcctgcgggttgggacgatgcgaacaaaggcaacagctccgacaacggcggcaccccgaaagccccgacgccggtagatgagccgcgcaccccaacgccgggcaacaccatgtccgaacagctcgacaagtaa

SEQ ID NO: 425695 - DNA, 630 bp, Serratia marcescens
atggctaataaaaagcgttcggctagctccagtcgctggttacaagaacactttagcgataaatatgtacagcaggcgcagaaaaagggactgcgttcccgcgcctggtttaaacttgatgaaatacagcagagcgacaaactgttcaaaccgggcatgaccgtggtggatctcggcgccgcgccgggcggctggtcgcagtatgtggtcacccaaatcggcggtaccgggcgcatcatcgcctgtgatattttgccaatggatcctatcgttggcgtcgatttccttcagggcgattttcgtgatgaactggtgctgaaggcgctgttggaacgagtaggcgagagtaaggttcaggtggtcatgtccgatatggccccgaatatgagtggcaccccggcggtcgatattccaaggtcgatgtatctggtggagttggcgctggatatgtgtcgggatgtcctcgcaccaggcggaagtttcctggtgaaggtgttccagggagatggctttgacgagtacctacgggaaattcgctccctgtttacgaaggttaagattcgtaagccagacgcttcccgcgcccgttcgcgcgaagtgtacattgtagcgacagggcgcaaactgtag

SEQ ID NO: 425696 - DNA, 294 bp, Serratia marcescens
atgaatctgaataataaacaaaaacagcacctgaaaggcctggcgcatccgttaaaaccggtggtgatgctgggcaataacggtcttaccgaaggggtgctggctgaaattgaacaggctctggagcatcacgagctgatcaaggtaaaaatcgccgctgaagatcgcgaaaccaaaaccctgatcgccgatgctatcgtgcgtgaaacgggcgcctgcaatgtgcaagttatcggcagtacgcttattctttaccgcccgtcgaaagagcgcaagatcagtctaccgcgttaa

SEQ ID NO: 425697 - DNA, 477 bp, Serratia marcescens
atgaaccaaattccgatgaccttgtttggcgctgaaaaactgcgcgaagagctcgaatatctgaaaagcgtgcgccgcccgaaaatcattgcggacatcgctgaggcgcgcgagcacggcgatttgaaagagaatgccgagtaccacgccgcccgcgaacagcagggtttctgcgaaggccgcattcaggaaatcgaagccaagctgtccaatgctcaggtgatcgatatcaccaagatgccgaacaccggccgagtgatcttcggcgccaccgtatcggtgatgaatctggacagtgaagaagaagtgacttaccgcatcgttggcgacgatgaggccgatttcaagaaaaatctgatttcggtaaactcgccgatggcgcgcggcctgattggcaaagagcaagacgatgtggtggtgatcaaaacccctggcggcgacgtcgagtatgagatcctgaaggttgagtatctctga

SEQ ID NO: 425698 - DNA, 1434 bp, Serratia marcescens
atgcgtttttcacgaattgtcagtgcattggcttgcgcattcgttctgaatgcgaatgcggccccggttgaagagtacacacaatatctgcctgatggggccaaccttgccctggtcgttcagaaaatcggtgccggcgcgccgacgatcgattatcactctcagcagatggcgctgccggccagtacccaaaaagtgctgacggcgctggcggcattgctgcaactcgggcccgattaccgtttcaccaccacgctggagagccagggcgatatccgcgacggcgtgctgcgcggcaacctgatcgcccgcttcagcggcgatccgaccttcaaacgccagagcctgcgcaatatggtggccgtcctgaagaaacagggcgtgcgccaaatcagcggcgacgtgctggtcgatacctcggtcttcgccagccatgacaaggcgcccggctggccgtggaacgatctgacgcagtgcttcagcgcgccgccggccgccgccatcgtcgatcgcaactgtttctcggtctcgctgtacagcgcgccgaatccgggcgacatggcgtttatccgcgtcgcctcctattatccggtcaatatgtttagccaggtgcgtaccctggcgcgcggctctgcagacgcgcagtactgcgaactggacgtggtgccgggcgagctgaaccgctttaccctgaccggctgcctgacgcagcgcagcgaaccgctgccgttggccttcgccatccaggatggcgccagctacgcgggcgccatcctgaaagacgaactgatccaggccggcatccagatcgacgggcacttgaaacgccagacgcgtcccggcatcaccggcacggtgatcgcgcaaacccagtcggcaccgctgcacgatctgttgaagatcatgctgaaaaaatcggacaacatgatcgccgataccgtcttccgcaccatcggccacgaacgcttcggcgtgccgggcacctggcgagcgggtgccgatgcggtacgtcaggtgctgcgccagaaggccggcatcgatctgggtaacaccatcatcgccgacggctccggcctgtcgcgccacaacctgctggcgccggcgaccatgatgcaggcgttgcagtacatcgcgcagcacgacaacgagctgaacttcatctcgatgctgccgctgtccggctatgacggcaccctgcgctatcgcggcggcctgcacgaagccggcgtcgacggcaaagtgtcggccaagaccggcgcgctgcagggcgtgtacaacctggcgggcttcatcaccaccgccagcggccagcgcatggccttcgtgcagtatctctccggctacgccgtgccgccggaggatcagaaacagcgccgcgcgccgctggtgcgtttcgaaagccgcctgtatcgggatatttaccaaaacaactga

SEQ ID NO: 425699 - DNA, 663 bp, Serratia marcescens
atgaagctgctggtcgttgaggatgatgaactgttgcaacaggggctggcgctggcgctgaccggcgaaggttacgtctgcgactgcgccgccacggcggcggaggccaacagcctgctcatcaccagccaatacagcatggtgatcctggatctcggcctgccggacaccgacggcgccgcgctgctgcggcagtggcgccgccaacagatcgatctgccggtgctgatcctgaccgcccgcgacgcgctggaagaccgcgtcgacgggctggacgccggcgccgacgactacctggtcaaacccttcgcgctggtcgagctgcaggcgcgcgtgcgcgccctcctgcggcgctaccaggggcacagcgacaatctgatgcaggtggacgatctgcagctgaacctctccagccagcaggtttacctgcagcagcagccggtggaggtcacgccgaaagagttcgccattctggcgcgtcttatcatgcgtgccgggcagacggtcaaccgtgaactcctgcagcaggatctctacacctggcaggacgacttgggctccaacacgctggaagtgcacattcacaacctgcgccgcaaactgggcaaggatcgcatccgcaccgtgcgcggcatcggctaccgcctggaaccctcctcatga

SEQ ID NO: 425700 - DNA, 1062 bp, Serratia marcescens
atgatcagcatgcgccgccgcctgctgctgatgctggcgctgatcctgctggtcacgcaactcatcagcgccttctggctgtggcacgaaagccaggaacagatcggcttcctggtggacgaaaccctgtccgccaaagtgcgtaccgaacgcgtcgatagcgagatcgccgaggccatcgcgtcgctgttggcgccttcgctgatcatgatgatcgtcacgctgctggcgtcgttttgggccatcagctggatcatccgcccgctcaaccaattgcagaaacggctggaaaagcgctctgccgataacctgacgccgctgccgatcgccagcgacagccaggaaatggtggcggtcaccaatgcactcaatcagctgttctcacgattggacaacaccattcaacaggaacgcctgttcaccgccgacgccgcccacgagctgcgcacgccgctggccggcatccgcctgcatctggaactgatggagaaacagggcgtcaagggcagccaggcgctgatcgcccgcatcgatcagctgatgcacaccgtcgagcagttgctgatgctgtcgcgcgccgggcaagacttcgcccgcggccattatcagcatgtcgattgggtggccgatgtgatccagccgctacgtgaagagctcgacgaaatggccgcccaacgcgggcagacgctggactggcacttgccggctactgccacagtaaacggcgatccggtgctgctgcggctgctgctgcgcaacctggtcgaaaacgcccatcgttacggccctgaaggcggcgcgatacaggtgcagttaacgccgcaagacaacggctatctgctgcaagtcatcgacgatggcccgggtatcaaggaagagatggtcggggagctgacgcaggcgtttcgccgcatggatcaacgctacggcggcagtgggctgggcctgaatatcgtgatccgcatcgtgcagttgcaccaggggcgtttgacgctggaaaaccgccgcgatgcgcgcggcctgaacgcccagtgctggctgccggaaaaggcgcttaaataa

SEQ ID NO: 425701 - DNA, 1173 bp, Serratia marcescens
atgaagtttgtagatgaagcagcgattctggtcgttgcaggcgacggcggcaacggatgcgtcagcttccgccgcgaaaaatatatccccaacggcgggcctgacggcggcgacggcggcgacggcggcgacgtctacctgctggcggacgagaacctcaacactcttatcgactatcgctttgagaagtctttccgcgccgagcgcggccagaatggccagagccgcgactgtaccggtaaacgcggtaaagacgtcatcatcaaggtgccggtcggcacgcgcgtgaaggatcagggcaccggcgagatcctcggcgacatgacccgccacgagcagaagctgatggtcgccaaaggcggctggcacggcctgggcaacacccgtttcaaatcttcggtcaaccgtgcaccgcgtcagaagacgctgggtaccgctggcgaagcgcgcgacctgttgctggagctgttgctgctggccgatgtaggcatgctggggctgccgaacgccggtaaatcgaccttcattcgcgcggtgtccgccgccaagccgaaggtggccgattatccgttcactacgctggtgccgagcctgggcgtggtgcgtatggaccacgagcagagctttgtggtcgccgacattccggggctgatcgagggcgcctccgaaggcgctggcctgggcattcgcttcctgaaacacctggagcgttgccgcgtgctgctgcacctggtggacatcgcgccgatcgacgaatccgatccggtggagaacgccaaagtcatcatcaacgagttgaaccaatacagcgaaaatctggcgcagaagcctcgctggctggtgttcaacaaaattgatgtgattggtgaggaagaagccgccgaacgcgccaaggcgattgtggaaggcatgggctgggaagggaagtactacatgatctccgccgccaaccgcggaggcgtcaacgcgctgtgctgggacgtgatgaacttcatcaacacccagccgaaagcgatggcgatcgaagaaagcgcaccggaaaaagtcgaattcatgtgggatgactaccaccgcgagcaaatcgcggaagtggaagccgaagcggaagatgactgggatgacgactgggacgaagacgacgacgaaggcgtcgaaattatttaccagaagtaa

SEQ ID NO: 425702 - DNA, 972 bp, Serratia marcescens
atggatacgaagcagcaggtcggcgttggcatttctctggcgttaaccacggcggtttgctggggcgcgttgccgattgcgatgaaagaagtgttggtggtgatggagccgtttaccgttgtctggtatcgctttaccatggccgccatcggtttgggcgcgatcctcgcggtgcgcggcaagctgccgccgctgacgatgttccgccagccgcgttggctgctgctgttggcgatcgcgacggcggggctgctgggcaactttgtgttcttcagttcctcgctgcaatacctgagcccgacggcgtcgcaggtgattggccagctgtcgccggtcggcatgatgttcgccagcgtgctgattttaaaagaacgcatgcgcgtcacccaggtcattggcgccctgatgctgatttgcggactgatgctgtttttcaacgtcagtctgatagagatcttcacccggctgacggactacacgctgggcgtcatgctgggcgtgtgcgcggcgatggtctgggtgagctatggcgtggcgcagaaggtgttgctgcgccggctggcttcgccgcagatcctggttatgttgtacactttatgtgcgatggcgttgttccctctggccaagcccgaggtgattttccagctgagcggctggcaattggcgtgtttgctgttttgcggcgccaatacgctgatcggctacggcgcgctggcagaggcgatggcgcgttggcaggcggcgcaggtaagcgcgttggtgacgctgaccccgctgtttaccctgctgttttcagatttattggcgttggcctggccccaggcattcgccgcgccgacgctgaacattgtcggctatgtcggtgcgtttgtggttgtggcgggcgccatgttttccgcaattggtcaccggtggtggccgcgacgggcagaaccccccctggttgctcctttgaagcagcccggtgaatga

SEQ ID NO: 425703 - DNA, 258 bp, Serratia marcescens
atggcacacaaaaaggctggcggctcgactcgtaacggtcgcgattcagaagctaaacgtctgggcgtaaaacgctttggcggcgaagcagtactggcaggcagcatcatcgttcgtcagcgcggcaccaaattccacgctggtaccaacgtgggttgcggcaaagaccacactctgtttgctttgaaagacggtaaagtcaaattcgaagttaaaggcccgagcaatcgtaaattcatcagcatcgaagctgaataa

SEQ ID NO: 425704 - DNA, 312 bp, Serratia marcescens
atgtacgcggttttccaaagtggtggtaaacaacaccgagtaagcgaaggtcagaccgttcgcttggaaaagctggacatcgcaactggtgaagcggttgagtttgaccagattctgatgatcgctaatggcgaagatatcaaaatcggcgttcctttcgtcgatggcggcaagatcaaagctgaagtcgttgctcacggtcgtggcgagaaaattaaaatcgttaagtttcgtcgtcgtaaacaccaccgtaagcagcagggccaccgtcagtggttcactgacgttaaaatcaccggcatcagcgcttaa

SEQ ID NO: 425705 - DNA, 972 bp, Serratia marcescens
atgaacctagagcaaattaccgagttaaccgcgcaagatatggcggccgtgaacgcaacaattctcgaacagctgaattccgatgtcacgctcatcaatcagcttggctattacattatcagcggtggcggtaagcgcatccggccgatgatcgccgtcctggcggcgcgggcattgggctatgaaggcagcaagcacgtcaccgtggccgccctgatcgaattcatccataccgccacgctgctgcatgacgacgtcgtcgacgaatcggacatgcgccgcggcaaagccaccgccaacgcggcgttcggcaacgccgccagcgtgctggtcggcgactttatctacacccgcgccttccagatgatgaccagcctggaatccctgcgcgtgctggcgctgatgtcggaagcggtcaacgtcatcgccgaaggtgaagtgctgcagttgatgaacgtgcacgatcccgacatcagcgaagaaagctatatgcgggtgatctacagcaaaaccgcccgtctgtttgaggcggcggcgcaatcgtcggcgatcctgtccggcgccagcgcggagcaagaacgggcgctgcaagactatggccgctacctcggcaccgctttccagctgatcgacgatctgctcgactacagcgccgacggcagcaccctgggcaaaaacaccggcgacgatctgaacgaagggaaaccgaccctgccgctgctgcacgcgatgcacaacggcgacgacgcccagcgtgacatgatccgcggcgcgattgagcaaggcaacggccgtcacctgttggagccggtgctgcaggcgatgcagcaatgcggttcgctggaatacacccgcaaacgcgccgaggaagaggccgacaaggcgatcgccgcgctgcaggcattgccggcatcggagcaccgcacggcgctggagggcctggcccatctggcggtgcaacgcaacttttaa

SEQ ID NO: 425706 - DNA, 357 bp, Serratia marcescens
atgaaaaaagagtggtttgccgccaaggaactgacaggcatcgcaggattaccttcctcaccacagggaatcaatctgatggcccggcgcgaaggctggatcagccgcaggcgtaaaggcgtgcagggaaaagcgttggagtaccatttcgacagcctgccttcagacgtgcgtaacctgctggtgctgaaggaagacggggcggcatatgacgtagagcgtcaggatccgttggcggtctggatcgagtattactaccatttgacggaaagcgagcgcgagaaaatggtggctttcctgatgcgggaagggatcggcggcctgctggcgcgtatcgacgaagagagcaatacctag

SEQ ID NO: 425707 - DNA, 261 bp, Serratia marcescens
atgaattcaaggaacccagattggcatccggcagatatcatcgcggcgctacgcaagcagggcaccacgctggcggcagtgtcgcgcaaggccggattaagctcatcgacgctggccaacgcgctgtcgcgcccgtggccgaagggggaatggctgatcgccgaagcgataggcgtccacccctcggagatctggccaagccgctattacgatccgcacagcgattgcctgctggatcgcaaggcgcgcatcaaatcgtga

SEQ ID NO: 425708 - DNA, 939 bp, Serratia marcescens
atgaaagttgcagttctcggtgctgctggcggtatcggccaggccctcgcccttctactcaaaacccagcttccttcaggttctgaactctctctctacgacattgcccccgttaccccaggcgttgccgtcgacttaagccacatcccaaccgcagttaaaatcaaaggcttcagcggcgaagacgcgaccccggctctgcaaggtgcggacgtggtgctgatttccgccggcgtggcccgtaagccaggcatggatcgctctgacctgttcaacgttaacgccggcatcgtgcgtaacctgattgaacaagtggcgaaaacctgcccgaaagcctgcgtcggcatcatcaccaacccggttaacaccacggtcgccatcgcggcggaagtgctgaaaaaagccggcgtttacgacaagaacaaactgttcggcgtgacttcgctggatatcatccgttccaacaccttcgtggccgagctgaaaggcaagcagccggaagagctgaacgtgccggtcatcggcggccactctggcgtgaccatcctgcctctgctgtcgcagatcccaggcgtgagcttcaccgatcaggaagtggcggatctgaccaagcgtattcagaacgccggtaccgaagtggtggaagccaaagccggcggcgggtctgcaacgctgtccatgggccaggcggctgcccgtttcggtctgtctctggtgcgtgcgctgcagggcgagaaaggcgttgtggaatgcgcttacgttgaaggcgacggcaaatacgctcgcttcttcgcacagccgctggtgctgggcaagaacggcgttgaagagcgcaaggatatcggcaccctgagcgccttcgagcagaaagcgctgaacgagatgctggacgtgctgcacaaagatatcgaactgggcgagaagttcatcaataactga

SEQ ID NO: 425709 - DNA, 471 bp, Serratia marcescens
atgcgtaatcccgcaaaacaggaagatctgatcaagacgttcaaagcgttattgaaagaagaaaaattcagttctcaaggcgagatcgttttggcgctgcaagaagaaggcttcgaaaacattaaccaatccaaagtatcgcgcatgctgaccaagttcggcgcggtacgtacgcgcaatgccaaaatggaaatggtgtattgccttcctgccgaactcggcgtgccgaccaccaccagcccattgaagaatctggtgctggacgtcgaccataacgacgccgtcgtggtgatccacaccagcccgggcgccgcgcagctgatcgcccgcctgctcgactcattggggaaatcccagggcatcctcggcacgattgccggcgacgacacgattttcgtcaccccgtccaacggctttaccgctcagaaactgcatgaggctattctgggcgtgttcgagcaagagctgtga

SEQ ID NO: 425710 - DNA, 264 bp, Serratia marcescens
atgaaaattaaagctaccgttgcaaccctgagcgttctgtccatgctttcctttggtgcattcgcagcacaatctattgatgcaactcaggccgcaaaactgcagccggccggtgtaatcaccgtgagcggcgtcgctgctgcgccttccgacatccgccaggcgctgtccgacaaagccgacgccaaaggggcgaccgcttaccgcgtaatcgaagcccgcaatgacggcagcttccacgcaaccgctgaaatctacaaataa

SEQ ID NO: 425711 - DNA, 264 bp, Serratia marcescens
atgaacatgaaaactactctcgctgcattcggcctgctgtctgtcatctccttcggcgcctccgccgcccagctggtgactaacgatcagaccgccaatctgcaatctatcggcaccatcaccgtcagcggcatcgacggcgcgccgaccgacattcgccaggcgttgtccgacaaagccgacgcgaaaggcgcgaccgcctaccgcgtgatcgaagcgcgtaacgaaggcaactaccacgccaccgccgagatttacaaataa

SEQ ID NO: 425712 - DNA, 1380 bp, Serratia marcescens
atgcgcattcacattcttgggatctgtggcacctttatgggcgggttggcgatgctggcgcgctcactggggcatgacgtcaccggttcggacgccaacgtctatccgccgatgagcacgctgctggagaaccaggggatcgatcttattcagggttatgatccggcccagctggatccggcgccggatctggtgatcatcggcaacgccatgacgcgcggcaacccgtgcgtggaggcggtgctggaacgtggcatcccttacgtttccggcccgcagtggctgcacgatgccgtgttgcgcgatcgctgggtactggcggtcgccggcacccacggcaaaaccaccaccgccggcatggcgacctggatcctcgaggcctgcggctaccagcccggcttcgtcatcggcggcgtgccgggcaacttcgacgtatcggcgcgccttggcggcagcccgttcttcgtgatcgaggccgacgagtatgactgcgcgttcttcgacaagcgctccaagttcgtgcattacagcccgcgcacgctgatcatgaacaacctggagttcgatcacgccgatatcttcgacgatctgaaagccatccagaaacagttccaccacctggtgcgtctggtgccgggcaaaggcaagatcatcctgccggacaacgacagccacctgaagcaggtgatggcgatgggctgctggagcgagcaggagctggtgggggaagagggcacctggcgcgcacagaagctgacgccggacgccagccattacgcggttttcctcgacggcgaacaggtcggcgaagtgaactgggcgctggtgggcgagcacaacatgcataacggcctgatggccatcgccgccacccgccacgtcggcgtgcagccggcggacgcctgccgcgcgttgggcgatttcatcaacgcccgccgccgcctggagctgcgtggcgaagccaacggcgtcacggtttacgacgacttcgcgcaccacccgacggcgatcctggccactctggccgcgctgcgcggcaaggtcggcggcacggcgcgcattctggcggtgctggagccgcgatccaacaccatgaaaatgggcatcagcaaaaacgatctggcgccttcgctcggccgcgccgacgaggtgttcctgttccagccgcaccacattccgtggcaggtggcggaagtggcggatgcctgcgtgcagccggcgcattggagcgcggatctcgacacgctggtggacatggtggtgaaaaccgcacagccgggcgatcacattctggtgatgagcaacggcggtttcggcggcattcacgaccgtctgctggacgcgctggcgaaaaagcaggaaccgaaagtcacctactga

SEQ ID NO: 425713 - DNA, 1005 bp, Serratia marcescens
atgaaaacgttaggcgaatttatcgtcgagaaacagcacgacttctctcacgccaccggcgagctgaccgcgttactttctgcaattaaactgggcgccaaaatcatccaccgcgacatcaacaaggccggcctggttgatattctgggcaccagcggggtgtccaacgtacagggcgaagttcagatgaaactggacctgtacgcgaacgaaaaactgaaagcggcgttgaaagcgcgtggtgaagttgcgggtatcgcttccgaagaagaagatgaaatcgtgatattcgacggcgagcgagctgaaaatgccaagtatgtcgttttgatggatccgttggacggttcgtccaacatcgatgtcaacgtctcggtcggtacgattttctctatctaccgtcgcatcacgccggtcggcacgccggtgaccgaagaagacttcctgcagccgggcagcgcccaggtcgcagcgggttatgtggtttacggttcgtccaccatgctggtgtacaccaccggttacggcgtccacgccttcacctacgacccgtctctgggcgtattctgcctctcccacgagaaagtgcgcttcccggcgagcggcaacatgtattccatcaacgaaggcaactacatcaagttccctctcggcgtgaagaaatacatcaaatactgccaggagcaggatgaagcgacgcagcgcccttacacctcgcgctacatcggttctctggtggcggacttccaccgcaacctgctgaaaggcggcatctacatctacccaagcaccgccagccacccgcaaggcaagctgcgcctgctgtacgaatgcaacccgatggcgttcctggccgaacaggccggcggtaaggccagcgacggcaaaaaccgcattctggacatcacgccggtgaaactgcaccagcgcgcgccattcttcgtcggcaccaagtcgatggtagaagacgcggaacgcttcatcgccgaaaacccggacgagtaa

SEQ ID NO: 425714 - DNA, 1554 bp, Serratia marcescens
atgctaaaaaagattacggtgaaggctgggctgatcgccctgctgagcctgatgaccatgctgctgatcatggtcagcgttattggcgtcaacgcgattaacgaaggatcgcgctcgatccataccttaaaccagatcctcggcgaagagctgggctcgctggccaacagctccaacctgacgctgcgcgccagaaccgccgcctcgctggcggtgcgccaacgggagatcggccagactgatgtctccgacgccaccgtgggccgcatctacggttacctcgagcagtcgaacaaggaaatggcgcgctttgtcggcgtcggcaccgtgaccgagcgcggccgcgaactctccaaccgcctgcaaaacagctaccgcgcctatctggatcagggcgtgaagccgatggccgccgccatcaaggccggcaagattgatgagtattatcatattcaggaaacgcgcatctccgcgttgagcatcgcgttcgaaaaggatctcagcgatttccgcagcttcgccatgaagctcggcgcgcagcaggtgtatgacgcggaaagcaacgccagcaccaagatctcgctgatcgtggtggcgggcctgctcagcgtgctgctggcggtgctggcctggttcgcgctgcgggtgatcattctgcgcccgctggacgagtccatcgcgcagctggaacacatcgccggcggcgatctgacccatgagatccgcggcgagggcgataccgagatgggccgcctggtgcgggcgatgcagcgcatgcagcaggcgttggccagttcggtcagcaaagtgcgtgacgccagcagccagattgacaccggttcacgcgaactggcggccggcaacctgcatctggcgcagcgcaccgaagaatcggccgcttcgctggaagaaaccgccgccagcatggaacagctgacctcgacggtgaaaatgaacgccgagaactgcgaacaggccaaccagctggcgctgagcgtgtccgatatcgccaaccagggcagcgaggtggtcagccaggtgatgagcaagatgcaggcgatcaccgacagctcgcgccgcatcgccgacatcatcagcgtgatggacggcatcgccttccagaccaatatcctggcgctgaacgcggcggtggaagcggcgcgcgccggcgaacagggccgaggttttgcggtagtggccggtgaagtgcgcaatctggcgcagcgcagcgcccagtcggcgaaagagatcaaaggattgatcgaagcctcgcagaaccgggtgcaggaaggcgagcagatggtggagtcggcggcgcagaccatgagcggcattaccggcgaagtgggccgggtgacggcgctgatgcgtgagatctcggcggcgacgcgcgaacaaagcagcggtatcgaacaggtgaacctggcggtggcgcagatggatcaggtggcgcagcagaatgcggcactggtggaagagtcggcggcggcgacgcgctcgctggaagatcaggctcagctgctggcgcagagcatggcggcgttcaagctgtaa

SEQ ID NO: 425715 - DNA, 531 bp, Serratia marcescens
atgagcttgaatctggtccctgctggcaaagacctgccggaagacatctacgtagtaatcgaaatcccggccaacgccgatccaatcaaatacgaaatcgacaaagaaaccggcgcgctgttcgttgaccgtttcatgtccaccgcgatgttctacccgtgcaactacggctacatcaaccacaccctgtctctggacggcgacccggttgacgtgctggttccaaccccatacccgctgcagccgggttccgtaatccgctgccgtccggttggcgtgctgaagatgaccgacgaagccggtgaagacgccaagctggttgcggtaccgcacagcaagctgaccaaagagtacgatcacgtgaaagacgtgaacgacctgccggaactgctgaaagcccagatcgctcacttcttcgagcactacaaagatctggaaaaaggcaaatgggtgaaagtggaaggctgggcagacgctgccgcagctaaagcggaaatcatcgcctccttcgaacgcgctgccaagaagtaa

SEQ ID NO: 425716 - DNA, 348 bp, Serratia marcescens
atgcgaataattgtctacggcagtttacggcgcaaacagggaaacagccattggatgaccaacgcccaatggctcggcgagcacgagctcgaaggctatcagatttataatctgggccattacccggcggcgatccctggagagggcacgatacattgcgaggtgtatcgtattaactcatcgattctggcagagctggacgaactgaaaagcaacaccaaggactataagcgcgagctgattcagacgccttatgggagtgcgtggatctacctgtacaaacacagcgtggacggttacccgcgaattaccagcggtgactggctgaaacgtctcgacgatcagtaa

SEQ ID NO: 425717 - DNA, 3819 bp, Serratia marcescens
atgagcctggttaaaaagatttgtctcggatttctggtcgttctgctgttgctgatcggcggcctggccttcctgataggcaccaccaccggtttgcatatggtcatcaacggtgcggcgcgctgggtgccggggctggagatcgccggcgtcagcggcggctggcgcgatctgacgctgaagggcgtgaagtatcagatgccgggtgtgacggtcaacgccgggcagttccatctgtcgctcgatctctcctgctttaagcgcagctcgctgtgcgtcaacgccttgaccgcccaggatgtggacgtggcggtgaacaccaaagagatggcgccttccgcgccggtggaggagagcagtgagccgaccaccaatctcagcacgccttacccgatcacgctgcgcctgttggcgttgaacaacgtcaaggtcaccgtcgacgacaccgccatctcgctggccgagttccgcaccggcgcgcagtggcaagagcgcgcgctgacgctgatgccgaccaagatcggctcgctgctgatcgccttgccgaaaaccccgcaaaacccgctgccggaagcggtgcagccggcggtcgaggtggcgaaaaaggtcggcgagcaggttaccgacgcggcgaagccggcacctcagccggaagagaagccgctgggcgaaacgctgaaggaactgttcgccaaaccgctgttgccggatctgccggacatccgcctgccgctggatatcaccgtcaaagagatcagcggcgagcagctgcgcttgaccggcgataccgacgtgctgatcacgagcctgttgctgcaggccagcacgcaggatcaacatatccagctggacaacttcgacgtgaagtcgccgcagggcacgctgtcgctgcaggggcaggcgacactgaccggcgactggccggtgtccctgaccgccaacagcgcgctgaacatcgaaccgctgaagggcgagaaggtgaagctgaacgtcggcggcgggctgcgtgacgagctgaaggtggcgctgaacctgtccggcccggtcggcgcccagctcgatgtgcaaacccggctggccgaagccggcctgccgctggcgctgacgttgcagagcaagcagctgaaatggccgctgagcggcgaggggcagtatcaggtcaacgatttccgcctgcgctttaacggcaaggcgaccgactacgcgctgtcgacgcgcgccaatctgaaaggccaggacttgccgccggcggtgctgacgctggacggcaaaggcaacgtcgagcagttcaagctggagcgcctgcgcttggcggcgctgcagggcaataccgatctcaccgcgttggtggactggagcaaggccatcagctggaactcgcaattgacgctgagcggcatcaataccgccaagcagtggccggaatggccggcgaaactcgacggcaagatcaccacgcgcggcagcctgcacggcggcagctggcaactgcaggtgccggtgctgcagctggacggcaacgtgaagcagaacaaggtcacggcgcgcggtacgctgagcggcaacgccgccgggcagtggaaaatccccggcatcgatctggcgctggggcgtaaccaactgaacgtcaaagggcagctggacgagaagagctggaacctggacgccaacatcgacgcgccgcgtctggacggcgcgctgccgggcctgggcggcaccgccaaagggctgctgaagctgcgcggcaatctgcaggcgccgcagctgctggctgatttgaccgcatccggcctgcagtggcaggcgctgcgcatcaaccgcgtgaaaatagacggcgacgtgcgctccacggatcagattcaggggcaactggcggtacgcgtcgagcagctgaagcaggatgcgctggaggtcagcctgttgaccctcgacgccaagggcagcgagaagcagcaccagctgcagctgaagatcgacggcaaaccggtctccggccagctggcgctgcagggcagtttcgatcgccagcagcagcgctggcgcggcaatctgaacaacactcgcttcgatacgccggtcggggaatggcgcctgacgcgcgccatcgcgctggactacctgaacaccgagcagaaaatcagcgtcgggccgcactgttggcagaacccgaacgccgagctgtgcgtgcctaagaccattaaagccggccagagcggccaggccagcgtggtgctcaaccggttcgatctggcgatgatcaagccgttcctcggcccggaaaccgccctgagcggggtgttcaccggccgggccgacgtcagctggaaaccgggcggcgcgctgccggaggcgaaagtcacgctggccggcaacggcgtcaaagtggtgcagcaggtgcagggcaacgcgctgccgatcgccttcgacacgctgaccctcaacgccggcctgaacaacggtcgcgcgctggccgactggcggatcaagctgaccaacaacggccagttcgacggcaatatccaggtggcggatccgcaggtgcggcgcaccatcagcggcaacgtcaatatcaccaacatctcactggcgctgatcaacccggcgctgatgaagggcgaaagcgcggcgggcatgctgaacgccaacctgcgcctgggcggcagcgcgcagaagccgctggtgttcgggcgcctggcgttggatcgggcgaaggtgcaggggcactggatgccgttcgatatgaccgacgcgcggctggcggtgaatttcaacggcatgacctcgacgctggaagggctgctcagcaccacgcgcggccagctgaatctggcgggcgacgccgactggcgtgacatcaacgcctggcgtgcgcgcattgccgccaagggcgataagctgcgggtgacggtgccgccgatgatccgcatcgacgtgtcgccggatctggtgttcgaagccacgccgcagctgttctcgctcaacggcaaggtcgatattccctgggcgcgcatcacggtgcaggagctgccggaaagcgcggtgggcgtctcttccgacgaggtgatgctggacgaccaactgaagccgattcaaccgaagaccgcctcgatcccgatcaacagcaatctgatgatccacgtcggcaatgacgtgcggctggacgcttttggtctcaaggcccgcctgaagggcgacctgaaggtggtgcaggacaagaaagggctgggccttaacggccagattgacatcccttccggccgcttccatgcttatggtcaggatttgatcgtgcgtaaagggcagctgatgttctccggcccgccggatcagccgctgctgaatatcgaggcgatccgcaacccggaatccaccgaggacgatgtgaccgccggcgtgcgcgtgaccggcctggcggatgcgccgaagctggaagtgttctccgatccggccaaatcgcaacaggaagccctgtcttatctgctgcgcggccagggcttgagcagctccggcgccgacggcaacgccatgacctcgatgttaatcggcatgggggttgcacaaagtggtcaacttgtgggtaaaatcggcgaggcattcggcgtaagtaatttggctctggacactcagggggttggcgacagttcccaggttgtcgtgagcggctatgttctcccaggcttacaagtaaaatatggagtgggcatcttcgactccttggccacgctgacgttgcgttatcgcctgatgcctaagttgtatcttgaagcggtgtctggtctcgaccaggcattagatttgctctatcagtttgagttttag

SEQ ID NO: 425718 - DNA, 1737 bp, Serratia marcescens
gtgccaaagtacccggtcatgtgcttgatatctgtgttgcttgcggcacctgcggcctatgcggccaacgtgcgcttgcaggtggaggggttaagcggagagttggaaaaaaacgtccgggtgcggctgtcgtcgatcacgcctgaagaggttggcaccgacgggcgcttccgcgcgcgggtggatgaggcggtgcgccaggggctgcgcgcgctcggctattaccagccgaccatcgagtttacgctggacgaccggccggggatgtcgcgcccggtgctgcacgccaaggtcaatccgggcgaaccggtgcgtatcgccggcgccaacatcgtgctggaaggcggcgcgaagaccgatgaggactacctggcgctggtgaagaaggggcggccgaccatcggcgagatcctcaaccacggcaagtatgacagtttcaaaggctcgctcaccggcctggcgctgcgcaaaggctacttcgacgccgacatgaccaaaagccaactcggcgtggccgaagatctgcacaaggcgttttgggatatcgatttcaacagcggcgaacgttaccgcttcggcaaggtaaaattcaccggctcgcaaatccgcgaagactatctgcaaaatctggtgccctttcatcagggggattactacagttcggaggatttggccgagctgaaccgccgtttgtccgccaccaactggttcaactcagtggtggtgtcccctgatttcaacgatgccaaagagaacaagattttgccgttggacgcgctggtgacgccgcgcacgcgcaacaccgtcgaaaccggtatcggctactccaccgacgtcggcccgcgggtgaaaggcacctggaaaaagccctggctcaacgatcgcgggcatagcctggaaaccagcgccagcgtatcggcgccggagcagcagctggatctgacctacaaaatcccgctgctcaagaacccgctggagcagtattacctgctgcagggcggcctcaagaacgtcgatcttaacgacaccaagtccgttacctccaaagtggtggcctcgcgcaactgggatctttccagcggctggcagcgggcgatcaacctgacctggcgctgggataactttacccagggtaacgtcagcaacaccaccatgctgctgtatcctggcgtcagcttcagccgcacccgttcgcgcggcggtctgatgccgacctggggcgacagccagcgctactctatcgacgtgtccgacacctcctggggctccggcgtggactttgcgctgatgcaggcgcagaacgtctggatccgcaccctggccgacaagcatcgttttgtggcgcgcgggcaggtgggctggatagaaaccaacgacttcgacaaggtgccgccggatctgcgcttcttcgccggcggtgaccgcagcattcgcggctacaagtacaaagacatctcgccgcgcggtgacgacggcaagctgaccggcgcctccaagatgctgaccggctcgctggagtaccaatacaacgtgaccggcaaatggtggggggcgatgttcgtcgattccggtgaagcggtgaacgatatcaagaaaagcaacttcaagaccggcgccggcgtaggcgtgcgctggcagtcgccggtggggccggtgaagctggatatcgccgcgcctgtgggagacaaggacacccacgggatgcagttctacatcggtttggggcctgaactatga

SEQ ID NO: 425719 - DNA, 642 bp, Serratia marcescens
gtggtgccattttttgataaatcacaaaccgtcgataaggcaagcgcgctgcctggccgcaccacgccaatgcctgtcgcaacgctcaacgtggtcaccgaacactcgatgacccaggtgccggcaggcatggaggtggcaatcttcgccatgggctgtttctggggcgttgagcgcctgttctggcagcagccgggcgtctacagcaccgccgccggctacagcggcggctacacgccgaacccgacctaccgcgaagtgtgcagcggccagaccggccacgccgaagtggtgcgcgtggtgttcgatccgcaggtcgtcagctacaaacagctgctgcaggtgttctgggaaaatcacgatccggcgcagggcatgcgccagggcggcgacgtcggcacccagtaccgctcggcgatttatacgctgagcccggagcagcaggccgaggcggaaagcagcctgcagcgcttccagcaggcgatggaggcggcaggcgacaagcgcgtcatcactaccgagatcgcgccggcgctgccgttctattacgcggaagacgatcatcagcagtacctgttcaagaatccggaaggctactgcgggctgggcggcatcggcgtttgcctgccgccgcagggctga

SEQ ID NO: 425720 - DNA, 1326 bp, Serratia marcescens
atgttaaacagtattttactgattctttttctgatcgcggtgagtgcgttcttctcactgtcggaaatctctctggccgcctcgcgcaagatcaaactgaagctgatggcggacgaaggcaacgtcaacgccgccagagtgcttaaactgcaagaaaccccaggcatcttcttcaccgtggtgcagatcggcctgaacgccgtggccatcctcggcggtatcgtcggcgacgcggctttctctcccaccttcaaggtgttgttcgatcgtttcctgtcgcccgaactggcggaacaggtcagcttcatctgctccttcgtgctggtgaccagcctgtttatcctgttcgccgatttgaccccgaagcgcatcggtatgattgcaccagagacggtcgccgtccggatcatcaacccgatgcgtttctccatcatgatcttccgcccgctagtgtggttcttcaacggcatggccaacctgatcttccgtatgttcaagctgccgatggtgcgcaaggacgacatcacctccgacgacatctacgcggtggtggaagccggcgccctggcgggcgtgctgcgcaagcaggaacatgagctgattgaaaacgtgttcgaactggaatcacgcaccgtgccgtcttcgatgacctcgcgcgaaagcgtggtgtacttcgacctgcgcgaaagcgaagagagcatcaaggagaaggtctcgacccatccgcactccaagttcctggtgtgcgacggccatatcgatcaggtggtcggctacgtcgattccaaagacctgctgaaccgcgtgctgggcaaccagagcctggtgctgagcagcggcgtgcagatccgctcggcgctgatcgtgccggatacgctgacgctgtccgaagcgctggaaagcttcaagaccgccggcgaagacttcgcggtgatcctcaatgaatatgcgttggtggtgggcatcatcaccctcaacgacgtgatgaccacgctgatgggcgatttggtcggccagggccaggaagagcagatcgtggcgcgcgacgaaagctcatggctgattgagggcggcacgccgatcgacgacgtgatgcgcgtgctggatatcgacgagttcccgcaggcgggcaactacgagaccatcggcggctttatgatgtatatgctgcgcaagatcccgaaacgcaccgacttcgtcaaatacgccggctacaagttcgaagtggtggatatcgacagctacaagatagaccagctgctggtcacccggctgagcgacaaaccggcggcggtgctgccgaaagcgccggaagacaccccgtag

SEQ ID NO: 425721 - DNA, 207 bp, Serratia marcescens
atgagaatcttccagcgttataaccctttgaaagtggcgaagtacgttaagaccctgtttcgcggaaggctgtatatcaaggacgttggcgcatttgaattcgacgaggggaaaatcctgccgccgaagattcgcgacaagcgccatttcagcgtgatgtctgaagtgaaccgtcaggtgctgctgctgcaggccgagatggggtga

SEQ ID NO: 425722 - DNA, 558 bp, Serratia marcescens
atgaaaacaagtcgcatgctgatggtatccctgctgctcgccccgcttttcgcttccgcgcacaacttccagctccagcagcgcgtggcgccggtcggcgtcagcgacaaaggagagctcaattacgctgaaggtaattttagctaccagaactggaacagcgcgcagctcagtggaaaagtgcgagtgatacaacatattgccggccgcagctccgccaaagacatgaacgacccactgattgaagcgatcaagaaggcgaagctaccacacgatcgttaccaaacgacgacaatcgtcaacaccgacgatgccctgatgggcaccgcgatgtttgtgcgcagcagcattgaagatagcaagaaggagttcccgtggtcgcagtttatcgtcgacagcgacggtaacgtgcgcaaggcctgggatctgcagccgaaaggctccgccatcgtggtgctggataagcaagggcgcattcagtttgccaaagacggcgcgctgacgccggaagaggtgcagcaggtgatgtccaagctgcaccagctgttggcgaactaa

SEQ ID NO: 425723 - DNA, 741 bp, Serratia marcescens
atgttagagcgaatttgccaactgtcccgcgaggcgggggcggcgatcatggcggtgtacgacggtgaacaaccgcttgatgtcgcacagaaaaaagatgattcaccggtgacggcggccgatctggcggcgcatcacatcatcaagcgcggcctggcggcgctgacgccggaggtgccgctgctgtcggaagaagatccgccagcgtgggaagagcgccgcagctggacgcgttactggctggtcgatccgctggacggcaccaaagagttcttgcaccgcaacggtgagttcacggtcaatatcgccctgattgaagaggggcaggcggtgatgggcgtagtgtacgcgccggcgatagacgtattgtatctggcggagcgcggcaaggcctggaaagaagagaagggcgtgcggcaggcgatcggcgtcagcaacgcgcatccgccgctggtggtggtgagccgctcgcatatcgacgacgagctgaaagattatctgcagcaactgggcgagcaccagaccgtgtccgtcggttcctcgctgaagttctgcctggtggcggaaggcaaggcgcagctctatccgcgcttcgggccgaccaacatttgggataccgccgcagggcatgcggtggcggtggccgccggggcgcaaattcacgattggcagggcaagccgttgctctataccccgcgtgaatccttcctcaaccccggcttccgggtgtcgctgttctga

SEQ ID NO: 425724 - DNA, 1953 bp, Serratia marcescens
atgatgaagcatccactgacgctgtccgcgcttgcgctgctggtgtgcgcctcggcgcaggcggccaccgtcgatctgcgcgtgctggaaaccaccgatctgcacagcaacatgatggacttcgattactacaaggacacgccgaccgacaagttcggcctggtgcgcaccgccagcctgatccagcaggcgcgccaacaggctaccaacgcggtgttggtggacaatggcgacatcattcagggcagcccgctcggcgactacatggcggccaaggggttgaagccgggcgacgtgcacccggtctataaggcgatgaacacgctggactacgtggtcggcaacatcggcaaccatgaattcaactacgggctggactacctgaagaacgccatcgccggcgccaaattcccgtacatcaacgccaacgtcatcgacgccaaaacgcaaaaaccgctgttcacgccctacatcatcgtcgatacgccggtgaaggaccgcgacggcaaggcgcatacactgcgcatcggctacatcggcttcgtgccgccgcagatcctggtgtgggataaagctaacctgcagggcaaagtgacggtggacgacatcaccgccaccgccaagcgctacgtgccggaaatgcgtaaacagggcgccgatctggtggtggcgatcccgcattccgggctgtccagcgagccttacaaggcaatggcggaaaactcggtctattacctcagccaggtgccgggcatcgacgccatcatgttcggccacgcccatgcggtgttcccgagcaaggacttcgccaatatcaaaggcgcggatatcgataaaggcctgctgaacggcgtaccggcggtgatgccgggccaatggggcgatcatctcggcgtggtcgacctgcagctcaacaacgatggcggcagctggaaagtgaccgccgccaaagcggaagcgcggccgatctacgacaaagagaacaagaaatcgctggcggcggaagataccgcgctggtgaaagtgttggcggacgatcacaagggcacgcgcgagttcgtcagccagccgatcggcaaatccgacggcaacatgtacagctacctggcgctggtgcaggacgatccgacggtgcagatcgtcaacaatgcgcagaaggcctacgttgaacattacattcagggcgatccggatctggccgatctgccggtgctgtcggcggcggcgccgttcaaggtcggcggccgcaagaacgatccggccagcttcgtcgaagtggaaaagggccagctcaccttccgcaacgccgccgatctctatctctaccccaataccctggtagtagtaaaggccagcggcaaagaggtgaaagagtggctggagtgctccgccggccagttcaaccagatcgacgtcaacagcgccaagccgcagggcttgatcaactgggacggcttccgcacctataacttcgacgtgatcgacggcgtcaactaccagatcgacgtcagccagccggcacgctacgacggcgaatgccagctgatcaacgacaaggcggagcgcatcaagcagcttaccttcaacggcaagccgatcgatccgaacgccaccttcctggtcgccaccaacaactaccgcgcctacggcggcaagtttgccggcaccggcgacaaacacatcgccttcgcttcgccggatgagaaccggtcggtgctggcggcctacatcagcgccgaaacccaacggcacggcgcggtgcatccgcaggcggacaacaactggcgtttggcgaccttcaacagccagcagccgctggatatccgcttcgagacttcgccgtcggacaaagcgacagcgtttatcaaggagcacgctcaatatccgatgaccgccgagggcaatgaccgtatcggcttcgcgctctatcgcatcaatttaagcgcgaaataa

SEQ ID NO: 425725 - DNA, 666 bp, Serratia marcescens
atggattaccgcaaccaatcccttggcgcgctcgccatcgccattccccgggcatcccggctgtttcgccagcatcagctggatttctgctgcggcggccggcagtcgctggcgcgcgccgccgagcgtaaagggctggacatcgaccagttggagaacgcgctggccgcactcgccgccacgccggaacaaagccgggactggcgcacagcgccgctcggtgaggtgatcgattacattctgccgcgctttcatcagcggcaccgcgagcaattggctgaactggtgctgatggcggaaaaagtcgaacgcgtgcacggcgacaaacccagctgcccgcgcgggttggcgaagcagctgaacctgatccgtctggatctggagaatcacatgatgaaagaggaacagatcctgttcccgctgatcaaacagggcatggggccgcaggccgccggaccgatctcggtgatggagcatgaacatgacgaggcgggtgagcagctggaagtggtgaagttcctcaccgataacgtgacgccaccggagggcgcctgcaccacctggcgagcgctgtacaccggcatcgatgagtttatcggcgatctgatggagcacatcagcctggaaaacaatctgctgttcccgcgcgcgctgcgcggcgcataa

SEQ ID NO: 425726 - DNA, 621 bp, Serratia marcescens
atgacaaccccttcttttgacagcgttgaagcgcaagcaagttacgggattggtttacaggtcggccagcagctgcaagagtccgggctggaaggtttgcaaccggaagctttgctggcgggcctgcgtgacgcgctggaagggaatgccccggcggttccggtagacgtggtgcaccgcgcgctgcgtgaaatccacgagcgtgcggacgcggtgcgccgcgagcgccagcaggcgatggccgttgaaggccagaaattcctggacgacaacgccaagcgcgacgacgtgacgctgaccgagtccggcctgcagttctccgtgctggagcagggcaacggcccgatcccgtcccgtcaggaccgtgtgcgcgtgcactacaccggtcgtctgatcaacggcgacgtgttcgatagctcggtcgagcgcggccagccggcagaattcccggtcagcggcgtgatcccaggctggatcgaagcgctgaccctgatgccggtcggctccaaatggcagctgtatatcccgcataacctggcctacggggagcgtggcgcaggcgcgtccatcccgccgttcagcgcgctggtgttcgacgtcgagctgctggaaatcctgtaa

SEQ ID NO: 425727 - DNA, 672 bp, Serratia marcescens
atgggcagaatcgcgcccaggagaaggaaaaccacccgcatctaccagccgctgctgcgcacctggctgaacgtcagccagcgcctgaaaccgggcgccgcacccacgtctgaaggcgcggaaccgccatcggagccaccgccggccaacgacaaaatgcagcaggtcaaagcgctgctggccaaagtctggcatctgccggacggtttccattggatggagccgctgccctactttcaccgccgctgggtgctgattttcggcgctatcctgctgctggccctgctgtggccctattcgcccgaaagacagccgttcccggtatcccagcaggaaaccagcgtgccgctgcaggccgagcggcaaaacggcggcggcgccactccagccaacgaaccgacgccggcgggcaactggcagcgttaccaaattcagcccggccagaccctggcgcagctgtttcgcgacaacaatctgccggtgaatgaagtgttcgccatggcgcaggtggaaggcggcgacaagccgctgagcaacatgaaagccggccaggaagtgcgcatcgaacgcggtgccaacggcatgattaacgcgctgtcggtgaccacggtggacaacagccaggcgctgttccgccgccagcccgacggcagctaccgccgggaacgttaa

SEQ ID NO: 425728 - DNA, 354 bp, Serratia marcescens
atggcaaagattacgctacagcgggtttacgatttcagcgcgccggcgccggaacactgttatctgatagacaggctatggccgcgcggcatcagcaaggagcggctgacgggcgtgcagtggctgaaacaggtggcgccggatgatgagctgcgcaagtggttccatcagcataccgaccagtgggcggtcttcgaggcgcgttaccgccaacagctggcggccaacgacgcctggcggccgctggtggcgctgttacggcaggggcaagcgctgacgctgctgtatggcagcaaagataccgagcacaaccagggcgtggtgctgcgcgagtttttgctggcgcagctgtag

SEQ ID NO: 425729 - DNA, 453 bp, Serratia marcescens
atgcaagttattctgcttgataaagtagcaaacctgggcagcctgggtgatcaagttaacgttaaagcgggctacgctcgtaacttcctggtaccacagggcaaagctgttcctgctaccaagaaaaacgttgagttcttcgaagcacgccgtgctgaactggaagccaaactggctgacgttctggctgctgctgaagctcgcgcaaccaagatcaacgaactgggttcagtcaccatcgcttccaaatctggcgacgaaggtaaactgttcggctctatcggcacccgcgacatcgctgacgcagtgactgcggcaggcgttgaagttgccaagagcgaagttcgtctgccgaacggcgttctgcgtaccactggcgagcacgaagtgcacttccaggtacacagcgacgtgttcgcacagctgaatgtagttgtggttgcagaagcgtaa

SEQ ID NO: 425730 - DNA, 228 bp, Serratia marcescens
atggcacgttatttccgtcgtcgcaagttctgccgtttcaccgcggaaggcgttcaagagattgactataaagacatcgctacgctgaaaaactacatcaccgaaagtggtaaaattgtaccgagccgtatcaccggtactcgtgcaaaatatcagcgccagctggcccgtgctatcaagcgcgcgcgctacctgtctttgttgccgtacactgatcgtcatcagtaa

SEQ ID NO: 425731 - DNA, 399 bp, Serratia marcescens
atgcgtcattacgaaatcgtttttatggtccatcctgaccaaagcgaacaggttccgggcatgatcgagcgttacagtgctaccatcactaacgcgcaaggtcagattcaccgtctggaagactggggccgccgtcagctggcttatccgatcaacaaactgcacaaggctcactacgttctgctgaacgttgaagcgccgcaggaagcgatcgatgagctggaaactaacttccgcttcaacgacgccgttatccgcagcatggttatgcgcgttaagcacgcggtaactgaagcatctccgatggttaaagcgaaagacgaacgtcgtggcgatcgccgcgaagacttcgctaacgaaaccgcagatgatgcagatgctggggattctgaagagtaa

SEQ ID NO: 425732 - DNA, 267 bp, Serratia marcescens
atgaaacgcatcattctcgcaacggcgctggccgccctgttctccgccaacgtaatggccgccacggagatcacgtcgcaccaggccgatcaacgccagagcgtcggcttcgtcaccctgaaccagaacgtggtttcgccggatgacgccagcagccaggtcagtaaaatcgccgatcaacgcggcgcgacctcttatcgcatcatcgccctgcacgaaccgggcgacaacagcacgatgcacgtcagcgccgagctgtatcgctaa

SEQ ID NO: 425733 - DNA, 363 bp, Serratia marcescens
atgataaaaaacatcggcagtgcggccggtttaatgggaacgatgaaagcacgcgccgagcttaactcagcggccttcagcgagatgttgggagccgccgacggcaaggcgcggcaaaacaaggcgaatccgctgtcgcgcatcaccgtgcagacgatgcaaaacgtgacggcgctgttcgcctccgcggcgaaagcggcgcccactcaccccgcggcagccggtgcgctctcgttcgaacagcgggcgacgctggcggaaagcgcagagctgctgcaaacgcgaacgaactatctgcggacggcgctgcaattgcacaatccgggcaaggcgttcagcatgccggcgctgctcaagctgtga

SEQ ID NO: 425734 - DNA, 753 bp, Serratia marcescens
atgatcgaaattcatgacgagcgggcgggcgatatcgcggtgatccatgcggtgccggcggggcagtatcaccggcccttgccgacggtgttcttctgtcacggctatacctcgtcgaaagaggtgtacgcctacttcgcctatgcgctggcgcgcgtcggttttcgggtggtattgccggatgccgatcggcacggcgagcggttcgacggcgatgaggcgcggcgtctggccacgttttgggagatcctgcgcagcaatatcgacgagctgccgcagatcaaggcgcacttcgagcggcttggcctgattgccgacgggcgtatcggcgtcgccggcgcctctatggggggcatgaccgcgcttggcgccttcgcgcgcttcccgtgggtccgggcggccgccagcctgatgggttccggctattaccgttcgctggcgcaaacgctgtatccgccgttgggcgcagagggcgaggcgctctcgccggcggcgtttgcggcgcgcaccgccgtgctggcggaatatgagctggaggggcgtttggagacgatcgccgggcggccgctattgctgtggcacggcgagacggacgacgtggtgccggcggcggacagcctgcgtttggcggctgaactgcgccggcaaggtgcgggcagccgtctgacgtcgctcgtcgaaccgggggtgaagcaccgcatcacgccgctggcgctgtccgccacggccgacttcttccgccgcgagctgtaa

SEQ ID NO: 425735 - DNA, 309 bp, Serratia marcescens
atgacgcttgtccgtacactcatcatcctgacgctggccgcacagctttccgcctgcggcatcatgaccaccacgccgaaaccgccgccgccgcccaccgcacaggcgcaggagatcgtccgcgcgcagaccgccgagctggtgaagataggtaccgtcaccgccgtagtgcgcggcagcccgatggacgtggaagcggagatccagcgtaaggccaccgccgccggcgcccggtattacgtgaccatcatgaacagcgaaaccgtcgtgccgggccaatggtattcccaggcgatcctgtatcagtaa

SEQ ID NO: 425736 - DNA, 276 bp, Serratia marcescens
atgaaacgctccaccgcactcacctccctcctgctttcagtagggctgctcagcaccggcgcacagtccgccgaactggcgcccgccgatcgtgtgacgccgctcagtgaaatcgccgagatcacctttaacgatctgcccggctcaccgcaggaggctgagcaggccatcgcccgcaccgccggccagcacggcgccagctattaccgcatcctgcggatggaagaacaggcgcacccgcttggctggcgcgcctcggccatcttatacctttag

SEQ ID NO: 425737 - DNA, 399 bp, Serratia marcescens
atggatattctcagcgcgttggcggcgttcgcctcttacttcttcagcggtttcgccatggttttggtgtttctgttcgtctatacccgcatcaccccgcacgacgaatgggcgttgatcaaggccgataaccaatccgccgcctttgctttcatcggcgcttgcctggggtatgtgatcccgttggccagcgcggcgatcaactcgatcagcctgctggattacctgctgtggggcgtggtggcgctggtggtgcaactgctgttgttcgcggccgtgaagatctacatgccgcgcatcagcgacaagatcgaagcgaaccacctggccgccgggattttcctggggggcgtctccgtcagcggcggcgtgttgaatgcggcttgcatgagctactaa

SEQ ID NO: 425738 - DNA, 1629 bp, Serratia marcescens
atggtctggactacgcacaccgtttttaaccaacccaagccgctgggcaacagcaacctgtttctctccgatacgccgctgcgcgaagcgttgcagcgcgagcagggcggctgggatgccgaggtattggcctcgctgggccagcagctcggcacccaggagtcgctggagctggggcgcctggccaatgccaacccgccggagctgctgcgctacgacgccaccggccagcggctggacgacgttcgctttcaccccgcctggcatatcctgatgcaggggctgatcgccaaccgggtgcacaacctgccctggcaggaggatgcgcgcatcggttccttcgtggcgcgcgccgcgcgctttatgctgcatgcgcaggtcgaggccggcacgctgtgcccggtgaccatgaccttcggcgctacgccgctgttgctgcaggcgttaccggccgagtttcgctcctggctgacgccgctgttgtcggatcgttatgacgctcacctgctgcctggcgggcaaaagcgcggcctgctgatcggcatgggcatgacggagaaacagggcggctccgatgtgctgagcaataccaccaccgccgcgccgctcggcgcgcgcgggccgggtgaagcctaccggctggtggggcacaagtggttcttctcggtgccgcagagcgatgcgcacctggtgttggcgcaggccgaaggcgggttgtcctgcttcttcctgccgcgcattttgccggacggcagccgcaacgccattcgcctggagcggttgaaagacaagctgggcaaccgttccaacgccagcagcgaagtggaatttcaggacgccaccgcctggctgctgggggaggagggcgacggcgtgcggcatatcctgaagatgggcggcctgacccgtttcgactgctcgctcggcagccacggcctgatgcgccgcgggctgtcggtggcgctgtatcatgcgctgcagcggcaggcgttcggcaagctcttgatcgaacaaccgctgatgcgtcaggttctggcgcgcatggcgctgcggctggaagggcataccgcgttgctgttccggctggcccgcgcctgggagagccgcagcaatgagggcgagctgatctacagccgcctgctgaccccggcggccaaatacagcatctgccgccagggcatgccgttcatcgccgaggcgatggaggtgctgggcggcatcggctactgcgaagagagcgagctgccgcgcctgtatcgcgagatgccggtcaacagcatctgggaaggttccggcaacatcatgtgtctggacgtattgcgcagcctgcacaaactgccgggtgcgctcgagatgctgcagttcgaactgcagccggtgcgcggccagaatcggttgttcgatcatgcctggcggcagtggcagcagcgcgcccggcaaccgagtgaggagatggggcggctgctgacccagcagctgttcgatctgtgctgcgccgcgcagctgctgcagcacgccagcccgcaggtagccgacgcctggtgccatctgacgctggatcaccgcggcgagagcctgctgtcggccgaggtgtgcgaactgctgctgaaccgcgctatcggctgttag

SEQ ID NO: 425739 - DNA, 732 bp, Serratia marcescens
atgagcgaaattatttacggcatccacgccgtcaaagccctgttagagcgcgatccgcaacgcttcctggaagtgtttatcctgaaaggccgcgaagatcgccgcctgcaaccgctgatcgccgagctggaagcgaccggcatcgtgatccaggtggcgaaccgccaatggctggatgacaaggttgaaggcgcggtgcaccaggggatcatcgcccgggtgcgcgaagggcgtcagtatcaggagaacgatctgccgggcctgctggaaagcgtggagacaccgttcctgctggtgctggacggcgtgaccgacccgcacaacctcggcgcctgcctgcgcagcgccgacgctgccggcgtgcacgcggtgatcgtgccgcgtgaccgttccgcccagttgaacgccaccgccaagaaagtggcctgcggcgccgccgaaaacgtgccgctgatccgcgtgaccaacctggcgcgcacgctgcgtctgctgcaggaaatgaacgtttgggtggtgggcaccgccggcgaagccgaccatacgctgtatcagagcaaaatgaccggcccgatggcgctggtgatgggcgcggagggcgaaggcatgcgccgtctgacccgcgaacactgcgacgaactgatcagcatcccgatggccggcaccgtctcttcgctgaacgtgtcggtcgccaccggcatctgcctgttcgaagcggtgcgccagcgcggctga

SEQ ID NO: 425740 - DNA, 2475 bp, Serratia marcescens
atgtcacaagatccattcctggaacgagaagcagaaaaatacgaatcccctatccccagtcgtgaatatatcctggcccatttggcgaaaagagaaacgccggccagccgcgaagaactgggcaacgaactgggcctcagcggtgaagagcagctggaagcgctgcgtcgccgcctgcgcgccatggagcgcgatggccagttagtgtttacccgccgccagtgctacgcgctgccggaacgtctggatctgctgcgcggcacggtgatcggccaccgcgacggctacggcttcctgcgcgttgaaggcagcaaagacgatctgtacctgtctgccgaacagatgaaaatggcgatccacggtgacgtggtgttggcgcaggcgctgggcgcggatcgcaaagggcgccgcgaagcgcgcatcgtgcgcgtgctggtgccgaaaaccagccagattgtcggccgcttcttcatggacgccggtaccggcttcgtggtgccggacgacagccgtctgagcttcgatattctgatcccggcggacagcgtcagcggcgcgcgcatgggctttatggtggtggtggagctgactcagcgcccgacccgccgcaccaaggcggtcggcaagatcgtcgagatcctcggcgacaagatgggcaccagcatggcggtggacatcgcgctgcgcacccatgagatcccgcatacctggccgccgcaggtggaaaaacaggtggccgatctcagcgagcaggtgccggaagcggccaagaagggccgcgtcgatctgcgcaagctgccgttggtgaccatcgacggtgaagacgcacgcgacttcgatgacgccgtgtactgtgagaagaaacgcggcggcggctggcgcctgtgggtggcgatcgccgacgtcagttactacgtgcgtccgcgcaccgcgctggacgacgaagcgcgcagccgcggcaactcggtgtacttcccgtcgcaggtgatcccgatgctgccggaagtgctgtccaacgggctgtgctccctgaacccgcaggtcgatcgcctgtgcatggtgtgcgagatgaccatctccgcccaggggcgcctgtccacggccaagttttacgaggcggtgatgagctcgcacgcccgcctgacctacaacaaggtgtggcacattctgcagggcgatcaggagctgcgcgagcactaccatccgctggtcaagcacctggaagaactgcacgtgatgtacaaggtgctggataaggcgcgcgccgagcgcggcggcatcgcgtttgaaaccgaagaagccaagttcattttcaacgccgagcgtcgcatcgagcgcgtggagccgacggtgcgcaacgacgcccacaagctgatcgaagagtgcatgatcatggccaacgtggcggccgcgcgctttgtcgagaaacgcaacgagccggcgctgtaccgcgtgcacgatcgtccgagcgacgaccacatctccgcgctgcgcagcgtgctgagcgagctggggctgacgctgggcggcggcaacaagccgcagccgaaggactatgcggtgctgatggatgaagtgtccgagcgccctgaccacgaaatgctgcaaaccatgttgctgcgctcgatgaagcaggcgatttacgatccggaaaaccgcggccacttcggcctggcgctggcgtcttacggccacttcacctcgccgatccgccgttatccggatctggcgctgcaccgcgcgatcaaatatcagctggccaaagaacacggcgagccgaaagagcgctggacgccgaccggcggctggcacagcgaattcgaagagatgctgcagctgggcgaacactgctcgatgaccgagcgccgcgcggacgaagcgacgcgcaacgtcgccgactggctgaagtgcgacttcatgcaggatcacgtcggtgaagtgttcagcggcatcatctccagcgtgaccggcttcggtttcttcgtgcgcctgaacgatctgttcatcgacgggctggtgcacgtatcaacgctggataatgattactatcgctacgataatatcggccagcgcctgatcggcgaatcttccggcaccgtctatcgcctgggggatacggtggagatccgcgtggacgcggtgcatatggacgagcgcaagattgacttcgcgctggtgtccagcacccgcaaagcgcgcggtgaaggtaaaaccgagcgcgatcgtgccaagaagggcggccagcgcacgctgcgcgacaacggcaacgcggggcgcggcaagcgccgcggcggcaaaccgccggccaacttcgagccggacagcgccttccgcaagcaggacgacgccaagcccgcggacaacgtgaagaaggcgaaaaagaaagccaagaaagcgtccgacaaaacgcggaaaatcgcggcggcgaccaaagccaaacgcgcagccaagaagaaaggtgccgagcaggcttaa

SEQ ID NO: 425741 - DNA, 426 bp, Serratia marcescens
gtgcagttaacaagttttactgattatggtctgcgggcgttgatctacatggcctcgttgccgcaggacaagatgaccagcatctcggaagtgaccgaggtttacggcgtgtctcgcaaccatatggtgaagatcatcaatcagttgagccgggtcggttttgtcacggcggtgcgcggcaagcatggcggcattcgcttgggcaaaccggccgagagcattcgcctcggcgacgtggtgcgggcgctggagccgctcgcgctggttaactgcagcagtgatttttgccacatcacccctgcctgccgattgaagcaggtgctccaccagggcgtacagaatttccttgaagagctggataagcatacgttggccgacatggtcgaagacaatccgccgctctacaagctattgcttgtcgaataa

SEQ ID NO: 425742 - DNA, 1299 bp, Serratia marcescens
atgggtaagaacgtcgtcgtactgggcacccaatggggtgacgaaggtaaaggcaaggttgtagacctgctgactgaacgggctcaatatgttgtgcgctaccaaggtggccataacgctggccacactctggtaatcaacggtgaaaaaaccgtccttcatttaattccttcaggtattctgcgtgaaaacgtcaccagcatcatcggcaacggtgttgttctggcgccggacgcattgatgaaagaaatgggtgaactcgaagcgcgtggcatcccggtacgcgaacgtctgttactctctgaagcttgcccgctgatcctgccttaccacgtcgcgttggataacgcgcgtgagaaagcgcgcggcgcgaaagcgatcggcaccaccggtcgcggtatcggcccggcttacgaagataaagtggctcgtcgcggcctgcgcgtcagcgacctgttcaacaaagaaaccttcgccgttaagctcaaagagatcgtcgattaccacaacttccagctggtcaactactacaaagttgaagccgtcgattatcaggcgacgctggactacgtgctgtctatcgccgacatcctgaccgccatggtggttgacgtttccgaactgctggacggcgcgcgcaagcgtggcgacctgatcatgttcgaaggcgctcagggcaccctgctggatatcgaccacggtacttacccgtacgtcacctcttccaacaccaccgccggcggcgtggctaccggttccggcatcggcccgcgttatgtggactacgtgctgggcatcgtgaaagcctactccactcgcgtgggtgcaggcccgttcccaaccgaactgttcgatgaaaccggcgagtacctgtgcaagcagggtaacgagttcggcgccaccaccggccgtcgtcgtcgtaccggctggctggacgcggtagcggtgcgccgcgccgtgcagatcaactccctgtccggcttctgcctgaccaaactggacgtcctggacggcctgaaagaagtgaagatctgcgtgggttaccgcatgccggacggccgtgaagtggacaccactccgctggcggctgaaggctgggaaggcatcgagcctatctacgaaaccatgccgggctggagcgaaaccacctttggcgtgaaagagcacagcaagctgcctcaggctgcgctgaactacatcaagcgcatcgaagaagtgaccggcgtaccggtagatatcatctctaccggcccggatcgcagcgaaaccatgatcttgcgcgacccgttcgacgcataa

SEQ ID NO: 425743 - DNA, 201 bp, Serratia marcescens
atgaactcaacgatttggctggcgctcgggctggttctggtgctggaaggattggggccgatgctgtttccgcaggcctggcgcaaaatgattgtggcgatgtcgcagttgccggacgcgacgctgcggcgatttggcggtggaatagtggttgcgggctgcgtgatctactacatgttgagcggccgcacgggtctttaa

SEQ ID NO: 425744 - DNA, 1005 bp, Serratia marcescens
atgcgtaagtcttttgtagttattgtcctcgcggtgctggtggtgctgtacgcttcgctgttcgtggtgcaggaaggccagcgcggcatcgtgctgcgcttcggcaaggttctgcgcgacggcgaaaacaagccgctggtgtatgcgccgggtctgcacctcaagatcccgttcatcgagaccgtgaagaacctggatgcgcgtatccagaccatggataaccaggccgatcgcttcgtgaccagcgagaagaaagacctgatcgtcgactcctatctgaagtggcgcatcagcgacttcagccgttactacctggcgaccggcggcggcgacgtctcccaggccgaagtgctgctgaaacgtaagttcagcgaccgtctgcgttccgaaatcggccgcctggacgtgaaagacatcgtgaccgactcgcgcggcaagctgatgtccgacgtgcgtgacgcgctgaacaccggcaccgtgggtgacggcgaagaagtggcgaccaccgaagccgatgacgctatcgcctctgcggcggcgcgcgttgagcgggaaaccaccggcaaacagccgcaggttaacccgaacagcatggcggcgctgggcatcgaagtgatcgacgtgcgtatcaagcagatcaacctgccggccgaagtgtccgacgccatctaccagcgtatgcgcgccgagcgtgaagcggtagcccgtcgtctgcgctcgcagggccaggaagaagccgagaagctgcgcgccagcgcggactacgaagtgacccgtaccctggcggaagccgagcgtcaggcgcgtatcacccgcggtgaaggcgatgccgaagcggccaagctgttcgccaacgcgttcagccaggatccggacttctatgcctttatccgcagcctgcgtgcctatgaagccagcttcaaggacaaccaggacgtgctggtacttagcccggacagcgatttcttccgctacatgaagtcgcctgataccctgcgcaaataa

SEQ ID NO: 425745 - DNA, 1251 bp, Serratia marcescens
atggcgtggaatcagcccggtaataacggacaggaccgcgacccgtgggggagcagcaataacaatggcggcaactctggcggtaacaacaaaggcggtcgtgatcaagggccacctgatttggacgatatcttccgcaaactgagcaagaaattgagcggtttgggcgggggcaaaggctccaacagcaatagcggcggcaccggcacctctggtccgggcttcagcggccgcattatcggtatcgcggcggtggccgtggtggtgatttgggccgccagcggcttctacaccatcaaggaagccgagcgcggcgtcgtgacgcgtttcggcaagttcagccacctggtgcagccgggcttgaactggaagccgaccttcatcgacgacgtgcgtccggtgaacgtggagtccgtgcgcgagctggcggcgtccggcgtgatgctgacctccgatgaaaacgtggtgcgcgtggaaatgaacgtgcagtaccgcgtgaccaacccggaagcgtacctgttcagcgtcgtcaatgccgacgacagcctgagccaggcgaccgacagcgccctgcgcggcgtgatcggcaaatactcgatggatcgtatcctgaccgaaggccgtaccgtggtgcgtaacgatacgcagcgcatgctggaagagaccattcgtccttacaacatgggcatcacgctgctggacgtcaacttccaggcggcgcgtccgccggaagaggtgaaggcatccttcgacgatgcgatcgccgcgcgtgagaacgagcagcaatacatccgtgaagcggaagcttacgccaacgaagttcagccgcgtgcgaacggccaggcgcagcgtctgctggaagactccaaggcttataaggaccgtaccgtcctggaagctcagggtgaggtggcgcgctttgccaagctgttgccggaatacaagtccgcaccgcagatcacccgcgagcgtctgtatatcgaaaccatggaaaaagtgctgggccatacccgtaaggtgttggtgagcgacaaaggcaacaacctgatggtgctgccgctggatcagatgctgcgcggccaaggcgcggcgccggagagcggcaacaaggataccagcctgattcgcctcaatccgaatcctgcgccggctgccaacagcagcgccccgcgcaccagcggcggttcgattatggatcagcgccgggcgaatgcgcagcgtgacgacaccactcgcgtagggagagagtaa

SEQ ID NO: 425746 - DNA, 1281 bp, Serratia marcescens
ttgtttgaccgttatgaagccggtgagcaggccgtactggttcatatctatttctcgcaagacaaagatacggaagacctcaacgagttcgaatcgttggtttcctcagccggtgtcgaagctttgcaagtggtgaccggtagccgcaaagccccgcatccgaagtactttgtcggcgaaggaaaggccgaagaaattgcagatgcggtgaaagccagcggcgcgtctgttgtcctgtttgatcattccctttccccggcgcaggaaagaaacctcgagcgcctgtgcgaatgccgggtgatcgatcgcaccgggctgattttagacatcttcgcccagcgtgcccgtacccatgaaggtaagctgcaggtggagctggcgcagttgcgtcacatcgccacgcgtctggtacgcggctggacgcacctggagcggcaaaaaggggggattggcctgcgcgggccgggggaaacccagcttgagaccgaccgtcgcctgttgcgcgatcgcatcagcttgattctgcgccgcctggagcgggtagaaaagcagcgtgaacaaggccgacgcgcgcggacccgcgccgatgtgccgaccgtatcgctggtgggctacaccaacgccggcaaatccaccctgtttaaccgaataacgtctgccgaggtgtatgcggcggaccagctatttgccaccctggatcctacgttgcggcgcattgacgtgccggacgtgggggataccgtgttggcggataccgtaggctttatccggcacctgccgcacgatctggtggccgccttcaaggcgacgctgcaggaaacgcgccaggcatctctgctgctgcacgtcatcgatgccgcagatccgcgcgtcgatgagaacatcgaagcggtgaacaccgtgctggcggagatagactcggatgaaatccctacactgttagtgatgaacaaaatagatatgctggacgattttgtgccgcgtatcgaccgcaacgacgaaaacctgccgatccgggtgtggctgtccgccgccagcggagagggtattccgttgctgtatcaggcgttgacggagcgcttatcgggggagatcgcgcattacgaattgcgcctaccgccacgggcaggccgtcttcgcagccgtttttaccagcttcaggcgattgaaaaagagtggaacgaagaggacggcagcattggcgtggtggtgcgaatgccgatcgtcgaatggcgtcgtctctgcaagcaagaacaggacctgattgactttatcgtatga

SEQ ID NO: 425747 - DNA, 309 bp, Serratia marcescens
atggctaaggggcaatctttgcaagatccgttcctgaacgcattgcgtcgtgaacgtgttccggtttctatttatttggtgaatggtattaagctgcaaggccagattgagtcttttgaccagtttgtcatcctgttgaagaacacggttagccagatggtgtacaagcacgctatctctaccgttgtcccgtctcgcccggtctcgcatcacagcaacaacccgagcggcggttcaagcaactatcaccatggcaacaatccgtctgcgcagcaacagccgcagcaggaaagcgatgacgctgaataa

SEQ ID NO: 425748 - DNA, 897 bp, Serratia marcescens
atggggccgaccgcctcgggcaagaccgcgctggcgatcgcgctgcgcgaacgcctgccggtggaactgatcagcgtcgattccgcgctgatttaccgcggcatggatatcggcaccgccaaaccgagcgccgaagaattggcgcaggcgccgcatcggctgatcgatatccgcgatcccgccgaagcctactcggccgcggagtttcgcgccgacgcgctgaaggagatggccgacatcaccgccgccgggcgcattccgctgctggtcggcggcaccatgttgtatttcaaggcgttgctggaaggattgtcgccgctgccgtccgccgatcccgcggtgcgcgagcgcatcgaacggcaagcggcggagcagggctgggaggcgttgcatcggcagttgcaggcgatcgatccggtcgcggcattgagaattcatccgaatgatccgcagagactgtccagagcactggaagttttttttatttcgggtaaaactttaacggaactgactaaaatttcgggtgaatcgttgccgtatcaagttcaccaatttgcgatagcgccgaccagccgtgagttgatccatcaacgcatcgagctgcggtaccatcaaatgttggcggcgggttttgagacggaagcgcgtgcacttttcgcacggggtgatttgcatacggacttgccctccattcgctgtgtcggttaccgccagatgtggtcatacttgtctggtgaaattagttacgatgagatggtttatcgtggtatttgcgcaacacgtcagttggctaaacgccagatgacctggttacggggttgggagtcggtccattggttggacagtgaaaagccgggagaggctttggactcggtgacacaggttgttagtgcatag

SEQ ID NO: 425749 - DNA, 1884 bp, Serratia marcescens
atgcctatccaggtgttaccgccgcagcttgccaaccagattgccgccggagaggtggttgaacgccccgcgtcggtcgtcaaggagctggtggaaaacagcctggacgccggcgcaacgcgcatcgatatcgatattgaacgcggcggtgccaagctgatccgcattcgcgacaacggctgcggcatcggcaaggacgatctggcgttggcgctggcgcggcacgccaccagtaaaatcagcacgctcgacgatctggaggctatcgtcagcctcggtttccgcggcgaagcgctggccagtatcagctcggtttcccgtttgaccctgacgtcgcgtaccgccgagcaaagcgaggcgtggcaagcctatgccgaagggcgcgagcaggcggtgaccgtcaaacccgccgcgcacccggtcgggagcacgctggaagtgctggatctgttttacaatacgccggcgcgccgcaagttcatgcgcaccgaaaaaaccgaattcggccatatcgatgaagtggtgcggcgcattgcgctggcgcgtttcgatgtggcgatcaacctcagccacaacggcaaaccgatccgccaataccgggcggcgaaagaagagagccagcacgaacgccgtttgggcagcatctgcggcccggcgttcttgcagcatgcgctgaacatcgactggcagcacggcgatctgagcatccgcggttgggtggcggatccggccggggcgcgccagctgggtgaaatgcagtattgctacgtcaactgccgcatgatgcgcgatcgcttgatcaatcacgctattcgtcaggcctatcaggatcagctgaaggacgatcagcagcccgcttacgtgctgtatctggaggtcgatccgcaccaggtggacgtcaacgttcatcccgccaagcacgaggtgcgtttccatcaggcgcggctggtgcacgactttatctaccaggcggtaaccaccgtgctgcagcaggccggtcagacgccgccgctgccgctggcggaaacgcctgaagaagcgcccgcgccggtctggcagccggagaaccgcatcgccgccggcggcaaccatttttctcagcctgcgccgcgccgtgaaacgccgccaccggccggcaccgcccgcgagcgggcgccgcagccgggttggcaaacggcgggcggttaccagaaacgcgaaggcgagctgtacggtaaactgatgcagcccgccgccgagccgcaggccgatgccgcgccggaagtttcgagcaagccgccgctgttcccgccggcgaaagccgcagcggaaacgccgttggcgggcggccaacacagttttggccgggtgttgatgatccatccgccgtgctacgcgctgattgagcagcgccagcagccggcgttgctcaatctggcggtagccgaacgctggctgcgccaggcgcagctcaacccaccggcggaagggctgcggccgcagccgctgctgatcccgattaagctgacgttggagaagcgcgaagcggcggccattgcgcggcatcaggcgctgctcgtggcgatggggctggatctgcagacggatcacggccgtgtgacgctgcgcgcagtgcctttaccattacgccaacaaaatttacaaaaactgatacccgaactgttaggctatctggccgaacatcaggagatgtcgcccgcggtgctggccacctggctcgctcgccgtcttggcagcgaacatgaacagtggaacacctcgcaagcgatacaattgttgaccgacgttgaacgactttgcccgcagctggtcaaatcgccaccgagcggacttttacaacccgttgatttacaggccgcactggcggccctcaagcatgactga

SEQ ID NO: 425750 - DNA, 1833 bp, Serratia marcescens
atgacgcacgtgttgaaaaaatttgcggtcatcatgctgatcgccgtgctggggccgctcggcgcgctgaacgcgctggcggcgtcctcgctgtccgatatcaaagtgtccaacgcccaacgcgaagcgacggtgtcggtgagcttcaatggcccgccggactatgcgtttttcccgctgcacggcccggaacgcgtggtgctggacgttaaccagaagggcaaggtcggcggtcttccgctcaatttcagcgggcaaaacctggtgaaaagcattcgttccagcgcgccgaaagacgcgcagagcgtgcgcctggtgtttgatctgacccagcgcgccaaaacccgcgtcgccacccgccagaacggcggcgtgcataccgtggtgttcaccattacggccgaaggcggcgccaataccgtggtgcgtaaagcgccggtgcaaacgcctgcgccggttgcggtcaatccaccgccgcgtcaggcgccagtcacggtcagccagccaccgcgccaggcgccggtcgcggtgcgtgaagcgccggagccgccgctgcgcaaagcgccgacaggatcgaatccctttaccaataaacagaccgtggtcgcaggcaccgccacagaggtcacgccgcgcagcagccgcgtttccgccggttccggcgatcgggtggtggtagcgatcgacgccggccacggcggccaggatccgggcgccattggcccgagcgggctgaaagaaaagaatgtcaccatcgctatcgcgcgccgcctgcaggcgatgctggacgccgatccgcagttcaaaccggtgctgactcgtaccggcgactatttcatctcggtgatggggcgctccgatgtggcgcgtaaacagggcgccaacgtgctggtctccatccacgccgacgccgcgccaaaccgcagcgccagcggggcctccgtctgggtgctgtccaatcgccgcgccaacagcgaaatggccggctggctcgaacagcatgagaaacagtccgagctgctcggcggcgccggcgatctgctggccaacagccaggctgacccttacctgagccaggcagtgctggatctgcagttcggccactcgcagcgcgtgggatacgacgtggcggtgaaagtgctgcagcagctgcagagtgtcggatcgttgcataaacgccggccggaacacgccagcctgggcgtgctgcgttcgccggatattccctcgctgctggtggaaaccggatttatcagcaatagcacggaggagcggctgcttggcagtagcgcgtatcaggagaagattgccagagccattcataacggcctgcgcagctacttcctggcgcatccgctgcaagccgacccaaaggtggaaaaccgaccgctggacgtcgcagcggcggttaacacctcaacaccagacgtgcgccagcctgagcctatcgtcagctcggccggcgcgagccgcagcgtaagcggcaagacccggatccacgtggtgaagcgggcggaaacgctgtccggcatcgccgacagctacggcaccaccatggcggcgctgcgtgatctgaacaaactgaaaaaagacggcgtgtgggtagggcaacgtctgaaggtgccggcggggaaagccgccgccgtcaccaccaccgtcgccaaggcgaaaacgccggcgaagaaaacgtctaaacataaagtggcccgcggggatacgctctcctccatcgcttctcgctacggggtcagcgtcggcgatctgaaacgggtcaataatctgaagtcggacgtcgcgccgctggatcggacgctgaccattccgcaggcctag

SEQ ID NO: 425751 - DNA, 471 bp, Serratia marcescens
atgaaagaactcgttttacctctgccggacgaggcagcgactgtcgctttgggcaccactttggcccaggcctgcgatcgcgccagcgtcatctatctctacggcgacctgggcgccggtaaaaccaccttcagccgtggtttcctgcaggcgttagggcatcagggcaacgtcaaaagcccgacctacacgctggtggaaccctatgccttgcagccgctggcggtgtatcacttcgatctgtatcgcctggccgatccggaagagcttgaattcatgggcattcgcgattacttcgcgcaagacgccatctgcctggtcgaatggccgcagcagggcaccggcgtgctgccggagccggatctggcgctgcatcttagctatcagggcgaggggcgagaggcgaagatcgaggcgatttccgcatacggcagccagctgttagaccgcattcatggatcacagggatga

SEQ ID NO: 425752 - DNA, 1392 bp, Serratia marcescens
atgcagcgcgccggtcaggcggcctacgcgctggcgcgcaacgcgtacccctcccgcgaccactggctggtgctgtgcggccacggcaacaacggcggcgacggctatgtggtggcgcgcctggcgaaggcggcgggcgtgcaggtgacgctgatcgcctgcgacggcgcacggcctttgccaccggaggccgcagcggcccgcgaggcctggcaagccgcaggcggcgacattctgccggcgagcagccgctggccggcgtctgtttctctcatcatcgacggcctgttaggtaccggcctgggcagtgcgccgcgtgcgccctacgaggcgctgatcgaggccgccaaccgccattcggcaccggtggtggctcttgacatcccgtccggcctgctggcggagagcggcgcggcgccgggcgcggtcgtgcgtgccgctcacaccgtcacgttcatcggcctcaaaccggggttgctgaccggccaggcgcgcgactgggtcgggcaacttcatcagaatgcgctaggcttatcgggttggttggcgaagcaaccggagcagattcagcggcttaccgccgaggtgttgccgcgttggctgcatccgcgccgtccctgcgcccataagggcgagcatggccgcctgctgttggtgggcggcgatcgcgggttcggcggcgccattcgcatggcggcagaggcggcgctgcgcagtggggctgggttggtgcgagtgcttactcacatggagcatgtcgcgccgctgttggcggcccggcctgagctgatggcgcaggcgctggacgaggcgacgctgcggcaggcgatgcaatgggcggatgtgctggtgattggcccgggtctgggacaggctgagtggggcaaaaacgccctgaacgtgctgcaaaccagcgataaaccggccttgtgggacgccgatgcgctgaacttgctggcattaaatcccgagaaacggcagaatcgcgtgatgactccgcatcctggagaggcggcgcggctgttgagctgcagcactgccgacatcgagagtgatcgcttacttgccgtgcgcaagctgacggcgcgctacggtggcgtggcggtgctgaaaggctccggtacgctgatcgccgatgagcaggggcagatggcgatcgccgacgtcggcaacgccggcatggcctccggcggcatgggcgatgtgctgtcgggcatcatcggcggtttgctggcgcaaaagctctcgctgtatgatgccgcctgtgcgggctgcgtcgtacacggcgcggccggcgatcgcgtagcggaaagacaaggaacaagaggcatgttggcgaccgatttactgccggacatccttcatttcgttaaccctgagtgggcaaaatag

SEQ ID NO: 425753 - DNA, 1140 bp, Serratia marcescens
atgacgcaccccctcgatctccatcaactcgcccaacatatcaagcaatgggggcaatcgctaggattccagcaggttggcatctgcgataccgatttgagccttgaagagccgaagctgcaggcctggctcgacaaacagtaccacggcgaaatggaatggatggcgcgccacggcatgctgcgcgcacgccctcacgaactgttgccgggcacgctgcgagtgatcagcgtacgcatgaactacctgccggccaaggcggcatttgccagcaccttgcaaaatccgcagctgggctacgtcagccgctatgcgctggggcgcgactatcacaagctgttgcgccagcgcctgaaaaagttgggcgatcagatccaggcctactgcggcgagttgaatttccgcccctttgtcgattctgcgccggtgatggaacgcgcactggccgccaaggcgggcatcggctgggttggtaaacactcactaattctcaaccgtgaagccgggtcgtggtttttcctcggcgaattgctgatcgatctgccgctgccggtagaccagccgcaggaagagcagtgcggccgctgcgtcgcctgcatcaccacctgcccgaccggcgccatcgtcgctccctataccgtagacgcccggcgctgcatctcctacctgaccatcgagctggaaggcgcgatcccggaggagttccgcccgctgctcggcaaccgcatctacggctgcgacgactgccagctgatctgcccgtggaaccgcttttcgcagcttaccgacgaagacgatttcagcccgcgcgccgcgctgcatgcgccgcagctgatcgatctgttcaactggacggaggaaaaattcctgcgcatcaccgaaggctcggcgatacgccgcatcggccacctgcgctggctgcgcaatatcgccgtggcgctgggcaatgcgccctacgaggacggcatagtgctcgcactacgcacccgtttgggccaaaacgccatgctggacgaacatatccactgggcgctggcgcaacagctcgcccgccgcgaagcgcagggcatcgaggtgcaaacggcgcagaaaaaacggctgatacgggctgtggaaaaaggtttgccaagggatgcctga

SEQ ID NO: 425754 - DNA, 690 bp, Serratia marcescens
atgccgttaaatgcacaacaacaggccgcccaacgcaatctttcttatctgcttgcagagaaacttggccaacaaattctggcgggcgattatcgggccggcagcatcctgcccggtgaaatggaactgggcgagcaattcggcgtcagccgcaccgcagtacgcgaagcggtaaagatgttagccgccaaaggcatgctactaccgcgcccgcgcatcggcacccgcgtgatgccgcagagccaatggaatttcctcgatcaggatttactgacctggtggatgacgcgggaaaacttcgatcaggtgatgcaacacttccttatcctgcgtacctcgctggagccgcaggcctgcgcgttggcggcaaaccacgccagcccgcagcaaaccaagctgctggcggagctgatggcggaaatgcgcgcgctgcatacccagtttgatcgcgagcgttggatccaggtcgatacccaattccaccagctcatctacgaagccagcggcaacccgttcctgacctcgttcgccaacctgttcagctcggtgtaccaaagctacttccgcgccatcaccggcaatgaagtgatcaagctgcgccatcatcaggctatcgtcgatgcgatactcgccggagacagcgccggcgcgctcgtcgcctgccagatactgctgaaagagaaagactag

SEQ ID NO: 425755 - DNA, 1416 bp, Serratia marcescens
atgacccaatccgcgcgcagtatggcaggacttccgtggatcgccgcaatggcgttctttatgcaggcgctggacgccactatcctcaataccgcgctgccggcgatcgcccaaagcctggggcgttcgccgctggcgatgcaatcggccgtcatcagctacacgctgacggtagcgatgctgatcccggtcagcggctggctggcggaccgcttcggcacccggcgcgtgttcatcttcgccgtcacgttattcaccctcggctcgctgctgtgcgctctgtcccctacgctgagcgcgctggtagcctctcgcgtgctgcagggcatcggcggcgcgatgatgatgccggtcgcgcgattggcgctactgcgcgcctacccacgcagcgaactgctgccggtgctgaacttcgtcaccatgcccggcctggtcgggccgattctggggccgctgctgggcggctggctggtcacctacgccacctggcactggattttcctgatcaatatccctatcggcctgctcggcatcttctatgcgcgtaaatacatgccggacttcaccacgcccaagcgccgcttcgacttccttggctttatgctgttcggcctgagcctggtgctgatctctaccgggctggaactgtttggcgagcgggtactggcgagctacgtttcgctgggcattctgctcagcggcttcgtgatgctgttcggctacatcgcgcacgcccgccgtcatcctcagccgctgatcggtctcgacctgttcaaaacccgcaccttctcggtcggcatcgccggcaacgtcgcctccaggctgggcaccggctgcgtgccgtttttaatgccgctcatgctgcaggtgggattcggctacacagcgatcgtcgccggctgcatgatggcaccaaccgccatcggttcgctgatggcgaaatccaccgtcactcaggtgctgcgctggttcggctaccgtaaaacgctggtcggtatcaccgtcattatcggggtgctgatcgcccaattcgccctgcaaagcccgggcatgccgctgtggctgatgatcctgccgctgttcgtgctgggcatggcgatgtccacccagttcaccgccatgaacaccatcagcctggcggatttgaacgacgccaacgccagcgccggcaacagcgtcctggcggtcacccaacagctgtccatcagcttcggcgtggcgatcagcgcggcggtgctgcgtttttacgaatctctgtcgttaggcaccatgatcgaccacttccattacacctttatcaccatggggatcgtcaccgtagcgtcggcgctggtgtttatgttgctgagaaggagggatggccgcaatttgatcagcggccaggaaagcaagaaagaagcgaaggcggcgagttaa

SEQ ID NO: 425756 - DNA, 993 bp, Serratia marcescens
atgaaagatgtcgcccgcctggcgggcgtttcaacctctaccgtttcgcatgtggtcaacaacaatcgctttgtcagcgacagcgtgcgcgacaaggtcatggcggccgtggaacagctgaactatgcgccttccgcgctggcgcgcagcctgaagctcaatcagacgcgcaccatcggcatgctggtgaccgccagcaacaacccgttttatgccgaagtggtgcgcggcgtggagcgcagctgctatgaacgcggctacagtttaatcctgtgcaataccgaagaagacgccgcgcgcatgaaccgcagcatggagacgctgctgcaaaagcgcgtcgacggtttgctgctgatgtgcaccgaaaaccaccggccatcgcaagatgccctgagccgctacccgtcattgccgatcgtgatgatggactgggcgccgttcgagggcgccaacgacattattcaggataactcgctactgggcggcgagatggcgaccgatcatctgatcgcccgcggctaccgccaaatcgcctgcatcgccggcccgcaggataaaaccaccgcccgtcaccggctggaaggctatcgcaacgcgatgcggcgcgccggattgccggttccgccagggtatgaagtgcactgcgattttgagtttgagggcggcgtgaacgccatgcgccaactgctggcgctggacgagccgccgcatgcggtgttcgccggcaacgacgcggtggcggtgggcgtttatcaggcgctgtatcaggccgggctctccgtgccgcaggatatggcggtgatgggctacgatgacattgagctggcgcgctatctggcgccgccgctgagcaccattcatcagccgaaggattcgctgggcgaactggcgatcgatgcgctgatcaatcgcctgcaaaacccggagcgcgccccccaggtgctggtgctgacgcccgagctggtggaacgcgcctcggtgggccgccgttaa

SEQ ID NO: 425757 - DNA, 927 bp, Serratia marcescens
atggaaacaggtaagctggtggttcttggcagcatcaatgccgaccatatcctcaatattgaacacttcccccacccgggcgaaacggtgatcgggaaacagtataaggtggcgtttggcggcaagggcgcgaatcaggcggtggcggccgggcgcagcggggcggagatcgcctttatcgcctgcgtaggcgccgacgacatcggtgaacgtgtccgccggcagctggcgagcgatcgcattgatacccaaccgattgaagccatcgccgacagcaccaccggcgtggcgctgatcttcgtcaacgccgaaggcgagaacgtgattggcattgatgctggcgccaacgccgcggtgacgccggattacctggcacgctaccaacaaaaagtgatcgacgccgacgctttgctgatgcagctggagtcgccgctggagacggtgatcgccgccgcccgcctggcgaagcagcatcacacgcaagtgatcctcaacccggccccggcgcgtgagctaccggacgagctgctgggcatgatcgatatgatcaccccgaatgaaaccgaagcccagcgcctgaccggcatcgccgtggacaacgacgccgatgcggcgcgcgcggcgcaggcgctgcacgacaagggcatcgcgacggtgattatcaccctcggcagccgcggcgtgtggctgagcgaaaacggcaacggcaaacgggtgcccggcttcaaggtgcaagcggtggatactatcgccgccggcgatacctttaacggtgcgctggtcacagccctgttggaaggcaaggccatggccgacgcggtgcgtttcgcccatgcggcggcggcgatcgccgtgacccgccctggcgcgcagccttcggtgccgtggcgtgaagatatcgacgccttcttgcagcagcaggggtga

SEQ ID NO: 425758 - DNA, 891 bp, Serratia marcescens
atgatgaaaatgaaaaaactggcaaccttagcttccgccatcgcgctgagcgccaccctgagcgccaatgccatggccaaagacaccatcgcgctggtggtgtccaccctcaacaacccgttcttcgtctcgatgaaggacggtgcgcagcaagaggccaacaagctgggctacaacctggtggtgctggattcccagaacaacccggcgaaagagctggccaacgtgcaggatctgatggtgcgcgcgcccaagctgctgctgatcaacccgaccgactccgacgcggtgggcaacgccatcaagatggccaaccaggctaagatcccggtcattacgctggaccgcgtggcgagcaagggcgaggtggtgagccacatcgcttcggacaaccgcgtgggcggcaaaatggccggcgacttcatcgccaagaaagtgggtgccgatgccaaggtgattcagctggaaggcatcgccggcacttccgccgcgcgtgaacgcggtgaaggcttcaagcagtcgctggatcagaataaattcaaactgttggccagccagccggccgatttcgatcgcaccaagggcctgaacgtgatgcagaacctgctgaccgcgcacccggacgtgcaggcggtgttcgcccagaacgatgaaatggcgctgggtgcgctgcgcgcgctgcaaaccgccggtaaaaccgacgtgatcgtggtaggcttcgacggcaccgccgacggtgtaaaagcggttgaagggggtaagctggcggcgaccgtggcgcagcgtcccgatcagatcggcgtgatcggtgtggaaaccgccgataaagtgctgaaaggcgaaaaagtgccggcgaccatcccggtcgatttgaaactggtcactaaataa

SEQ ID NO: 425759 - DNA, 969 bp, Serratia marcescens
atgagttcccagactatcgcagccaagcgctggttcagtaaagagtggctgttagagcagaagtcgttgattgcgctgctggtgctaatcgccgtggtctcttccatgagcccgaacttcttcaccctgaacaatctgttcaatattctgcagcaaacctcggtgaacgccatcatggcggtggggatgacgctggtgatccttacgtccggcatcgatctgtcggtgggatcgctgctggcgctgaccggcgcggtggcggcgtcgatcgtcggctttgaggtcaacgcgctggtggcggtggcggcggcattggcgctgggcgccgcggttggcgcctgcaccggggtgatcgtcgccaaaggcaaagtgcaggcctttatcgccacgctggtgatgatgctgctgctgcgcggcgtcaccatggtgtacaccaacggcagcccggtcaacaccggtttcaccgacgtggccgacaccttcggctggttcggcatcggccgcccgctgggcgtgcctacgccgatctggatcatggcaatcgtgttcatcgccgtctggtatatgctgcaccacacgcgcctgggccgctatatttatgccctgggcggcaatgaagcggcaacccgcctgtccggcatcagcgtcgataaggtgaagattatcgtctactcgctgtgcggcctgctggcggcgctggccggggtgatcgaagtggcgcgcctgtcgtcggcgcagccgaccgccggcaccggctatgagctggacgccatcgccgccgtggtgctgggcggcaccagcctggccggcggcaagggccgcatcgtcggcacgctgatcggggcgctgatcctcggcttcctgaacaacggcctgaatttactgggtgtttcttcctactaccaaatgatcgtgaaggcagtggtgatactgctggcggttctggtagataacaaaagcaacaagtaa

SEQ ID NO: 425760 - DNA, 1506 bp, Serratia marcescens
atgcaacctttactgcaactgaaagggattgataaagcctttcccggcgtgaaggcgctttccggcgccgccctcagcgtttatcccggcaaggtgatggcgctggtgggggaaaacggcgccgggaagtccaccatgatgaaagtgctgaccggcatctaccagaaagacgccggcagccagtattttctcggtaacgaggtggcgttcaacgggcctaaagattcgcaggaagcgggcatcggcattatccatcaggagctgaatctgatcccgcagctgacgattgcggaaaacatcttcctcggccgcgagttcgtcaaccgtttcggccgcattgactggaagcgtatgtacgccgaggccgatcgcctgttggcgcgcctcaacctgcgctacagcagccaccggctggtgggcgagctgtcgatcggcgatcagcagatggtggagattgccaaggtgctgagcttcgaatcgaaagtgatcatcatggacgaaccgaccgacgcgctgaccgacaccgaaaccgcctcgctgttcaaagtgatcaacgagctgaaggccgaagggcgcggcatcgtttatatctcgcaccgcctgaaagagatttttgaaatctgcgacgacgtgaccgtgttccgcgacgggcagtttatcgccgagcggccggtgagcgagctgcaggaagattcgctgattgagatgatggtcggccgcaagctggaagagcagtacccgcgccttgatttgccgcgcggggaaaaacggttggaagtcagccacctttccggccccggcgttgaggacgtcagttttacgctgtatcgcggcgagatcctcggcgtggccgggctgatgggcgccgggcgcaccgaactgatgaagatcctgtacggcgccgcgccgcgcaaggccggcaccgtcagcctggatggccgcgaggtggtcacccattcgccgcaggacgggttggcgaacggcatcgtctatatctcggaagaccgcaagcgcgacggcctggtgctgggcatgtcggtgaaggaaaacatgtcgctgaccgcgctgcgctacttcagccgcgccgacggcagcctgaaacaggccgacgagcggcaggcggtgggggatttcatccggctgtttaatatcaaaacgccgtcgatggaacagccgatcggtctgctttccggcggcaatcagcaaaaagtggcgatcgcccgcggcctgatgactcggccgaaggtgctgatcctcgatgagccgacgcgcggcgtcgacgtcggcgccaaaaaagagatctatcagttaatcaaccagttcaagcaggaagggctgagcatcattctggtgtcttcggaaatgccggaggtgatgggcatgagcgatcgcattctggtgatgcacgaagggcatctcagcggcgagttcccgattgaacaggccacccaggaagcgttgatggcggcagccgtcggcaagcaatacggcgtaaagcaggagtaa

SEQ ID NO: 425761 - DNA, 420 bp, Serratia marcescens
atgaaaaaaggcgtattactgaattccgatgtgtctgccgtgattgcccggctggggcataccgaccagctcaccctgtgcgacgcgggcctgccgataccggcggcgacgcagcgcatcgatctggcgctgacgcagggcgtgccgaccttcatgcaggtgttcgcggcggttacgcaagagatgcaggtagaaagcgccatcctggcggaagagatcgtgaaacagaatccgtcgcttcacgaggcactgctggctgaactgaccgcactgggccaacgccagggcaataccatcagcgtgcgttatatcagccatcaggcgtttaaagcgcaaaccgagcacagccgggcggtgatccgcagcggggagtgttcgccttacgcgaacctgatcctgtgcgccggcgtaactttctga

SEQ ID NO: 425762 - DNA, 1869 bp, Serratia marcescens
atgagcgcagagcataagcagtccttatcggcggtaaccctggcggccatcggcgtggtctacggtgatatcggcaccagccctctctatacgttgagagagtgtttctccggccattacggcttcgatgttcgtccagacgtggttttcggcttcctgtcgctgattttctggatgctgatcgtgatcgtttccctcaaatatctcacctacgtgatgcgcgcggacaacgccggcgagggcggcattctgacgctgatgtcgctggccgggcgcaacacttcggcgcgcaccaccgcggtgctggtgatactgggcctgatcggcggcagcttcttctatggcgaggtggtgatcaccccggctatctcggtgatgtcggcgatagaggggctggaaatcgccgcgcctgcgctcgatgcctatatcgtgccgctctccattctggtgctgacgctgctgttcgttatccaaaagcacggtaccggcagcgtcggcaagctattcgccccggtgatgctgctgtggttcatcgtgttggcggtgctgggcgcgcgcagcatcatttcgaacccggaagtgctgcaggcgctgaaccccaaatgggcgctcaacttcttcatggaatataagaaggtgtcgttctttgcgctgggggcggtggtgctgtcgatcaccggcgtcgaggcgctgtatgccgatatggggcacttcggtaagttcccgatccgcctggcctggttcaccgtggtgctgccttcgctggtgctcaactacttcggccagggcgcgctgctgctgaaaaaccctgaggcgatcaaaaacccgttcttcctgctggcacccgactgggcgctgatcccgctgctgattctggcgaccctggcgacggttatcgcttcgcaggcggtgatttccggcgtcttctcgctgacccgccaggcggtgcgcctgggctatctgtcgccgatgcgcattattcacacctcggaaatggaatccggccagatctacattccagtgatcaactggacgctgtacatctcggtggtgctggtgattgtcggtttcgaacactccagcaacctggcggcggcgtacggcatcgccgtcaccggcaccatggtgctgaccagcattctggtcacctcggtggcgatcaacaactggcactggaatcgcttcctggcgctcggcatcgctgccatcttgctgatcatcgacgtgccgatgttctccgccaatgccctgaagctgttctccggcggctggttgccgctgaccttggcgctggtgatgtttatcattatgaccacctggaagagcgagcgcttccgcctgctgcgccgcctgcatgaacacggcaactcgctggaggcgatgatcgcctcgctggagaaatcgccgccggtgcgggtgccgggtaccgcggtgttcctgtcgcgcgccaccaacgtcattccttttgcgctgctgcacaacctgaagcacaacaaggtgctgcatgagcgtgtggtgctgctgacgctgcgcaccgaggatgcgccttacgtgcacaacgtgcgccgggtgaccatcgaacagctgtcgccgaccttctggcgggtagtggccagctacggctggcgggaaacgccgaacgtcgaggaggtattccaccgctgcgggctggaagggttgccgtgccgcatgtcggagacctcgttcttcatgtcccatgaatcgctgatcctcaccaagcggccgtggtacctctacctgcgcggcaagctgttcgtcgccctgagccgcaacgcgctgcgcgcgccggatcagtttgagatcccgccgaaccgggtcatcgagctcggcacgcaggtcgagatctaa

SEQ ID NO: 425763 - DNA, 1572 bp, Serratia marcescens
atggtggtttatcatcggattatcgaccaagattggctaactctcggacaatgcgacaattatatgacgccatcatcccttctggcagaacgaatttcccgcctcagcagcgcgctggagagcggtctttatgagcggcaagaagcgattcgcctgtgcctgctggcggcgctgagcggcgaaagcgtattcctgctcggcccgcccggcatcgccaagagcctgatcgcgcgccggctgaagtttgccttccgcaacgcccgctcctttgaatacctgatgacgcgcttttccacgccggaagaggtcttcggcccgctctccattcaggcgctgaaagatgaggggcgctatcagcgcctgaccgccggctacctaccggaagcggagatcgtgtttctggacgagatctggaaggccggcccggcgatcctcaacaccctgctgacggcgatcaacgaacggcgctttcgcaacggcaacagcgaagaaccgatcccgctgcgcctgctggtcaccgcctccaacgaactgcccgaagcggacaacagcctcgaagccttatatgaccgcatgctgatccgcctgtggctggataaggtgcaggataagcagaatttccgctcgctgctggtcaaccgccagagcgaaagccaaaacccggtgccggcggcgctgagcgtcagcgacgaagagtttctgcagtggcagccgcagatcgataaggtggcgctgccggaagcctgctttgagctgattttccagctgcgccagcggctggacgcgctggaacaggcgccgtacgtctctgaccgacgctggaaaaaagccctgcgcctgctgcaggcctgcgccttcttcagcgggcgcgacgctatcgccccgctcgacctgatgctgctgaaagactgcctgtggcacgatctcacctcgctgaagctgctgcaacagcagatcgatcagctgttgaccgaatcggcctaccagcaacagtcgatgctgatccaactgcaacaaatccacacccgctggctgcaggatcaacagcaacaaagcgaccggcaggccatcagcctggtgaaaaagggcggcatgttcagccgtaaaccgcaatacgcaccggccacgccgttcgccggcggcaccctcaccctgttgctgcaaaagccgctgcagctgcatgacattcaggtcaaccatctgagcatcgaaagcagcgtgctggacaactggctgcaaaaaggcggcgacgtgcgcgccaagctgaacggcatcggcttcgcgcagccgatcgatttggaggtcgacgaccaactgcacctgacggtgctggacgtcagccgccagccgtcgctgctggcgctgccaggcaaacaggccaccgccacgccgcaggcgctgctggacgaaatggacgcgttggcccaacgcctggcggagcagcgccgcgccttcagccaacatcagccctgtctgttcacacccgccgccggcctggccaagatcgaagccagtctgctgcaggtggcggagcaggttaaacagcaactgcagcaaatgcgcggccagtaa

SEQ ID NO: 425764 - DNA, 1464 bp, Serratia marcescens
atgctcagtctggagacgctcgatctgctgctggcgatcgccgaaggcgaaatgatcgaggagatgatcgtcggcatgctggcggcgccgcagctgtcggtgttctttaaaaagtttccggcccttcgccgggcgttggatcgcgatctgccacgctggaaactgcagctcaaggagcgtctgcaggaagctatggtgccgccggcgctggcgcaggaattttaccgctaccaacagtgccagctggagaacaacacccagttctatcacaacctcaacgacacgatggagctgctgcgccagctggtctcgccgttttatgaacaggcgcgcgcgctggtggacgccgccgatctgcccaatcatccgctggacgacagcttccaaaccctgttcctgcagcgctggcgcatcagcctgacgctgcaggccaccatgctgcaccaccagctgctggaacaggagcgcgagcaactgatggcggaactgcaggagcgattggcgctgagcggcgcgctggagccgctgctgtcggaaaacgacaccgccgccggcaggctgtgggacatgagcaaaggccagctacagcgcggcgattaccagcggctggtggagtacggcaactttttgcagcagcagccggagctgaaaaagctggcgcagcagttgggccgcagctatcaggccaaggcggtgcagcaacaggacgcgcagccggagccgttcagggtgatggtgcaggtgccggccacgctaccggaagaagtgagcggcattcatcagagcgacgacatcctgcgcctgctgccgccggagctggcgacgctaggcattgaagagctggagttcgaattttatcgccgcctgttggaaaagcggctgctgagctaccgcctgcagggcgacgtctggcaggagcagatcctgatccgccaggtcacccatcagcagcaggatcaacagccgcgcgggccgtttatcgtctgtgtggacacctcaggatcgatgggcggcttcaacgaacagtgcgccaaggcgttctgcctggcgctgctgcgcattgcgctggcggacaaccgccgttgctacatcatgctgttcgccaaccagatcgtgcattatgagctcaccgccgccagcggcatcgaacaggcggtgcgctttctcggccagcagtttcgcggcggcaccgatctggcggcctgcctgaacgccaccgtcactaaaatggcggagagcggctggtttgacgccgatgcggtgatcatttccgattttatcgcccagcggttgccggaggaggtaataaagaaggtgaaacagcagcagcaaagccaccagcagcgtttccatgcggtggcgatgtccgcctacggcaaacccggcatcatgcgcattttcgatcatatctggcgcttcgataccgggctgaaaagccgtttgatgcgccgctggcggcgctag

SEQ ID NO: 425765 - DNA, 993 bp, Serratia marcescens
atgaaaaaacagtttatccaaaaacaacaacaaatcagccaggtcaaatccttcttctcccgccagctggagcaacagcttggcctgatcgaagtgcaggcgccgatcctcagccgtctgggcgacggcacgcaggataacctctccggcagcgagaaagcggtgcaggttaaggtgaaaaccctgccggacgccaccttcgaagtggtgcattcattggcgaaatggaaacgtaaaacgctgggcagctacgatttcggcgccggcgaaggcctgtacacccatatgaaggcgctgcgcccggatgaagatcgcctgacgcctatccactcggtgtacgtcgatcagtgggactgggaacgggtgatgggcgacggagagcgcagcctggactacctgaaaagcaccgtgcgcagcatttacgccgccatcaaggcgacggaggcggaagtcagccgcgagcatggtctgaccccgttcctgccggaacagatccactttgtgcacagcgaaaccctgctgcagcgttacccggatctggacgccaaagggcgcgagcgggcgatcgccaaagagctgggcgcagtgttcctgatcggcatcggcggcaagctgtcgcacggcaaatcgcacgatgtgcgggcaccggattatgatgattggaccaccccggcggcggatggcctggcgggcctgaacggcgatatcgtggtgtggaacccggtgctgcaggacgctttcgagctgtcctctatgggcatccgcgtcgacgccgccgcgctgaaacgtcagctggcgctgaccggcgatgaagagcgcatgaagctggagtggcaccagtcgctgctgcgcggcgatatgccgcagactatcggcggcggcatcggtcagtcgcgcttggtgatgctgctgctgcaactgtcgcatatcggccaggtgcagtgcggcgtgtggtcgccggaagtgcgcggggcggtcgaaggcctgctctga

SEQ ID NO: 425766 - DNA, 462 bp, Serratia marcescens
atggcggaaatttatcagatcgataatctcgatcgcggcatcctcaacgctctgatggacaacgcgcgcacgccgtacgccgaactggcgaaaaacttcgccgtcagccccggcaccattcatgtgcgggtagagaagatgaaacaggccgggatcatcaccggcgcgcgcatcgacgtcagccccaaacagctgggctacgatgtgtgctgctttatcggcatcatattaaagagcgccaaggactacccttcggcgctgaaaaagctggaaagcctggaggaagtggtggaagcctattacaccaccggccactacagcgtctttatcaaggtgatgtgccgatcgatcgacgcactgcagcaggtacttatcaacaagatccagaccatcgacgagatccagtctaccgaaacgctgatctcgctgcagaaccccattatgcgcaccatcgtgccgtaa

SEQ ID NO: 425767 - DNA, 441 bp, Serratia marcescens
atggcagacattactctgatcagtggcagtacgcttggcagcgccgaatacgtggctgaacatttggctgaaaagctggaagacgcgggtttctctaccgagatgctgcacggccctgaactggatgaactgccgttgaccggccgctggctggtggtctcttccacgcacggcgccggcgaactgccggataaccttcagccgctgctggagcagatcgccgaacaacagccggatctttccgaggtgcagttcggcgccgtcggtttgggcagttcggaatacgacatcttctgcggcgcgatcaaacagatcgacgatctgctgatcgccagaggcgcgaaaaggatcggcgatcgtctcgagatcgacgtgaccgagcatgaaattcccgaggatccggccgaggaatgggtaaaaaactggattaatttactctag

SEQ ID NO: 425768 - DNA, 1890 bp, Serratia marcescens
atgttttatccagatcaatttgacgtcatcatcatcggtggtggccatgcaggtaccgaggccgccatggccgcggcgcgcatgggacgtcagactttattattgacacacaatatcgatacgctgggacagatgtcctgtaacccggcgattggcggtattggtaaagggcatctggttaaggaaattgatgcactcggcggcctgatggccacggcgatcgatcatgccggcatccagtttaggatactaaacgccagcaaaggccctgccgtccgcgccactcgcgcgcaggcggatcgcgtactgtatcgccaggcgatccgcaccgcgttggagaaccagcccaacctgatgatcttccaacagccggttgaggatctgatcgtcgaaaacgatcgcgtagtgggcgccgtaacccaaatgggcctgaaattccgcgccaaggcggtggtattgaccgtcggcaccttcctggacggcaagatccatatcggcctggagaattacagcggcggccgcgcgggggatcctccttcgatctcgctgtcgcagcgtttgcgtgaactgccgctgcgcgtcaaccgcttgaaaaccggtacgccgccgcgcatcgacgcccgcactatcgatttcagcgtactggcgccacaacacggcgatacgccggtgccggtattctcgttcctgggcgatgccagccagcacccggaacaaatggcgtgctacatcacccacaccaatgaaaaaacccatgacgtgatccgcaataacctcgatcgcagcccgatgtatgccgggatcatcgaagggatcggcccacgttactgcccgtcgatcgaagacaaggtcatgcgctttgccgatcgcaacgcgcaccagatcttcctcgaaccggaaggcctgaccagcaacgaaatttaccctaacggcatttccaccagcctgccgttcgacgtgcagatgcagatcgtccgttcgatggaagggatgcagaacgcgcgtattattcgccctggttatgccatcgagtacgatttcttcgatccgcgcgatctgaagccgacgctggaaagcaaattcattcaggggctgttcttcgccggccagatcaacggcaccaccgggtatgaagaagccgctgcgcagggcctgttggccggcctgaacgccgggcgcttcgccgacgaacaggaaggctgggcgccacgtcgcgatcaggcctacctgggcgtgctggtggacgatctcagcaccctcggcaccaaagaaccgtaccgcatgtttacctcgcgcgccgagtatcgtctgatgctgcgcgaagacaacgccgatctccgcctgacggaaaaaggccgtgaactcggcctggtggacgacgtgcgttgggcgcgttacagcgagaagctggagcgaatcgaacgcgaacgtcagcgcctgcgcgacatctggatgcacccgcacgccgagaacgtcgaacaggtcaatgcgctgctgaaagcgccgctgtcgcgcgaagcgaacggcgaagagctgctgcgccgcccggagatggattacgcacagttgaccggcaccgaggccttcgcgccgccgctggacgacgtacaagccgccgaacaggtcgagatccaggtcaaatacgaaggctacatcgctcgtcagcaggaagagatcgaaaaacaacagcgcaacgagaacaccgtgctgccgttggatctcgactaccgtcaggtttctgggctgtcgaacgaggtgatcgccaaactgaacgatcacaaaccgaactccatcggccaggcttcgcgcatctccggcattacgccggcggcgatctcgattttgctgatctggctgaaaaagcagggactgctgcgccgcagcgcataa

SEQ ID NO: 425769 - DNA, 621 bp, Serratia marcescens
gtgcaaaaaaaattagactcgctgctcgcggcagcaggcattgagctgcccgatcagcagaaacagcagctgctgggctatgtcggcatgctggataagtggaacaaggcttataacctcacgtcggtgcgcgatccgcagcaaatgctggtgcgccacatcctcgatagcatcgtggtcaacccgcatctgcagggctcgcgttttatcgatgtcggcaccggccccggcttgccgggcattccgctggcgatcgtgcgcccggacgcgcatttcacgctgctcgacagcctgggcaagcgcgtgcgtttcctgcgtcaggtgcagcatgagctgggcctgaacaatatcgagccggtgcagagccgcgttgaggagtttccggccgagccaccgttcgacggcgtgatcagccgcgcgttcgcttcgctgcaggatatgctgtcctggtgccatcacctgccggcgaaagggcaggggcgtttttacgcgttgaaaggcgtgcgcccggatgaagagctggcgcagctgccggcgggcgttagcctggaatccatcgtgcggttgcaggtgcctgaattggaaggcgaacgccatctggtgattcttaaggcaaactga

SEQ ID NO: 425770 - DNA, 384 bp, Serratia marcescens
atgtctgtgtccctttacagcgggaaagtcgcacgcaaactgctgtttttgcagttaatgacttttgttctgatcagcgttgctttctggctgaaaagcccggaatggagcgcttcggcgctggcaggcggtctcgccgcctggttgccgagtgcaatgtttatgctgtttgccttgcgccatcaggcgcaaacgccggcgccctgtagggttgcctggtcgttcgccatcggcgaggggctaaaggtcgtgatcaccatcgttttgctgatcgtggcgctgggggtgttcaaggcggagtttataccgcttggcctgacctatttagcggtgttagtggtgcagatagtggcaccggccgtgattaacagttaccgaacttaa

SEQ ID NO: 425771 - DNA, 780 bp, Serratia marcescens
atgtctgcaggagaagtcttgactccacaggagtatatcggtcaccacctgacgcagcttcaggtcgggactgggttttggtcgattaacctcgactcgatgtttttctccgtcgtcctcggggcgctcttcctggtgatcttccgcaaagtggccaaaaacgccaccagcggcgtgccgggtaaactgcaaaccgccgtggagctggtggtcggtttcgtcgacagcagcgtgcgcgatatgtaccacggcaagagcaaggtcattgcgccgttggcactgaccgtgttcgtctgggtgttcctgatgaacctgatggacctcatcccggttgacttcctgccttatctcggcacccacgttctcggtctgcctgcgctgcgcgtcgtgcctaccgccgacgtgaacgtcacgctgtcgatggcgctgggcgtgtttatcctgattctgttctatagcatcaaaatgaaaggcgttggcgggttcgttaaagagttgaccatgcagccgttcaaccaccctgtattcattcctatcaacctgattcttgaaggtgtcagcctgctgtccaaacctgtttcactgggtctgcgactgttcggcaacatgtatgcgggtgagttgatcttcatcctgattgccggcctgttgccgtggtggtcacagtgggtcctgagcttgccttgggctatcttccacatcctgatcattacgcttcaagcctttattttcatggttctgacgatcgtctatctgtcgatggcgtctgaagagcactga

SEQ ID NO: 425772 - DNA, 240 bp, Serratia marcescens
atggaaaacctgagtatggatctgctgtacatggctgccgctgtgatgatgggtttagcggcaatcggtgctgcgatcggtatcggcatcctgggtggtaaattcttggaaggcgctgctcgtcagcctgacctgattcctctgctgcgtacacagttctttatcgttatgggtctggtcgacgccatcccgatgatcgctgtaggtctgggtctgtacgtgatgttcgccgtcgcgtaa

SEQ ID NO: 425773 - DNA, 471 bp, Serratia marcescens
gtgaatcttaacgcaacaatcctcggccaggccatcgcgttcgttctgtttgtctggttctgcatgaagtacgtatggccgccgatcatggctgccatcgagaaacgtcagaaagaaatcgctgacggcctcgcttctgcagagcgtgccaaaaaagatctggacttagcgcaagccaatgcgaccgaccagctgaaaactgctaaagcagaagctcaggtgatcatcgagcaagcgaacaaacgcaaagctcagatcatggatgaagcgaaagccgaagccgagcaggaacgtaacaaaatcgtggcgcaggctcaggctgagatcgaagccgaacgtaagcgcgctcgtgaagagttgcgtaagcaagtcgcgatgctggcaattgccggcgccgagaagatcatcgaacgttccgtggatgaagctgctaacagcgacatcgttgataaactggtcgctgaactgtaa

SEQ ID NO: 425774 - DNA, 534 bp, Serratia marcescens
atgtctgaatttgtcactgtagctcgcccctacgccaaagcagcttttgactttgccgttgagcaccaaagcgtagagcgctggcaggacatgctggcgtttgcggctgaagtcactcgcaatgaacagatttctgaactgctgtctggcgcggtcgcgccagaaacgctgtccaagacgttcatcgcggtttgtggcgatcggctcgacgaacatggccagaactttatccgtgtaatggccgaaaatggacgtttactggttcttcctgccgtgctgcagcagttcatcgaactgcgcgcctcgctggaatccaccgtcgaagtcgaagtgctctctgcgagcgcgctgagcgacgaacagcaggcgaaaatcgccgctgcgatggaaaaacgtctgtcacgcaaagttaagctgaattgcaaaattgacaagtctgtactggccggcatcgttgttcgcgccggcgatatggtgattgatggcagcgttcgcggtcgtcttgaacgcctgacagacgtcttgcagtcttaa

SEQ ID NO: 425775 - DNA, 1542 bp, Serratia marcescens
atgcaactgaattccaccgaaatcagcgaactgatcaagcagcgcattgctcagttcaatgtagtgagcgaagctcacaatgaaggtactatcgtttccgtcagcgacgggatcatccgcgtacacggcctggccgacgttatgcagggcgaaatgatcgcgctgcctggcaaccgttacgcaatcgcattgaacctggagcgcgactccgtcggtgccgtggttatgggtccgtacgcggatctggccgaaggcatgaaggttaaatgcaccggccgtatcctggaagttccagtcggtcgtggtctgctgggccgcgtagttaacaccctgggcgcgccaatcgacggcaaaggcccgattgagaacgacggtttctctccggtagaagctatcgcgccaggcgttatcgagcgtcaatccgttgatcagccggttcagactggctacaaatccgttgacgccatgattccaatcggccgtggccagcgtgagctggtgatcggtgaccgtcagaccggtaaaaccgcgctggcgatcgatgcgatcatcaaccaacgcgactccggcatcaaatgcgtttacgtggctatcggccagaaagcgtccaccatcgctaacgtggtgcgcaaactggaagagcacggcgcactggccaacaccatcgtggtggtggcgaccgcttccgaatccgctgcactgcaatacctggcgccatacgccggttgcgcaatgggcgaatatttccgtgaccgcggtgaagatgcgctgatcgtgtacgatgacctgtccaaacaggccgttgcttaccgccagatttccctgctgcttcgtcgtccgccaggtcgtgaagcttacccaggcgacgtattctacctgcactcccgcttgctggagcgtgcagcgcgcgttaacgccgaatacgttgaagccttcaccaaaggtgaagttaaaggccaaaccggttcactgaccgctctgccgatcattgaaacccaggcgggtgacgtttccgcgttcgttccgaccaacgtaatctcgattaccgatggtcagatcttcctggaatccaacctgttcaactccggtattcgtccggcagttaacccgggtatctccgtatcccgtgttggtggcgccgcgcagaccaagatcatgaagaaactgtccggcggtatccgtaccgcgctggcgcagtatcgtgaactggctgcgttctcccagttcgcatccgatctggacgacgcgacccgtaaacagctgagccacggtcagaaagtgaccgagctgctgaaacagaaacagtatgcgccgatgtcggtcgcacaacagtctctggtgctgtttgccgcagaacgcggttacctgaacgacgtcgaagtcgccaaagtggtgagcttcgaagccgcgctggtcgcctatgcggaccgcgagcacgccgagctgctgaaccacatcaaccaaactggcaacttcaatgatgagatcgagggcaagttgaaagacatcctcgagaccttcaagaaaacccagtcctggtaa

SEQ ID NO: 425776 - DNA, 864 bp, Serratia marcescens
atggccggcgcaaaagagatacgtagtaagatcgctagcgtgcaaaacacgcaaaagatcactaaagcgatggaaatggtcgccgcctccaaaatgcgtaaatcgcaggatcgcatggcggccagccgtccttatgcagagaccatgcgcaaagtgattggtcaccttgcgttagggaatctggagtacaagcacccgtacctggatgagcgtgacgttaagcgcgtcgggtatctggtggtgtctactgaccgtggtctctgcggcggcttgaacatcaacctgttcaaaaagctgctggcggagatgaaagcctggtccgaaaaaggcgtcgaaaccgatttggcgctgattggctctaaagcggcctctttctttggttccgtgggcggcaacgtggttgcccaggtgaccggcatgggggacaaaccttccctgtcggatctgatcgggccggtgaaagtgatgctgcaggcctacgacgaaggtcgtttggacaagctgtacattgtcagcaacaaatttgttaatacgatgtcccaagagccgcaggtgcttcagttgctgccgttaccgccagccgatgacgaagagctgaagaaaacgccttgggattacctgtatgaacccgatccaaaagtgctgcttgataccttgctgcgccgctatgtggagtcgcaggtttatcagggcgtcgtggaaaacctggccagcgagcaggccgcacgaatggtcgcgatgaaagccgcaaccgataacggcggtagcctgatcaaagagctgcagttggtatacaacaaggcgcgtcaggccagcatcactcaggaactcaccgagatcgtttcgggagcctccgcggtttaa

SEQ ID NO: 425777 - DNA, 1383 bp, Serratia marcescens
atggctactggaaagattatccaggtaatcggcgccgtggtggacgtcgagttccctcaggatgccgtaccgaaagtgtacgacgcccttgaggtagaaaacggcaccgaaaaactggtgttggaagttcagcaacagctgggcggtggcgtggttcgctgtatcgcaatggggacctccgacggtctgcgtcgcggtctgaaagtgaacaacctggaccacccgattgaagtgccggtgggtaaagctaccctgggccgtatcatgaacgtattgggtcaaccgatcgacatgaaaggcgacatcggtgaagaagagcgttgggcgattcaccgcgcggcgccaagctacgaagagctgtccagctcccaggaactgctggaaaccggtatcaaggtaatggacctgatttgtccgttcgccaagggcggtaaagtgggtctgttcggcggtgcgggcgtgggtaaaaccgtaaacatgatggagctgatccgtaacatcgcgatcgagcactccggttattccgtgtttgcgggcgtgggcgagcgtactcgtgagggtaacgacttctaccacgaaatgaccgactccaacgttctggacaaagtatccctggtttacggccagatgaacgagccaccgggtaaccgtctgcgcgttgcgctgaccggcctgaccatggcggagaaattccgtgacgaaggccgtgacgttctgctgttcgttgacaacatctaccgttacaccctggccggtaccgaagtgtccgcacttctgggccgtatgccatccgcggtaggttatcagccaacgctggcggaagagatgggcgttctgcaagaacgtatcacctcgaccaagaccggttccatcacttccgtacaggccgtttacgttcctgcggatgacttgactgacccgtcaccagccaccacctttgcgcacttggacgcaaccgtggtactgagccgtaacatcgcttctctgggtatctacccggccgttgacccgctggattccaccagccgtcagctggatccgctggttgttggccaggagcactacgacgtagcgcgtggcgtgcagtccattctgcaacgctaccaggaactgaaagatatcatcgcgatcttgggtatggacgagctgtctgaagaagacaaactggtcgtatcccgtgcgcgtaagatccaacgcttcctgtctcagccgttcttcgtggcagaagtcttcaccggttctccgggcaagttcgtatcgctgaaagacaccatccgtggtttcaaaggcattatggacggcgactatgaccacctgccggagcaggcgttctacatggttggcaccattgaagaagcagtggaaaaagccaagaaactgtaa

SEQ ID NO: 425778 - DNA, 420 bp, Serratia marcescens
atggctatgacttaccatctggatgtagtcagcgcggaaaaacagatgttttccggcctggtgcagaagatccaggtgacaggcagcgaaggtgaactggggatcttccctggccatgcgccgctgctgactgccatcaagcctggcatggtgcgtattgttaagcagcacggtgaagaagagttcatctacctgtccggcggcatcctcgaggtgcagccgagcgtggttaccgtgctggcggacactgctatccgtggtactgacctcgacgaagcgagagcgttggaagctaagcgtaaagctgaagaacacattcgcagctctcatggcgatgtcgactatgctcaggcatccgctgaactggcgaaagcgatcgcaaaactgcgcgttatcgagctcaccagaaaagcgatgtaa

SEQ ID NO: 425779 - DNA, 1374 bp, Serratia marcescens
atgtcgaacagcgcaatgagcgtggttatcctcgccgcgggcaagggaacacgcatgtattccgatcttcccaaggttttacatccgttggccggtaagccgatggtgcaacacgtcattgatgccgcgatgaaactgggcgcgcaacatgttcacctggtatacggccacggcggcgatctgctgaaaagcacgttgactgacggcgcgctgaactgggtgctgcaggccgagcaattgggtaccggccatgcaatgcagcaggccgcgccgcactttgccgacgatgaagacgtgctgatgctgtacggcgacgtgccgttgatctccgtggatacgctgcaacgcctgctggcggccaaaccgcagggcggtatcggtctgctgacggtcaagctggacgatccgagcggctacggccgcatcgtgcgcgagcagggcaacgtggtgggcatcgtcgaacacaaggatgccaacgaggcgcagcgccagatcaacgagatcaataccggcatcctggtggcgaacgggcgcgatctgaagcgctggctggggatgttgaataacgacaacgcacagggcgagttttacatcaccgatattattgcgttggcccatgccgacggcaagaaaatcgaaaccgtgcacccgtcgcgcctgagtgaagtggaaggcgtgaacaaccgcctgcaactggcgaccttggagcgcgtcttccagtcggaacagtctgaaaagctgctgttggccggcgtgatgctgctggatccggcgcgttttgacctgcgcggggaacttgttcacggccgcgacatcactattgatgcgaatgtgattatcgaaggtcacgtcaagctgggcgaccgggtgaaaatcggcgccggctgcgtgctgaaaaactgcgtgatcggcgatgactgcgagatcagcccttacagcgtgctggaagacagcgtgctggaagccgactgcaccgtggggccgttcgcccgcctgcgccctggcgcggagctggcggcaggggcccacgtcggcaacttcgtggaaatgaaaaaggcgcgtttgggcaaaggctccaaggccggccacctcagctacctgggcgatgccgaaatcggcgatgacgtgaatatcggcgccggcaccatcacctgcaactacgatggcgccaacaagcacaagacgctgatcggcgacggcgtgttcgtcggttccgatactcagctggtggcgccggtgtcggtcggcaaaggctccaccatcgccgccggcaccacggtgacgcgcgatatcgccgagaacgaactggtgctgagccgcgtcaagcaggtgcacattcagggctggcaacgcccggtgaagaagaaatcatag

SEQ ID NO: 425780 - DNA, 1830 bp, Serratia marcescens
atgtgtggaattgtaggcgcagtagcgcaacgtgatatcgcagaaatcctgttggaaggtttacgccgtctcgagtaccgcggttacgactccgccggtctggcggtggtcgacgaaaaaggcaacgtcagtcgcctgcgtcgcgtaggcaaggtgcaaaaactggccgaagcggcggagcagaccgatctgcacggcggtaccggcatcgctcacacccgctgggcaacgcacggtgaaccgaccgaagcgaacgcgcacccgcatgtttccgactacattaccgtggtgcataacggcatcatcgaaaaccacgaaccgctgcgcgaactgctgatcgaacgcggttaccgcttcagctccgaaaccgacaccgaagtgatcgcgcacctggtgcactgggaacaacaacagggcggcacgttgctggaagtggttcagcgcgtgatcccacagctgcgcggcgcttacggcaccgtggtgatggacagccgcgatccgagcgtattggtcgcggcgcgctccggcagcccgctggttatcggccgcggcgtcggggaaaactttatcgcttccgatcagctggcgctgctgccggtcacccgccgcttcatcttcctggaagaaggcgacgtggtggaagtgactcgccgcaccgtcaacatcttcgacaagcagggcaacgccatcgagcgccctgagatcgaatcccaggtgcagtatgacgccggcgacaagggcgcttaccgtcactacatgcaaaaagagatctacgaacagccgctggcgctgaaaaacaccctggaagggcgtttcagccatggccaaatcaacctgagcgagctgggcccgcgcgccgacgagctgctggccaaggtgcagcacgtgcagatcatcgcctgcgggacttcttaccactccggtatggtggcgcgctactggtttgaagcgttggccggcgtgccgtgcgacgtcgagatcgcgtccgaattccgttaccgcaaatcggcggtgcgtccgggcagcctgatcatcaccctgtcgcagtccggcgaaaccgccgatacgttagcggcgctgcgtctgtccaaagagctggggtatctcggttcgctggcagtttgtaacgtggccggctcttcgctggtgcgcgaatcggatctggcgttgatgaccaaagcgggcacggaaatcggcgtggcctcgaccaaggctttcaccacgcagctcaccgtgctgttgatgctggtggcgcgtctgggccgcctgaaaggcatggcggaaagcgtggagcaggaaatcgtgcatggcctgcaggcgctgccggcgcgtatagagcagatgctgtcgatggataaagagatcgaagcgctggcggaagggttctccgacaagcaccatgcgctgttcctcggccgcggcgatcagtatccaatcgccatggaaggggcgctgaagctgaaagagatctcctatattcacgccgaagcctatgcggcgggtgagctgaaacacggcccgctggcgctgatcgacgccgatatgccggtgatcgtggtggcaccgaacaatgaactgctggaaaagctgaagtccaacattgaagaagtgcgcgcgcgcggcggccagctgtacgtgttcgccgatcaggacgccggcttcgtcagcagcgaaggcatgactatcattcctctgccgcacgtcgaggaaatcgtggcgccgatcttctacaccgtgccgttgcagctgctgtcttaccacgtggcgctgatcaaaggcaccgacgttgaccagccgcgcaacctggcgaagtctgtcaccgtagagtaa

SEQ ID NO: 425781 - DNA, 1041 bp, Serratia marcescens
atgaaactgatgcgtaccaccgtcgccagtattgtggcagcgaccttctccctgaccaccgtgtccgcgttcgctgctgccagcctgaccggtgcaggtgcgacattccccgctccggtttacgccaagtgggcagattcttatcagaaagaaaccggcaacaaagttaactatcagggcatcggctcctctggcggcgtgaagcaaatcgtggccaacaccgttgactttggcgcttccgacgccccgctgtctgacgacaaactggcggccgatggcctgttccagttcccgaccgtgatcggcggcgtggtgctggccgtgaatatcccgggcatcaaatccggcgaactgacgctggacggcaaaaccctgggcgatatctacttgggcaacgtcaaaaaatggaacgatccggctatcaccaagctgaacccaggcgtgaaactgcctgaccagaacatcgccgtggtgcgccgcgccgacggttccggcacctcgttcgtgttcaccagctacctgtccaaggccaatgcgcagtggaaagagaagatcggcgccggttctaccgttaactggccgaccggtctgggcggtaaaggcaacgacggcatcgccgccttcgttcagcgtctgcctggctctatcggctacgtagaatacgcttacgccaagcagaacaacctggcttacaccaagctggtatccgccgacggtaaaccggtcagcccgaccgaggagagcttcagcaacgcggccaaaggcgtggattggagcaagaccttcgctcaggatctgactgaccagaaaggcgacaacgtgtggccgattacatccaccaccttcatcctggtgcacaaagagcagaaaaaccctgctcagggcgccgaagtgctgaagttcttcgactgggcttacaaaaccggtgccaagcaggctaacgagctggattacgccaccctgccggcagaagtggttgagcaggtgcgcgcggcctggaaaaccaacgtaaaagacagttcaggcaaagcgctgtactaa

SEQ ID NO: 425782 - DNA, 957 bp, Serratia marcescens
atggctgagtacaagccgaccatcaaagcaccgggcaaaaacggtgacatcattttcagcgcgctggtgagactggctgcgctgattaccctattgttgctgggcggcatcattgtttcgctgatcttcgcctcctggccaagcatgcagaaattcggcttcgccttcctgtggaccaaagagtgggacgcgccggcggagcagttcggcgcgctggtgccgatctacggcaccgtggtcacctcgcttatcgcgctgatcatcgccgtgccggtgagcttcggcatcgcgctgtttctgaccgagctggcgcctaactggctgaagcggccgctgggcatcgccattgagctgttggcggccatccccagcatcgtttacggcatgtggggcctgttcgtgttcgcgccgctgttcgccgaatacttccagacgccggtcggcgaagtgctgtcgggcattccgatcgtcggcgagctgttctccggcccggccttcggcatcggcattctggccgccggggtgatcctggcgatcatgatcattccttacatcgcggcagtcatgcgcgacgtgttcgaacagaccccggtgatgatgaaagagtcggcctacggcatcggctgcaccacctgggaagtcatctggcgcatcgtgctgccgttcaccaaaaacggcgtcatcggcggcgtgatgttgggcctgggccgtgcgctgggggaaaccatggcggtgacctttatcatcggcaacacctaccagctcgacagcgcttcgctgtacatgccgggcaacagcatcacctcggcgctggccaacgaattcgccgaagccgagtccggcgtgcacaccgccgcgttgatggagctgggcctgattctgtttgttatcacctttatcgtgctggcgctgtcgaaactgatgatcatgcgtctggccaagaatgaggggcgttaa

SEQ ID NO: 425783 - DNA, 891 bp, Serratia marcescens
atggcgacgatggatatgcaaaacgcagtcgttctggcggaaagccgccgcaaaatgcaggcctggcgccggcagaaaaaccgtctcgcgctgttcctgtcgatggcgaccatggtgttcgggctgttctggctgatctggatcctgatcgccaccgtgaccaaaggcttcgacggcatgtcgctggcgctgttcactgaaatgaccccgccgccgaacaccgcaggcggcggtctggccaacgccatcgccggcagcggcctgttgatcctgtgggcgaccatcttcggcacgccgctgggcatcatggccggcatttacctggcagaatacggccgtaaatcctggctggcggaagtgatccgctttatcaacgacatcctgctgtccgcaccgtcgatcgtggtgggcctgttcgtttacaccatcgtggtggcgaagatggaacacttttccggctgggccggcatcgtcgcgctggcgctgctgcaggtgccgatcgtcattcgcaccaccgagaacatgctgaagctggtgccggatacgctgcgcgaggccgcttatgcgctgggcacgccgaaatggcgcatgatttccgccatcacgctgaaggcgtcggtgtccggcatcatcaccggcgtgctgctggcgattgcgcgcatcgcgggggaaacggcgccgctgctgttcacctcgctgtcgaaccagttctggagcaccgacctgatgcagccgatcgccaacctgccggtgaccatcttcaaattcgccatgagcccgttcgccgaatggcaacagctggcctgggccggggtgctgttgatcaccctgtgcgtactgttactgaatatcctggcgcgcgtgattttcgccaagaaaaagcattcataa

SEQ ID NO: 425784 - DNA, 777 bp, Serratia marcescens
atgagtatggttactgacgcttccagcagcaaaattcaggtacgcgatctgaacttctactacggcaaattccatgcgctgaagaacatcacgctggatatcgccaagaacaaggtcaccgcgtttatcggcccgtccggctgcggcaaatccaccctgctgcgcaccttcaacaagatgtaccagctgtacccggaacagcgcgcggaaggcggcatcctgctggacggccagaacatcctgaccgacaactcggatatcgcgctgctgcgcgccaaggtcggcatggtgttccagaagccgacgccgttcccgatgtcgatttacgacaacatcgccttcggcgttcgcctgtttgaaaagctgtcgcgcgccgatatggacgagcgcgtgcagtgggcgctgaccaaggcggcgctgtggaacgaaaccaaggacaagctgcaccagagcggctacagcctttccggcggccagcagcaacgcctgtgcatcgcccgcggcatcgccattcgcccggaagtgctgttgctggatgagccttgctcggcgctggatccgatctccaccggcaagattgaagagctgatcagcgagctgaaggccgattacaccgtggtgatcgtaacccacaatatgcagcaggcggcgcgctgctccgactccaccgcatttatgtatctgggcgagctgatcgagttcagtgatactgataacctgttcactgcgccgcagaaaaagcagactgaagactacatcactggccgttatggttga

SEQ ID NO: 425785 - DNA, 735 bp, Serratia marcescens
atggataacctgaatttaaacaaacacatttccggccagttcaacgcagagcttgagcatatccgcacccaggtgctgaccatgggcgggctggtggagcagcagctgaccgacgccatcaccgcgatgcacaatcaggatggcgagctggccaagcgagttatcgaaggcgacgccaaggtcaacatgatggaagtggcgatcgacgaagcctgcgtgcgcatcatcgccaagcgccagccgaccgccagcgatctgcgcctggtgatggcgatcatcaaaaccatttccgagctggaacgcatcggcgacgtggcggacaaaatctgccgcaccgcgctggagaagttctcgcaccagcaccagccgctgctggtcagcctggaatcgctggggcgccacacagtgcaaatgctgcacgacgtgctggacgccttcgcgcgcatggatctggacgaggcgatccgtatttaccgcgaagataaaaaggtcgaccaggaatacgaaggcatcgtgcgtcagctgatgacctatatgatggaagactcacgcaccattccgagcgtgctgaccgcgctgttctgcgcccgttctatcgagcgtatcggcgaccgctgccagaacatctgcgaatttatcttctatttcgtcaaaggacaggatttccgtcatttgggcggcgacgccctggaaaagctgctctccccgggcggtaaagacgacaaagccgactga

SEQ ID NO: 425786 - DNA, 840 bp, Serratia marcescens
atgaaacatcgcgctttggccttaacgttgttagccagtctgaccggcctcgccgccggcgccgcgcacgcggacaaacttgacgatatcaagcaagccggcgtggtgcgtatcgcggtgttcgacagcaacccgccgttcggctacatcgatccgcagagcaagaagctggtgggctacgatgtggacgtcgccgatgcgatcggcaaagcgctgggggtaaaagtggagctgcgcgccaccaacccggccaaccgcattccgctgctggtgtcgaagaaggttgacctgattgccgccaacttcaccattaccgacgagcgcgccaaggaagtgaacttcagcgtgccgtacttcgccaccggccagaaattcatcgcccgcaaaggcgtgctgaaaaccccggaagacatcaaaaaactgcgcatcggcgcggacaagggcacggtgcaggaaatcaccctgcgcgagcgtttcccgacggcgaaagtgatctcttacgatgacaccccgctggcgtttgtggcgctgcgcaacggcaacgtgcaggcgatcacccaggacgacgccaagctggttggcctgctcggcaacctgccggcggcgcagaaggcggagtttgaaatttcaccgttcagcctgaccaaagagtaccagggcgtcggcattcccaagggcgaagatcgcctgaccgccgcggtgaacgagacgttgatcaaactggaaaaagacggcgaagcggttaagatttacgatcgctggttcgggccggaaacccaatccgcccaaccgcgcggcgatttcaaaatcgcgcctttggatcagcaaccgaaagcctga

SEQ ID NO: 425787 - DNA, 714 bp, Serratia marcescens
atgaacctggactggctgctggcgccgcaatacctgagctggctgtggcacggttttctgctgacgctgtggctttccgcctgcgcgggcctggcggccacgctgctgggcttcgtgctggcggcgatgcgcgacagcagcctgcggccgttgcgctggctggcgatgggctacagctcgctgtttcgcaatacgccgctgctggtgcagctgttcttctggtacttcgccgccgggcagatcctgccgtccgccgccatgcagtggctgaacagctcacatcaggtcggcccgctggaatggccgtcgttcgagtttctcgccggtttcttcggcctgacgctctactccaccgcctttatcgccgaagagatccgttccggcattcgcggcgtcgccggcgggcagaaatatgccgcgcaggcgctggggctgaccggctggcaggcgatgcgctacgtggtgctgccgcaggcgctgaaaatcgcgctgccgccgctgctggggcaatacatgaacgtgatcaagaactcgtcgctgaccatggcgatcggcgtggccgaactctcttacgcctcgcgtcaggtcgaaaccgaaaccctgcgcaccttccaggcgttcggcgtggcgacggtgctgtatatcgccatcatcgcgctgctggaaggctggggcatgtggcgccaacagcgtaaaccgctgggagggcattga

SEQ ID NO: 425788 - DNA, 741 bp, Serratia marcescens
atggatttcagcgtaattcacgataacctgggctacctgctgtggggcacctggccggatggtccattaggcggcgcggcgctgacgttggcgatcagcctgatggccggcgtcgcctcggcggtgctaggcaccttgctcggcgtggcgctggcgatgtcgcgcggcgtcgctgccggattgctggcggcggtgctgggctttttccgcgccataccggtcatcatgctgatcttctggacctatttcctgctgccgatggtgtttggcgtcgagatcccggaaatcaccaccgtggtgtgcgcgctggcgctgatcgcttcggcctatctggcccatgcggtgaaggccggcatcgccgcgatcggccccggccagtggcaggccgggctttccctggggctgacccgctggcagacgctgcgcatgatcgtgctgccgcaggcgctgcgcatgatggtgccgtcgttcatcaaccagtggatatccctgatcaaagacacctcgctggcttatatcgtcggcgttggcgaactgaccttcctggcgacccaggtcaacaaccgcagcatggtctatccgatggaagtgttcctgttcgtggcgctggtctatttcgtgttctgcctggcgctcgatctgctggccaacgcggtcaaccgccgcttcggcgcgcaaacccgcgcgctgaagcggtcgtggcgctggtggcgcaacaagccaccgttgccggccagttaa

SEQ ID NO: 425789 - DNA, 669 bp, Serratia marcescens
atgaatcagattgactgcattttgttcgactgcgacggcacgctggtggacagcgaagtgctgtgcagcaaagcctatgtgcacatgttcgcccgctacggcattcatctgtcgctggaagaggtgttcaagaaatacaaaggggtgaagctgtacgagatcatcgatcgggtcaacgccgagcagggcactgacctggcaaaagaggcgctggagccgctgtatcgccaggaagtggcgcggctgttcgacagcgaactgcaacagattcccggcgcccgcgagctgctggcgcaggtgacggtgcctgtctgcaccgtctccaacggaccggtcagcaagatgcagcactcgctcggcctgaccggcatgctgccttattttgatgaccggttgttcagcggctatgacattcagcgctggaagccggatccggcgatcgtgtatcacgccgccgaacagatgcaggtgccggtaacgcgctgcatcctggtagatgactcgcccgccggcgcgcaggctggtatcgccgccggcattccggtcttttacttctgcgccgatccgcataacccgccgatcgaccacccgctggtgacgacgtttaacgacctggcccagctgcccgcgctgtggcgcgaacgcggctggcggctgacggccgattaa

SEQ ID NO: 425790 - DNA, 405 bp, Serratia marcescens
atgtcttcaacctttatcgataagctcgcgttgatcgcgctgaaagatgacaaagtggcgctggtgcgttcacacaataagacgctgttttatatgccgggcggaaagcgcgaagcgggcgaaaccgacgaacaggcgctgtgccgcgaaatcgacgaagagctgaccgtcacgctgcagccgagctccatcgcgttttacggcgagttcgccggcccggcggacggcaagcaggacggcacccaggtgcgcattcgctgctatcaggccgacgttaccgggcagctgcagccggccgccgaaatcgccgaactgaggtggtgcgacagccgcgatttgccgcactgctcacacgtcgccgcgctgattttgcacgatctcaaggcgcgtaacctgatcaagtga

SEQ ID NO: 425791 - DNA, 1338 bp, Serratia marcescens
atgaccaaaccagtatctggccttgacgctgagcaaggcttgcttgggcgcgtgtttaaactcaagcaacatggcacgacggcgcgtacggaaacgattgccggtatcaccaccttccttaccatggtgtatatcgtgttcgttaacccgcaaattttgggcgcggcgggcatggatacccaggcggtatttgtcaccacctgtttgatcgccgctttcggcagcatctttatgggcctgctggcgaacctgccggtggcgctggcgccggcgatgggcctgaacgccttcttcgccttcgtggtggtcggggcgatgggcatctcctggcaggtgggcatgggcgccatcttctggggggcggtaggcctgctgctgctgaccattttccgcatccgctactggatgatcgccaacattccggtcagcctgcgggtcggcatcaccagcggcatcggcctgttcatcggcatgatggggctgaaaaacgccggcatcgtggtggccaacccggacacgctggtgaccatcggcagcctgacctcgcacaacgtgctgctgggggcgctcggtttcttcatcatcgccgtgctctcttcgcgcaacttccacgcggcggtgctggtgtcgatcgtggtcaccaccctgatcggctggatgctgggcgacgtgaaatacggcggcctgttctccctgccgccgagcatcacctcggtggtgggccaggtcgacgtggccggcgcgctgaacatcgggctggccgggatcatcttctcgtttatgctggtgaacctatttgactcttcgggcaccttgatcggcgtcaccgataaagccggcctgaccgacaaccagggaaaattcccgcgcatgaagcaggcgctgtacgtcgacagcatcagctcggtggccggttcgctggcgggcacctcttccgtgaccgcttacatcgaaagttcgtccggcgtcgccgtcggcggccgcaccggtttgacggcggtggtcaccggcctgctgttcctgctggtgatcttcctgtcgccgctggcgggcatggtgccggcttacgccgccgccggcgcgctgatctacgtcggcgtgctgatgacctccagcctggcgcgggtgaagtgggacgatctgaccgaagcggtaccggcgtttgtcaccgcggtgatgatgccgttcagcttctcgatcaccgaaggcatcgcgctcggctttatctcctactgcgtgatgaagctcggcaccggccgctggcgtgaaatcagcccgtgcgtggtggtggtggcgctgctgttcgtgctgaagatcgtcttcgtcgacggccattga

SEQ ID NO: 425792 - DNA, 1053 bp, Serratia marcescens
atgtattttttcattttagcgttattttttgtttccatcaccagtcccgctttcgcggcagagatgcgttatcccgccggtgaagagccgctggagctgccggcacacagcgcgctcaacgcccagctgtcgcgatccgcgcaaaaccaggaagataaaaagctgggcgccatgtcgctgtacctgacgctgatgcgcgaagacggccgcaacgtctgggcgccctaccagctggcggtgtcatcggcggagaaagggcaaaccgagctggcggagcgctacctgcagctgagcgccgaccgcggcctgtggtactactacaacctgctggaggacgacgccttcaacagcatccagcactccgccacctaccaatcgatcctggccgccaccaaagcgcgctatctgcagcacgcccgccactatgaaggcaaggccagctacgcgatgccggacggcgaagcgccgcccgaaggctggccaacggtgatcttcctgcatacctacggcaaagccgccgccatcagccccgaagaacggctgctgttcggcgaaatgggcgtggcctacatcgagctcaacggcacgcagatgctgtcggaaaacagtttccgctggtcgaattacagcgacgagagcacccaaaccgccattcagcgtacgctgcaacagctggctccgcagctaaagctgaatccccggcggatttacctcagcgcccgcggccagggcgcgctgcacgccgccaacctgatcgcgaagtacccgcagttttacgccggcgcgctgctgatcgcccccaacggcgagatcaagccggcccagcagtcgctggcggcgcaaaagaaaatcgtgatggcgtattacgatcggcagaatttcagcgagcaggcgctggcgttgcacttcgccaatctgttcggagaggataatcaggtagaaacgctgcacttcgcccagggagaggatgccgccggcagttggcaggcgcgcttcaagcggccgttgcagtgggtgttgggtaaggcgccggatgcgacgccgggcgcctag

SEQ ID NO: 425793 - DNA, 567 bp, Serratia marcescens
atgtcagaccaagccttgaaaatcgtcactctgctcggcagcctgcgcaaaggctcctacaacgccatggtggcccgcgccctgcctgggctggccccacaaggcgtcacaattgaagcgctgccttccatccgcgatatcccgctgtacgacgccgacatgcaacagggtgaaggcttccctgccgctgtcgaggcgatcgccgaacagatccgccaggccgacggcgtgatcatcgtcacccctgaatataactattccgtgcccggtgggttgaagaacgccatcgactggctgtctcgcttgccgaatcagccgctggccggcaagccggtcgccattcagaccagctcgatggggccgatcggcggcgcgcgctgccaataccacctgcgccagatcctggtgttcctcgatgcgatggtaatgaacaagcctgagtttatgggcggcgtgatccagagcaaggtcgacgaacaggccggtgaactgagcgatcagggaacgctggattttctgaccggccagctgtctgcgttcagcgattttattcgccgcgtggagtga

SEQ ID NO: 425794 - DNA, 726 bp, Serratia marcescens
atggcgtgtcattttgcccgctggaccccggcctccgctgtcctggatacccaaagactctccgacgaagtgatagccgccacccgcaccttttccgttaaacgccgcacgcgctacctgcaagggcgcattctgctcgccgaaatgatgttctatctgtacggcctgccgacgctgccccccatcgccaccacgccgaccggccgcccctgtttcgccgatcatcagttgcccgatttcagcctcgcttacgccagcaacaccgtgggcgtgctgctcagcgacgagggcaaagtcggactggatatcgaagtaatgcgcgcgcgcggcacccggcaaagcgcgctgcaacacgcgcatcagacgccagcggaaagtgcctggatcggcgcgcaggacgatcggctggaggcagagactcagctgtggagcatccggcaaagcgtgctgaaaatttccggcctcggcaacagcggccaggctacgctgcgtctgcatcccttctccggccacctgcgctccagcgccacgccggacgttcaggtgatgagcgacgccgacgaatacctgagctgggcctgcgccggcagccccggcctggaccgcctgctgtgctggcgctacgaagagcgccgcggcctgcacaaagacggggaaatctcgccgcgcagcccggcggcatcctcgcgcttcgttaaactgacgggcctgaagacgcccggttaa

SEQ ID NO: 425795 - DNA, 1314 bp, Serratia marcescens
atgaacgaacctttagacttgattggcgtgggattggggcctttcaatctcagtctggccgctctggccgccgaaagcggcgccgtcaactatacctttctcgatcgtaacgcgagcttccgctggcaccccggcatgctgctgccttccgcttatatgcagacatatgtgctgcaggatttggttaccgccgtcagcccacgcagccaattttcatttattaattacttggtcgaacagaaaaaaatttatcggtttttaatcaccgagcagcaaattatcagccgagaagaattttccgactatctacgctgggcctgcgaaagattagacgggctacagttttcacagtccgtagagcgcattgattttgacgatgaaaagagtttgttcaaggtaaccacccataatcagacgctgtgggcgaaaaatatctgtctgggcaccggccataacccttggttaccgaaagcgttttacccggcgctgggcgaaaactgcatgcatgccgccgaaatagccctgcgcaatccggacttcagcggcaagcgagttatggtggtgggcggcggccaaagcggcgccgatgtgtttttgaacgcattgcaggggcactggggcgaaccggcgcagctggactggctctcgcgccgtcccaattttcagccgctggatgagtcccccttcaccaacgaatatttcactcccgaatacgtcgactatttctatacactgccgtcagaaatccgcgagcgtgaaatcaaaacacagaaattgccggcagacggcatcagcaatcatacgctgcgaaccctataccgtgagctatatatgcgttttgacgtgatgcgccagacgcgcaatgtgcgtttactgcctcatcgcaccctactggccatcgaatcaatgggtgaagcttttcatctgcgcacgcttcacggcctggaaaatcgccaggaaagtttcagggccgatatcgtcattctggccaccggctatcgcgcttcgctgcccgcttacctgaaacccttgctgccgcgcattcctctcgatgcggaacagcatctgccgctactgccgaattttaatctggactggctcgggccggagcaaaatcgaatttatgcggttaatgccggaatacacagccacggcagcgcagaaggcggactgagcctgatggcctggcgttcagcccgcatcctcaatcacttgctgggtaagccgtgctttgatttggcaccgaacgcatcaatgatccaatggtggagcgatgccgcgccgggcgatatctctaccaccgctgataaatag

SEQ ID NO: 425796 - DNA, 1365 bp, Serratia marcescens
atgagcaccaccgataccatcgtagcccaagccaccccgccgggacgcggcggcgtcggcattctgcgcatttccggaagcaaggccaaagacgtcgcccaggcgttgctcggcaagctgccgaagccgcgctacgctgactatctgccgttccgcgacgccacgggtgccaccctcgatcagggcatcgcgctgtggttcccggggccgaactcctttaccggcgaagacgtactggaactgcagggccacggcgggccggtgatcctcgatctgttgctcaagcgcgtgctggcgctgcccgacgtgcgtatcgcccggcccggcgagttctccgaacgcgcgtttctcaacgacaagctcgatttggcgcaggccgaagcgatcgccgatctgatcgacgccagctccgagcaggcggcgcgctcggcgatgaactcgctgcagggggcattttccacccgcatccaccagctcgtggaagcgcttactcacctgcgaatctacgtggaagcggcgatcgacttcccggacgaggaaatcgacttcctgtccgacggtaaaatagaagcgcagctcaacgacgtgatggcggatctggatagcgtacgcggcgaagcgcgccagggcagcctgctgcgcgaagggatgaaggtagtgatcgccgggcgccccaacgccggtaaatccagcctgctcaatgcgttggccgggcgcgaggcggcgatcgtcaccgatatcgccggcaccacccgcgacgtcctgcgcgaacatatccatatcgacggcatgccgctgcacatcatcgacaccgccggcctgcgcgacgccagcgacgaagtggagcgcatcggcatcgaacgtgcgtggaacgagatcgaacaggccgacagagtgctgtttatggtcgacggcaccaccaccgccgccaccgagccggcggagatctggccggagtttatggcgcgcctgccgggcacgctgccgatcaccgtggtgcgcaacaaggccgacatcaccggtgaaacgctgggtctgacagaagtgaacaaccactcacttattcgcctgtcggcccgcaccggcgaaggcgtcgatgtgctgcgcgatcatcttaaacagagcatgggcttcaccagcaacatggaaggcggcttcctggcgcgccgtcgtcacctgcaggcgctggagctggcggcacagcacctggtgcaaggcaaagaacagttagtgagcgcttacgcgggcgagctgctggccgaggaactgcgccaggcgcagctggccttgagcgaaatcaccggcgaattcacctcagacgatctgctgggccgcatcttctccagcttctgcatcggcaaataa

SEQ ID NO: 425797 - DNA, 1638 bp, Serratia marcescens
atggattcgcaacgcaatcttctcctcatcgctctgctgttcgtgtctttcatgatctggcaggcatggcaaacggacaacgctccgcagccggccgcacagaccacgcaacagacttcgaacgcagtagccggtgatgccgccagccaggccgtgccagccagtggtcagggtaagctgattaccgtgaacaccgacgtgctgtcactgaccatcaacacccgtggtggcgatatcgagcaggctaaactgttggcctacccggatactctgggttcatcgactccgttccaactgctggaaaccactccgtcgttcgtctatcaggcgcaaagcggcctgaccggtaaaaacggcccggacaacccggccaacggcgaacgcccgctgtatcaggcggcgcaagacagctacaccctgccggaaggccaggacgagctgcgcatcccgctgacctacaccgataaagacggcgcagtctacaccaagaccttcgtgctcaaacgcaaccactatgcggtcggcgtggattacagcatcgacaacaaaggcgcgacgccgctggagctgaccctgttcggccagctgaagcagaccaccgaattgcctaaacaccgcgacaccggcagcagcaacttcgcgctgcacaccttccgcggcgcggcgtactcgtccagcgaggacaagtaccaaaaatacgcgttcgacaaagatgaaaacctgagcgtcaccaccaaagacggttgggtcgccatgctgcaacagtacttcgccaccgcgtgggtaccggcgaccaaaggtgacaacaccttctacaccgccaaaccgggcgacaacctgtccaccatcggcttcaaatctacgccggtcgtggtgcagccaggcgctcagcagcagctgaacgcgaccctgtgggtcggcccggagctgcaggatcagatggcccagctggcgccgcacctggacctgaccgtggattacggctggctgtggttcatctcccagccgctgttcaaactgctgaagttcatccacggctttatcggcaactggggcttctccatcatcatcatcaccttcatcgtgcgcggcatcatgtacccgctgaccaaggcgcagtacacctcgatggcgaaaatgcgcatgctgcagccgaaactgcaggcgatgcgcgagcgtatcggcgatgacaaacagcgcatgagccaagagatgatggcgctgtacaaggcggagaaagtgaacccgctcggcggctgtctgccgctgatcattcagatgccgatcttcctggcgctgtactacatgctgatgggttcggtcgagctgcgccacgcgccgttcgccctgtggatccatgacctgtcggcgcaagacccgtactacatcctgccaatcctgatgggcgtgacgatgttcttcattcagaagatgtcgccgaccaccgtgactgacccgatgcagcagaaaatcatgaccttcatgccggtgatcttcacagtgttcttcctgtggttcccgtccggtctggtgctgtactacatcgtcagtaacctggtgaccatcctgcagcagcagctgatttaccgtggtctggaaaaacgcggcctgcacagccgcgacaagaaaaaaagctaa

SEQ ID NO: 425798 - DNA, 327 bp, Serratia marcescens
ttgttaactcccactcatttcactttcgtcttccagcagccacaacgggctggcacgccgcaaattaccatcctcggccgcctgaaccagctggggcatccccgcatcggtcttaccgtcgccaaaaaacacgtcaaacgcgcgcacgagcgtaatcggatcaaacgcctaacccgcgaaagcttccgcctgcgccagcacgaattaccggcgatggattttgtcgtggtggccaaaaaggggatagcggatttggataaccgcgcgctgacggaagctttggataaattatggcgtcgccactgtcgccaggctcccgcatcctga

SEQ ID NO: 425799 - DNA, 1326 bp, Serratia marcescens
atgtggatacgcccattgcaggcggaactgagtgacaacaccctggcgctgtatgcgcctaaccgctttgtgctggattgggttcgcgataagtacttaaacaacatcaatggtctgctgaatgatttctgcggcacggacgcgcctttgctgcgttttgaagtcggcagcaagccgatcgcgcaggtgatcagccagaccgtgaccgccagcgtcagcagcgcccctgcggctcccgcggcgcgcacggccgcgcctttgcgcccgagctgggacaacgcggcggcgcaacccgagctctcttaccgctccaacgtcaaccccaaacacaccttcgacaacttcgtcgagggtaagtccaaccaattggcgcgcgcggcggctcgtcaggtggcggacaacccgggcggcgcctataacccgctgttcctgtatggcggcaccggcctgggtaaaacccacctgctgcacgcggtcggcaacggcatcatggcgcgcaaggccaacgccaaagtggtctacatgcactcggaacgcttcgtgcaggacatggtcaaagcgttgcagaacaacgccatcgaagagtttaagcgttactaccgttcggtcgacgccttgctgatcgatgacatccaattcttcgccaacaaggagcgttcgcaggaagagttcttccatacctttaacgctctgttggaaggcaatcagcagatcatcctgacctcggatcgctaccctaaagagatcaacggggtggaagatcgtctgaagtcgcgcttcggctgggggctgacggtggcgatcgagccgccggagctggaaacccgcgtggcgatcctgatgaaaaaggccgacgaaaacgacatccgcctgccgggcgaagtggcgttcttcatcgccaagcgcctgcgttccaacgtgcgtgagctcgaaggggcgctgaaccgcgtgatcgccaacgccaactttaccggccgggccatcaccatcgatttcgtgcgcgaagcgctgcgcgatctgctggcgctgcaggaaaagctggtcaccatcgacaatatccaaaagacggtggcggagtattacaagattaaagtcgcggatttgctgtccaagcggcgttcgcgatccgttgcccgcccgcgccagatggcgatggcgttggcgaaggaactcaccaaccacagcctgccggaaatcggcgatgcgtttggtggccgcgaccataccacggtgttgcacgcctgccggaagatcgagcagctgcgtgaggaaagtcacgacatcaaagaagatttctccaatttaatcagaacattatcttcatag

SEQ ID NO: 425800 - DNA, 1101 bp, Serratia marcescens
atgaaatttatcgttgaacgtgagcatctgctaaaaccgctgcaacaggtgagcagcccgctgggcggccgcccgaccttgccgatcctgggcaacctgctgctgcaggtgacggaaggctccctgctgctgaccggcaccgatctggagatggagatggtggcgcgcgtcgccctgtcccagccgcacgagccgggcgcgaccaccgtgcccgcgcgcaaattctttgatatctgccgcggcctgccggaaggggcggagatcgccgtcacgctggaaagcgagcgcatgctggtgcggtccggccgcagccgcttctcgctgtccacgctgccggcggcggacttcccgaacttggacgactggcagagcgaggtggagttcaccttgccgcaggcgacgctgaagcgcctgatcgaagccacccagttctcgatggcccatcaggacgtgcgttactacctgaacggcatgctgtttgaaaccgaaggcgaagaactgcgcaccgtcgcgaccgacggccaccgcctggcggtgtgctcgatgccgatcggccaacagctgccgtcgcattcggtgatcgtgccgcgtaaaggggtgatggagctggtgcgcctgctggacggcggcgattcgctgctgcagctgcagatcggcagcaacaacattcgcgcccacgtcggcgatttcatcttcacctccaagctggttgacggccgtttcccggactatcgccgcgtcttgccgaagaacccggataaaacgctggaagccggctgcgatctgctcaagcaggcgtttgcccgcgcggcgattctctcgaacgagaaattccgcggcgtgcgactgtacgtcagccagaaccagctgaagatcaccgccaacaacccggagcaggaagaggcggaagagatcctcgacgtcagctacgacggcgcggagatggagatcggcttcaacgtcagctacgtgctggacgtgttgaacgcgctcaagtgtgaagacgtgcgcctgctgttgaccgattcggtctccagcgtgcagatcgaagacggcgccagccaggcggcggcctacgttgtcatgccaatgcggttgtag

SEQ ID NO: 425801 - DNA, 1086 bp, Serratia marcescens
atggctctgacgcgtttattgattaaagatttccgcaatatcgaggcggcggatttggcgctggcgccgggattcaacttcctggtcggcgccaacggcagcggcaagaccagcgtgctggaagcggtgtatacgctcggccacggccgcgcctttcgcagcctgcaggccggtcgggtcattcgccacgaccagccggagttcgtgctgcacggccgcatcgaaggcgcggagcgcgagctgtcggtaggattgagcaagagccgtcagggtgacagcaaagtacgcatcgatggcagcgatggccacaaggtggccgagctggcgcagctgctgcccatgcagctgatcacccccgaaggttttaccctgctgaacggcgggccgaaattccggcgcgccttcctggactggggctgttttcataacgaacccggttttttcaccgcctggagcaacctgaaacggttactgaagcagcgcaatgccgcgctgcgccaggtgagtcgctatgcgcagatccgcgcctgggatcaggaactgatcccgctcgcggagcgcatcagcgaatggcgggcggaatacagcgacgcgatcgccgcggatatcaccgcgacctgcgcgcagtttctgcctgaattcgccctgaccttctccttccagcgcggctgggacaaagagagcgactacggcgagctgctggagcgccagttcgagcgcgacagggcgttgacctataccgcggtggggccgcataaagcggacttccgcattcgtgccgacggcacgccggtagaggatttgttatcgcgcggtcagcttaagctgctgatgtgcgcgttgcgcttggcgcagggtgagtttctcacccggcagagcgggcggcgttgcctgtatctgattgatgattttgcctccgagctggacaccggccgtcgccggttgctggccgatcgcctgaaagccacccaggcccaggtttttgtcagcgcggtgagcgctgaacaagtgaccgacatggccggtgaaaagggcaagatgttccgcgtggaacagggtaaaatagaggttcaaccacaggactaa

SEQ ID NO: 425802 - DNA, 2415 bp, Serratia marcescens
atgtcgaattcttatgactcctcaagtatcaaggtattaaaagggctggatgcggtgcgcaagcgcccgggcatgtatatcggcgataccgatgacggcaccggtctgcaccacatggtattcgaggttgtggacaacgctatcgacgaagcgctcgcgggccactgtagtgacattcaggtcaccatccatgccgacaactcggtatcggtacaggatgacggccgcggcattccgaccggcattcacccggaagaaggggtttcagccgcagaggtcatcatgaccgtgctgcacgccggcggtaaattcgacgacaactcctataaggtttccggcggcctgcacggcgtgggcgtctcggtggttaacgccctgtcggagaaactggagctggtgatccgccgcgaaggcaaagtgcacgaacagacttacagccacggcgagccgcaggcgccgctgaccgtggtgggcgaaaccgaacagacgggcaccatggtgcgcttctggccgagccaccagaccttcaccaatgtgaccgatttcgagtacgacattctggccaagcgtctgcgcgagctgtccttcctcaactccggcgtgtctatccgcctgaaggacaagcgcaccgaccgtgaagatcacttccattacgaaggcggcatcaaggcgtttgtcgagtacctgaacaagaacaaaaccccgatccacccgaacgtgttctacttctcgaccgtgaaagacgacatcggcgtggaagtggcgctgcagtggaacgacggtttccaggaaaacatctactgcttcaccaacaacattccgcagcgcgacggcggcacgcacctggtcggtttccgtaccgcgatgacccgtacgctgaacagctacatggagaaggaaggctacagcaagaaggccaaggtcagcgccaccggcgatgacgcgcgtgaaggtctgatcgccgtggtgtcggtgaaggtgccggatcccaagttctcttctcagaccaaggacaagctggtctcttccgaggtgaaaaccgcggttgaaacgctgatgaacgagaagctggtggattacctgatggagaatccgggcgacgcgaaaatcgtggtcggcaaaatcatcgacgcggcgcgtgcgcgcgaagcggcgcgtaaagcgcgtgagatgacccgccgcaaaggcgcgctggatctggccggcctgccgggcaagctggcggactgccaggaacgcgatccggcgctgtccgaactgtacctggtggaaggggactccgcgggcggctctgccaagcaggggcgcaaccgcaagaaccaggctatcttgccgctgaaggggaaaatcctcaacgtcgagaaagcgcgtttcgacaaaatgctctcctcgcaggaagtcgcgacgctgatcaccgcgctgggttgtggcatcggccgcgacgagtacagcccggacaagctgcgttaccacagcatcatcatcatgaccgatgccgacgtcgacggttcgcacatccgtacgctgctgttgaccttcttctaccgccagatgccggaaatcatcgagcgtggccacgtgttcatcgcgcagccgccgctgtacaaggtgaagaaaggcaagcaagagcagtacatcaaagatgacgaggcgatggatcagtaccagatcgccatcgcgatggacggcgctacgctgcacaccaatgccagcgcaccggcgctcggcggtgagcagctggaaaaactggtggccgaacactacggcgtgcaaaagctgattggccgcatggagcgccgctacccgcgcgcgctgctgaacaacctgatctatcagccgacgctgaacgaaggcgatctgagcgatgaggccaaggtgaaaacctggatcgcttcgctggtgcaggcgctgaacgacaaagagcagcacggcagcagctatgacttcgtgatcttcgagaaccgcgaacgccagatgttcgaaccggcgctgcgcatccgcacccacggcgtggataccgactataagctggacttcgacttcatccacggcggcgaataccgcaagatctgccagctgggcgaacagctgcgcgggctgatcgaagacggcgcgttcatcgagcgcggcgaacgtcgtcagccggtagacagcttcgagcaggcgctggagtggctggtgaaagagtcgcgccgcggcctgtcggtgcagcgctataaaggcctgggcgagatgaacccggagcagctgtgggaaaccaccatggatccggaaagccgccgcatgctgcgcgtgaccgtcaaggacgccatcgctgccgatcagctgttcaccacgctgatgggcgatgcggttgagccgcgccgcgcctttatcgaagaaaacgccctgaaagcggcgaacatcgatatctga

SEQ ID NO: 425803 - DNA, 816 bp, Serratia marcescens
atggctattgaactgattgcgatcgacatggacggcacgttgctggatccgcagcaccaaatcacgccggcggtaaagcaggctatcgcggcggcgcggcgcaaaggggtgcacgtggtgctggccaccgggcggccttatgtcggcgtgcaggactatctgcgccagttagacattcagggccccggcgatttttgcataacctacaacggcgcgctggtgctgcgcgcggccgacggcgcctgtattctgcaggaaaccctgggttttgaggactatctgcacttcgagcagatggcgcgcgagctcggcgttcactaccaggcgtttgactttgacaccctgtataccccgaacaaagacatcggcaaatacaccatacacgaggcggaaatgaccggtattccgttgaaataccgcagcgtggaggagatggatcgccagatgcgtttcccgaaagtgatgatgatcgacgagccggcgctgctggacaacgcgattgcgcgcatcccggcggaaacgcgcgagcgttacaccattctgaaaagcgcgccttactacctcgaaatcctgcataagaacgtcgataagggcgccggggtgagaatgctggccgagcacctcggcgtggcgcgggaaaacatcatgacgctgggggatcaggccaacgatacggcgatgatcgagtatgccggcgtcggcgtggcgatgggcaacgccattcccgagctgaaagcggtggcgcagtttgtcaccggcgccaataccgaagacggcgtggcgcgcgccatcgagaagttcgtgctcaacgcctga

SEQ ID NO: 425804 - DNA, 942 bp, Serratia marcescens
atgcacatccttaatcggcagcaaatcctcgccgcgttcgacgccgaggctataaccccgctgttgaagcagggttttatcgcctattcgcaacggcgggtgcaacagccgccggtgcagcacttcctgttcgaacaagccgccggcgattgctgcatcaaatccgcctggctggaaggcgaagagctgttcgtggtcaaggtctccgccggtttctatcgcaacgccgaacgcggtttggccagcaatcaggggctggtggtggcgttctccgcccagaccggcgaacctcgggcgctgctgcaggatgagggctggctgaccgcgctgcgcaccgcactggccggccgcatcgccgccgaactgtgcgcgccgccgcatattcaggcgatcggcatggtcggcaccggcctgcaggcccggctgcagctgcaatgtctgaaaccggtgaccgattgccgcgaagtgtgggtgtggggccgcaacgatcaggcgctggcggcgtatcggcgcgaagccgaggccgaaggttttcgggtgcgggttacgcaggatgcggcggaactggcggcgcactgtcagctgatcgtcactaccacgcccagccgcgaaccgattttacaggcggcggatattcggcccggcacgcacatcaccgccgtgggcgccgacgcgcccggcaagcaggagctggcgaccgatctggtggctcgcgcggacgcactgctggtcgatgcgctggcgcagtgcgctgactatggcgagatcgcgacggcttatcggcaaaataggctgatttcaacgccaatcgtcgaaatgggcgccgtcttggcgcagggcgggcggttgcgaagcgagccgcagcacatcaccatcgccgatcttaccgggctggcgattcaggatctgcagatcgccaaaggggtgttggcggcaatataa

SEQ ID NO: 425805 - DNA, 969 bp, Serratia marcescens
atgaaccccctcttcgatgccattgtttctgcccatcaacagctgcgccctcaggtacgggtcacgccattggagcgcagcgtgctgctttcacagcagctgggctgcgagctgtatctgaaatgcgaccatctgcagcacaccggctcctttaaatttcgcggcgccagcaacaagttgcggttactggatagcgagcaacgccggcgcggcgtgatcgccgcctctaccggcaaccacggccaggcggtcgctttggcggggcagctgatgggcgttggcgtcacggtttatgcgccagagacggcggcgagcatcaagctagacaccatccgcgcgctgggcggcaccgtggaacgggtgccgggcgatgcgctgaacgccgaactggccggagaacaggccgcccgcgaacagggaaaaacctatatctcgccgtataacgacgagcaggtgatcgccggccagggcacctgcggcatggagctggttgaacagctcaccggtctggacgccgtgttcgtggcggtcggcgggggtggctatatcgccggtatcggcaccgttctgcggcaattgtcgccgaacacgcagcttatcgcctgctggccggaaaacgccaccagtatgtacagcgcgctggaagcgggccatatcttcccggtggaagagcaagacaccctgtccgacggcaccgccggcggcgtcgagccgggcgccgtgaccttcccgctgtgccaacagctgatcgaccgcaaagtgctggtcagcgagacggagatcaagcacgcgatgcgccggatcgccgccagcgatcggtggattatcgaaggcgcggccggcgtggcgctggcggcggcgatcaagctggcaccggaataccagggaaaaaaagtggcggtggtgctgtgcggtaaaaacatcgtgctggagaagtacctcaaggccatcgccgatgcacatccttaa

SEQ ID NO: 425806 - DNA, 735 bp, Serratia marcescens
atgaaaaaaatattactcgcctcattaacctacgccgcgctgacaccgtttggtttcgccgccaaagatgtgaccacccaaccggaggtctattttctgcaagagtcgcaatcgatagacagcctggcgttattgccgccgccgcccgccgttgacagcatcgattttatgaatgacaaggcgcaatatgatgccgggaaattattgcgtaataccgaacggggcaaacaggcttatcacgacgcacacgtaacgggggatggcgtcgccgccgcattatccggcgctttcggtacggaaatcacccaggataatacgccggagctgttcaaactggtgatgaaaatgcgtgaagacgccggcgatctggctacccgcagcgccaaaaatcactatatgcgcattcggccgttcgctttttaccatgagcccacttgccgaccggatgaagagagcacgctatcgacgaacggctcttatccttccgggcacaccgccatcggttgggcgaccgcgctggtgctggcggagattaaccctcccaggcaggggacgatactgcagcgcggctatgagatgggccagagccgggtgatttgcggttatcactggcaaagcgacgtgaccgccgcgcgcttggtcgcctcggccatcgtcgcccgactgcacgcggagcccaccttcgccgcgcagttgcaaagggccaaaacggaattcaacgccctgaaaaaataa

SEQ ID NO: 425807 - DNA, 1281 bp, Serratia marcescens
atgagccatcgggaaaaacagctgactttcgaccctcgcgggcatcagttaaccaatatcaacgtctggacgccggacagccaatggctggcttatgacgtgcgcccgcgcggcgcctctttcaccggtctgagcatcgagcgggtcaacgtcgccagcggcgcggtggaggtggtttatcgcgctcagcacggcgcccacgtcggcgtggtcacggtcagccccgatgcgccggcgcgctatgcctttatccatggcccggagcacccggacagcgcctggcaatatgattttcaccaccgccgcggggtgatcgtcagcgaaccggatcgcgagttggccatcaccctcgacgcgctggatatcaccgccccctacacccccggcgcgctgcgcggcggcagccatgtgcacgttttcagcccggacggcagccgcctcagctttacctataacgatcacgtcatgcacgagtgcgatccagcgcgcgatctgcgcaacgttggggtggccgtgccactgcacggggtcaatccgccgaaacagcatccgcgcgagtatgacggcagccactattgcgtgctggtcagcgagaccgtgccgcagccgcagccgggcagcgatcagatcaatcgtgcttacgaagaaggctggattggccgcgaaggttaccgtaaggccgacggcagccggcagcgctgggcgctggcgtttatcggcgatacgctgtccgccgccggtgaaaagctgccggaggtgtttatcgttgatctgccggagaacgatgccgattacgccagggcgggcgctctgccgctgcagggaacggaaagcgagctgccggcgccgccgcagggcgtcaggcagcggcgggtgacctttaccggcgatcgtcgttttccgggcgtggccggcgcaccgcgccactggctgcgcagctcgccggacggcagccagatcgcgtttttgatgaaggatgacggcggcgtggtgcagctgtggacggtgtcgccgaacggcggggagccgcgccaggtgagccacagcgagcatgatatccagtctgccttcagctggcacccgcagggcggggcgattgccttggtgtgtgacaacagcgtgatgctgtgcgaggtcgccggcggccgtctacagcgtttgacgcagcgcagcgcgcagccgccgtcaggggacgccgtggtgttttcaccggacggcaagaaagtggcgtttatgcgcgagatagcgggattcaaccagatctttgtggttgaggtgtaa

SEQ ID NO: 425808 - DNA, 348 bp, Serratia marcescens
atgacgacgatgaaagcgatagcgacgggctgcatgttgttggcgaccagcggttgctccagcgtgatgagccataccggcccgaatcagggttactatcccggcacccgcgccagcgtggacatgctgaaggacgacaacaccagttgggcgatgatgccgctggtggcactggatctgccgttctctgcggtgatggacaccgtactgctgccttacgactatctgcgttccggcaacgacgccaccacagactcgccaaaagcgcgcatcctgcgcagcgagcagcagaatctggcggcaaccggcaatcccggcgaaggcaacgacagcgccgccacacactaa

SEQ ID NO: 425809 - DNA, 414 bp, Serratia marcescens
atgcgtaattttgatctttccccgctataccgttccgccattggtttcgatcgcctgttcaacgcgctggaagccggccagagtcagggcaacggcggttatccgccttataatgtcgagctggtggacgaaaatcattatcgcatcgccatcgcggtagccgggtttgccgagcaggagctggagatcaccacgcaagataatctgctgatcgtgcgcggggcgcacaataacgaaccggcagaaaaaacctatttatatcagggcatcgccgagcgcaatttcgagcgtaaattccagctggccgaacacattcaaattaaaggtgccaaactggagaatggcctgttgtatatcgacatgcaacgcatcgtgccggaaacattaaaaccgcgccgcatcgaaattaaataa

SEQ ID NO: 425810 - DNA, 429 bp, Serratia marcescens
atgcgtaattacgatttatccccgcttctgcgtcagtggattggttttgataaattggccagctcaatgggcggccaggaaccccaggggttcccgccgtataacatcgagaaaagcgatgacaatcactaccgcatttctctggcgctggccggtttccggcagagcgaactgaatattgaagtggaagggccgcggctgaccgtcagcggtaaacccactccgccggaaaaacaggtcgaatacctgcatcagggcctggtgtgcaaagagttccagttgaccttcaccctggcggagcatctgcaggtgtcggaggccaaatttgaaaacggcctgctgcacatcgatctggtgcgtcaggtgccggaagccttgcagccgcagcgcatcgccatcggggcgacgccggagctggaagccaaataa

SEQ ID NO: 425811 - DNA, 1659 bp, Serratia marcescens
atgagcgatatcgccctgaccgtcagcatgttggcgctggcggccgtcattgggctgtggatggggaactggaagctgtacggcgttgggctgggcatcggcggcgtgctgttcggcggcatcctggtcggccacttcgcccagagcgggcaaatcaacctgaacggggacatgctgcactttattcaggagtttggcctgatcctgttcgtgtacaccatcggcattcaggtcggccccggtttcttctcttcgctgcgcgtctccgggctgcgcctcaacgccttcgcggtgctgctggtgctgaccggcggcgtcgtggcggcggcggtacacaagctgttcgacgtgccgctgccgatcatcctcggcgtgttctccggcgcggtcaccaacaccccggcgctgggcgccggtcagcaaatcctgaccgatctcggttccgatccggcgttggtggacggcatggggatgggttacgccatggcctatccgttcggcatatgcggcatcctgctggtgatgtggctgattcggctgttttttcgcatcaacatcgagcgcgaggcgcaggcgtttgaaagcagcctgggcaatcagcgtgagctgctgcacgccatcaacgtggcggtgcgcaaccccaatctgcagggcatggcgatcaagcaggtgccgctgctcaacggtgaagcgatcgtctgttcgcgcctcaaacgcggggagctgctgatggtgccggcgccgcacgagcggcttgagctgggcgactacctgcacctggtgggcaaacgcgaagatctggagaacgcccgactggtgatcggcgaagaggtggacgcctcgctgtccacgcgcggcaccgcgctgcaggtggtgagggcggtggtgaccaacgagcaggtgctgggcaagaaaatccgcgatctgaacctgaagcagaagtatgacgtggtgatttcacgcctcaaccgcgccggcgtggagctggtggccggcagcaacgtgacgctgcagttcggcgacattctgaacctggtcggccggccggaggccatcgacgcggtgacggcaatcgtcggcaacgcccaacaaaaactgcagcaggtgcagatgctgccggtgtttatcggcatcggccttggggtgctgctcggctccattccgctgttcgtgcccggcttcccggcggcattgcggctggggctggccggcgggccgctggtggcggcgctgatcctggggcgcatcggcagcatcggcaagctgtactggtttatgccgccgagcgccaacctggcgctgcgcgaactgggtatcgtgctgtttctggcggtggtcggattgaagtcgggtggcaacttcatcgataccttgctgcacggcgaggggctgacgtgggtcgggtacggcgcgttgatcaccgccattccgctgctgagcgtcggtattctggcgcgcacggtgggcaagatgaactacctgacgctgtccggcatgctggcgggatcgatgaccgatccgccggcgctggccttcgccaacggtctgcatcctaccagcggcgccgccgcgctgtcttacgccaccgtgtatccgctggcgatgttcctgcgcatcatgtcgccgcagctgctggcggtgctgttctggacgctgtaa

SEQ ID NO: 425812 - DNA, 381 bp, Serratia marcescens
atggtggctcaacgggcgttattcgacaccaatatcctgatcgattatctcaacggcattcctcaagccaaagacgttctgaccgaataccacatcaacccggctattagcgccatcacctggatggaagtgatggtgggtgccaaaaaacaggggccggcgctggagttgaaaacgcgccagtttttagggcaattcctgctgctgcctattaccgatgaagttgccgaacgcgccgtagaactgcgccactcacagcatgtgaagctgccggacgccattgtctgggccaccgcgcaggtggggttccggacgctcatctcccgcaaccccaaagattttggcactgacaacggcgtgttaatgccttatcggctgtag

SEQ ID NO: 425813 - DNA, 222 bp, Serratia marcescens
atgactcgcatcgtgatcgatttacctgaagaagacctgcggcagctcgacaatctgaaaaatatccgccacattccccgggccgaaatcatccgtcaggccgtctcccgttatctgacggagaaccacgttgaagatcccagcaatgctttcgggctctggtccggggcgatgggcgatggcgtagactacgaaaatcgtcagcgcgaggagtgggaataa

SEQ ID NO: 425814 - DNA, 1251 bp, Serratia marcescens
atgactttctcacttttcggcgaaaaatttacccgttatgcgggcattacccgtttgatggacgacctgaacgaaggcctgcgcacccccggtgccatcatgctcggcggcggcaacccggcgcagatcccagagatggaagcctacttcaaacagctgtgccaggagatgctcgatcagggcaaactgaccgaagcgctgtgcaactacgacggcccgcaaggcaaggacgcgctgctgaaagcgctggccaatctgctgtgcgacgagctcggctgggagatttcgccacagaatattgcactgactaacggcagccaaagcgcgtttttctacttgttcaacctgttcgccggccgctacgccgacggttcgcgccgccgcgtgctgttcccgctggcgccggaatacatcggctatgccgacgccgggctggacgaagggctgttcgtctccgccaaaccgaacatcgagctgctgccggacggccagttcaaatatcacgttgatttcgaacacctcaccatcggcgacgacatcggcatgatctgcgtttcgcggccgaccaacccgaccggcaacgtgatcaccgacgaagagctgatgaagctcgacctgctggcgcagcagcgcgacattccgctggtgatcgacaacgcctacggcgtgccgttccccggcatcatcttcagcgacgccacgccgctgtggaacccgaacaccatcctgtgcatgagcctgtccaagctcggcctaccgggctcgcgctgcggcatcgtgatcgccgacgagaaggtgatcaccgcgctgaccaacatgaacggcatcatcagcctgtcgccgggcagcatggggccggcgatggcgacggaaatgatcgcgcgcggcgatctgctgcgcctgtcgaacgaggtgattcgcccgttctacaaacagcgcgtcgagcacaccatcgagattatccgccgctacctgtcgccggagcgctgcctgatccacaaaccggaaggggctatcttcctctggctgtggttcaaagatctgccgatcaccaccgaagtactgtatcagcgcctgaaaaagcgcggcgtgctgatggtgccgggccattacttcttcccggggctggagcacgaatggccgcacacccaccagtgcatgcgcatgaactacgtgcccgatccggagaaaatcgagcgcggcgtggcgatcctggcggaagagatcgaacgcgcgcatcaggaaggctaa

SEQ ID NO: 425815 - DNA, 2064 bp, Serratia marcescens
atgaaactgttacccctgcccttgttgatgctgctgtcgccttcggtgctggccggctggacgctgccgggtttcccggccttcgacgaaactgccgccgggctgtttaccagccaggccgcgctgcccaaaggccaactgccgctgcgcctgtatctggataaccactgctggcagccggccgaggcggtgaagcttaaccagacgctgtcgctgcagccctgcggcgcccatccgccggccagctggcggcagttccgcgccggcgactatcaggtgcgcatcgacacccgcagcggcacgccgacgctgcagctcagcctgcgcagcgcgccggaaagcgccgccgttgttgcccgcagctgcccgcgctgggacggcaagccggtcacggtcgacgtcgcctccaccttcgccgaaggcgaaacgctgcgcgatttctattccggccaaacggcgcaggtgagccaggggaaaatcacgctgcagcccaccgccgccagcggcggcctgttgctgctggagtccgccgccacggcgaaaccggcggcgttcagctggcataacgccacagtctacttcgtgctgaccgatcgctttgagaacggcaacccggccaacgaccacagctacgggcgccgcagcgacggcctgcaggaaataggcacctttcacggcggcgatctggccggcctgacgcaaaaactggattatctgcagcagctcggcgtcaacgccttgtggatcagctcgccgctggagcagatccacggctgggtcggcggcggcaccaaaggcgatttcccgcattacgcctatcacggctattacgcgctggactggactcgcctcgacgccaacatgggcaccgaacaggagctgcgcacgctggtcgaacaagcgcatcggcgcggcattcgcattctgttcgacgtggtggtgaaccatgtcggttacgccacgctggcggatatgcagacgtttcacttcggctcgctgtatctgcaaggcgcggaggtggagaaaaccctggggaaaaactggggcgactggcgccccgggccagggcaaaactggcacagtttcaacgactacatcaacttcagcgacaaggcgggctggcgccaatggtgggggaaaaactggatccgcaccgacatcggcgactatgactcaccgggctatgacgatctgacgatgtcgctggccttcctgccggacatcaaaaccgaagcgcccggcgccagcggcctgccgctgttctatcgccacaaacccgacaccgccgcgcgcgacatgcccggcgccaccacccgcgattacctgaccgtctggctcagccagtgggtgcgcgattacggcatcgacggttttcgcgtcgataccgccaagcacgtggaaaaaccgacgctggcgctgttgaagcagcgcgccacggcggcattggcggcgtggaaagcggatcatccgcagcaggcgctggatgacgcgccgttttggatgaccggcgaggcctggggccacggggtgatgaaaagcgactattaccaaaacggcttcgacgcgatgatcaacttcgacttccaggaccaggcggcgcaggcattgggctgctttgccgacattgatgccacctaccggcagatggccgagcggctgcaggatttcaacgtgctgagctacctctcttcacacgacacccggctgttcttcgccagcgacgccaaaggctcgctgccgctgcaacagcgggcggcgaacctgctgttgctggcgccgggcgcggtgcagatttactacggcgatgaaagcggccgcccgctcggccccaccggttccgatccgctgcagggcacccgctccgacatgaactggcgtgagctgctgggggaaaaagccccgatgctggcccactggcaacggttggggcagttccgcgctcgccatccggcgatcggcggcggcgtgcaaaccccgcagccacacgccgcctactacgccttcagccgccggctcggcgacgataaggtgatggtggtgtgggccggcgaacggtcacaataa

SEQ ID NO: 425816 - DNA, 153 bp, Serratia marcescens
atgacggacaaaaactggcgagaagagatcgttcaggcaattcaggatgccgaattgcagcacttcgccgaagaacatcagctgcaggcgctgttcgcgccgcagcaggaagagcaacacggccggttatccgcagaccaccggccgcgctga

SEQ ID NO: 425817 - DNA, 1008 bp, Serratia marcescens
atgccccctttggcccagctggagttcgtgatgaagccttctatcgtattgtacaaaagcctgcccgccgatctgcgtgaacgtctggaacagcacttcaccgtgcacgccttcaacggcctgcagccggagaaccgcgacgaactgcgccaggcgctgcagcaggccgaagggatcatcggttccggcggtaaaattgacgaagccttcctgcagcaggcgcccaaactgcgcgcggcctcgaccgtttccgtcggctacgacaacttcgacgtcgaggcgctcaacgcccataacgtgctgttgatgcacaccccgacggtgctgaccgaaaccgtcgccgacaccatcatgagcctggtgctggcgaccgcgcgccgggtggtggaagtggcggaacgggtgaaggccggcgaatggcgcggcagcatcgggccggactggttcggcgtcgacgtgcaccataaaaccatcggcatactcggcatggggcgcatcggcctggcgctggcgcagcgcgcgcacttcggcttcggcatgccggtgctgtacaacgcccgccgcacgcacgaagaggcggagcagcgctttaatgcgcgccgctgcgatctggataccctgctggccgagtcggatttcgtttgcatcacgctgccgctgaccgaacaaaccttccacatgatcggccgcgatcagttggcgaagatgaagaaaagcggcattctgatcaacgccggccgcgggtcggtggtggatgagcaggcgctgatcgaagcgctgcaaaacggcgtgatcctcgccgccgggttggacgtgttcgagaaagagccgctgccggccaactcaccgctgctcagcatgccgaacgtggtggcgttgccgcacatcggctccgccacccatgaaacgcgctacggcatggccgcctgcgcggtggataatttgatcgccgcgttgaccggcacggtgaaagaaaactgcgtcaacccgcagctgttgcggaaataa

SEQ ID NO: 425818 - DNA, 1269 bp, Serratia marcescens
atgaacaaagcgactgtcgcggccaaacgctggtggtacatcatgcccatcgtgtttatcacctacagcctggcctatctcgatcgcgccaacttcagcttcgcctctgccgccggcatcaatgaagatctcggcatcaccaaaggcatgtcctcgctgctgggcgcgctgtttttcctcggttatttcttcttccaaattcccggcgccatctacgccgaacgccgcagcgtcaaaaaactgatcttctggtgcctgatcctgtggggcggctgcgcctcgctgaccggcgtggtgagcaatattccgatgctggccgccatccgctttatcctcggcgtggtggaagcggcggtaatgccggcgatgctgatctacatcagcaactggttcaccaaatcggagcggtcacgcgccaataccttcctgatcctcggcaacccggtgacggtgctgtggatgtcggtggtgtccggctacctgatccacgccttcggctggcgtgaaatgttcatcatcgagggcattccggcggttatctgggcgttctgctggtgggtgctggcgaaagacaaaccggcgcaggccggctggttgagtgccgatgagaaacaggcgctgcagcagcagctggacgaagagcagaaaggcatcaaggccgtgcgcaactacggcgaagccttccgttcgcgcaacgtgatcctgctgtgcgtgcagtacttcgcctggagcatcggcgtgtacggcttcgtgctgtggctgccttccatcctgcgcagcggcatgcagatgggcatggtggaagccggctggctgtcggcggtgccttacctggcggcgaccatcgccatgatcgtggtctcctgggcgtcggacaaaatgcaaaaccgcaagctgttcgtctggccgctgctgctgatcggcgcgctagcgttcttcggctcttacgccgtcggcgccaaccacttctggatctcctacggcctgctggtggtcgccggcgccgcgatgtacgccccctacgggccgttcttcgccatcattccggaaatgctgccgaaaaacgtcgccgggggcgccatggcgctgatcaacagcatgggcgcgctggggtcgttcttcggttcgtggttcgtcggctatctgaatggcgccaccggcagcccggcggcctcttacatgtttatggccatcgcactggtggtggcggtggtgttgacgctgatcgtcaaacccgcccgcaacgagatccagccgcaattggcttga

SEQ ID NO: 425819 - DNA, 969 bp, Serratia marcescens
atgatgacaacgttaacggcaacgacggcgcagcaggcgcccctggatgtggtcacgctgggcgaagccatggcgatgttcgtggcggcgcaaaccggcgatttggcggaggtggaaaccttcaccaaacgcatcgccggcgccgagctgaacgtggcgatcggcctggcgcgcctgggcatgaatgtcggctgggtcagccgcgtcggcaacgattcgttcggccgcttcaccctgcagcagctgaaaaaagaaggcatcaactaccggcaggtgacggtcgacggccactatcccaccggctttcaggtgaaatccaaaaccgccgatggtaccgatcccagcgtggaatacttccgcaaaggctcggcggccagccacctgtcggtcaccgatttcaaccctgagtatttcggttctgcgcgccacctgcacctgagcggcgtggcggcggcgctgtccagcgaatcgctggcgctgtgccaccatgcggcgcgcgagatgcgcgccatgggcaaaaccatttcgttcgatcccaatctgcgcccggtgctgtggcccagccgcgaggtgatgatcgagcagctgaaccagctggcgttcgccgccgactgggtgctgccggggctgaaagaggggcagatcctcaccggccaatcgacgccggaaggcatcgccgatttctatctggaacgcggcgtgcaggcggtgatcatcaaaaccggcccggacggcgcctggtttaaaaccgccgccggcgacaaggcggcggtggccgcggtcaaggtcgacaacgtggtggataccgtcggcgccggtgacggctttgccgtcggcaccctcagcgccctgctggaaggcaaaacgctgatacaggcggtgcagcgcggcaacaaaatcggttcgctggcgatccaggccatcggcgacagcgagggcctgccgacccgcgcggcgctggccgaataa

SEQ ID NO: 425820 - DNA, 753 bp, Serratia marcescens
atgaaaacagaaatcatcgtggtcaccggcgcctacggcaccgataccgtcaaacaatacggcggccagcgcgcgctgttgcccatcatcgccggcgcgggcgccgacggggtggagatccgccgcgaactgttcgccgccggcgaattggacagcctgccggccctggcgcaagaaatcgatcgccaacagttgttcgccgtctactccgctcctgaggcgctgttcaccccgcaacatacgctgaaccccaacctggcggcgctgctggcggaagcgcaggcgctgaacgcgcgccagctgaagctgtcccttggccatttccgccccggttttgattttaccgagctgaaagtggcgctggagcagcacccggtcaaactggtggtcgaaaacgatcagacgccggactgcggcattttgtcgatgctgaacgcctttttccacgccgcggaagatagccacctgccggtcagcatgaccttcgatatggccaactggctgtgggtggggcaagacgctttcgccgccgccgaacgcctggcccgccacgtcggttacgtgcacgtcaaagccgccacccaaggcccgcgcggctggcgcgccgtcgcgctggacgataccgacggcagctggcgcgatctgctggcccgcctgccgcacgatgcgccgcgcggcatcgaattcccgttgcagggcgatgatctggaagccgtcacccgccattacgtcaatattttgcgtgcggagtaa

SEQ ID NO: 425821 - DNA, 1035 bp, Serratia marcescens
gtgagcactgtcaaggcaacgcgcgcctcagggcgcgccaccatcagcgatgtggccagcatcgccaaaaccggcaagaccagcgtgtcgcgctatctgaatggtgaacagcacctgctttccgacgatctcaaacagcgcatcgaacaggcgatccagcagctcgactaccggccaagccagatggcgcgcagcctgaagggcggccagacccgcctgatcggcctgatcctcgccgatatcaccaacccctattcggtggacgtgatgcgcggcatcgaggccgcctgccgccagcacggctttaccctgctggtgtgtaacactaacaacgaagtcaatcaggaacagcactacctgcagctgctcagcagttaccgggtggagggcatcgtggtcaacgcggtcggcatgcgcgaggaagcgttatccacgctgcagcagtcgatgctgccgatggtgctgatcgaccgcaaaatccccgatttcgcctgcgacgtggtgggtctgaacaaccgcgaagccgccaccgtcgccaccgaacacctgctgcaacaaggtttcgaagcgattttgttcctcagcgagccgctcggtacggtcaatacccgtctcgagcgcctgcacgctttcagacataccatggcgcagcaccccacgctgtcggcggagcaggccgaaacgccgctcaacgatcggcagaagctggagcaggtgctgagcgatttcagcgaccgccatcgcggcatgcgcaaggcggtgatctccgccaacggcgccctgacgctgcaggtggcgcgcgccatgcgccggctcggcatccagtggggcaacgacatcggcctgctgggcttcgacgagctggagtgggcggagctggcgggcgtcggcatcaccacgctgaaacagcccacctaccaaatggggcacgcggcgctggagcggctggtgcagcgcattcagggcctggcagcccccagcggcgagcagatgttctccggcgagctgatcgtccgcggctccaccacccgctaa

SEQ ID NO: 425822 - DNA, 663 bp, Serratia marcescens
atgaaaaaacgcattgcaattattgccggcgccgtgagcctcacgctcgcgctgtcggcctgtaccaccaacccttacaccggtgaatccgaagccggtaaatccggcatcggcgcgggcctcggcgccgcactgggcgccggtgtcggcgtgctgtcctcttccaagaaagatcgcggcaagggcgcgctgatcggcgcagcggccggtgcagccctcggcggcggcgctggctattacatggacgtgcaggaagccaaactgcgcgacaagatgaaaggcaccggcgtcagcgtcacccgccagggcgacaacatcgtgctgaacatgccgaacaacgtgaccttcgacagcagcagcgccacgctgaaaccggcgggcgccaacaccctgaccggcgtcgccatggtgctgaaagagtatccgaaaaccgcggtcaacgttgtcggctacaccgacagcaccggctcccgctcgctcaacatgaacctgtcgcagcagcgcgccgacggcgtagccagcgcgctgatcacccagggcgtggcggcgaaccgtatccgcaccaccggtgccggtccggacaacccgatcgcctccaacagcaccgcggaaggcaaggcgcaaaaccgccgcgtcgagatcaccctcagcccgctgcagtaa

SEQ ID NO: 425823 - DNA, 477 bp, Serratia marcescens
atgcatgtgctacccaaagccacggtgatccgcccctgtggcccggaggatatcgaccggctgatggcgctatggctgcccagcaccatcgccgctcatccgttcgtggcggaaaaatactggcgtgagagcgccgcgctggtgcgtgaaaactacctgccgcgcgcgcaaagctgggcctgctggcatgacgacgagatcgtcggctttatcagcgtgctggacgaacagttcatcggcgcgctgtttgtcgagcgggcgtttcacggccgcagcgtcgcccaggcgctgatgacgcacgtgcagcagcgctaccgccggctcagcctggaggtgtaccagcagaacctgcgcgcctgcgcgttctaccacaggcacggttttcaggtgacgcagcgcctgttcaatgatgaaacccaggcctatacgctgatcatgaactggccggcagccgaaaattcaacccgttatgcttaa

SEQ ID NO: 425824 - DNA, 567 bp, Serratia marcescens
atggcagacgaacgttgcggttgggtgacggccgatccgttgtatctcgagtatcacgaccaggaatggggcgcgcccaccaccgacgcgcgcgagctgtttgaaatgctgtgcctcgaggggcaacaggccggcctttcctggatcaccgtgctgaaaaagcgcgagaactaccgccgcgctttccacggtttcgatccgcagcgggtcgccgccatgaccgaacaggacgtggaaaatctgctgcaggacagcggcatcatccgccaccgcggcaagatagaagccatcatcaccaacgccaaagcctatctggcgatggaggcggccggcgagaatttcgttaccttcatttgggacttcgtcggcggcaggccgcagctcaaccgctggcaggcgctgaaccaggtgccggccaaaaccgagcagtccgacgccatgtccaaggcgctaaaaaaacgcggcttcaagtttatcggctccaccgtttgttacgccttcatgcaggccagcgggctggtgaacgatcatctcacgggatgcatgtgctacccaaagccacggtga

SEQ ID NO: 425825 - DNA, 1989 bp, Serratia marcescens
atgcctctaaaaataacgtgcatgccccgcccggcggcgcttgcagtggcgttgctttgcagtgtgacccttccggctcaggcgtacgatcaactctacgtctttggcgatagcctgagcgataccggcaacaacggccggttcacctatgacggtaaccagcacctgctgtacgacgaagcgttggcgcaacgcatcggggcggcgctggtggcttcggacaacggcggtgagaactacgccgccggcggcgccgtggcggtgccgggcctgaacccggccgataacacccaggatcaggtgcagcgctatctgaaccgggtcaacggccaggccgacggcgacggtttgtacgttcattggatcggcggcaacgatctggcggcggcggcattaaatgccgctaccgcgcccggcgtggcctacaacagcgccgccgcggcagccgcgcaggtgcattcgctgctgaacgccggcgccggcacggtgatcgtgccgacggtgccgaacatcggctccacgccgcagctgatggaattgatcattcaacaggcgctgtcgccggtgcagggggcggcgatccaggcggcctatgccacgcttaattcggtggcgacgccggacaacgcttcacgcacgcaggcgatccacgcggcgttggccgccgcggcgaagcagggcagcgccattcctcaggtgcagcaggcgatcgccacgcagcttatcgcggcgtatgacagcctgagcgcgcaggccgcccagctgaccgatttctacaatcaaagtgaagaccgtttgctggcgcagggcggcggcaatatcgtgcgggtggacgtcaacaagctgttcgccgaagcgatcgccaatccggcgcagttcggcttcgctaacaccgccggcatggcttgcccgccgggcgtttcctcggcggtctgcagctccgatatgcccggcttcgacgccggccagtcctatctgttctccgaccatttccacccgagcccgcaggcgcacctgctgattgcggattatatccaggcggtgttggatggcccggcgcaggtggtggcgctgaatcaggcgacggcggcgatggcgcgcgacagccgcgccacgctcgacagccgcttccagcagctgcgccacggcgaaaacccgcagggttcgctgggcgtgttcggcggttacgccggccagcactatgactatgccgataaccgggctgcgggggacggcaacgccaccacccacaacctgaccgtcggggtggactatcagctgaccgacggctggctgatcggcgcgttgatcgccggttccaacgacgatcaacatccttccagccgctttgattacaaggcgcgcgggctgctgctgtcggctttcagttcactggcgatattcgagcagggctgggtcaacgccgatttgcactatgcgacgatggattatgacgacatccgccgcagcctgcggctggggccgctgacgcgcaccgaaaccggttcgaccaccggcaggcagtggggcgcgcgcgtgaccgccggctatgacttcccgatcgcttcttacctgaccaccgggccggtggcgcagttcgcctgggattacagccgcgtttccggctacagcgaagatggcgatgacagcaccgccatgcgcttcaacgatcaaacctaccactcgcagatcggcgcgttgggctggcggctggatacgcaattcggcgtgtttaacccttatgcggaagtgagttatcagcaccagttcggtgacgacgtctaccgcgccggcggcggcctgaaatcgacgcaaacctcgttcacccgcgacagtgcgggccaggacaaaaactgggtggatgtcacgttgggggccaacatgccgttgacggacagggtatcggccttcgccaccgtctcgcaaaccggcgggctgagcagcggcgaacagtttatgtataacgtcggcgtcagcgcgcgtttttga

SEQ ID NO: 425826 - DNA, 918 bp, Serratia marcescens
atgcaaaagtttgataccaagaccttccagggcctgatcctgacactgcaggattattgggcgcgccagggctgcaccatcgttcaaccattggacatggaagtcggcgcgggaacctcacacccgatgacgtgcctgcgcgcactggggccggagccgatggccgccgcctatgtgcagccatcccgccgcccgaccgacggccgctacggtgaaaacccgaaccgtctgcagcactactaccagttccaggtggtgattaagccatcgccggacaacattcaggaactctacctgggctcgctgaaagagctgggtctggatccgaccatccacgacattcgcttcgtggaagacaactgggaaaacccgacgctcggcgcctggggcctgggttgggaagtgtggctgaacggcatggaagtgacgcagttcacctacttccagcaggtcggcggcctggagtgcaagccggtgaccggcgagatcacttacggcctggagcgcctggcgatgtacatccagggcgtggacagcgtatatgatctggtgtggagcaacggcccgctgggcgtcaccacctacggcgacgtgttccaccagaacgaagtggagcagtccacctacaacttcgaatacgccgatgtcgacttcctgttctcctgcttcgagcagtacgagaaagaagcccaatcgctgctggcgctggaaaaaccgctgccgctgccggcctacgaacgcatcctgaaggcgggccataccttcaacctgctggacgcgcgcaaggcgatttcggtgaccgagcgtcaacgctacattctgcgcatccgcacgctgaccaaagccgttgccgaagcctactacgcttcccgcgaagcgctgggcttcccgatgtgcaacaagaagaacgagaactaa

SEQ ID NO: 425827 - DNA, 2070 bp, Serratia marcescens
atgactcaacagactttcctggtggaaatcggcacggaagagctgccgccgaaggctcttcgttccctggcggaatctttcgccgccaacttcaccgccgagctggacaacgccggcctggaacacggtgacgtgagctggttcgccgcaccgcgccgtctggcgctgaaagtggccaacctgagcgcggcgcaggccgatcgcgaaattgaaaaacgcggcccggcgatcgcccaggcgttcgacgccgaaggcaaaccgagcaaagcggccgaaggctgggcgcgcggctgcggcatcaccgtcgatcaggctgaacgcctggtgaccgacaagggcgagtggttgatgtaccgcgcccacgtcaaaggccagtcggcgcaggcgctgctggccggcatggtcagcaccgcgctggccaaactgccgattccgaaactgatgcgttggggcgactccgacgtgcagttcgtgcgtccggtgcacaccgtcacgatgctgttgggcgccgatctgatcccgggcaccgtgctgggcatcgactctgcgcgcaccgtgcgcggccaccgcttcatgggcgaagccgagttcaccctcgacaacgccgaccaatacccgcagatcctgctggagcgcggcaaagtggtcgccgattatgaagcgcgtaaagccctcatcaagcgcgatgccgagctggcggcgcagaagattggcggcaaggccgatctgagcgacagcctgctggaagaagtggcctcgctggtggaatggccggtggtgctgaccgccaaattcgaagagaaattcctggcggtgccggcggaagcgctggtgtacaccatgaagggcgaccagaagtatttcccggtgtacgacgccgcgggcaaactgctgccgaactttatcttcgtggccaacatcgagtcgaaagacccgcagcagatcatctccggtaacgaaaaggtggtgcgtccgcgcctggccgacgccgagttcttcttcaacactgaccgcaagaaacgcctggaagacaacctgccgcgcctggaaaccgtgctgttccaacagcagctgggcaccctgcgcgacaagaccgaccgtattcaggcgctggcgggctgggttgccggccagatcggcgccgacgtcaaccacgccacccgcgcgggcctgctgtcgaagtgcgacctgatgaccaacatggtgttcgaattcaccgacacccagggcgtgatgggcatgcactacgcgcgccacgacggtgaggcggaagacgtcgccgttgcgctgaacgagcagtatcagccgcgctacgccggcgatgcgctgccgcagtcgctggtggcctgttccctggcgatcgccgataagatggacaccctggccggcatcttcggcatcgggcagcatccgaaaggcgataaagacccgttcgcgctgcgccgcgccgcgctgggcgtattgcgcatcatcgtcgagaaaaacctgccgctggatctgcagaccctgaccgaagaggccgtgcgcctgtacggcagcaagctgaccaacgccaaggtggtcgacgaggtggtggaattcatgctgggccgcttccgcgcctggtatcaggaggaaggccacgctgtcgataccattcaggcggtgctggcgcgccgtccgaccaagccggccgacttcgacgcgcgcgtcaaggcggtctcccacttccgtacgctggaagcggcggcggcgctggctgcggccaacaaacgcgtctccaatattctggccaagtctaccgaaacgctgaacgacagcgtgcgcgcctcggtgctgaaggacgcggcggagatccagttggcgactcacctggtggtgctgcgcgacaagctgcagccgtacttcgcggcgggcaactaccaggaagcgctggtggagctggctgcgctgcgcgagccggtggatgcgttcttcgacaacgtgatggtcatggcggacgatgcggaagtgcgcgtgaaccgtctgacgctgttgagcaagctgcgcgaactgttcctgcaggtggcggatatctccgtgctgcagtaa

SEQ ID NO: 425828 - DNA, 720 bp, Serratia marcescens
atggcggtagggatccagagcagaggtttcgcgcgttggttggcaccggtattggcattgttggtggtcatgcaattgaccgcctgcggcgataaagagccggaacagcgcaaagcatttatcgattacttacagaataccgtgatgcgcagcggggcgaacatccccacgctgagcgaagaccagaagcagaagttcggcaactatgccggcgattacgcgattttggtcggcttttcgcagcagctgtccaagtcggtcggcgccagcctgacgccggcgctggatcagattaaccagatccgcaccgcgcaggactacctgaacaaacgcgacgcgctgcagcaatcggtcggcgcgttgaacctgctgggccagcagatccagtccgctaaatcgcaggcggataccgcccgcgcggcgctgaagcagcccgacgatctgaaggcggtgtacaaccaggcctatgacaagatcgttaccgcaccggccaatgccttgatgccggccatcccgaccaccgccggcttcgtgcaggatctggtgcaggttggcgatttcctgcagagccagggcaatcaggtcagtttcaacaacaacggcgtgcagttccgcaccgcgcagcaggtggcgcagtacaacaccatgatgtcgaatctggtggccaagcagcagaacctgctgaatgcgcagaaagccgttcaaagcgtgacgcaataa

SEQ ID NO: 425829 - DNA, 1920 bp, Serratia marcescens
atgttttcaccagacatcaaggttaaagtacaaaactttggccgcttcctgagcaacatggtgatgcccaacatcggcgcctttatcgcctgggggattatcaccgcgctattcattccaaccggctggctgccgaatgaaaccttagccaagctggtcggcccgatgatcacctacctgctgccattgctgatcggttataccggcgggcggctggtgggcggcgagcgcggcggtgtggtcggcgctatcaccaccatgggcgtcatcgtcggcgccgacatgccgatgttcctcggctcgatgatcgccggtccgctgggcggctgggctatcaagcactttgaccgctgggtggacggcaagatcaaaagcggttttgaaatgctggtgaacaacttctccgccggcatcatcggcatgctgctggcgatcctggctttcctgggcatcgggccgctggtggaggtgctctccaagctgctggcggcgggcgtgcacgtgatggtgaagaacaacctgctgccactggcgtccatcttcgttgaaccggcgaaaatcctgttcctgaacaacgccatcaaccacggcatcttctcgccgctgggtatccagcaggccacggaagtcggcaagtcggtattcttcctgatcgaagccaacccaggcccgggcatgggcgtactgatggcctacatgttcttcggtcgcggcagcgccaagcaatccgccggcggtgcggcaatcattcacttcctgggtggcatccacgaaatctacttcccttacgtgctgatgaacccacgcctgctgctggcggtgatcctggggggcatgaccggcgtcttcaccctgacgatgctgaacggcggcctggtttctccggcttctccgggttcgatcctggcagtgctggcgatgaccccgaaaggcgcctacttcgccaacattgcggcggtgtgcgcagcctttgccgtctccttcgtggtgtccgctttcctgctgaaaacctccaaggtgaaagaggatgacgatctggaagccgcgacccgtcgcatgcaagagatgaaatcgcagtccaaaggcggcgcggcggcgccggcatcggtcgacggcgatctgagcaccgtgcgcaaaatcatcgtcgcctgcgatgcgggcatgggttccagcgccatgggcgccggggtgctgcgtaagaaagtggccgatgccgggctgaagaacatctcggtgaccaacagcgccatcaacagcctgccggacgatgtggatctggtgattacccaccgcgatctgaccgagcgtgcgatgcgccacgcgccgcaggcacagcacatctcgctgaccaacttcctcgacagcaagctgtacagcgatttggtcgaccgtttgctggcggccaacaaaaccagcgacaaccaacaaaaggtactgggcgcgctggacgacagcttcgaagccggtgaatcgaacctgttcaagctgagcgagagcaacgtgttcctcaacctgcaggccagcgacaaagagcaggcgatccgcttcgccggcgagcagctggtgaaaggcggctacgtcgaggcggagtacgtgccggcgatgctggagcgcgagaaactcacctccacctacctgggcgagtcgatcgccgtgccgcacggcaccattgaggccaaagaccgggtgctgcgcaccggcgtggtgttctgccagtacccgcagggcgtgcgcttcggcgaggaagaggatgaagtggcccgtctggtgatcggcatcgccgcgcgcaacaacgagcatatccaggtgatcaccagcctgaccaacgcgctggatgacgagagcgtgatcgagcggctggcgaataccaccagcgtgcaggaagtgctggacctgctcggcggcaaaaaagccggataa

SEQ ID NO: 425830 - DNA, 1146 bp, Serratia marcescens
atgaaagcattacattttggcgcagggaacatcggccgcggttttatcggcaagctgctggcggacgccggggttgagctgaccttcgccgacgtcaatcaaacggtgctggatctgttgaacagccgtaaaagttatcaggtgcacgtggtgggcgagcaagaacgcgtggagagcgtcaacaacgtcagcgccgtcaacagcggcagcgaggcggcggtggcgctgatcgccgaggcggatctggtgaccactgccgttggcccgcaaattctcggcaaaatcgccggcacgatcgccaaagggctggtgctgcgtcatcagcagggcaatgcgcagccgctgaatatcatcgcctgcgagaacatggtgcgcggcaccagccagctgaagcagcatgtgttcgctgcgctgccgcaggacgaacaggcatgggttgagcagcacgtcggcttcgtcgattcggccgtcgaccgcatcgtgccgccggcggacagcagcgatccgctggaagtgacggtggaaaccttcagcgaatggatcgtcgatcagacccagttcaagggccagcctccggcgatcgccggcatggagctgaccgataacctgatggcgttcgtcgagcgcaagctgttcaccctcaataccggccacgccatcaccgcctaccttggccaacgggccgggctgcaaaccattcgcgacgccattctcgacccggcgatccgccgcgtggtgaaaggagcgatggaagagagcggtgcggtgctgatcaagcgctacggcttcgacgccgacaagcacgccgcctacatcaacaaaatcctcggccgcttcgaaaacccgtatctgcacgacgacgtcgagcgcgtggggcgccagccgctgcgcaaactgagcgccggcgatcgcctgatcaaaccgctgctgggcacgctggaatacggcctgccgcacgccaacctgatccagggcatcgccgccgccatgagctaccgcagcgaacaggatccgcaggcgcaggagttggcggaattgctgaacacgctcgggccgaaagccgcgctggcgcaaatttccggcctgccggcggaaagcgaggttgtagaagaggccgttgctgtgtataacgccatgcacaagtag

SEQ ID NO: 425831 - DNA, 639 bp, Serratia marcescens
atgatgaacacccgagcgcagcttgctgcgctcctgcaatccgagttcgacatcgacggccctccccacgcctttcgaaaagcgatgatggaagaagcacaggcatttgaaaatcaggttctggaaaagctgaacgcgggcaaaacggtgcgcagtttcctgatcgcggcggtagagctgctggcggaagcgctcaacgtgctggtggtgcaggtattccgcaaggacgactatgcggtgaaatatgccgtcgaaccgctattgtccggcagcggcccgctgggggagctgtcggtgcgcctgaagctgatgtatgggctgggggtgatctcccgccacgaatatgaagacgccgagctgctgatggcgatgcgcgaagagctgaatcacgacggtgcggaataccgcttcgtcgacgacgaaatcctcgggccgttcggcgagctgcactgcgtggccgcgctgccgccggcgccgaccttcctgcagccgggcgaagcggatgaagcgctgatcgccatgcagcgtcagcgctatcagcagatggtgcgctccaccatggtgctgtccattaccgatctgatcgccggcatcggcgccaaacaaccttcccgactctctcctctcggccgcggctaa

SEQ ID NO: 425832 - DNA, 609 bp, Serratia marcescens
atgctggactccgcctttgtcagctacgtcaccgtcatgtcgattacccccggccccaacaacctgctgctggcctcgtcgggcgtcaacttcggcctgcgccgcaccctgccgatgctgttcggcatcggcgccggctgcgcggtgcagttggctatcattatcccgctgctggcgctggcgctcagctgggccggcgtcatccgcttcccgctggcggtgatcggctgcgcctacctgctgtggctgtcatggaaactgttcaaggcggcctcgccggacgccaaagagcaggtgaggccaatgagtttcctcaacggcgcgctgtttcaggcggtcaaccccaaggcctggctgatggtgatcaacgtggcgatcctgttcaccccgcgcgaaggcgccaccttcttccatacgctgagcgtcatcgcaggtttcgtcgtgctgaatttaccctgtgtgctgctgtgggcggtgctgggcgaccggttgcgcaacgcgctccaggtcgcctggaagctgcgcgcgtttaacggcgtcatgtccggcctgatggccgccaccgcgctgtggttgctgttcgacgagtggcgcgcggcctttgcttag

SEQ ID NO: 425833 - DNA, 1467 bp, Serratia marcescens
gtgaccctgctcgatgaaaccccggatacccgttacctgcagctggcggatacgctggccgaggccattcgccgcggcacgctgctgcccggcgaccgcttgccttcggtgcggcgctgtgcgcaaacccatcgcgtcagtattaataccgtggtgtcggcttaccgcacgctggaggatcgcgggctgatcgaagcgcggccgcaatcggggttttatgtccgcagcacgctgccggcgctgaagatggcctcggcgcccagcggccgcatcgagccgccggcggacgacgtgctggcgctgatcgatactgtgttcgccgcccagcagaatccggccttcaccaacattgcgctggcctgcccgcagaccagcgatttttatcccggcggcaagctggggcgcatgctgtcctctcagctgcgccgtcaaccggatctgatcggccagtattcgttgccgcccggcagcctgcggctgcgtcagcagatcgcccgccgttcgatgacgctgggcatgctgctggagccgggcgacgtggtgctgacccacggctgcatggaggcgttgcagctggcgctgcgcgtcaccaccaaaccgggcgactgcgtcgggctggagtcaccgacctacttctacctgctgccgctgctggccagcctggggctgaaagcgctggaaatccccaccgatccgcagctggggctgtcgctggacgcgctggagctgctattgaacgagaaacggctgaacgcggtgattgccatgccgacggtgcaaaacccgctgggctgcaccatgccgctggcggcgaaaaagcggctggcgcggctgatgaacgatcatcaggtgccgttgattgaagacgggctgtatgccgagatccagttcggcggcgcgttgtcgccggcggtgaaggcgttcgatcgtgacggctgggtgctgttttgctccagcttcaccaaaacgctggcgccggattttcgcgtcggctggatctgcggcggccgctttcacgaggcgttgcgcaagctgaaggcggtgtcgtcgatgtccgagtcgcagctgctgtcggaaacgctggcgaccttcctggagagcggcggttacgatcaccatttgcgcaacctgcgcaagcgctatgcggcgcaggtagacgaggcgcgggcgctgatcgcccggcatttcccgcgcggcacgctggccacgcagccggcgggcggcttcgtgttttgggttgagttcccccccaacgtggacagcgtagcgctgttccaccaactgctggaagagcagatctgtttgacgccgggcaccctgtattcccccagcgggcgctaccgcaacgcgctgcggctctcctgttgctacccgttcaacgcgcgctacacccaggcgttggcccggctcggcgccagagcctgcgagatgagcggcctgccgcccggcattgcgcaggacgggtaa

SEQ ID NO: 425834 - DNA, 363 bp, Serratia marcescens
atgaaagagaaagaaaaggcagagatcaagcgcctgagcgacctgctggacgccttgaaccacaaagacgccaccgtgatccaacagggcaaccctgagttgattgcgcagcacaccaaagagaaagagaagctggcgatggagatcgagcgcctgaaaaacgtgcgcggcgagaagctgagcgccgaagcgcagaagctgagcaagctgccgttcagccgcgaaatcaccaagaaagagcaggccgacatgggcgcgctgaagaaaagcgcgcgcgggctgatcgtggtgcatccgatgaccgcgctgggccgcgagatgggcctgaaagcggtcaccggttacgccaagaaagcgttctga

SEQ ID NO: 425835 - DNA, 780 bp, Serratia marcescens
atgaccaccccgaaccattcgattcatcacgccgccgccgagggctatcaggccaatgccgatcgctatatgaaaggccggccggattatccgccggaaatcgccgcttggctgcgcgagactatcggcctgcacgccggcatgacggtcatcgatctcggcgccggcaccggcaagttcaccccgcgcctgctggaaaccggcgctcaggcgatcgccgtcgaaccggtgccgcaaatgctggaaaaactgtcggcggcgctgccgcaggtgaaaacgctggcgggcaccgccgaggcgatcccgttgccggacgagtcggtcgatgcggtagtgtgcgcccaatccttccactggttcgccacgccgcaggcgctggcggagatccggcgcattctcaaacccggcggcaaactcggtctggtgtggaacatgcgcgatgcgcgcgtcggctgggtgcgtaaactgaatcagatcgtcgatcgccacgaaggcgatgcgccgcgtttctataccggcgaatggcgcaagttcttcccgttcaaaggctttgaaccgctgcaggagcaggtctttatgttgagccaccgcggcgcgatggaggacgtgatctacaaccgggtgcgttcaaccagctttatcgccgcgctgccgcagccgcaacaggagcaggttatcgatcaattgcgccagctggtggcggaagaagaggagctacggggccaggacacggtcaccgtgccctatcagaccaaggcgtatttcaccaccaaggtctga

SEQ ID NO: 425836 - DNA, 672 bp, Serratia marcescens
atgcatcacccagacgtttacatcggcagcatccaaccctatgaaggcgggcgccccagcgccatcgccaaacgccaggtggatggcgccatccggctcacgccgctcggcctggaaggcgacgagcaggcggaaaaaagctatcacggcgggccggaccgcgcgctgtgccactacccgcgcgagcattacgcccactggcgcgcgcagtttccggcgcaggccgagcaattttgtgccccggccttcggcgagaatatctccaccgaagggctgaccgaacacaatgtgtttatgggagacattttccgctggggcgaggcgctgatccaggtcactcagccgcgctcgccgtgcttcaagctcaattatcacttcgccatcgaggacatttcggtgctgatgcagcaaagcggccgctgcggctggctgtatcgggtggtgtcgccaggcgcggtcagcggcgatcgtccgctggcgctggcggcgcgcaacagcgacgtgtcggtggccgaagctatcgccatcgcctggcatatgccgttcgacgccgaacagtatcgccgcctgttggcggtcgccggcctctccgccagctggagcaagaccatgctcacgcggcttgccgaagggcaccttgaggacttcaaccgccgcctgctcggccgttga

SEQ ID NO: 425837 - DNA, 1929 bp, Serratia marcescens
atggcggcattgcaagcattggcaggaaagttcactcatctcaccgtaggtaaaaagctcggtctcggcttcgcactgttgctgctgttggcggtcatcatcgccggcaccggggcgcaatatctgcatatcatcgaatcacgcgccgatcgcatcgacttcagcaaccggctgaacgaagagatcaaccaggccaaatacaaccgcgccatgtacggccagacctaccggccggagtatattcagaacaaccgcgccaatattgaaaacgccgtcaaactgatagaccacgggcaggcgctggactgggacgcccaaagccgcaaggatctgcagcgtctggtgacgctgatcggggaatatcagcagcagcaaaaagagtttgaacaggcggtcacggcgaaagacgcggtgcgccagagctggaacatgtcggaagtgcaggccagcctgagccaggtggagcgccagctgaccaacggcgatctgcagttggccttcatccagctgaaccagaagctgacccaggtgcgctacggcgcgcgcggcctgctgctgagcctgaacaaggaaaccgaagccccgctgatggcggccatcgacgatgcgcgcgacgcggccaatgccttgagccgccgggtcagcgacgcgcagcgcccgcagctgcaaccgctgctggccgcgctggacgattacaaaaaccgcatcgcggcctacctgccggcctatgagcacgaacagcaaatcagccggcggctcggcgaacgcgcgcaggcgatcggcatgctggtgaacgcctttatgcaggacgagctggcgcagacccacaatgatatcaatctcgcgcagctgcagatgggcatcaccacgctgatcgccatcatcgccggggtgcttatcgcctggcgcatcaccctgcagatcacccgtccgctgcacagcacgctggccatggcggaacgcatcgccagcggcgacctgcgccaggcgcagaccagcacccggcgcgacgagctggggcagctgctgaacgcggtggcggcgatgagccaaaacctgcgcaccatgattgagaagatccagatgggggtcagccaggtctccaccgcctcggcggaaatcgccgccggcaacaccgacctctcctcacgcaccgaacagcaggcggcggcggtcgaggaaaccgccgccagcatggaacagctgaccgccacggtaaaacagaacgccgacaacgcccatcacgccaatcagctggccaccgacgcctcgcagaccgcgcagcagggcggcaagctggtggaaaacgtggtcagcaccatgcgcgatatttccagcagttcgcagcgtatcgccgaaattaccaccctgatcaacggtattgccttccaaaccaatatcctggcgctcaacgccgcggtggaagcggcgcgcgccggcgaacagggccgcggcttctcggtggtcgccagcgaagtgcgcagcctggcgagccgcagcgcccaggcggccaaggagatcgaagggctgatcgccgaatcggtcagccgggtgaaaaccggcaccgaactggtggaaagcaccggcaacaccatggaacagatcgtccgctcggtcacccacgtgcgcgacatcatggctgaaatcgccgccgcttccgatgagcagacgcgtggcatcgcccagattggccaggcgatcgtcgagatggaccacaccacccagcagaacgccgcgctggtggaagagtccgccgccgccgccgattcgctggaagaacaggccgacatgctgctgcagagcgtctcggtgttccgtttggcggagcagaccgaacccgccgccgtgaaagccgccgcgccgaaagcgccggcggtaaaacccgcggccgccaacgccgcagcggaagagaactggaccaccttctga

SEQ ID NO: 425838 - DNA, 621 bp, Serratia marcescens
atgagttattcactgccatccctgccgtacgcttacgacgcactggaaccgcatttcgacaagcagacgatggaaatccatcacaccaaacaccatcagacctacgtcaacaacgccaacaccgtgctggaagcctaccctgagctggccaaatacagcgttgaagagctgatccaggatctggataaagtgcctgccgacaaacgcaccttcatgcgcaacaacgccggcggccacgccaaccacagcttcttctggaaaaacctgaaaaccggcaccacgctgggcggcgatctgaaagcagccatcgagcgcgatttcggcagcgttgagaaattccaggaagagttcgagaaagccgctgccacccgcttcggttccggttgggcctggctggtgctgaaagacggcaaactggccgtggtgtctaccgctaaccaggacagcccgctgatgggcgaagcggtcgccggcgcttccggtttcccaatcatcggtctggacgtgtgggaacacgcttactacctgaaatatcagaacaaacgccctgactacatcaaggcgttctggaacgtggtcaactgggatgaagccgccgcacgcttcgccgcgaagaagtaa

SEQ ID NO: 425839 - DNA, 588 bp, Serratia marcescens
atgcaggtcagcagaaggcagttctttaagatctgcgctggcggtatggcaggaacgacggtggccgcgctgggctttgcccccgaagtggcgttggcggaaacccggcagtacaaactgctgcgcgcccgcgagacccgtaatacctgtacgtattgttccgtcggctgtgggctgttgatgtacagccttggtgatggcgccaaaaacgccaaagaaagcattttccatatcgaaggggatccggatcatccggtaaaccgcggcgcgctttgcccgaaaggcgccggcctggttgacttcatccacagcgaaagccgcctcaagtacccggaataccgggcgccaggatcggacaaatggcaacgcatcagctgggacgacgcctttacccgcatcgccaagctggtgaaagaagaccgcgacgccaacttcatcaaaaccaacgaccagggcgttaccgtcaaccgttggctgaccaccggcatgctgtgcgcctcggccgccagcaacgaaaccggttttctgtcgcaaaaatttagtcgcgctctcggcatgcttgccgtagacaaccaggcgcgtgtctga

SEQ ID NO: 425840 - DNA, 2412 bp, Serratia marcescens
atgaccaaccactgggttgatatcaagaacgcgaatttgattatcgtcatgggcggtaatgcggcggaagcgcatccggtggggttccgctgggcgatggaagccaaaatacacaacaatgccaagctgatcgtgatcgatccgcgctttacccgaaccgcatcggtggcggacttctacacgccgatccgctccgggaccgacatcgctttcctgtcgggcgtgttgctgtatctgatgaccaacaacaagttcaaccgcgagtacgtcgaggcctacaccaacgccagcctgctggtgcgggaagattttgccttcgaagacggcttgttcagcggctacgacgcggaaaaccgcaagtacgacaaaaccacctggaactaccagttcgacgagaacggcttcgccaagcgcgacgtcacgctgcaggatccgcgctgcgtgtggaacatgctgaaacagcacgtgagccgctacacgcctgacgtggtgaccaacatctgcggcacgccgaaggacgatttcctcaaggtgtgcgaatacatcgccgaaacctgcgtcgcggataaaaccgcttcgttcctgtacgccctgggctggactcagcactcggtcggcgcgcagaacatccgcaccatggcgatgatccagctgctgctcggcaacatgggcatggcgggcggcggcgtcaacgcgctgcgcggccactccaacattcagggtctgaccgatctcggcctgctgtcgcagagtctgccgggctacctgacgctgccgtcggagaaacagaccgatctcgagacctacctgaaggccaacacgccgaaggcgctgctgccgggccaggtgaactactggggcaactacccgaaattcttcgtcagcatgatgaagaccttctacggcgacaaggcgcagaaggacaacagctggggctttgactggttgccgaagtgggacaaaggctacgacgtgctgcagtacttcgagatgatggcgcagggcaaggtcaacggctacttctgccagggctttaacccggtggcgtcgttcccgaacaaaaacaaggtggtggcttcgctgtccaagctgaagttcctggtgaccatcgatccgttgaacaccgagacctccaacttctggcagaaccacggcgagttcaacgaggtggacccttcgcagatccagaccgaagtgttccgcctgccgtccacctgcttcgccgaagagaacggctcgatcgtcaactccggccgctggctgcagtggcactggaaaggcgcggacgccccgggcgaagcgctgaacgacggcgagatcctggcgggcatcttcagccgcctgcgcgagatgtatgcgcgcgacggcggtgcggtgccggaacaggtgctgaacatgacctgggactacctgacgccggacaacccggcgccggaagaggtggcgcaggaaaacaacggcaaggcgctggcggatctgctggatgccgacggcaaagtgctggtgaaaaaaggcgagctgctcagctcgttcgcgcagctgcgcgacgacggcaccaccgccagcggctgctggatcttcgccggcagctggacgccggccggcaaccagatggcgcggcgcgacaacgccgatccgtccggcctcggcaatacgctgggctgggcctgggcatggccgctcaaccgccgcatcctgtataaccgcgcctcggcggatccgcagggtaaaccgtgggatccgaaacgccagctgctggagtgggacggcgccaagtgggtcggggccgatatcccggactacagcaccgccgcgccgggcagcgacgtcgggccgttcatcatgcagccggaaggcatgggccgcctgttcgccaccgacaagatggcggaagggccgttccctgaacactacgagccgttcgaaacgccgctcggcaccaacccgctgcacccgaacgtggtgtccaacccggcggcgcgcgtgttcaaggacgatctggcggcgatgggcaaatccgataagttcccgtacgtcggcaccacctatcgtctgaccgagcacttccactactggaccaagcacgctttgctgaacgccatcgcgcagcctgagcagtttgtggagatcggcgaaaagctggcggagaagaaaggcatcaagcacggcgataccgtgaaggtcagctccaaccgcggctacatcaaggccaaggcggtggtgaccaagcgtattcgcacgctgcaggtgcacggccaggaagtcgacaccatcggcatcccgatccactggggttacgaaggggtggcgaagaaaggctttatcgccaacacgctgacgccgttcgtcggcgacgccaatacgcaaacgccggagttcaaggcgttcctggtcaacgtggaaaaggtgtaa

SEQ ID NO: 425841 - DNA, 903 bp, Serratia marcescens
atggccatgcaatctcaagacatcattcgtaaatccgccaccaatggtttcacgccggcgccgcgcgcccgtgaccaccaggaagaagtggccaaactgatcgatgtcaccacctgtatcggctgcaaggcctgtcaggtggcctgttccgaatggaacgacatccgcgacgaagtggggcacaacgtcggggtgtacgataatcccgccgatctgaccgccaagtcgtggacggtgatgcgcttctccgaggtggaggaaaacggcaagctggaatggctgatccgcaaggatggctgcatgcactgcgccgatccgggctgcctgaaggcctgcccgtcggaaggcgcgatcattcagtacgccaacggcatcgtcgacttccagtccgagcactgcatcggctgcggctactgcatcgccggctgcccgttcgacgtgccgcgcatgaacaaggacgacaaccgggtgtacaagtgcaccctgtgcgtcgaccgcgtggacgtcggccaggaaccggcctgcgtgaaaacctgcccgaccggcgccattcacttcggcaccaaggaagcgatgaagcaggtggcggcggatcgcgtcagcgagctgaacacccgcggctaccagaacgccggtctgtacgatccggcgggggtgggcggcacgcacgtgatgtacgtgctgcaccacgccgacaaaccgcagctgtaccacggtttgccggacaacccgagcatcagcccggcggtgaccttctggaagggcgtgtggaaacccctggcggccatcggctttgccgccaccttcgcggccagcgtgttccactatgtcggcgtcgggcctaaccgcgtcgaagatgaggacgagcacgacgagtcgcacgacgaggagacgcgcaaatga

SEQ ID NO: 425842 - DNA, 636 bp, Serratia marcescens
atgagaaaggaaaagcccattcagcgttacagcgcaccggagcgcatcaaccactggatcgtggcgttctgctttgtgttcgccgccatcagcgggctggggtttttcttcccctccttcaactggctgatgaacatcttcgggacgccgcagctggcgcgcattctgcacccgtttgtcggggtgatcatgtttgccgcgttcctgctgatgttcctgcgctactggaagcataacctgatcaaccgggaagatatcgtctgggccaagaacatccacaaaatcgccatgaacgaggaagtgggtgacaccgggcgctataatttcggccagaagtgcgtgttctggacggcgattatcagcctggtgctgctgctggccagcggcgtggtgatctggcggccgtattttgcgccgtcgttctccatcccgctgatccgcatcgcgctgctggtgcattcgctggccgcggtcggcctgattatcgtgattatggtgcacatttacgccgcattgtgggtaaaaggcaccattaccgcgatggtggaaggctgggtgccggcggcctgggccaagaaacatcatccgcgctggtaccgtgaggtccgcgagaaacgacaggaagataaaccctga

SEQ ID NO: 425843 - DNA, 930 bp, Serratia marcescens
atgagtatccgcatcgttcctaaagagcagttaggggcacagcgtgagaagtcctcaacggcggagaacatcccgccgttacttttcgccaacctgaaaagcctgtacagccgccgcgccgatcgcctgcgtcagctggcggtcgacaatccgctgggcgactatctgaacttcgccgccgagctggcgcaggcgcagcagcatgcgctgcacgataatccgctgcagctcgatcttagcgaagcgctggcgcagggcgccgccagcggcaaaccgccgctcgatctgagcgtgttcccgcgcagcgagcattggcgcaagctgctggcgtcgctgatcgccgagctgcgcccgcaggcgccggagcatatcctggcggtgctggacaacctggagaaagcctcggcgcacgagctggagctgatggccgacgccttgctcaaccgcgagttcggcaaggtgggcagcgagaaggcgccgttcctctgggccgcgctgtcgctctattgggcgcagatggccagcctgatccccggcaaggcgcgcgccgaatacggcgagcagcgccagttctgcccggtgtgcggcagcatcccggtctccagcatggtgcacatcggcaccgtcaacggcctgcgctacctgcactgcaacctgtgcgaaagcgaatggcacgtggtgcgggtgaagtgcagcaactgcgagcagacccgcgatctcaactactggtcgctggacagcgagcaggcggcggtgaaggcggaaagctgcggcgactgcggcacttacctgaagatcctgtatcaggaaaaagacccgcaggtcgaagcggtggccgacgatctggcttcgctggtgctggacgcccgcatggaagaagaaggctttggccgcagcagcatcaatccgttcctgttcccggcggagtaa

SEQ ID NO: 425844 - DNA, 648 bp, Serratia marcescens
atgttaaacaccctggcaaaactgaccgcggtcgccgtgctggcggtcggactggcggcctgcgacaacaaagacgacaccaaaccggcggtgccgccaccggacaccaagccgaccgtgacgcagcccgcgccaccgccgcctgcgccggtagaaaccccgcccgcgccgccggggctgaacgtgtcgctgcagaagggcaaaatcaccttcgagctgccgccgggctttagcgatcagacgttgaacagcggcatcatcaacgacagcacctccaccattcagcgctttctcgacggcaagtcgcgccagagcgcggtctcttccgaagtgatcccgccggacggcatgaagctcaacaccagcgacaaaatgctgaaagagctggcgcagagcgccatcacggtgctggccgagcgctatcagaatatccagaccaccaaagaagagaacttcagcgtcggcaaacagaagtttcgccgggttgataccgagcagaccgtcaacgggcaaaaggtggtctccacgctggtgttgacggtgttcaacaagcgggtggtgacgctgcaaatgctgtcgccggccaaaacgccggaagtgcatcaggcgctggtgcagcggattatcgataccctggcggtgaagtaa

SEQ ID NO: 425845 - DNA, 606 bp, Serratia marcescens
atgaagcttatcggcagttacaccagcccctttgtgcgtaagatttccgtgatgctgctggaaaaagggatcgcgttcgaattcgtcaacgatccgccgtatgagcccgacagccgggtgaaggagcttaacccgctcggcaaggtgccggtgctgatcgccgatgacggcgaggtgttttacgattcgccggtggtggccgaatacctcgaactgctgacggtggagccggcgtttttgccggccgaacgcgccgccgcgctgcgcgtccgccaggtggcggcgctggcggacggcgtgaccgaagcggcggcgaccctgtttcgcgaaagccggcgcgcgccggaaaaacaggacgaaaactggatgctgcgccagcgtgacaaactgacgcacgggttggatgcgctggaggcgctggcgtgggacaaaacgtggctcaatgccgagcggctgacgctggcggatatcgccaccggctgcgctctgggctacctgaatttccgccgcatcctgcccaactggtgcgtcgggcgcccggcgctggtcaagctggccgaacgcctgttcgcccgtgaaagcttcgcccgcaccgcgccgccctga

SEQ ID NO: 425846 - DNA, 1395 bp, Serratia marcescens
atgagcactgaatcccaccttctttacagccaactgcccgccatcgaccgcctgctgcgtgaacccgcgattgaaccgctggtggcgcagcatggccagacgctgatcggcgaactgctgcgccggctgcaggcccaggcgcgtgacgctatcaagcaacagcaacgtttaccggcctggtgcggcgactggccgcaggcgctgcgggccgagctggcccggcagcaacgcccggctttgctgccggtgttcaacctcagcggcaccgtgctgcacaccaacctcgggcgcgccctgctggcgcagccggtgaaggaggcggtgagcgtggtgatgggggaggcggtgacgctggagtacgatctcgacggcgccgggcgcggccatcgcgatcgggcggtggcggatctgctgtgccggctgaccggcgcggaggacgcctgcatcgtcaataacaacgcggcggcggtgctgctgatgctggcggcgatcgcccccggcaaagaggtggtggtgtcgcgcggcgagctggtggagatcggcggcgcattccgcatacccgacgtgatgcgccaggccggctgccaactggtggaggtcggcaccaccaaccgcacccatctgaaagattaccgccaggctatcaacgaacagaccggcctgttgatgaaagtgcacaccagcaactacagcattcagggctttaccgcggcggtcgacgaggctgaactggcgcagctcggagccgaacagggcgtgccgaccgccaccgatctgggcagcggctcgctgatcgacatggcgcagtacagcctgcccgccgaaccgatgccgcagcggctgctggccgccggcgtcgacttggtgacgttctccggcgataagctgctgggcggcccgcaggccgggatcatcgtcggcaaaaaggcgttgatcgcccgcctgcagcagcatccgctcaagcgcgcgctgcgcgtcggcaagctgacgctggcggccctggaggccacgctgcggctctatctgcagccggaaaaactggctgagcagctgccgacgctgcggctgctgacccgcccgcagcaggagatgcaacaggcggccgaacggctgctggcggcgctgatgccacggttcaccgccgatttcgagctgcgcgccgaaccgtgctggtcgcaaattggcagcggttcgctgccggtggatcgcctgcccagctatgcgctgaccttcacgccgcgcgacggccgcggcgccacgctggaagcgttggccgaacgctggcgccgcctgccgcagccggtgatcggccgcctcggtgacggccggctgtggctggatctgcgctgtctggaacaggaaggggcgctgatcgacgcgctgagcgcctcatga

SEQ ID NO: 425847 - DNA, 1842 bp, Serratia marcescens
atgatcatcgccaccgccggccatgtcgatcatggcaaaaccaccctgctgcaggcgatctccgggatcaacgcggatcgcctgccggaagagaagcgccgcggtatgaccatcgatctgggttacgcctactggccgcagccggacggccgggtgctgggctttatcgacgtgcccggccacgagaaattcctcgccaacatgctggcgggcgtcggcggcatcgaccatgcgttgctggtggtggcctgcgacgacggcgtgatggcgcaaacccgcgaacatctggcgatcctgcgcctgagcgggcgcccggcgctgacggtggcgctgaccaaggccgaccgggtggacgcggcgcgtgtcggcgaggtacgccgccaggtgcgcgacgaactggcgcgccagggctggcccgatgcaccgctgtttgttaccgcggcggcggcgggagagggtatcgaggcgctgcgcgcgcatttgctggcgctgccctccggcgagcacgcgctgacgcgccgttttcgcctggcggtagaccgtgcgttcagcgtcaaaggggcggggctggtggtgaccggcaccgcgctcggcggccgggtgcaggtgggagatacgctgtggctgaccggcgccgacgcgccggtgcgggtgcgcggcctgcacgcccaaaatcaggccgtggaacaggcccaggccggacaacgcatcgcgttgaacatcagcggcgatgtcgataaagaccgtgtcgcgcgcggcgactggctgctggcgcagcgtccgcctgaggcggcggaacgcattctggtggcgctggaagcggatcggccgatccgccattggcagccgctgcacctgcaccatgccgccagccacatcaccgggcgcatttcgctgctgaacgacgggctggcggaattgatcctcgatcgcccgctgtggctggctgagaacgatcggctggtgctgcgcgatatcggcgcacggcaaacgctgggcgcggcccgggtgctcaggctgagtgcgcccaagcgcggcaagcgccagccggactacctggcatggctgcaggccctggcgaacgcgcaggacgatgcgcaggcgctgacgcttgagctgacgcacggcgcgctgtctctgacggcgttcgcctgggcgcgtcagttgaccgacgacggcctggcggcactgctggcgaaccgcgatctgctgatcgtcggtgatcgggcgctggcgcaggatcaggtgcaacaggcggagagccggctgttgcaggtgctggcggagtaccaccaacagcacgccgatcagctggggttagggcgcgcccgtctgcggcgcatggccctgccccagcagccggaaacgctggtgtttatgatgatcgatcggctgctgaaggccggcgcactgcgcaatacgcgcggctggctgcacctgccggaacacggtctggcgttcagcgccgaagaggcgccgctgtgggcgcgcatcgaaccgctgttcggcgacgagccgtggtgggtgcgcgatctggcgagcgagttgggcgaagaggagagtcgggtgcgggcgctgctgcgcaaggcggctcagctgggccatgtgacggcggtggtggtggatcgctattacctcagccgacgcatcgatcagttcgcggcgctgatccgcgagctggatgctgagcggggcggcgccaacgccgccgacttccgcgatcggctcggcgtcgggcgcaagctggcgatccaggtgctggagttcttcgatcgcagcggctttacccgccgcaagggtaacgaacatctgctgcgcgacggcgggttgtttggcaactga

SEQ ID NO: 425848 - DNA, 261 bp, Serratia marcescens
atgaatacgaaagtcatcaccgctcatgtcccgctgcctttggctgaaaaggtggatgaaatggccgccaaacttgaacgctcacggggatggatagtgaagcaagccctcaccgcctggctcgagcaagaggaagagcgccgtcggttaacgctggcggcgctggccgatgtcgaacagcaaaacgttatcgatcatgaatcggtagaagcctgggctgccagcctggacagtgacgatccgctgccggtaccgcgctga

SEQ ID NO: 425849 - DNA, 276 bp, Serratia marcescens
atggagttaaaatggacgagtaaggcgctatcggatttggcgcgtttgtttgagtttcttgccttggttaaccgtactgcggcagcgaattcggtgaaggccttggtcgccgcgcctaaagcgttgcttgataattctcgcctgggtgaaagactggacgagtttttaccgcaggaagtgaggcgtattctggtcggccgttatgagatacgttaccaggtgcagccggcaacgatttatgttctgcgtatttggcatacccgcgaagagcgatag

SEQ ID NO: 425850 - DNA, 912 bp, Serratia marcescens
atggccagttcccttccgccgctttacgccctgcgcgccttcgaaagcgccgcccgcaccggctcgttcacgctggccgccgaggagctgcatctcaccccgagcgccgtcagcaagcacatcaaaacgctggagcagcacttcggctgtcgactgttccagcgcaacggcccgcgcatcgaggtcacgccgcaggggaaaatcttcgccgccgagctgcagcaaggttttggccgcatcgagcaagcctgcgagctgttcagaagccaccgcgatctgctgcggctgaaggcgccctccacgctgaccctgcgctggctgctggactgcctgagccggttccggcaaacggcgcaggcgttcgaggtgcaggcagccagcgtctggatggacatcgacagcgtggattttttcagcgaaccctacgactgcgccatcctgctcggcaacggccacttcggcgccaacaccgccgccgccaagctgttcgacgaatggctgatcccgatttgcgcccctgcactgctcgccgacgggcagcgcgatctcgccgcctgtccgctgatccacccttcgcccgatcggcgcgactggcggcgctggctgcaaaaaagcggcatcgcggccccgatcgatctcacgcgcggccaggtatttgattcgctggaacagggcaacacggcggccatcgccgggcacggcgtctcgatcggcgatctggcgctgagcctgcggacgattgaggaggggttattggcgctgccctgtgacgccgccgtgcgtaccggcgacggttactatctggtttggccggaagaatcggcgaaacggccgctgatcgaacgcttacaggcgtttctgaccgcccagacgcccgacgtcagccgggccgccgtcagatttatcgggtag

SEQ ID NO: 425851 - DNA, 627 bp, Serratia marcescens
atgaacctgtcgttgctggcggcgtatttcgccgccattttcttgctgatcgccacgccggggccggtggtggcgatggtggccaacaccgcggcgcgctttggcgcccggcgcgcgctgttgaccgcgctgggcagcaatggggcctctttgttgctgatcggcatcgccgcgctgattatcaccgggctgttcgcggtggatatgcgcttgctgcagtggataggcctgctggggtgcctgttgatcggccgcatggcgatcgcctcgctgtatgaggatttatccgcgcgaaccccggatgcgcagcccgttgcgccgccgcaaaaacgctcggcgatcctgaccggttttctggtgggcatcgccaaccccaaagacattatcttcttcgtcgcttttttcccgcagtttatcgccgtcaccccctcgatcggcgccagcctgacgctgttgaccgcgctgtgggtgctggcggacttcgccatcttgctggcctatatcaccctgctgtcgggaacggcgctgcagcgcgcgcggcgggcgatctctgtcctgtcggcgttgctgctgttgggggtggcggtggtgggagcggggtatgcgctgtgggggctgctcggctga

SEQ ID NO: 425852 - DNA, 1356 bp, Serratia marcescens
atgattgcgaaggtgaacaattggcggcaaaatagccgccacaactcgctcagtttgcgcttcccgccctggcagttcatttttctcttttactatcagtacaataatatgaaaacgacattaccacctgcggcacgtttgggccgacaggcgcttttattccctctttgtctggtgctgttcgagttcgccacttatatcggcaacgatatgattcagccgggcatgctggccgtcgtggcggatttcaacgccggcgaagagtgggtgcccacctcgatgaccgcctatctggccggcggcatcttcctgcagtggctgctcgggccgctgtcggatcgccgcggccgccgcccggtgatgctggccggagtggcgttctttatcgtctcctgcctggcgatcctgttggtcaccaccatcgagcagttcatcgccatgcgtttcctgcagggcatcggcctgtgctttatcggcgcggtcggctacgccaccatccaggagtcgtttgaagaatcggtgtgcatcaagatcaccgcgctgatggccaacgtggcgctgatcgccccgctgctcgggccgctggccggcgcggcgctgatccacgtcgcgccgtggcagagcatgttcgtgctgttcgccgcgctggcggccatcgccttctacggcctgtggaaagcgatgccggaaaccgccacgctgcagggcgaggcgttttccgccgccaacctgtggcgcgactaccgtcaggtgctgggcaaccgccgcttcctgtgcggcgctttggcgatcggtttcgccagcctgccgctgctggcctggatcgcccagtcaccggtgatcctgatcagcggtgagtcgctgtcgacgctggattacggcctgctgcaaatcccggtgttcggcgcgctgatcctcggcaacctgacgctggcacgcctgaccggcaaaaacagcgtggagcgcctgatcaagctgggcgcgggcccgatgctgctggggctactgatcgccgcgctggcgacccagttctccagccatgcctacctgtggatgaccgccggcctgagcctgtacgccttcggcattggcctggccaacgccgggctgtaccgcctgacgctgttctccagcaacgtcagcaagggcacggtgtcggccactatgggcatgctgagcatgatggtgttcaccatcggcatcgaactggccaaggtcgcctacgtctggggcggtagcgggctgttcaacctgttcaacctcatcagcggcctgtgctggctgacgctggtggcgctgtttatcggcaaacgccgcaacggcgaccccacgccgcagccgaccggcgcggcttaa

SEQ ID NO: 425853 - DNA, 945 bp, Serratia marcescens
atgatggtggtgatgatccacgccaccacctattacgtcaccaacggcgcggcgatagggctgcacaactgggatatcgccaacgcactgaactcgctgtcgcgcgtgtcggtgccgctgttcttcatgatttccggctacctgttcttcggtgaaaagagcgccggccggcggcatttcacccgtatcgcctgctgcattctgttctacagcgccatcgcgctgatctatatcgcggccttcaccaagatcggcttctggccgtcgctgcgcgccatcctgcaaaagccggtgttctaccacctgtggtttttctacgccattacggtgatttacctgttgtcgccgctgatcagcgtcaaaccggtgtcgcgcctttacctggccgccgcgctggtggtgttggcggcgatcgccaacccgaataccgacaagctgaccttcggcaatgcgcacctgctgccggttaacctgtatatctacggcgataccttctactacctgctgtatgcgctggcagggcgggcgattggcatgatggaggcgcgcgggcgcgccgtgggctggctggcggcgctgggatttgcgctgtgcgtggcgctgatcgcgcgcggcaccaagcaccagctgttcatcaacggcaacttcgccgatacctactacatctacagcggcccgctggtgtttatggcggcggtggcgctgctggtgtgggtgaaacactgtttgccgcagccgatcggctggctgagcacgttctcccgccattcgctggcgatctacggttttcacgcccttatcgtcaacgtgatgcgtagccggcacctggatttcaccggccacccgctgctggatatcttctgggtgttcggcgtggcgctggggctcagcctgctgctgtctgtcggcctgcagcggctggatacccgccggctggtgtcatag

SEQ ID NO: 425854 - DNA, 924 bp, Serratia marcescens
atgtcgcaggccgtctattttctgctgttgcccaacgtgctgtcgctggacgtcagcggcccggcggaaaccctgcgcctcgccgggcagttcagcctgcgttatctcagcccggcgccgcagatcgtctgctccatcggcatgacgctgagcggcctgcagccgttgcccgaacgcttggaagacggcgccattctggtgctgccgggcgtcggcgattcgcagcgctatttcgccggggaagaggccgagcaggcgcgccgctggctggcgacgctgcggcccgatctgcagcggcagcgcatcaccctggtgtgcatctgttccggcgcgctgctggcggcgcaggccgggctgctcgacggctatcagtgcaccacccaccacgacgtcatcgaacgtatccgccggcaggcgccggcggcgcaggtgaaagagaaccgtatcttcgtcgaagatcgcggcgtctacaccagcgcgggcatcaccaccggcatcgatttggcgctgcacctggtccaccgccactgcggctccggccgggcgcgcgacgtcgcccgcgatatggtggtctatttccgccgtgccggggacgatccgcagctgtcgccctggctgcgctatcgcaaccacctgcacccggcggtacaccgcgcgcaggacgtgatggccgccgagccggaggccgactggtcggtgccgcaggtggcggagaaggcgcacgtcagcagccgccacctggcgcggctgtttcgcaaccacgtcggcatcagcgtgcgggagtatcatgagcagctgcggttggcggtggcgcaacagcgcctgcagcaaggatatgggttggagaaggccgcgctggcggccggcttttcttccgggcggcagctgcgccgcgcccagcagcgccagcgctcgccgctatga

SEQ ID NO: 425855 - DNA, 552 bp, Serratia marcescens
atgtcacagagtgcgttattgatcatcgatgtccagcaatcattccagcaccgtccattctggcaggaggacgatctgccggcgtttcagcaggcgctgacgcgcctgatcgcgggttgccaacaacgcggcgcagcgctggtcgatgtgctgcacgtttcgccgcaggggccgttctcgctggcttcaggccatgtgcagcgcctgccgttcctcacccaccaggcggatatcaccgtgcataagcacgtacacaatgcgctgaccgaatccggcctcgacgcctggctgcgcgagcgggatatcaaccacctgatcgtctccggcatccgcaccgagcagtgctgcgaaaccaccacccgggtagcgtcagatctcggttatcgggtgaccttcgtcaccgaggcgacgctgaccttcccgatgcgtcatcccgacggtgaaacctttacccccgcgcagctgaagcggcatactgaaaccgtactggtcgatcgtttcgcccgcatcgccagcgtggatgaggcgctggcgcaactcgcacaggagtaa

SEQ ID NO: 425856 - DNA, 1389 bp, Serratia marcescens
gtggaaaaccctcaacaaccgggccgcagagccttcctcagccaaaccggcaaacttaccaccgcctgtgcggtgatcggccttacgggcggcatggcgcaggccgcgtcaccgggcgacgggcagtgcgcaccggcaccgatgaccctgaccgatcgccactactgcctgagcgaggtgcggctggaagacggctttgaatacgacggcgaaacggtgatcggcacccgcaccgcgctgtacacgctggagatcaaagacggcaagatcgccgccattcacgccgccaacgccgcgttgcccgccggcgtgccccgctataaggcgcagggccagctgctgctgccggcgtttcgcgacatgcacatccacctggacaaaaccttctacagcggcccgtggcaggcgccgcgcccgcgccagggcaagaccatcatggacatgatcgcactggagcagacgctgatcccgaaactgctgcccacctcgcagcagcgggcggaaaatctgatcgccctgctgcagtccaagggcagcaccgtggcacgcagccactgcaatatcgatccggtcagcggcctgaaaagcctggagcacctgcagcgcgcgctggaaaaacaccaggcggacttcagctgtgaaatcgtcgccttcccgcagcacgggctgttgcactccaaagtcgatgcgctgatgcgcgaagcgatgcagatgggcgtgcagtacgtcggcgggctggatccgaccaacgtcgacggcgcgatggagcaatcgctggacgccatgttccagatcgccctcgataccggcaaaggcgtggatatccacctgcatgagaccagcccggccggggtcgccgccatcaactatatgatcgccaccgtggagcaaaacccggcgctgcgcggcaaggtcaccatcagccacgctttcgccctgaccacgctgacgccgggcgaactggcggaaaccgccacccggctggcggcgcagcagatcaccatcgcctccacggtgccgatcggcggcctgatgatgccgctgccgcagctcagcgagaaaggggtgttcgtgatgaccggcaccgacagcgtgatagaccactggtcgccgttcggcaccggcgacatcctggagaaggccaacctgtacgcccagctgtaccgtggctccgacgagtatcacctgtcgcgcgccatggccatctccaccggcggcgtgttgccgctggacgataagggccagcgcgcctggccaaaagccggcgacgccgccgagttcgtgctggtcaacgccagctgttccgccgaggcggtcgcccgcctgccggcgcgcagcgccaccttccatcaggggcgtctggtggccggccaggtgagcaaagcctaa

SEQ ID NO: 425857 - DNA, 441 bp, Serratia marcescens
atgacgctggacaatctggtcgggctgggactggaggtgataacgcctgccgcgggggcgattaaaaaattgctggccgccgccgcgcgcaaccgacgcgatgcgggtatcactcagctcagcaatgagagccgtttcgacacggcatataaggcggtcatgcaaatggctaatgccgctttacaagccaaaggataccgcacgctgaccagcaagcccggccatcaccagatcatgatccaatcgttgccgctcaccgtagggctgccgcgcgaggcaatgatctgcctggacgcattgcgaaagcagcgcaacgtggcggattactccggcgacttggtgacggacgcggcggtacaggcttgccttgagcagacagaggcgctgtgggggctgcttatcgactggctgcaacgtgaatatccgcagatagtggcgtaa

SEQ ID NO: 425858 - DNA, 855 bp, Serratia marcescens
atgaatcgctacccgatgttcaatccgcagctgctgctcagcttcgtcgccgtatgcgacagcaacagcttcacccgcgccgcagagcgggtgtttttgtcgcagtccaccgttagccagcaggtgcgccggctggaagagatgctgggcaaaccgctgtttgagcgctcctcgcatcaggtgctgctgaccgaagaaggcgtcaagctgttgagctacgcgcgccgcatcatcgcgctgaatgaagaggcccacgacgcgctaaccggcatctggcgcgacggcgtgctgcggatcggcatgccggaggatttcgccgtgcccaccaccgagctgctggccgacttcagccgcgagcacccacacctgcgattggacgtcgccagcggcctgagcgccgatctgcacagcgcctacgcgcgtgaagagctggatctgatcctggtgaagcagcgccgccgacaaccgccgcgcgccgcgcggccggaaccgctgctgtggttggacagcctggccttcccggccatagagcaatcgccggtgccgctggcggtatttccgctcagcggcctgtaccgcgacgagctgtgccaggcgctggacaacctcggcaaacgctggcgcatcggctacagcagcgccagcctggcggcgctgaccgccgcttccgccgccgggctgggcgtcaccctgttgccggccggctgccgtctgccgacgcatcgggtgctgggcgaagccgaaggattgccgccgatagacaacttcgaactggcgctctactaccgcgacggcgcccccgccgccacgctgtcgctggcccagcggctggcggtgttttgcgggttgaagtga

SEQ ID NO: 425859 - DNA, 1200 bp, Serratia marcescens
gtgttaaatcattctgttaattcaccttcttcgcgccgctggttcaaccctctgctgctggcgctggtgttgatcggcctgaacatgcggccgctgttgacctcgattggcccgttgctgccgacgctgcgccaggctaccgggctgagctttggcggcgcggcgctgctgaccacgctgccggtgctgatgatgggcctgatggcgttggcgggtggcgccatcaaccggctgttcagcgaacgtagcgccgtggcgttgagcctgttggcgattgggtcgggcgcactttggcgcgagctggcccccggcagcgtgcagctgctgatgagcgcggtgctgggcgggctcggcatcggggtaatccaggcggtgatgcccggtatcatcaagcatcatttcctcaacagcatggcgctggtggccgggctgtggtcggcggcgctgatgggcggcggcgggctgggcgcggcgatcactccgtggctgatgagtgcggggcacgactggcacagcgcgctggcctggtgggcgttaccggcgctggtggcgctgctggcctggtggccggtcagtcgcgggctgtcgcgcctgggcgcggcgggagaaaaccgtgggccaagcctgctgcgcaaccggcgcgcctggctgctcggcgcctatttcggcctgatcaacggcggctataccagcctgatcgcctggctgccaccgtattacatgcagctcggttggcagccgcaggccagcggttcgctgctggcgctgatgaccttcggccaggtggtgggcgcgctgctgttgccggcgctggcgcgcaatcatgaccggaggccgctgctgctgctggcgctgatgatgcaactgatcggctttatcggcctgatttacctgccgcagacgctgccgtggctgtgggtgttggtttctgggctggggctgggcggcgcgttcccgctgtgcctggtgctggcgctcgatcacctgcaccagccggcggcggccgggcggctggtggcctttatgcagggcgtcggcttcctgctggcgggcgtgacaccctacctctccggcctgctgcgcgactacagcggtggcttcgtgctggactggcagatccacgcgctgctggtggtggtgctgatcgccatcacctggcgcttccacccgcacagctaccggcgggcgttcgccgaataa

SEQ ID NO: 425860 - DNA, 1344 bp, Serratia marcescens
atgcacaacaccaaaacccggctggcgctgctggtcggctgcatggcgctgagcgccaacctgtgggccgaggcgcagccggtaccggcgacgctggcggggcatgcgctgctgccggtgaaatccaccgtttccacgccgaaggacgcgccgagcgatctgcagctgagcggtaagtacaccagtggcaaacgcgtcaccgagctgggcagcgtggcgggcaaatccgccgatcgcctgaccggcctcggcctgccgatcgaaggccagccgctgcagggccactcaggcatcaaacacatgcccgacggcacctactgggtgctgaccgacaacggcttcggcagcaaggccaactcgccggacgccatgctgtatctcaaccactacaagatcgatttcaaagacggcacggtcgcgccgctgaagacggttttcctgcacgatccggataaaaaggtgccgttccacatcatcaacgagagcaccgagcagcgttatctgaccggcagcgatttcgatccggaaagcttccagtttgccgacgatgccttgtggatcggtgaagaattcgggccttacctgatcaaggccgacctgaacggcaaagtgctggcggtgttcgacacccaggtggacggcaaggtggtgaaatcgccggacaacccgacgctaaccctgccgggcgcgccggacggcaagcagaacttccaggtggcgcgctccaaaggctttgaaggcatggccgcctcgccggacggcagcaagctgtacccgctgctggaaggggcgctgtgggacggcgagcagttcgagaacgtcggcggcaaacgctatctgcgggtgctggagttcgacgtgaaacagcaggcctggaccggccgcagctggcagtacgtgctggaagacaaccagaatgccatcggcgacttcaatatgatcgacgccacccacgggctggtgatcgagcgcgacaacggcgaaggcacgccggataaagcctgcgccgcaggcgcgccgaccgacaactgcttcagccaggtggccaagttcaagcgggtgtataaaatcgccttctcggacgccaacgtcggcaaaccggtcgacaaactggcctatatcgacctgatgaacatccaggatctgaacaagctggcgcgcaagccgctgaacgacggcgtgctgaccttcccgttcttcaccatcgagaacgtggacgtggtggacgccaaccacatcatcgtcggtaacgacaacaacttcccgttctcctccagccgccaacccaatatggcggatgacaacgagttcatcctgctggacgtgaaggatttcctgaagtag

SEQ ID NO: 425861 - DNA, 339 bp, Serratia marcescens
atgaccaaagcgtattattggaaaagtcaggtgtggggagcggcctatttttttaccgcgctttattacatctattctttccaggacatggtgaatatcgcactttcgttgatcctctccatcctgagctttttactgtatccctgtgctaaaaaaggcattgaaacggccgccctgcggttcacgagtgaagaattttggcaccgcggactgttcgccgataccataggcaaaaatggcgtgctgatcctgtattatgcattctgttatgtcatggccgtgccgctgggcgccctgtatctgcttgccctgttcctcagaaataaaaaggccgcgtaa

SEQ ID NO: 425862 - DNA, 903 bp, Serratia marcescens
atgccgcaaaaaattgatttcaacctgatctatgcgctgaatctgctgctggaagaagggagcgtgagcggcgccgccgaaaagatgaatctgagcgcgccggcgatgagccgcattctggggcgcatccgccggcagttcgacgacccgatcatggtcagagccggtaagcatctggtgccgacgccgcgtgcgctggagttgaaacgccagctcggtgatatcatcgagcaggccgccgcgctgatcgcgccgaatgaatccttcgagcccggcaagctgaccagaaccttcaccattcgcgccaacgacatttttatcggcgcgctggcaggcggcttgctggagacgctgcgggacatggcgccgctgagcggcctgaagtttatcgccgaaagcgacggcgaggatgacgcgctgcgcagcggcaaggtggatctggtgatcggttcctcacgcgactggcacccggaaatcaagacgcagagcctgttcaccagcacctttcaggcgttggtgcggccggggcacccgatcattggccgggtaacgcccgaaaccctgacccattacccgcatatcagcgtctcccgccgcgggcgcacccaggggccgatcgacgacgcgctgcgcgatcttggcctgcagcgcaacgtcgccctgaccctaccgggcttccattcggcgatgatgctgaccatgaaatcagactttatcctgccgctgccgcgccacgtgctgcagggggtgagcaacatccacctgccgttagcagagatcgagctgccgctcgagctggaatcagtgtttatcgtacaggcctggcaccctcgcctcgatcgcgatccggcgcaccgctggctgcggcaaaccatcaagcagttctttttgcaaagggagtga

SEQ ID NO: 425863 - DNA, 1536 bp, Serratia marcescens
atggttgaggtgtctgttacgccgcaccacaaaaatcgatggctcgccagcgccggcgaaatcaacggccgcacctggctggggttgttcggcgtgtttttggcggtgatggccagcggcgtgggggaaaacgccagcaagttcgcgctggcggatatacagggcggcatgctgctgagcttcgatgccggcagctggctgaccacctgttatgtcaccggctttgtgatcggttccgggttcacgccctgtttttggccgaccttttcgctgcgccgggtggcgttgacgatgtgcggcatttacctggccggtggactgctgacgccctggttgggagaacagtatggcgtgctgctggcggtgcgcagcctgcagggcttcgccggcggcgcgttgccgccgatgctgatgacggtggtgctgcgttttatgccgccgctgatcaaggtgctggggctgggcgcctatggctgggtctccgcctggagcgccacgctgggcgccactgccgccgcctttgcctttcactggggctggagcgggtacttctattggaacctgccgctgatggcgatcgccgctgtgtgtatcggctacggtctgccgcaggatccgctgcggctggagcgcctgcggcagttcaactggcgcggcctgttgctcggcggcatggcactcggcatgctgacgatgggcatctcacagggggagcgcctcgactggctgaactcaccgctgatctacgttttattgttgggcggcggcggattattggcattatttctgatgaatgaatggtatcacccgctgccctttttcaatttgcagctattaagcaaaaggaatttgtctttctccttaattacgctgggtggcgtgctgttaattatggtgtcgctagtcaatattacgtcgggatatttagccgcgattcagggctatcgtcaggaacaaacctccgacttaatgctgtgggtagcgttgccgcaattaattacgctgccaattgtcgccatgatatgcaatacgccgcgggtggattgccgctgggtgctggcgatcagcctgctgttgatggccaccgcctgcgtgctggccgcccagctgacgccggaatggaacggcgacacgtttcgcgttatcgcgctgttgcaggcggtcgctcaaccgatggcgatcatccccctgttgatgcaggcgaccggcgggctgttgccgaccgacgggccgtttgcggcggcctggttcaacgcggtgaagggtttcgccgccaccgcggccggcggcgccatcgcgctgctcagccggcagcgcggggactatcacgccggcacgatcgccgacggttttggctcggcctacagccgcgcatcggggtcggcggagcagttggcgcagcttgccgcccggcagggccacgtgctggccagcgccgatctttatctgttggttgccggcctggcgttattactgaccgcgctgattttatttatgccgacccgtatttatccgccgcgttcggtcgccgcctga

SEQ ID NO: 425864 - DNA, 1044 bp, Serratia marcescens
atggctaacaagaaagtcgccgtcgccgtattggcggttaccgtcattacgctgggattattaatcaataaattccttattaaagagacacagcagaataccaacgacgcctatattcgcgccgatatctcgcgtatttctccgcagattgccggtgaaattgcgcaggtgttggtcagggacaatcagtgggtcaaacagggggagttgctggcggtgatcgacccgcgtgaattcaacgttgccctagcgcaggcgacggcgcaggagcaatcggcccgcgcccggcaggacgacgccagggccaatctgacccggcaaagcgcgctgatcgccgccgcgcaggcggagcgtcaggcggcgcaggcggagctggcgtttgcgcgccaggagcagaaccgctaccagagaatggccagcagcggcgcgggctcccagcaggcggcgcagcaggcgacaacgcgggtgcacacgctttccgccaatgtggcgcaggcggaggcgacgctcaaagcggcgcgatacatggagcaggtgctgcaagccaagctggcggacagcgatgccgagctgatgctggcgcaggccaagaaagcgatggccgagctgaacctgtcttacacccgcatcaccgcgccgatcggcggcgtggtcggcaagaaaagcctgcgggtcggggagttcgtcaaaccgggcgatgcgctgctggccatcgtgccgcaggacaagctgtacatcatcgccaactaccaggaaacccagctggaaaacattgcgcacgggcagtcggtggacatccatatcgatacctttcccggccaaacgctgaaagggcaggtggacagcattgcgccggcttccggcgtcagcttcgcggccgtggcgccggagaacgccaccggcaacttcaccaagatcgttcagcgcatcccggtgaagatcgtgtttgatagcaacaaggagcacgccgccttgctgagcgccctgcgcgtcgggatgtccgcggacgtcagcatcaatacgctggacggaggcctgcaatga

SEQ ID NO: 425865 - DNA, 1446 bp, Serratia marcescens
atgaacagagccgtgatcccgctgctgttgattgcgctgagcggctgccgggcggtagggccggactacgctcggccgcagaacgcgctgcccaataactggggcgagcaggccggcggcggggcgctgccggtggcctggtggtcgatattcaacgacgcgccgctgtcgcaactggtgcagcgcgcggcggccggcaacctggatctgcagctcgccacggcgcgcatgcagcaaagccgcgccctgctgggcgtgaccgaggcggcgctgatgccggatctgagcctggacggcgcctatcagcgccagcgcgccacctcggtgggcagcatggatccgtccggcaacggcggagaggcggattataacctctggcgcggcggattcagcgccagctgggagctggacatgtggggcaagctgcgtcgcgcgtcggaaagcgcgcgcgccggcttcgccgcttcgcaggagaatcggcgcgcgctgctgacgtcggtgacggcggaggtggcgagcgattatctgcgcctgcgcgccacgcagcagcagctggcggtggcgcaggaaaaccgcgccacggcgctgcgcacgctgcagctgacgcaaagccgttatcaaagcggcgcgggcaacgaactggatatcgatcaggcgcaggtgcagttggcgcaggtggatgccctgctgccgacgctggtcgatcggcaggaacgcttgatcaacgccatcagcctgctgttgggcgagcggcctggcgcgctgaaagcgatgttgtcgccgacggggccgctgccgacgctggcgcgcgcggtgccgatgggcgtgccgtcggatctggcgctgcgcaggccggatattcgcgaagcggcggcgcgtttgcatcaggcgaccgccgagatcggcgtcgccaccgccgactactatccgcgcatcacgctgaccggcaacgcgggctatcaggcgctggcgctggcggatatgggcagttggtccacgcataccttcgccatcggccccaccctgtatctgccgctgttcgacggggggaaaatcacccagcgggtgcgcctgagcgaataccggcagcaggaaatggccatcgcctaccagcaaacggtgctgcgcgcctggcacgagatcgacgacgcgctttccggctatcgcgcccagcagcgccgccagacgcacctggccgaggcgctggccgccaaccggcacgcgtttgcgctggcgcgcgacagctatctgaacggcgccagcgattttatccatgttctgagcacgcagcgtgcgctgctggatctgcagtccgcgcaaattgtttctcaggaggagacggcgatcgccgtggtgaatatctatcgagcgctgggcggtggctgggaacacacctatccgtctgcggcgccacaggagaaggctgatgcacaatacgctgaataa

SEQ ID NO: 425866 - DNA, 774 bp, Serratia marcescens
atgcacaatacgctgaataaaattgtcgacgagatgctggaaagggacacccgccgcaaacgggaggcccgggtgagcgccgtgcggcaagtcaccgcccggatccgccgcatcacgttgagcggcgacgatgtggataagtttatcgccgatccgcgcgcgcaggagccggccaactgggtcaaggtgttcttcccgtggcgcgacacgctggccggacgggcttacaccctgagcggcatcgacaaactcgcccgcaccttcgatatcgacatggtgctgcacggcgaaggcccggcgtcgaactgggcgcgcgacgcgatgccgggcgacaagctggggttcgccggcccttgctccggcggctttcgtctgttgccgcaaacccgctggctgctgttgctgggcgatgagaccgcgctgcccgccatgcgcaccatcctcgcctcgctgtctgccccgttgccggtgctgtggttcgccgaagtgggcgatgcgcaggagattcaggacgtcgattactcctttttgcaggtgaacagctggcaaatccgcacccgacatttcgacagcgtgatgaacagcccgctggtgcaggccgtcagccattgcgagctgccgcccggcgaagggcaggtgtggctggcctgcgaacaccaggtcgccgcctatctgaaggcgcgctttatcaacgaaatgggcatttcccgcgctgcgctgtttgccaagggttattggaaaaagggcgaagccaacttcaagggtgcgatttaa

SEQ ID NO: 425867 - DNA, 444 bp, Serratia marcescens
atgattgagagagtgttattggcggtggactgttttgaacacagcggcaatgccctggattttatggcgcgtctgcaaggcagcatcggcggcgtgatcgtactgacggtggtagacaatgccttcacgctcagccgcagcggcctgcgtttcgacagcgacgagcgcgaggaatatcccgccgcccagcgcgaagaggcgctggcggaaaagcaggtcgggcaggtgacgcgggcgctgaaacagatgggcttcaacgcccaggggctgctggctgcgggggcgcccatcgaggtgatcccggaacagatggcgctgtttaactgcgatttgctgatcatctcgcaccgccacctgtcttcgttggggcgctggctgaacgcctccgtcacgcgcggcctgctggatgagattggccaaccggtattggtgatcccgcgctaa

SEQ ID NO: 425868 - DNA, 513 bp, Serratia marcescens
atgcgaagcctggaagatcaacttgccgcttatgccgcctaccaccgcgatgcgcgcaatatcgccacgcattttatcggcatcccgctgatcgtcgtcagcctgctggcgctgctctcccggccggcgtggggcgcgggatggctgccgttttcgccggcctgcgcggtggttttcgtcgcggccctctattacctgcggctgagcctgcgccttggcgtcatgatgctggcgttgctgctgctgtgcctcgggatcggcgcctgggtggcgtcgctgtcgacggcggcgtggctgagcatcggcatcggcggtttcgtcatcggctggctgtttcagtttgtcgggcatttctgggaggggcgaaaaccggcgtttatggacgacgtgacgggccttatcatcggcccgctgttcgtgctggcggaagcctgcttcctggccggcgggctgcgtgaactgcagcggaacatcgaactgcgtgcgggcaaagtgcgcaatgcaaagcgctaa

SEQ ID NO: 425869 - DNA, 1167 bp, Serratia marcescens
atgaaagtgaattatcccttgttagcgctggcggtgggggcgtttggcatcggcaccaccgaattctctcccatgggcttgctgccgaccatcgccaaaggggtggacgtctccattccgatggccggcatgttgatcagcgcctacgccgtcggcgtgatggtcggcgcgccgctgatgacgctgctgctgtcgcaccgggcgcgcagaagcgcgctgattttcctgatggcgatctttaccctgggcaacgtgctgtcggctatcgcgccggattacaccaccctgatgctgtcgcgcatcatcaccagcctgaaccacggcgctttctttggtctcggttcagtggtggccgccagcgtggtgccgaaagagaaacaggccagcgccgtggcgaccatgtttatgggcctgaccatcgccaatatcggcggggtgcctgccgcaacctggctgggtgaaaccatcggctggcgcatgtcgttcctggcgacggccgggctgggcgtgatcgccatgctggggctgtggttctcgttgccgaaaggcagcgccggggcgcgccctgacgtcaagcgcgagctgtcggtgctggtgcgcccgcaggtgctgaccgcgctgctgacgaccgtgctgggggcgggcgcgatgttcacgctctatacctacatctcgccggtattgcagcacatcaccgaggcgacgccgctgttcgtgacggtgatgctggtgttgatcggcgtcggtttctccatcggcaactacctcggcggcaagttcgccgaccgttccgagagcgcgacgctgaagggcttcctgctgctgttggtggccatcatgctgctgatcccgctgctggcgcgcagtgacatcggcgcggcggtgagcatggtgatttggggcgcggcgacctttgccgtggtgccgccgctgcagatgcgcgtgatgcgcgtggccagcgaagcgccggggctgtcgtcttcggtcaacatcggcgctttcaacctgggtaacgcgctgggcgccgccgccggtggcgcggtggtctccgccggtttgggctacagcttcgtgccggtgatgggggcgattatcgccggattggcgctgctgctggtgttgttcaccagccgcaccgccgcaaaagtcgtttacgccaacggctaa

SEQ ID NO: 425870 - DNA, 750 bp, Serratia marcescens
atgacgttgcggactgagttgggacggattctgatcaccggcgccggcggccgggtagccacggcgtttcgtctggcgatgggcgatcgctacgcgctgcgcctggcggaacgagacatcagcctgctgagcgatcggcagccgggcgacgaagtcatcagcttcgacatcgccgatctcgatgcctgccgcgcggcctgcgccaatatcgacaccgtgttgcatttggcggccgatccctcccccgatgccgacttctgcggctcgttgatggacaataacattctcggcaccttcaatatcttccgcgcggcgaaagacgccggctgccgccgggtggtgttcgccagcagcgcgcaggcggtggaaggctatccgctcgattaccaaatccgcccggacgacgcgccgaagccgaagaacctgtacggcgccagcaaagccttcggcgaaggcatcgccgcctacttcgcccatcaggaagggctttccgccctgtcggtgcgcatcgccaacttcaccaccctcagcccgggcgatcggctcagcgctcgcgacatgagcgcgttcctcagccatcgcgacgccgccgatctgctggagcgctgcattcgcgtcgaaggggtgcaatatgcggtggtgcacggggtttccaataaccgctacacgcgtttatcgctggaagagacccgtcgcctgctgggttacgccccgcaggacgatgcgttcagcctgctcggctttgagtag

SEQ ID NO: 425871 - DNA, 1863 bp, Serratia marcescens
atgaaatatgacacattagccagtgagattttggccggcgtcggtggccgcgacaatgtgaaaagcctggtgcactgcgccacccgcctgcgtttcaagctgcgcgatgacactcgcgccaacgcggcagcgctgaagaaaaatcctggggtcattatggtggtggagagcggcggccagttccaggtggtggtgggcaaccacgtggcggaggtgttcgacgcggtcaaccgggttggcggattggccgacggcgcgccgagcgacgacgcgggcggcaaaaaagacaacctgctcagccgctttatcgatctggtgtccggcattttcaccccgctgctcggggtgatggccgcttcggggatcctgaaaggcttcctggcgctgagcctggcctgcggctggctgctggagagcggcggcaccttcaaaatgctgttcgccgccagcgactcgctgttctacttcttcccgatcatgctcggctacaccgccgggaaaaaattcggcggcaaccccttcgtcaccatggcgatcggcggcgcgttgacgcatccgctgatgatggcggcgttcgaagcggcgcagcagccgggggcggtgcgcgagtatttcttcggcattccgctgaccttcatcaactacagctcgtcggtgatcccgatcatcttcgcggcctgggtatcctgccgcctggagccgctgtttaaccgggtgatccacagcgcgctgcgcaatttcatcacgccgctgctgtgcctggcgatcaccgtgccgttgaccttcctgctgatcggcccggcggcgacctggctcagccacctgctggccaacggctatcagagcatttacgcctttaacccgatcgttgccggcgcctttatgggggcgatgtggcaggtgtgcgtgatcttcggcctgcattggggactggtgccgttgatgatcaataacctgagcgtgctggggcgcgacaccatggtgccgctgctgttgccggcggtgatggggcaggtcggcgccacgctgggcgtgatgctgcgcacccgcgacgccaaactgcgggcgctgtccgcttcggccatcggcgccgggattttcggcatcaccgaaccggcggtgtacggcgtcacgctgccgaacaaacgcccgttcatcttcggctgcatcggcggcgcgctgggcggtgcggtgatcggctacttccagacctcggtctactcgttcggcctggtgagcgtattcaccttcgcgcagatcatccccggcggcggcatcgacgccacggtatggggcgcgatcggcggcaccctgctgtcgttcgtgttcgctgcgctggccagctatctgttcggcgttgcgccggcggaagacgcggcgcagcctgaagccgccgcgccgcttaaccgcaaacaggccatcctcagcccgatcgccggcgacatcgtgccgctggatcaggtgaacgacgcgaccttcgccagcggcctgctggggaaaggggtggcgatcgcgccgcagcaggggcgcgtggtggcgccggtgagcggcagcgtggcgtcgctgttcaaaaccaaacacgccatcggcatcgaatcggacgacggcgcggagatccttatccacgtcggcattgataccgtgaagctggacggggcgcatttcaccgcccacgtgcgggaaggcgagcgggttgccccgggcgatctgctgatcgagttcgaccaggcggcgatccatgccgccggctatgacaccaccacgccgatcatcatcagcaacagcgatgactacgtggacgtgttgaccagcggcctgtctccggtgcaggaacaggcgccgctgctgactttattacgttaa

SEQ ID NO: 425872 - DNA, 1404 bp, Serratia marcescens
atgaacggcaagtttccgcaacattttctgtggggcggcgcggtagcggcgaaccaggtagaaggcgcgtatcaggccgacggcaaggggctgtcgacctccgatctgcagccgcagggcatcttcggcgccatcacgccgcgcacggcgggcgacagcggcatcaaggacgtggcgatcgatttctatcatcgttatccggaggatatcgcgctgttcgccgaaatgggtttcaagtgcctgcgcacctcgatcgcctggacgcgcattttcccgcagggcgacgaagagacgccgaacgaagccgggctggcgttctacgatcggctgttcgacgagatggcgaagtacggcattcagccgctgatcacgctgtcgcactatgagatgccttacggcctggtgaagcactacggcggctggggcgatcggcgcaccatcgatttcttcgaacgctatgcgcgcaccgtgttcgaacgctacaagcacaaggtcaaacactggctgacctttaacgagatcaacatgtcgctgcacgcgcctttcaccggcgtcggcctgccgcaggagagcgacaagagcgccatctatcaggcgatccatcatcagctggtggccagcgccaaagcggtgaaggcctgccacgagatcgtgccggagggcaaaatcggcaacatgctgctgggcggcattctgtatccgctgagctgcaagccggaagatctgctggaaacccagcggcaaaaccgcgactggctgttcttcggcgacgtgcaggcgcgcggctattacccggcctatatgcagcgcttcttccgtgaaaacggcattcaggtggcgatcaccgaggaagatcggcaaacgctgcgcgaaaccatcgacttcatctcgttcagctactacatgagcggctgcgtcaccgccgatccggagcagtacgagacggcgcgcggcaacattctcgatatggtgccgaacccgcatctggccagctcggagtgggggtggcaaatcgacccgatcgggctgcgctacctgctcaacgtgctgtacgaccgctatcagaagccgctgttcatcgtcgagaacgggctgggcgccaaagaccgcgtcgaagccgacggcagcatccacgacgactaccgcatcaactacctcaatgaccatctggtgcaagtggcggaagcgatcgacgacggcgtcgaggtgatgggctacaccagctgggggccgatcgatctggtcagcgcctcgaaggccgaaatgtcgaagcgctacggcttcattcacgtcgacagggacgatgccggcaacggcagcctcgcgcgcagccgcaagaagagtttcttctggtatcgcgatgtgatccacagcaacggcgccagcctgaaagaccgacgctaa

SEQ ID NO: 425873 - DNA, 1398 bp, Serratia marcescens
atgatgaaaagcttattacctcgttccataaccctggcggcgctggcgctgctctgtagccaggcgcaggcggaaacgctgcaaaccggcaaggacgtcgaagcccccaccgtcaagtgggaaggggtggcgctcggctttgaaccgccgcagcccgggctgttgggggatatgctggggatcaggccgatcctggaggatcacggtttccactataacctcggctacctcagccagctgtcgtataacgccggcggcggttacaaccacgataaacaggcgtcgtacatcgaccaattctcgctgaccttcagccaggatttgcaggcgctgaccggcattccggacgcggcgatcgaaggcaatatcgtcaaccgcaaccatgacaacaacctgacccgcgatcgcttgcaggatccgcgcgtcggcctgaccgatctgtcgcaggagagctttggcgggcagtcgattacccgcctgggctggctgaccttcagccggtccttcctcgatcgccggctgcagtggcgcatcggcatgatgaacaaggtgcaggatttcgatcagatcatcccctgcgattttcagacgctgacgctgtgcggcggcaagtctgccaactcgttgacctggtacaactggaacgtgcattactggggcaccacgctgcaatacaagctgaccgacggcctgacgctcaagggcggcgtgatggagcagaacccgagcgcccccagccgcagccacgcctggagttggtccaccaagggcagcaaaggcttcctgttgccgatggagctggagctgaaaacccacgccgtcaaccagctgccgggggtgtataacctgggcgtgctgttcaccaacgcgcgccagagcgatctttatgaaggggtgtccggcgggccgggcgccagcgatccgcagggctatcgcagccacgatcgcacctggttcctgtataccggtttcaatcagcaggtgacgcgccatgcggacgacataaaccgcggtctgagcgtgttttacagcctggggctgggggatcagcgcagcaactacctgcactggtctacctcgaccggcattcgctatcgcgggctgttcgatgcgcggccggacgactggctggggctgggcgtctcggtggtgaagctgagcgaccgctataaagataatcagcgttatctcaaccaaatcaacggcgtcagcgattatcacgatccgagctaccggccggtgccggggcactcggtgacggcggagctctattatcgcgtgaacgtcacgccgtggttgcagctgcagccgggcctgcagtactggcatcacccggcgggcgtcagcgagacgcaggacgcctgggtgacggcgttgaaaacggtggtgaccttctga

SEQ ID NO: 425874 - DNA, 600 bp, Serratia marcescens
atgacaaacacgcttgtagaacgcgcgcgccgctacgccaccaaggcgcatgcggccatcgatcagcgccgcaaatacaccgacgatccgtacatcgtccacccacaggcggtgatggaattggtgcgcagcgtgccgcacaccgaagagatgctggcggccgcctggctgcatgacacggtggaagacacgcccactaccctcggcgatatcgaaagccacttcgggccgaaggtggcggagctggtgcggatgctgaccaacgtcagccgcgccgaggacggcaaccgcttcgagcgcaaaaatcgcgatcggcgccacagcgccggcgcatcgccgcaggccaaaaccatcaagctggcggatctgatcgacaacacccgctcgctgctggactatgacagccacttcgctcagacctacctgatcgagaaacagcgtctgctggaggtgctgaccgaaggcgacccgacgctgtggcgccaggccagccatatcgttgagcaagggctgctccgcttgcagcagccgccgcacaacgtgcccgccagctggttcgaacacgcccgccggcgctaccgcgagagcgatgcggcctga

SEQ ID NO: 425875 - DNA, 465 bp, Serratia marcescens
atgaaaagcaccgataccgaacaaccccacgcgaagaatctgctgcagctcgatcagcagctctgtttcgcgctgtactccgccaacctggcgctgcacaaagtctaccgcaagctgttgaatcagctcgaactcacctacccgcaatacctggtgatgatggtgctgtgggagcgcgatcgggtgacggtatcggatatcggcgagcggctgttcctcgattccgccacgctgacgccgctgctgaagcggttggaaaccgccggtttgctggtgcgttatcgcgccaccgccgacgagcggcaggtgatcattgcactcaccgaagccggccgcgcgctgcgcgagcgggcgcaatcggtgcccgaggcggtgatgtgcgccaccgactgcagcctggacgagatcgtctcgctcaaacagcagctggaaaagctgcgcggcagcctgatcgatcagatttga

SEQ ID NO: 425876 - DNA, 426 bp, Serratia marcescens
atgtctattgagaaagtggtttaccgcgctcacgccaccgcaaccggcggccgcgacggccgtgcgacctcctccgacggcgtgttggacgtgaaactgggcgtgccgaaagagatgggcggcgccggcggcgaagtcaccaaccccgagcagctgtttgccgccggttactcggcctgcttcctcggcgcgttgaagtttgtcgcggcgaaagaaaaggtcaaaatcccggccgaagcgaagatcgacggcaccgtcggcatcggtgaaatcccgaacggcttcggcatcgaagtgcagctggatatctcgctgccgggcatcgagcgcagcgtggcggaggatttggtgaaaaaggcgcacgtggtgtgcccatactccaacgccacccgcggaaatatcgatgtgactctgaacgttaagtaa

SEQ ID NO: 425877 - DNA, 1695 bp, Serratia marcescens
atgaacaaagttaaatcgctatcacagcagaatttatcgttattgttagcgatctatatcggcatatttctcaacctgtccgttttttatcgtcgttttgattcgctggcgcacggcattcaggggattaaggtgatttcggcggtgacggaagtcatcgctatcgtcctgttcacgttcttcatcatgcggctggtatcgctcggcggccggctgttttatcgcatcgtcgcttcgctgctggtgttgatttcggttgccgccagctactacatgacgtttttcaacgtggtgatcggctacggcatcgtggtgtcggtgatgaccaccgacatcgatctgtcgaaagaggtggtcggcctgcacttcgtgctgtggatggtggcgctcagcgccttgccgctgctgctgatctggaaaaacagcctgcgttacaccctgatagaacagctgaaaacccccggtcatcgcatcaagccgctgctggtcttgctggcggtggtggcgctggtctggctgccgctgcgcatgctggacgacgagcagagcgtgcaagagaagctctccaacgtcgatctgccgagctacggcggcgtggtggcgcactcgtatctgccgtccaactggctgtcggcgctggggttgtttgcctatacccgctatgacgaaagccaggatcagagcacgatgttcgatccgggcaaacacttcacctacgtaccgccggcggatatcgacgacacctacgtggtgttcatcatcggcgagaccacgcgctgggaccacatgggcatgctgggctatgagcgtgataccacgccgcggctgtctaaagagaagaatctggtggcgtttcgcggcgagtcgtgcgacacctccaccaagctgtcgctgcgctgtatgttcgtgcgcgaaggcggcaccgaagacaacccgcagcgcacgctgaaagagcagaacgtgttcgcggtactgaaggatctgggcttctcttccgagctgttcgccatgcagagcgaggtgtggttctacaacaacaccgaggtgaacaactattcgttccgcgagatgatcgcgtccgagaagcgcaacgacggcaaggcggtcgacgatatgctgttggtggacgaaatgaaggagtcgctggcgcgctatccgaagggcaaacatctggtgatcctgcataccaaaggctcgcactacctgtactcgcagcgttatccgcgcagctatgcgcgctatcagccggagtgcatgggggtggacgattcctgcaccaaggcgcagctgatcaacgccttcgacaatacggtgctgtataccgacagctttatcgccaatgtgatagaccaggtgcgcgacaagaaggccatcgtgttctatgccgccgatcacggcgaatcgatcggtgaaaacacgcacctgcacggtacgccgcgcgaaatggcgccgccggagcagttccgcgtgccgatgatcgtatgggcgtcggacaaattccttgagaacccgcagcacctcagcgcctttgagcagctgcaggcgcagcagcgcatcggcaaaacgcatcgccacgtcgagctgtttgacaccatcctcggctgcctcggctacacgtctcccgatggcggcatcgtggataaaaacaactggtgccatctgccgcaggataaaacggcacccgctagcctgtag

SEQ ID NO: 425878 - DNA, 591 bp, Serratia marcescens
atgaccctgcgcgtggcgtttatcgacgatcatgacattgtgcgttcgggcttcgtgcagctgctgtcgctggaagccgatattcaggtggtgggcgaattcagcggtgcggcgcaggcgcgcgccggcctgccggggctggaggtggacgtttgcatctgcgacatttcgatgccggacggcagcgggttggatctgttggcggacattccctccggcatccgcgtggtgatgctgtcgatgcacgataacccggcgctggtggaaatggcgctggatcgtggtgccggcggctttctctccaagcgctgcaagccggaagatttgatcaccgcggtgcgcaccgtcgccggcggcggcgtttacctgatgccggaaatcgcgcagcagctggcgcgggtgagggtcgatccgttgacccgccgcgagcgcgagatcgcgctgttgctggcgcagggccaggaggtgcgcgagatcgccgccgccttggggctgtcgccgaagacggtgcatgtgcatcgcgccaatttgttcgccaagctgggcatcaacaacaacgtcgagctggccagacggatgctgaacctgtga

SEQ ID NO: 425879 - DNA, 1545 bp, Serratia marcescens
gtgacgcagcgcctgatcacccagctggcgctgtttttcatctacgccgccagcgcgttttgcctgtggggcatcggcaccgcgctgatcgacccgccctggcaggcgctgctgctgttcccgttcggcctgcgcatgggtattttgctgcagagcccgtaccgtttctggccggggatcctgctggccgatctgctgctgatggcgctgctggcggatcagttcggctacggcccggcgctgtgggcgtcggtggcggtgctggtgttgacggtgctgctcagcctgctggcctcgccgtggctgttgcgccatcagcagagcgacagcgaatggcgctggccactgttgcagggcgcggtggtgggcgccgccgccttgctgcaggcgctggtgtggcagctggtgagcggtgaaggcgcccgcgcgctgctgctcggcctgaccggcggttttaccatcgcaccgacctgcctgctgttgtggcactatctggcgcgccaaatctgggtgccgctggagccggggctgatccacaagccggtggagctgcgtctgggccacctggccagctatctgctgctgtttgcgttcagcatctggctgcagcagcaggtgaacgccgccgagctgcggcgctttgcgcctttctgcctggccattcctatcgtgttcatgtcttaccgctacggctggcagggcgcgctgttggcgacgctgctcaacggcgtggcgctgatggtcaacgagccgccgcagccggagtcgcaccgcgatctgctgctgtcgctgctggcccaaagcctgaccgggctgctgctgggcgccggcattcagcgccagcgcgagctgaatcagcagctgaggctgcggctggcggagaaccgccagttggcgcgggcgctggtgacggcggaggagcaaacccggcgcgaggtggcgcgcgagctgcacgatgaagtggggcagaccatcaccgtgatccgcacccaggccagcatcgtcaaacgcctggcgccggagccggcggtggtcggctgcgccgacaccatcgatgcgttggcgctgcgggtctacgacggggtgcatgatgtgctgactcaactgtggccggcggcgctgaacaacctgccgctgtcggcggcggtggcggcgatgctgcgggagtcgctgccgcaggacgcgtcgctggtgagcagcctgcagtggcaggtgccggacgagctgctggatgaaacgctgaaaatcacgctgtaccgggtgtgtcaggaaggggtgaccaatgtgtgccgccacgccggcgccagccgcctggagctggatgcgcgcctgcagccgcgcaaaggcgccgcgccgcagatcgccctgaccatccgcgacaacggggcgggcttcgatgaggaaaaccatcagccgggctatggcctgcgcggcatgcaggagcgcatcagcgccctcggcggcagcctgcggttcaccgctgaggggggcgcctgtttgagtgtgatcttgcccacagtttcgccggcgcaaacgcaaaactag

SEQ ID NO: 425880 - DNA, 1332 bp, Serratia marcescens
atgtggtctttccttaaaagccgcccggacgcgccgcaggtcaccgatcaacggcagatcgacgccagctacaaatactggcgcatccagctgatgtgcaccatgtacatcggctacgccgcgttttacttcacgcgcaaaagtttcaacttcatcatgccggcgatgctgagcgatctgggcctgacgatgtccgacgtcggcatcctcggcacgctgttctacatcacctacggctgctcgaaattcatttccggcatgatcagcgatcgctccaacccgcgttactttatggggctgggcctgatcatgaccggggtgctgaatatcttcttcggcctcagttcgtcgctgctgatgctgggcacgctgtggatcctcaacgccttcttccagggctggggctggccgccgtgctccaaaatcctcaccagctggtattcgcgctccgagcgcggtggctggtgggcgatctggaacacctcgcacaacgtcggcggcgcgctgatcccgctgctggtgggctttatctcgctgcacttcagctggcgttacggcatgatcattcccggtatcatcggcgtggtgcttggcttgctgatgtgctggcgcctgcgcgacaagccatccaccctggggctgccgagcgtcggcaaatggcgcaacgacgccatggagctggtgcaggaatcggaaggccaggggctgagcaaccgcgagatcatcaaacgttacgtgctgaccaacaagtacatctggctgctggcggtctcttacgtgctggtgtacatcgtgcgtaccgcgatcaacgactggggcaacctctacctgacgcaggaaaagggctattcgctgatgaccgccaactcggccatttcgctgtttgaagtgggcggctttatcggttcgctggtggccggttggggttccgacaagttgttccgcggcaaccgtggcccgatgaacctgatcttcgccatcggtatcttcctgtcggtggcggcactgtggttgatgccgggcgtgacctacctgctgcaggcctgctgcttcttcgccatcggtttcttcatcttcggcccgcagatgctgatcggcatggcggcggcggagtgctcgcacaaggatgcggcgggcgcggcgaccggttttgtcggcctgttcgcctacctgggcgcggcgctgtccggctacccgattgcgcgggtgatggagatctggcagtggaacggcttcttcgtggtgatttccatcgccgcctgcctgtcggcgctgttcctgctgccgttcctgcgcgcgcagacgccggcgctgaaaccggccaaagcctga

SEQ ID NO: 425881 - DNA, 1692 bp, Serratia marcescens
atgcgcaaatttaataaaccgctgttggcgctggtgatcggcagcacgctgtgttccgcggcgcaggccgccgcgccgggcaagccgaccatcgcctggggcaacaccaagttcgccatcgtcgaagtcgatcaggcggccaccgcttataataatctggtgaaggtaaaaaatgctgccgacgtttcggtctcctggaatttatggaatggcgacaccggtacgacggcaaaaattttattaaatggcaaagaggcgtggagcggcccttcaaccggcgcttccggcacggcgaattttaaagtgaataaaggcggccgttatcaaatgcaggtggcattgtgcaatgccgacggctgcaccgccagcgacgccaccgaaattgtggtggccgacaccgacggcagccatttggcgccgttgaaagagccgctgctggaaaagaataaaccctataaacagaattccggcaaagtggtcggctcttatttcgtcgagtggggcgtttacgggcgcaatttcaccgtcgacaagatcccggcgcagaacctgacccatctgctgtacggctttatcccgatctgcggcggcaacggcatcaacgacagcctgaaagagatcgaaggcagcttccaggcgttgcagcgctcctgccagggccgcgaggacttcaaagtctcgatccacgatccgttcgccgcgctgcaaaaagcgcagaagggtgtgaccgcctgggatgacccctacaagggcaacttcggccagctgatggcgctgaagcaggcgcatcctgacctgaaaatcctgccgtcgatcggcggctggacgctgtccgacccgttcttctttatgggcgacaaggtgaagcgcgatcgcttcgtcggctcggtgaaagagtttctgcagacctggaagttcttcgatggcgtggatatcgactgggagttcccgggcggcaatggcgccaacccgaacctgggcagcccgcaagacggggagacctatgtgctgttgatgaaggagttgcgggcgatgctggatcagctgtcggcggaaaccggccgcaagtatgagctgacctccgccatcagcgccggcaaggacaagatcgacaaggtggcttacaacgtcgcgcagaactcgatggatcacatcttcctgatgagctacgacttctacggcgccttcgatctgaaaaacctggggcatcagaccgcgctgaatgcgccggcctggaaaccggacaccgcctacaccacggtgaacggcgtcaatgcgctgctgacgcagggcgtcaagccaggcaagatcgtggtcggcaccgccatgtatggccgcggctggaccggggtgaacggctaccagaacaacattccgttcaccggcaccgccaccgggccggttaaaggcacctgggagaacggcatcgtggactaccgccaaatcgccagccagttcatgagcggcgattggcagtacacctacgacgccacggcggaagcgccttacgtgttcaaaccttccaccggcgatctgatcaccttcgacgatgcccgctcggtgcaggccaagggcaagtacgtgttggataagcagttgggcggcctgttctcctgggagatcgacgcggacaacggcgatattctcaacagcatgaacgccagcctgggcaacagcgccggcgttcaataa

SEQ ID NO: 425882 - DNA, 1608 bp, Serratia marcescens
atgacacgttccttgggtaaatcgggggttctgaaattcggcattgggctgatcgcgctgaccgtggcggccagcgtacaggccaagacgttggtttactgttctgaaggttccccggaagggttcaacccgcagctgtttacctccggcaccacctacgacgccagctcggtaccgatttacaaccgcctggtcgaattcaaaatcggcaccaccgaactgcagccgggcctggctgagaagtgggacgtcagcgaagacggcaaaacctacaccttccacctgcgcaaaggcgtgaagtggcagagcagcaaagacttcaaaccgacgcgcgatttcaacgccgacgacgtggtgttctcctttgaacgccagttggatgcgaacaacgcctatcacaaagtgtccggcggcagctacgaatactttgaaggcatggacatgcctaagctgatcgccaagattgaaaaagtggacgacaacaccgtgcgcttcgtgctgaaccgcccggaagcgccgttcctggctgacctgggtatggacttcgcgtccatcctgtccgccgaatacgccgacgtgatgatgaaagccggcacgccggagaaagtcgacctgaacccgatcggcaccggcccgttccagctgctgcaataccagaaagactccaagatcctgtacaaggcattcgacggtttctggggcaccaagccgaagatcgatcgcctggtgttctccatcacgcctgacgcctccgtgcgctacgccaaactgcagaaaaacgaatgtcaggtgatgccgtacccgaacccggccgatatcgcccgcatgaagcaagacaagtccatcaacctgatggaacagccgggcctgaacgtgggttacctgtcgttcaacgtcgagaaaaaaccgctggataacctgaaggtgcgtcaggcgttgaccatggcggtcaacaagcaggcgatcatcgacgcggtttatcagggcgcgggccaggcggccaagaacctgatcccaccgaccatgtggggctataacgacgcggtgcaggattacgcttacgatccggccaaggcgaaagagctgctgaaagaagcgggcatggccgacggtttcagcatcgacctgtgggcgatgccggtacagcgtccttacaacccgaacgcgcgccgcatggcggaaatgatccaggccgactgggccaagatcggcgtgaaagccaaaatcgtgacctatgagtggggtgaatacctcaagcgcgccaaagcgggcgagcaccagacggtgatgatgggttggaccggcgacaacggggatccggacaacttcttcgccacgctgttcagctgcgcggcggcgaaagacggctccaactactcccgctggtgctacaagccgtttgaagatctgattcaaccggcgcgcgccgaatccaaccacgacaagcgcatcgaactgtacaagcaggcgcaggtggtgatgcacgatcaggctccggcgctgattgtcgcacactccaccgtgtacgagcctgtgcgtaaggaagtgaaaggctacgtcgtggatccgctcggtaagcatcacttcgagaatgtctctgtagactga

SEQ ID NO: 425883 - DNA, 1020 bp, Serratia marcescens
atgttgcagttcatactccgacgtttggggttagttatcccaacgtttatcggcattacattgctgacttttgcattcgtccatatgatccccggcgacccggtgaccatcatggccggggaacgcggtatctccgccgagcgccacgcgcagctgatggcggaaatggggctggacaagccgctctatcaacaatatttctcctacgtgtccaacgtgctgcaaggcgatctgggcacctccctcaaaagccgcatctccgtctggagcgagttcgttccgcgctttcaggccacgctggaactgggcatttgcgcgatgatcttcgcggtgctggtaggcatcccggtcggggtgctggcggcggtcaaacgcggctcggtcttcgaccataccgcggtgggcatctcgctgaccggctattcgatgccgattttctggtggggcatgatgctgatcatgctggtgtcggtgcagcttaacctgacgccggtgtcggggcgcatcagcgacacggtcttcctcgacgacagccagccgctgaccggcttcatgctgatagacaccctgatctggggcgagccgggcgacttcgtcgacgcggtgatgcacatgatcctgccggccatcgtgctgggcaccatcccgctggcggtgatcgtgcgcatgacccgttcctcgatgctggaggtgttgggcgaagactacatccgcaccgcgcgcgccaagggcgtgagccgcatgcgggtgatcgtcgttcacgcgctgcgcaacgcgctgctgccggtggtgacggtgattgggctgcaggtcggcaccatgctggccggcgccattctgaccgaaaccatcttctcctggccggggctgggccgctggctgatcgacgcgctgcagcgccgcgactacccggtggtgcagggcggggtgttgctggtcgcctgtatgatcattctggttaacctgctggtagacgtgctctacggcgtggtcaacccgcgtattcgccacaagaaataa

SEQ ID NO: 425884 - DNA, 903 bp, Serratia marcescens
atgtctcaaatcactgagtctgcagttaaaggtgcgccgaagccgatgaccccgtttcaggagttctggcactatttcaagcgcaataaaggggccgtggtcggcctggtgtatatcgttctgatgctggtgatcgcgctcggcgccggcgtgctggcgccgcatgcgccggcggaccagttccgcgacgcgctgctcaagccgccggtgtggcaagagggcggcagctggcaatatatcctcggcaccgacgacgtgggccgcgacgtgctgtcgcgcctgatgtacggtgcgcgcctgtcgctgctggtcggctgcctggtggtggtgctgtcgctgatcatgggcgtgatattcggcctgctggccggttacttcggcggcgtggtggacgcgattatcatgcgcgtcgtcgacatcatgctggccctgccgagcctgctgctggcgctggtgctggtggcggtattcgggccgtcgatcgtcaacgcctcgctggcgctgaccttcgtcgccctgccgcactatgtgcgtctgacgcgcgcagcggtgctggtggaggtgaaccgcgactacgtcaccgcttcgcgggtggcgggcgccggcgcgctgcgccagatgttcgtcaatattctgcctaactgcctggcgcctttgatcgtgcaggcttctctcggtttctcgaacgccattctggacatggccgctctcggctttctgggcatgggcgcgcagccgccgacgccggagtggggcaccatgctctccgacgtgctgcagttcgcgcaaagcgcctggtgggtggtgaccttccccggcgtggcgatcctgctgacggtgctggcattcaacctgatgggggacggtttgcgtgacgctctcgaccccaaactcaagcagtaa

SEQ ID NO: 425885 - DNA, 981 bp, Serratia marcescens
atggctttattgaatgtagacaagctttcggtgcacttcggtgacgaaggcaccccgttccgcgcggtagaccgcatcagttacagcgtggagcaaggtcaggtggtcggcatcgtcggtgaatccggctccggcaaatccgtcagctcgctggcgatcatgggcctgatcgatttccccggcaaggtgatggccgacaagctggagttcaacggccaggatctgcgcaagatctccgaaaaagagcgccgccagctggtgggctccgaagtggcgatgatcttccaggatccgatgaccagcctgaacccgtgctataccgtcggttatcagatcatggaggcgctgaaggtgcaccagggcggcaaccgccgcactcgccgccagcgcgctatcgacctgctgacccaggtgggcattcccgatccggcctcgcggctggacgtatacccgcaccagctttccggcggcatgagccagcgcgtgatgatcgccatggccatcgcctgtcggccgaagctgctgatcgccgatgagccgacgaccgcgctcgacgtgaccatccaggcgcagatcatcgaactgctgctggatctgcagcagcgcgaaaacatggcgctgctgctgatcactcacgatctggcgctggtggcggaagccgcgcaccacatcatcgtgatgtacgccggccaggtggtggaatccggcaaggcggcggagattttccgcgccccgcgccacccgtacacccaggcgctgctgcgcgcgctgccggagttcgccgccgacaaggcgcggctggcttcgctgccgggcgtggtgccgggcaagtacgatcgcccgaccggctgcctgctcaacccgcgttgtccctacgccaacgagcgctgccgcaacgaggagccggaactgcgcagcattcccggccgtcaggttaaatgtcacacaccgctggatgatgcggggaggccgaccgtatga

SEQ ID NO: 425886 - DNA, 990 bp, Serratia marcescens
atgagccagaatcaacctttactgcaggcaattgacctgaagaagcattacccggtgaaaaagggcctgttcgcgccggagcggctggtcaaggcgctggacggcgtctccttcaccctggagcgcggcaaaacgctggcggtggtcggtgagtcgggctgcggcaaatcgacgctcggccgcctgctgacgatgatcgaagtgccgaccggcggcgagctgtactatcaggggcaggatctgctgaagccggacgcctctgccgagaagctgcgccgccagaagatccaaatcgtgttccagaatccttacggatcgctcaacccgcgcaagaaggtcgggcagatcctcgaggagccgctgttgatcaatacctcgctcagcgccgccgaacggcgggaaaaagcgctggagatgatggcgaaggtcggcctgaagaccgagcattacgatcgctacccgcacatgttttccggcggccagcgtcagcgtatcgccatcgcccgcgggctgatgctgaacccggacgtggtgatcgccgatgagccggtgtcggcgctggacgtgtcggtgcgcgctcaggtgctgaacctgatgatggatctgcagcaggatctggggctgtcctatgtgttcatctcgcacgatctgtcggtggtggagcacatcgccgacgaggtgatggtgatgtacctcggccgctgcgtggaaaagggcagcaaagaggcgatcttcaacaatccgcgccatccgtacactcaggcgctgctgtcggcgacgccgcgattgaatccggatatgcgccgcgagcgcatcaagctgaccggcgagctgcccagcccgatgaatccgccgccgggctgtgcgttcaatgcccgctgccgccgcgccttcggcacctgcgttcagctgcagccgcagctcaaacagtacggtgagcagatggtggcctgctttgcggtcgatcaggacgaacatccgggggcgtga

SEQ ID NO: 425887 - DNA, 1656 bp, Serratia marcescens
atgaatccaaactcgaagacgcaatccgataacgctctatggcgctactggcgcggactgggcggctggaacctgtactttctggccaaattcgccctgctgtggttcggctacctgaacttccacgcgctgccgaacctggtgttcatggcgtttctgctgatgccgatcccgtcgcagcgcctacatcgctggcgccattacctcgccatcccgatcggcatcgcgttgttctaccacgacacctggctgccgggcatcaacagcattctcagccagggttcgcagctggccggcttcagcgcccagtacctgctggagctgatcggccgctttatcaactggcaaatgatcggcgcggccttcgtgctgtttatcgcctacctgttcgtcgcgcagtgggtgcgcgtcacggtgttcaccgtggcggcgctggtgtggctcaatatcgtcaacatcgccggaccggcagtctcgctgctgcccgcgacctccacggccgcggccggcggcgccaatacgccggccacgtctgcgccggcggcgggggatgctgcgccggcagacagcctgccgccgaccagcgccaacctgacggcctacctgaaccagttctacgagcgagaaaaaggccgcaccaccgcgttcccggccagcttgcccgccgatgcccagccgttcgatctgctggtgatcaacatctgttcgctggcctgggccgatatggacgcggtcaacctgcaaaatcacccgctgtggtcgaagatggacatcatgttcgacaacttcaactcggccaccgcctacagcggcccggcggccatccgtttgctgcgcgccagctgcggccagctttcgcatcgcgatctgtatcagccggtgaaccagcagtgttacctgttcgacaacctggcgaagctcggcttcaaggaacagctgatgctcgatcactccggggtgttcggcaacttcctgaaagagctgcgtgaacagggcgacatgcaggcgccgctgatgtcgcaggccggcatcggcaacgagctgacgtcgttcgacggcgagccgatttataacgatctcgaattgctgacccgttggctggatcagcagcaaaaaggcggtgacggccgcactgccaccttcttcaacgtcatcccgctgcacgacggcaaccgcttcgtcggctccaacaagagcgccgactacccgccccgcgcgcagaagctgttcgatcagctgaacaccttcctcgatcagttggagaaatccggccgcaaagtggtggtggtgatcgtgccggaacacggcgcggcgttggtgggcgacaagatgcagatgtccggcctgcgcgacattcccagcccgaatatcacccatacgccggtcggcatcaaactggtgggcatgaaggcgccgcatcagggcagcccgctgcagatcaaaacgccgagcagctatctggcgctgtctgaactggtgtcgcgtctggtggacggcaaggtcttcagcgaacccagcgtcgactggcaggcgctgacccaggggctgccgcagaccccggtcatctccgaaaacgacaacgccgtcgtgatgctgtatcagggcaagccctacattcgcctgaacggcggcgactgggtgccttatccgcaataa

SEQ ID NO: 425888 - DNA, 204 bp, Serratia marcescens
atgctgaaccttaacgacatcgtgcaactgatcctgctgtgcgcgctgatcttcatcccgctgggctacgcctttcaccggcgttttccgcatttgcgtcaatactggcaaaacctgttgttatcgccgcgctatttgaaatccgccggtttgtgggtgcgcacaggctcctcatctcagattaaacgtaagaagcagccatga

SEQ ID NO: 425889 - DNA, 1569 bp, Serratia marcescens
atggcgcactctttttctctaggcattcggcagatttgggaagagctgtcggtgatgcaggcccccgggctttattggatcaatatcgacaggcaaagcgacgccgcgctgctgtgtcgccaggtcattgccgcccagccggccacccgcaaagtcgccctgatctgcagcggcgacaaacccgaccgcctgttggccgagctggcttcgcccgcgttgcagaagctgccgctgtatcaattaccggagaaaaaagccgcgctgacgcagctgagcgacgatctgatgcgcgccctgcggccgcaaaatcgcttacttatcctgctggcccacgccagcctgtggcaaaccttcaccaccgaagagctgcgcgagtggacgcgcgccctcgccgcctggctgcggcggcagggctgcacgctgttgattctcagccacggcggcggcatcaataagctcaaagggcagctcagcgcgcagcatcgcatcctgaacggcctgtccagcctgcaatggcaacaggacagcgcgcaatatctggtgaactggtggagcaccgaaaacggcatcaacgccaatcagctgctgacgctgtacgccgcggaaggcggctggcagggtgaggatgaaaacagccaaccctcccccaccgccttgcgcagcgatgaaggcctgtatctggccgagcgcagcatcctggaaggcgcgccgccgctgtccgccaactggcagctgctggagagcaacgacgaactggcgcagcacggcatgctgagactctcggcgacgttgattttcgcgctgtaccaaagcgaccaaatcgatcacctggcgcaccagatccacaccctgcgccgcagccgcggcaacggcctgaaaatcgcggtgcgcgagatgagcgccagcctgcgctacagcgacgagcggctgctgctggcctgcggcgccaacctgatcgtgccgcacgtcgcgccgctgtcgcgttttctgaccatgctcgagggcatccaggggcagcgcttctcgcgccatgtgcccgccgacatcgatgcgctgctggccggtttgcgcccgctgcagcttaaaggctatatgcggccggaaccgttcagccaggcggtgctttcgctgatgggcaacacgctgctgcccgaggacggcaaaggcgtgatggtggcgctgcggccggccaccggtctgcgcgccgaacaggcgatgaccctgtgccacctgcggcgcttcggcgacgtgatgaccgtggtgcaggggcggctggtgctgtttctctccacctgccgcatcaacgatctggataccgcgctgaggttcatcttccgcctgccggtggatgaagccttcagcaaccgggtggtgtggcatcaggacgtcgatatcatttcggaaatcaaacgtatggcccaggggcgctggcagatttcggccaccggcaccgccggcgccgcgccgcgcccccgcgagacggcggccgaggcgcccgcagaacggcggcagccggtcgccttcacgctgacgctcggcccgcaggaggaaccgcatgctgaaccttaa

SEQ ID NO: 425890 - DNA, 192 bp, Serratia marcescens
atgaataacgcacccacccattttcgtgcagcggcgcctggggagagccaggatgacctgcaggcgctcagccaggctttttcattgccgaaattaagctatgtcgatatttcccggcaggagcggttaacgcaaatgatgacgcgctggccactgttggccgaattggcgcagaccacggggagccattga

SEQ ID NO: 425891 - DNA, 741 bp, Serratia marcescens
atgccggtgatcgcgctgcaagggttgcggggtggaatggggacgacgtcggtcacggcggcgctcgcctgggcgttgcagcagctgggtgagtcggtgttggcgatcgatttcacgccggataatctgctgcgcctgcatttcaacacgccgttcgagctggcgcgcggctgggctcgcgcggagcgggatggcggcggctggcaggaaggcgcgctgcgttattgtgaaaacctcgactttctgccctttggccgcctgaatgcggcggaacggctggaagtgcagcgtcagtgtcgggagcagccggaacgctggcgcgacaacctgcgccaactgatcgccggcgatccgccgcgctggatcctgctggatgttccggtcggggacggcgtgctggcgcagcaggcgctgcagcttgccgattgcgtgttcatgctgttgaaccccgacgccaactgccaggtacggctccatcaacagacgctgccgaacgactgccgtttcctggtcaatcactactcctccgccagccagctgcagcaggatctgcatcagctgtggctgcaaacgctgagcggtctgctgccggtggtgatccaccgcgacgaagcgttggcggaagcgctggcggtcaaacagccgttgggcgagtaccgccccgagagcctggcggcggatgaagtgctgacgctggccaactggtgcctgatcaacctcaaacggggcgttgcgccatga

SEQ ID NO: 425892 - DNA, 2604 bp, Serratia marcescens
atgagccgggtattgagcctgctgctggtgccgccggtgcgtcaggcggtgcagacgcgctaccgcggctatcgccgcaatggcgcatcggcgctgaccgcctttttcgccacgctgctggtggcgttgggctggctgctgctgcgcttcgagtcgccggcctggcagcgcgtgcgtaccggccgcgcttactggttcccgcatctgtccgccgaacgcccgcgcccggcggatgcgctgcgttatctgctgcaggggctgtggctgctgctgtttcgcagcggccgcgcgccggtgcagcgcgactatttcgccggttggcgccgcctgcagcagcgctatgccgactggctgcagggcctgccgcagcggctgaagaacgctggcgtggaacagcgctcggtggagcgcctcggccgcatgagccgcggtatgcggcgcgcgctgtttattctggtcagcgtgctggcggcgatcctcgccatgctgtgcatctcgcaaccgttcgatctgccggcgcagttcgtgttcgtcctgctgctgtgggggatcgcgatggtggtgcgccgggtgccggggcgtttgcccgcgctgatgctgatcgtgctgtcgctgaccgtctcctgtcgctacctgtggtggcgctataccgccacgctgaactgggacgacccgctaagcctggtgtgcggcctgttgctgctggtggcggaaacctacgcctgggtggtgctggtgctgggctatttccagaccatctggccgcttaaccgccagccggtgccgctgcccgccgatagcgccagctggccgaccatcgatctgatggtgccgacctacaacgaagatctcggggtggtgaagcccaccatctacgcggcgctgggcatcgactggccgaaagagaaggtgaatatctatatcctcgacgacggcaatcgccccgaattccgggcgttcgccgccgaagtgggggtgaaatacatcgccaggccgacccacgaacacgccaaggccggcaacatcaacaacgcgctgaagcaggccaccggcgagttcgtggcgattttcgactgcgaccacgtgccgacgcgatccttcctgcagctgaccatgggctggttcttcaaagacaaaaagctggcgatgctgcaaaccccgcaccatttcttctcgccggatccgttcgagcgcaacctcggccgcttccgccagacgcccaacgaaggcaccttgttctacgggctggtgcaggacggcaacgacatgtgggatgcgaccttcttctgcggctcttgcgccatcctgcgccgcagcgcgctggacgaaatcggcggcatcgcggtggaaaccgtcaccgaagacgcccacacctcgctgcgcttgcaccggcgcgggcacacctcggcctatatccgcattccgcaggccgccgggctggcgaccgagagcctgtcggcgcacatcggccagcgcattcgctgggcgcgcggcatggtgcagatcttccggctggacaacccgctgctgggcaaggggctgaaactggcgcagcgcctgtgctacgccaacgccatgctgcacttcctgtcgggcattccgcggctgatcttcctcaccgcgccgctggcgtttttgctgctgcatgcttacatcatcttcgcgccggcgctggcgatcgcgctttacgtgctgccgcacatgatccacgccagcctgaccaactcgcgtatccaggggaaataccgccattcgttctggagcgaaatctatgaaacggtgctggcctggtatatcgcgcggccgacgacggtggcgctgttcaatccgcacaagggcaaattcaacgtcaccgccaagggcgggctggtggaggaggagcacgtcgactgggtgatcacccggccttacatgttcctggtgatcctgaacctggccgggctagcgttcggcgtctggcggttggcctatggcccgacggacgaggtgatgacggtgatcatcagcctggtgtgggtgctgtacaacatgacgattctcggcggcgcagtggcggtggcggtggaggccaagcaggtgcgtcaggcgcaccgcgtggaaatcgccatgccggcggcgatcgcgcgcgccgacggccatctgtatccctgcacgctgcgcgattactccgacggcggcgtgggcattgagatgcgggtggaaaacgcgttgaaagacggcgacaggctctcgctgctgctcaagcgcggccagcaggagtacagcttcccctgcgtggtgacgcgcgccttcggcaacaaggtgggggtgcgcctggtcgacctctccacccgcgaacacatcgatttcattcagtgcaccttcgcccgcgccgatacctgggcgctgtggcaggacgggttccccgaagaccggccgatcgaaagcctgcgcgacgtactggcgctgggcttccgggggtatgtgcgcatggcggactacgcgccgccgctggtgcgcggtctgctggtcggggtcacctcgctgaccgcctgggtcgtgtcgtttattccgcgcggcgtcggcagggatccgaccttgggtcaacaagaaacagtgggttag

SEQ ID NO: 425893 - DNA, 2307 bp, Serratia marcescens
atgacgagaaaaataacctggttaactgctctggccttaggcatcagcaccctgtcgcaggccgaaaccgccaccgcgccgaccgtggcggcccagccgccgatcgccgcggcggccgatacggcgatcgcgccaccgccggccgccgcgccgcaggatccgaatgcgccggtgcgcgacgtgtcgctgccgtttgcgcagatagcgccgccgccgggcacctttgttctacgcggtacccggccggacgggcagatcgaattcggcgtgcgcagcgacgaggtggtctcgcaggcgatgctcgatatggagtttacgccgtcgccggcgctgatcccggtggagtcgcacgttaaggtctacctgaacgacgagctgatgggcgtgaccacgatcgccaaggagcaactgggcaagcccaatcgcatccagatggcgatcgatccgcgctatatcaccgattttaaccgcgttcggttggtgttcgtcggtcattatcaaaatatctgcgaaaacccggccagcacctcgctgtggctcgacgtcagcaagtccagcgcgctgaagctgcgtttccagacgctgccggtgaaaaacgagctgtcgcacttccctgagccgttcttcgacagccgcgataatcggccgctgacgctgccgatggtgttcgccggccagccggatctcgcccagcagcgtgcggcgggcattctggcgtcctggttcggcagcaaggcgcaatggcgcgggcaatccttcccgacgctgtacaatgcgctgccgacgcaacacgcggtggtgttcgccaccaactcgcagcgcccggatttcctgcgcgattatccggcggtcaacggcccgacggtggagatgatcagccacccggacaatccgtacgtcaaactgctgttgattcaggggcgtgacgacaacgatttgatcaccgcggtgaagggtatcgcgcagggcaacatcctgttccgcggccagaacgtaacggtggacaaggtggaacagctggcgccgcgccagccgtacgacgcgccgaactgggtgcgcaccgatcggccgatgaccttcgccgagctgcagcagtacgccgagcagctgcaaaccagcggtatcgagcccggcccgatttcgttgaccatgaacctgccgccggacctgttcctgatccgcagcaccggcatcgacatgcacctgaaataccgttacaccgcgccgcgcattcaggacggttcgcggctgagcgtcagcctgaacaaccagttcgtgcaggcttactcgctggtgccggagcacgagcagggcgcgcagctgctgcgcctgccgttgacgcagggactgctcgattccgacaagaacgtcaatatcccggcgctgcggctgggggccaccaaccagctgcgctttgacttcgattacaccacgctgctggccagcggcgcggaagggcgctgtgaaacctactccttcacgcaaaaccacgcggtgatcgacggcgcgtccaccatcgatttctccggctaccgccactttatggcgatgccggatctgcgcgccttcgccaacgccggcttcccgttcagccgcctggcggatctgtcgcaaacgctggtgttggtgaatcagaaaccgcaaccggcgcaggtcagcgcgctgctgaacgcgctgggcgtgatcggcgcgcaaaccggctacccagcgctggccttcacgctgagcgatgactggtcgcaggcgaaggatcgcgacgacgatatcctgatggtcggtaccattccgccggagctgcgcgacgacaagaaaatcagcctgctggtggacgcgacccaaagctgggtgaaacagccgacgcggcagccgccgctgcccagcgcggaagcgctggcggaggacacccggccggacagcaagaccgccgtcagctccgagggggcgatgtcggcgatcattggcgtgcagtcgccgttcaacgaccagcgcagcatcgtggcgctgttggcggacagcccgcgcggctatgagctgctgaacaatgccctgctggacagcggcaagcgcgccgcggtattcggctcggtggcggtgatccgcgaatcgggggtcaacagcctgcgcgtcggcgatatttactatgtcggccacctgccgtggtgggagcggctgtggtatgccctctccacccatccggtgctgctggcggtgatcgcggtggtgctggtggtgatcctggggctgatgctgtggcgtggcctgaaggccttcagccggcgtcgtctggcgcctgaagatcgggattga

SEQ ID NO: 425894 - DNA, 1104 bp, Serratia marcescens
atgctgcaacgcctgtcgctcggcatgctgctgctgtgcgccttcagcgccgcggcggcctgcgagtggccgggctggcaacagtacaagcagttctacatcagcccgcaggggcgggtgatcgatccgagcagcccgaacaaaatcaccacctccgaggggcagagctacggcctgttcttcgccctggtggccaacgaccggccgaccttcgatctgctgctggcctggacggagaacaatctggcggcgggcgatctcagcgcccgtttgcccgcctggctgtggggcgagagcgatgacaaacagtggaaggtgctggacgccaactcggcgtcggacgccgatctgtggatcgcctacaacctgctcgaagccggccgcctgtggaaaagccggcgctatcaaaccctggggacgctgctgctgcaacgcatcggccgcgaggaggtggccgacattcccggcctgggcctgatgctgttgccgggcaaagtcgggttcgtgacggacgatcgctggcggctgaatcccagctacctgccgccgcagctgttggcgcgttttgcggcgctgaacggcccgtggcgcgcgatgcgccaggtcaatcaacggctgtggctgggcaccgcgccgcacggtttctcgccggactgggtggtgtggcgggtcggcgccggctggcagccggatcccgtcaagccgaacgtcggcagctacgacgccattcgggtttatctgtgggccggcatgctggcggacgacgatgagcacaaggcggcgctgctcgaacgttttcagccgatggcgcagctcaccgccaaacagggcgtgccgccggaaaaaaccgataccgccagcggcaaaaccaccggcgccggcccggtcggcttttctgcctcgatgctgccgatgttggcgacgcaggccgaggcgctggcgacacagcggcaacgcatcagcgaacatccgccgggtgacgacgcctatttcagcgcctcgctgacgctgttcggccaggggtgggatcaacaacgttatcgctttaatcgtcagggtgaattgcaaccctcgtgggacggccaatgcacaacttcaaaataa

SEQ ID NO: 425895 - DNA, 3474 bp, Serratia marcescens
atgcacaacttcaaaataaactggctgaatttgattccgctgagcctggcgatgctgccgcaggcgcgcgctgcggaagccgtggccccggagcagtggctgctggaacaggtgcgcattggcgaggccggcaacaaggacgatctggtgcgccagtcgctgtaccggctagagttgatggatccgaacaacccggacgtgatcgccgcgcgcatgcgtttggcgctgcggcagggcaatatggcgctggcgcagcagcagttggacaagctgaaaaccctcgcgccgcagtccagcgcctatcgccaggcgcaaatgaacatgctgctgacgcagccggaaacccggcagaagctgcagcaggcgcgcctgatggcgaccgccggccggttgccggaggccaaggcgcagtacgatgcgctgttccacggcgagccgccgacgctcgatctggcggtggaatattggcggctggtggcgcgtttgccggggcaggaggcgaaagcgttgaagcagctgcaggcgctggatcagcaatattccggcaacgtggcgctgcgcatgtcgctggcgcgcatgctgttcagtcagaaccaggacgcgcaggcctatgagctgctgcagaagatcgccgccgatccggccgggcgcggcgatgccgccgatctgtggttggacaaggtcaaagcgatgccggttagcgcgcaaagcgtggcggcgctcaaccgtttcctcggcgtgttcgataccggcgatcaggcgaccagcgcccgcgaagagctggccagacagcagaaactgttggccgatccggcgtatcaggcgcgggtgcgcggcctggcgcaggtggataaaggcggcagccgggcggccattccggcgttgcaaaaggcgctggcggcgacgccgaacgacgccgaggtgctgggcgcgctcggccaggcctattcgcgcgccggcaaccgcccgcaggcgttgaagctgttccgccaggcgctggccgccgacacgaacggctacgacagcggtaagtggcaaagcctgatcaagagcaccagttactggctggcgatagacgaaggcgacaaggcgctgaaggccggcaatcttgcgctggccaggcagaaataccagcaggcgcgccagctcgacgaccgcgacggcgatgcgtttatcggcctgggcgatgtggcggtggcgagcaaggatgacgctgcggcggaagggttttatcagcaggcgctgcggcgcgatcccggtaacggcagcgcgctgcgcggcctggtgaatctctatcaacgccagtcgccggaaaaagcgctggcctacctcaacggcctgccgcgcagccaacaggccaagctgcgcagcaccctcgacgggctgcggctcgatatgttgaagcaacaggcgcagacgctggcggcgcagcagcagtggcagcaggcggcggaaatctatcgccgcgcccagccgatggatcccgacgacgtttggctaacctatcgctatgcgcaggcgctgcgtcaggccgggcagccgcaacaggcggacgccttattccggcagctggcgcagcgtcagcgcgccaatccgcagttggcctatgcctatgcgctctacctttccggcagcgatcgcgacgaccaggcgctggcgcagctcaatacgctgcctgcggcgcagtggaacgacaacatgcgcgaactggcgcagcggctaaaaatgcaggcggtgattgcacatgccgaacggctgcgggcggccggcgacgaaccggcggcggaagcctatctgcgccggcagccggcggacacccgcatcgatttgctgctggccgactgggcgctggcgcgcggggagtatgcggcggcgctgggcgactatcagcgggtgaaacggcgcgaaccgaacaacccggatgcgcagctgggcgagatcgaagcttatgtggcgcagggggatctggacgcggcgcgccagcggctgaaaaccgaaccgcagccgcaagacgcttcgctcaacagccaacggcgggtcgccaacgcctggggcgcggtcggcgatccgcagcaggccgaagctatcttcggccggctgaaaacggcggcggccgcggagcccgtggggcagaccaaggcgctgatctaccgcgacgccgcccgtctggaacgggcgcagcggcagccggagcgggcgcagcaggattaccggcaggcgatggtggccggcggcatcacgccgacgttgccgcaggacaatgacacctacacctctctgacgcgcaataacccgggcgacgactggttgaaacgcggcatccgttccgaggccgcggatctgtaccggcagcaagacgtgaacgtcacgctcgatcacgattactggcgctcgagcggcaccggtggtatttccgacttcaatgcgcacgacaccatgctgcaggtggacatgccgctgtatgacgggcgcgccttcttgcgcaccgacaccgtgcagctggatgccggccgcttctcgaccgacggcagcggcaaatactacgagaccttcggcacctgcaatacgcaagggtgccgcggcggtgaacatcagaaatccaccggcaccagcgtggcggccggctggaaaaacgatcgttgggccgccgatatcggcacgacgccgatgggcttcgaggtggtcgactggaccggtggcctggcctacagcggcgactggaaccacatcggctggacgctggcggcctcgcggcggccgatctccagctcgctgctggcgttcggcggcgccaaggatccgaacaccggcatcacctggggcggcgtgcgcgctaccggcgtcagcctgagcgccagctacgatcgcggcgaggcgaacggcgtgtgggccgatctcagcgcgcaccagattaccggcaagaacgtggcggataaccagcggcagcggttgatggccggctactactacaagctgatcaacgaagacaatcgccgtctgagcgtcgggctcaataccatgctgtggcactaccagaaggatttgagcggctattcgctggggcagggcggctattacagcccgcagcaatatctgtcgctgtcgctgccggtcaactatcgccaacgcaccgagaactggtcgtgggagctgggcggttcggtttcgctgtcccattcgaaaaccgacagccagcgccgctatccgctgcaggggctgatcccggattcgttgcccgataagttcgccgtcgaggacggcagctcctcgagcggcgtcggttatacgctgcgggcgatcgtcgaacgccgtctcagttcgcactggacgctcggcgccggtatcgacattcaacaggcgaaggactatacgccgagccacgcgttgatttatctgcgctattccctggccggctggcagggggatctcgatttgccgccgcagccgctgacgccttacgccgacttcaagtag

SEQ ID NO: 425896 - DNA, 2007 bp, Serratia marcescens
ttgcgggtcaggcgttcgttaacgattaagcagatggcgacggtgtccggcgtggcgctggtcacgatctgcatctttatcgtgatccagttattccactttgtgcagcagcgcagggatgactacgcccagcaactggagaatatcgcgcactccgtgcgccagccgctggcggaagcggtgctgcgcatggacgtgccggaagccaaaaaggtgctgaacacgctgttgccggtcggcattctcagccgggcggatatcgtcttgccgaacgaatttcaggcgctgcacgccaatttcccgccggagcggccggtgccgacgctgatcgcccggctgtttgagctgccgatccaaatttccgtgccgctctattcgctggagcgggtgccggccaaccagcagccgctggcctatctggtgctgcaggccgattcgttccgcatgtaccagtttatccgcagcattttgtcgaccatgctgtcgacctacctgctgttggcgctgatcctgtcggtggccatcacctggtgcatgaaccggttgatggtgcatccgctgcgcgcgatggccaaagagctggaaaacatctcgcaggacgaagcgccctaccaccagctgatgctgccgacgctgcaccaggacgacgagctcggcctgctggtgcgcaactacaaccgtaatcaacagacgctggccaaggcgcatgccgacatgagccgcctgagcacccgccatccggtgaccgaactgccgaatccggcattgctgaacgcgttgctggaacagcatatcgcctccagcctgcgccccgagcgttttaacctgctggtgatcggcatcgagacgctgcatgaagcctcgggcgtgatgagcccggcgatgcgtgaagcgctgctgttggcgctggcgaagaagctgcgcggctgcatcgacgaaaacggcgtgctggcgcagctgagcaataccgaattcgccatcctggccaaggggaccgagcggccgttccacgccatgcagctggcgcgacgcatcatggcggagatcaacgcgcccttgaccctggaaggtctggcgctgcggcccaacgccagcatcggcatcgcgcactacctcaatcagggggaaagtgcggaacagctgctgcgcagcgccacctcggcgatgatgtccgcgcaccgtgatggaaaaaatcagatcctgttcttcgagcccagcctgacggagcgcacgcagaagcggctgacgcaggagagcgagattttgcacggcatcgagcagcggcattttacgctgttcctgcagccgcagatcgacatgcagtccaacgaggtgatcggcgccgaagcgctgctgcgttggcagcagtatgacggcagctataccctgccggccgacgttatcccgctcgcggaagagctgggcgtgatcgtgcctctcggcaactgggtgctggaagagtcctgccgcatcctggcggattggcagcaacgcggcattgcgctgccgctggcggtcaacgtttccggtatacagatgcagcatgaggcgttcgtcccgcatctgaaaaacctgctggcgcagtatcggatagacccgcgcaagctgctgttggagatcaccgagacggtgcgcatcgacgatctcgaccgcgcgctggcgctgctgcgcgagttgcacgatctgggattgtcgatcgcgcttgacgacttcggcatgggctactccagtctggaatacctgaaccgcttgaaatccctgccgatcgatttgattaaaatcgaccgcagcttcattcaggggctgccggccgacgatgcgatggtgcgcatcgtcagtgcgatctccgaagtgctggcgttgccggtgatggccgaaggcgtggaaaacgccgagcagcgcgactgcctgctgcagcacggcattcgcagcgggcaaggattcctgttcgcccggccgctgccgcgcgcagcgttcgaagccgagttttgccgcgcggcgccgtaa

SEQ ID NO: 425897 - DNA, 1287 bp, Serratia marcescens
atgaaaacaacgatctttaagagcctctattttcaggtgctgacggcgatcacgctgggtatcctgcttggccacttctcccctgacctcggcgccgagatgaaacctctgggcgatggcttcgtcaaactgatcaagatgatcatcgccccggtgatcttctgcaccgtggtgaccggcatcgccggcatggaaagcatgaaggcggtggggcgcaccggcgccatcgcgctgctgtattttgaaatcgtcagcaccatcgcgctgattatcggcctggtgatcgtcaacctggtgcaaccgggcgccggcatgaatgtcgatcccggcacgctggacgccaaggcggtggcagtctacgccgagcaggcgcagcagcagggcatcatcccgttcctgctggacatcatccccggcagcgtgatcggcgcattcgccagcggcaacattctgcaggtgctgctgttcgcggtgctgttcggcttcgccctgcatcgcttgggtgaaaaggggcagctgatcttcaacgtgatcgacagcttctcgcgggtgattttcggcatcatcaacatgatcatgcgcctggcgccgctgggggccttcggcgccatggcgtttaccatcggtaaatacggcgtcggaaccctggtgcaactcggccagctgatcgtgtgcttctatatcacctgtatcctgttcgtggtggtggtgctgggcagcatcgcgcgcgccaacggcttcagcattttcaaattcgtcaactacatcaaagaagagctgctgatcgtgctggggacctcgtcgtccgagtccgcgctgccgcgcatgctggataaaatggagaggctgggctgcaagaaatcggtggtgggcctggtgatcccgaccgggtactccttcaatctggacggcacctctatttatctgaccatggccgcggtgtttatcgcgcaggcgaccaacacccacatggacatcatgcatcagattaccctgctggtggtgttgctgctctcctccaaaggggcggcgggcgtgaccggcagcggctttatcgtgttggccgccaccatctccgccgtcggccacctgccgttggccggcctggcgctgatcctcggcatcgaccgcttcatgtcggaagcccgcgcgctgaccaacctggtgggcaacggggtggcgaccgtggtcgtggcgaggtggtgcggccaactggatgagaaacagctgaaagccacgctgaacaacaaaaacgccggcgcggacaaaacgctgccttccgcctga

SEQ ID NO: 425898 - DNA, 1503 bp, Serratia marcescens
atgcagggcaccagaattcatcttatagttggtgggctgctattggctgcagccagtagcagcgtgcaggctgaagcactacaacccgatcctgcctggcagcagggggcgctggccaacgggttttcatggcaaattctcgatacgccgcagcggccaagcgaccgcgtggaactgcggctgatcgtcaataccggctctctggtggagtcttcacaacagaccggcttcgcccagctgctgccgcggctggcgttgacgcgcagtgaaagctttaccgcgccgcagctgcgcgccctgtggcagcagagcgtggataacgagcggccgctgccgccggctatcatctcgtatgatttcaccatgtataatctcagcctaccgaataaccggcctgacctgctgaaagaagcgctggcctggctggcggacaccaccggcaaactggcgatcgacgagcatacggtgcacgcggtgatgaactccaccatcaatccggtcggcacgttcccgcccaatacccaagacgtctggtggcgttaccgcctgaaaggctcgacgctgctggcgcacgatccggcgcagccggcgaaacggccggtcaacctcgaacagctgaagaaattctatcaacagtggtataccccggatgccatgacgctgttcgttgtcggcaaggtcgacagccgcagcctgggcgagcagatcaacaaggcgttctcgccgctgcagggcaaacgtgaaaccccggccccgatgccgacgctgacgccgctgccacagcagccggtaagcctgatcagcgagcaggtgaagcaggatacgctgtcgatcatgtgggattcgccgtggcatccgattcgcgattcgcagagcctgctccgctactggcgtggcgatcttgctcgcgaggcgctgttctggcatctccagcagacgctggaaaaaatcgaccagaagaacctgcatctgggctttgactgccgcgtgcagtaccagcgcgggcagtgcgccatccatctggatacgccgaacaacaatctgaacggcagcctgggctttatcgcccgcgagctggccaacgtgcgtgacaacggcctgtccaaagaggaattcgatgcattgctggcgcagaaaaacgatcagctgagcaagctgttcgcgacctacgcccgtaccgataccgacgtgctgatgagccagcgcctgcgttcgcagcagagcggggtggtggatatcgcgccggagctgtatcagaagctgcgtcaggagttcctgtccagcctgacgctggagacgctgaatcaggcgctgaagctgcagctttctcaggaggcgacgctggtgctgatgcagccgaagggcgagccggaaatgagcatgaagcagctgcaggaaacctatgacggcatcatgatgccggcgccggcggtggtgacggaagaagccaaaccggccgacaccgcggtggctgcgccggcgacggacgccggcgcgcagtaa

SEQ ID NO: 425899 - DNA, 336 bp, Serratia marcescens
atgagatttagcgggtataatcagcgcaattttcgcatcgacaaaggcattaccatggcaaaaacggcgtgcgccctgcacattctggtagacaatgaaaagctggccaacgagctgctggccaagctgaagcgcggcgtcagcttcgacacgctggcgcgcaaatactcgagctgcccgtcaaaacgcaacggcggctcgctgggcgaattcaacaagggcgcgatggtgccggcgttcgataaagcggtgttcagcatcccactgctcaaaccttacggcccggtcaaaacccagttcggttaccacatcatcaaggtgctgtaccgcaactga

SEQ ID NO: 425900 - DNA, 2025 bp, Serratia marcescens
atgcgattaaaccccagccaacaacaagccgtcgaattcgttaccgggccctgcctggtgttggccggtgccggttccggcaagacgcgcgttatcaccaacaagatagcccacctgatccaccactgcggctatcaggcgcggcacatcgccgccgtgacctttaccaacaaggccgcacgcgagatgaaagagcgcgtgtcgcaaaccctggggcgtaaagaggcgcgcgggctgatgatttccaccttccataccctggggctggagatcatcaaacgggaatacgtggcgttggggatgaagtccaacttctcgctgttcgatgaccaggatcagctggcgctgttgaaagagctgaccgaaaagtggctggaaagcgataaaacgctggtggcgcagctgatctcgaccatctccaactggaaaaacgacctgatcgatccccagcgggcggcggagctggcgcgctcggagcgcgacaagctgttcgcccactgctacggcctgtaccacgcccatatgcgggcgtgcaacgtgctggacttcgacgacctgatcctgttgccgacgctgttgttgcaacgcaacgaagaggtgcgcgaacgctggcagcagcgtattcgctatctgctggtggatgagtaccaggataccaacaccagccagtacgagctggttaagctgctggtgggcaaccgcgcgcgctttaccgtggtgggtgacgacgaccagtcgatctactcctggcgcggcgcgcggccgcagaacctggtgttgttgaaggaagatttcccggcgctgcaggtgatcaagctggagcaaaactaccgttccagcgagcgtatcctgaaggcggctaacattctgatcgccaataacccgcacgtgtttgaaaaacggctgttttccgagctgggatatggtgaagagctgaaagtggtgaccgccaacaacgaggatcacgaagccgagcgggtggtgggggagctgatcgcccaccacttcgtgaaaaagaccaactacggcgactatgcgatcctgtaccgcggcaaccaccagtcgcgggtgtttgaaaagatgctgatgcagaaccgcatcccgtacaagatttccggcggcacctcattcttctcgcgccccgagatcaaggatctgctggcctacctgcgcgtgctgaccaacccggaggacgacagcgccttcctgcgcatcgtcaatacccccaagcgcgagatcggcccggcgacgctgcagaagctcggcgagtgggccaaccagcgcaacaagagtttattccacgccagtttcgatctggggctgagccagtacttgaccggacgcgggctggaatcgttgcagcgtttcacccactggctgggcggcatcgcccagcaggcggagcgtgagccggtggcggcggtgcgcgatctgatccgcggcgtggattatgagagctggctgtttgaaacctcgaccagcccgaaggccgccgaaatgcgaatgaagaacgtcaatacgctgttcggctggatgacggagatgctggaaggcagcgatctggacgagccgatgacgctgacccaggtggtgacgcgcttcaccctgcgcgacatgatggaacgcggtgaaagcgaagaagagctggatcaggtacagctgatgacgctgcacgcctccaaggggctggagttcccttatgtgttcctggtgggcatggaagagggcctgctgccgcaccagagcagcatcgatgaagacaatgtcgatgaagagcggcgtctggcctatgtggggatcacccgcgcgcaaaaagagctgattttcaccctgtgtcgcgagcgccgtcagtacggcgagctggtgcggccggagccgagccgcttcctgctggagctgccgcaggacgatttggcatgggaaaccgagcgcaaagtggtgagcccgcaggagcggatgcagaaagggcagagccatctggccaatatccgcgcccagctggccaaggccaaaggcgggaattaa

SEQ ID NO: 425901 - DNA, 1497 bp, Serratia marcescens
atgctcagctccagcacgctttatgctgccatcgatctcggctccaacagcttccacatgttggtggtgcgcgaggtggccggcagcattcagaccctggcgcggatcaagcgcaaggtgcgcctggcggccgggctggatcagaacaatcacctgtcgcatgaggccatgcaacgcggctggcagtgcctgcggctgttctccgaacgcctgcaggacattccgcgcgagcagatccgcgtcgtcgccaccgccacgctgcgcctggcgtccaacgccgatgagttcctgcaggcagccgagcaaatcctcggctgcccggtacaggtgatcagcggcgaagaagaagcacggctgatttatcacggtgtcgcgcacaccaccggcgggccggatcggcggctggtcgtcgacatcggcggcggcagcaccgaactggtcaccggcaccggcgcacaggcatcgcagctgtatagcctgtcgatgggctgcgtcacctggctggagcgctacttcagcgatcgcaacctcgggcaagaaaacttcgagcgcgccgaacaggccgcgcgcgaaatggtgcggccgatcgcaccgcagctgcgccagcaaggttggcagatctgcgtcggcgcttccggcaccgtacaggcgctgcaggagatcatggtggcgcaaggcatggatgagcgcatcaccctgcccaagctgcgccagctgaaacagcgcgccattcagtgcggcaagctggaagagctggagatcgaagggttgacgctggagcgcgcgctggtgttcccgagcggcctgtccattctgttggccatcttccaggaactgggcatcgaaagcatgatgctggccggcggggcgctgcgtgaaggcctggtttacggcatgctgcatctgccggtggagcaggatattcgcatccgcaccatccgcaacctgcagcgccgctacctgatcgacaccgagcaggccgaacgcgtcagccaactcgccgccaacttctcgcagcaggtcgccaacgagtggcagctggatgcgcgatgtcgcgagctgttgcacagcgccagtctgatccacgaactcggcctcagcgtcgatttcaagcaggcgccgcaacacgccgcctacctgatccgccatctggacttacccggctttaccccggcgcagaaaaaactgctggccaccctgctgcaaaaccagagcaaccccctcgacctgtcgctgttgaaccagcaaaacgccctgccgccgcgcactgcgcagcgtctgtgccgcattttgcgcctggcgatcatcttcgccagccgccgccgcgatgacacgctgccggcggtgcggttgcgcgccaatcaggacgatgaactgacggtaatcttgccgccgggttggctggaacagcatccgctgcgcgccgaggcactggagcaggaaagccactggcagagctacgtccactggacgctgcggttggaagaacagcgttga

SEQ ID NO: 425902 - DNA, 1287 bp, Serratia marcescens
atgagcaaaacacacttgactgaacagaagttttccgacttcgccctgcacccgttagtccttgaagcccttgagaaaaaagggtttcacaattgcacgcccatccaggcgttagcattgccgctcacgctctccgggcgtgacgttgcaggtcaggcgcaaaccggtaccggaaagacgctggcgtttttggcgtctacttttcactatttgctgactcacccggcgaaacaggatcgccagaccaatcagccgcgcgccttgatcatggcgcctacgcgtgaactggcggtgcaaatccactccgacgcagaagcgctctcccagagcaccggcctgaaactgggcctggcctacggcggcgacggctacgacaaacagctgaaagtgctggaaagcggcgtggacattctgattggcaccaccggccgtttaatcgattacaccaagcagaactatgtcgatctcggcgcgatgcaggttgtcgtgctggatgaagccgatcgcatgtacgatctcggctttatcaaagacatccgttggctgttccgccgcatgcctgcggccgatcaacgcctgaacatgctgttctccgccaccctgtcctatcgcgtacgcgagctggccttcgagcagatgaacaacgccgaatatgttgaagtggaaccggaacagaaaaccggccaccgcattaaagaagagctgttctacccgtccaacgaagaaaaaatgcgtctgctgcagacgttgatcgaagaagagtggccggatcgcgccatcatcttcgccaacaccaagcaccgctgcgaagacatctggggccatctggccgccgacggtcaccgcgtgggcctgctgaccggtgacgtggcgcagaaaaaacgcctgcgcatccttgacgacttcactaaaggcaacctcgacatcctggtcgccaccgacgtcgccgcgcgcggtctgcacattcctgccgtcacccacgtattcaactacgatctgcctgacgattgcgaagactacgtgcaccgcatcggccgtaccggccgcgcaggcgccagcggccactccatcagcctggcgtgtgaagagtacgcgctcaacctgccggcgatcgagacctatatcgaccacagcattccggtaagcaagtacaacagcgatgcgctgctgaccgatctgccggcgccgaaacgcctgtcgcgcccgcgcggcggcaacggcccacgtcgcaactccgcgcctcgtcgcggcggcgcgccgcgcaacaaccgtaaacgctcgagctga

SEQ ID NO: 425903 - DNA, 327 bp, Serratia marcescens
atgagcgataaaattattcacctgactgacagcagcttcgacgctgacgtgctgaaagcggaagggccgatcctggtcgatttctgggctgaatggtgtgggccgtgcaagatgattgctccgattctggatgagattgccgaagagttcgaaggcaaactgaccatcaccaagctgaatatcgatcagaacccggctaccgcgcccaagtacggtatccgtggcatccctacgctgttgctgttcaagaacggtgaagtggccgcgaccaaggttggcgcgttgtccaaaggtcagctcaaagatttcctgaacgcgaatctgtaa

SEQ ID NO: 425904 - DNA, 1260 bp, Serratia marcescens
atgaatcttaccgaattaaagaatacgccggtttctgagctgattactctcggcgaaaatatggggctggaaaaccttgcccgcatgcgcaagcaggacattatcttctccattctgaagcaacatgcgaaaagtggagaagatatcttcggcgacggcgtgctcgagatattgcaggatggattcggtttcctccgctctggagacagttcctacctcgccggtcccgacgacatctacgtatcccctagccaaatccgccgcttcaacctccgcacaggtgacaccatttccggtaagattcgcccgccaaaagaaggcgagcgctattttgccctgttgaaagtcaacgaagtcaactacgacaagccggaaaacgcccgcagcaagatcctgttcgagaacctgacgccgctgcacgccaattcccgtctgcggatggagcgcggcaacggctcgaccgaagacctgacggcgcgcgtactggatctggcggcaccgattggccgtggccagcgcggcctgatcgtggcgccgccgaaagccggtaaaaccatgctgctgcagaacattgcgcagagcatcgcctacaaccacccagactgcgtgctgatggtgctgctgatcgacgaacgtccggaagaagtgaccgagatgcagcgtctggtgaaaggcgaagtgatcgcatcgaccttcgacgagccggcttcgcgccacgtgcaagtggccgaaatggtgatcgagaaggccaagcgtctggttgagcacaagaaagacgtgatcattctgctcgactccatcacccgtctggcgcgtgcctacaataccgtggtaccggcttccggcaaggtgctgaccggtggtgtggacgccaacgccctgcatcgtccgaagcgtttcttcggtgcggcgcgtaacgtggaagagggcggcagcctgaccatcatcgcgaccgcgctggtcgataccggttcgaagatggacgaagtgatctacgaagaattcaaaggtaccggcaacatggaattgcacctggcgcgtaaaatcgccgagaagcgcgtattccctgcgatcgattacaaccgctccggtacccgtaaagaagagctgctcaccacttccgaagagctgcaaaaaatgtggatcctgcgcaaaatcattcacccgatgggtgagattgacgcgatggagttcctcattaataagttggcgatgactaaaaccaacgatgaattcttcgatatgatgaaacgctcataa

SEQ ID NO: 425905 - DNA, 1083 bp, Serratia marcescens
atgagtactgaaattctatttgttttcctgttttctttggcttttctctttgttgcccgcaaggcggcaaaacgtattggtctggtagataaacccaattatcgcaaacgccatcaggggctgattccactggtcggcggtatttccgtttatgccggattgtgcttcgcgttttggatttccgaacaacctatcgcgcacgccaagctttatcttacctgcgccggcattctggtgtttgtgggcgcgctcgacgatcgtttcgacatcagcgttaaaatccgcgccctggtgcaggcgttggtcggcatcgccatgatggtgttcgccggtctgtatctgcgcagcttcggccatgtactgggcgactgggagatgttgctggggccgttcggctatctggtgacgctgtttgcggtatgggcggcgatcaacgccttcaacatggtcgacggcattgatggcctgctgggtgggctgtcgtgcgtctccttcggcgcgctgggtctgttgctgtacctgagcggccaccatgagatggcgttctggtgctttgcgatgatcgccaccatcgttccctatattttgctcaacctcggcattctcggccgccgttataaggtgttcatgggggacgccggcagtaccctgatcggctttaccgccatttggctgctgctgcaaagctcgcagggcaaggcacactcgattaatccggtgaccgcactgtggatcatcgctattccgctgatggacatgatagcaatcatgtatcgtcgtttacgcaaggggatgagccccttctctcccgatcgtcaacatattcaccacctgatcatgcgcgccggctttacgccgcggcaggcttttgtgttgattaccctggcggccgcattgctggcggcggttggcgtgatcggcgaacgcctgacttttatcccagagtgggttatgttggcattattcttgcttgctttcttcctgtacggttactgcatcaagcgcgcctggcgggttgcgcggtacattaagcgtatcaagcgtcgcctgcggcgttcgagcgataacaagcaagtatcttaa

SEQ ID NO: 425906 - DNA, 1056 bp, Serratia marcescens
gtgatgaatccagaaacaacgtctgacaagcataccccggcggtggataacgaactcgatatccgcggcctgtgctgcaccctgtggcgcggcaaaccgtggattatcggcattgcggtgctgttcgcggcggtcgcgctgatcgtctcttatctggtaaagcaagaatggagcgcgaccgcaatcaccgacaaacccacggtaaatgcgctgggcggttactactcccagcagcagttcctgcgcaatctggatgtgcgcacgctgccggcgacggccggcgatcagccgagcatcgcggacgaagcctacaatgagttcatcatgcagctggcggcttacgatacgcgtcgcgatttctggctgcagagcgattactacaagcaacgtcaggaaggggatgcccgcgcggatgcggcgctgctcgacgagctgatcaacaacatcctgttcacgccgcgcgacgacaagaaagtgccgaacgacggcgtgaagctgacggcggaaactgccgcggacgccaaccgcctgctgcgtcaatacgtggccttcgccagccaccgcgctgccctgcacctgaacgaagagatccagggggcgtgggccgctcgcactacctcaatgaaggcgcaggtcaagcggcaggaagcggtggcggagtcggtttacaagcgcgagctgaacaccacgcagcaggcgctgaaaatcgccgaaagccaggggatcagccgcgcgcagaccgacactccggccgagcaactgccggattcggatctgttcctgctgggccggcctatgctgcaggcgcgtctggaaggcctgcaggcctccggccctacctatgacctggattacgatcagaaccgcgcgatgctggcgacgctgaacgttggcccgacgttggatgagaagttccagacctatcgttatttgcgcacgccggaagagccggtaaaacgcgacagcccacgccgggtcttctggctgattctgtggggcgcgatgggcgctttggttggcgcgggcgttgccttggcgcgtcggccgcgtagttaa

SEQ ID NO: 425907 - DNA, 1131 bp, Serratia marcescens
gtgaaagtgttgactgttttcggcaccagacctgaagccatcaaaatggcaccgctggtacatgcactggcccaggatgaggcttttgacgcaagagtctgcgtaacggcacagcatcgtgagatgttggatcaggtattgcggttgtttgagatcacgccgaattacgacctgaacatcatgaaacccggccaggggctaacggaaatcacctgccgcatcctggaagggctgaaaggggtgctggaagacttcaaaccggacgtggtgctggtgcacggcgataccaccactacgctggcgaccagcctggcggcgttctatcaacgcatccccgtcgggcatgtcgaggccgggctgcgtaccggcaatctgtattctccctggccggaagaggccaaccgcaaactgaccggccacctggcgatgtaccatttcgcgccaaccgagaactcgcgccaaaatctgttgcgcgaactgctgccggacaaccgtattttcgtgaccggcaatacggtgatcgacgctctgttctgggtgcgtgaccgcgtgatgagcgatgccgcgctgcgggctggcctggcacagcgttatccgttcctcgacgccgacaagaaactgatcctggtcaccggtcatcgccgcgaaagctttggcggcggttttgagcgaatttgcagcgcgctggcggagatcgcccgcaatcacccggaagtacaggtggtgtatccggtgcatctcaatccgaacgtcagtgagccggtgaatcgcattttgaaaggcatcgacaacgtcatgctgatcgagccgcaggattatctgccgtttgtctatttgatgacccaggcttacatgatcctgaccgattccggtggcattcaggaagaggcgccatcgttaggtaaaccggtgctggtgatgcgcgacaccaccgaacgcccggaagcgatagatgcgggcacggtgcgtctggtcggcaccgatgtgaccaaaattgttgaagcggtgacccggctgttgacggacgaaagcgaatatcacgcgatgagtcgggcgcataacccatacggtgacggacatgcctgtcagcgtatcctcgaagctttaaagaatcatcaggtgacactatga

SEQ ID NO: 425908 - DNA, 1263 bp, Serratia marcescens
atgagttttgacactatttcggttatcggcctgggttatatcggcttgccaacggcggcggcgttcgcttcccgcaagaaaaaagtggtgggtgtagatgttaaccaacatgcggtagataccattaaccgcggcgcgatccacatcgtcgaaccggatctggacaaagtggtcaaggacgccgtcgacggcggtttcctgcgggcggtgaccaaaccgctggcggccgatgcgttcctgatcgcggtgcctacgccgttcaagggcgatcacgagccggatctggcctatgtcgaagcggcggcgaaatcgctggcgccggtgctgaaaaaaggcgatctggtgatcctggagtccacctcgccggtgggggccaccgaacaaatggcggactggctggcgcaggcgcgcagcgatctcagcttcccgcagcaagcgggcgaagcggcggacgtgaatatcgcctactgcccggagcgcgtgttgccggggcaggtgatggtggagctgattcaaaacgaccgcgtgatcggcggcatgacgccgaagtgctcggaacgtgccagcgcgctgtacaagattttcctcgagggcgaatgtgtgatcaccaactcgcgcaccgccgagatgtgcaagctgacggaaaacagcttccgcgacgtaaatatcgcctttgccaacgaactgtcgttgatctgcgctgagcaggggatcaacgtctgggaactgatccgcctggcgaaccgccatccgcgggtgaatattctgcagccggggccgggcgtcggtggtcactgcattgccgtcgatccgtggtttatcgtggcgcagaatccgcagcaggcacgcctgatccacaccgcacgtctggtgaacgacggcaaaccgctgtgggtggtcgaccgggtgaaagcggcggtggccgattgtctggccgccaccgacaagcgcgcgtccgaggtcaaaattgcctgcttcggcctggccttcaaaccgaatatcgatgatttgcgtgaaagcccggcggtagaagtggtacatctgatcgccgaatggcacgtcggcgaaacgctggcggtggaaccgaacgtcgaacagttgccgaagtcattggccggccatgtgacgttgacgccaatcgcggaagcgttgcagcaggccgatgtgatcgtgatgttggtcgatcaccagcagttcaaggccatccggccggaagagatcaagcaaagctgggtggtggatactaagggagtctggcgttga

SEQ ID NO: 425909 - DNA, 1068 bp, Serratia marcescens
ttgaaacgtattttagttaccggtggtgccggtttcattggctccgcggttgtgcggcacatcatcgaggccaccggcgatagcgtggtggtggtggataagctgacctatgccggtaacctcgagtcgctggcggtggtggccgagagcgagcgctatgctttcgagcaggtcgacatctgcgatcgtgccgagctggatcgggtatttgcccagtatcagccggacgtggtgatgcacctggcggcggaaagccacgtcgatcgttctatcgacggcccagcggcctttatcgagaccaacgtggtgggcacttacactatgctggaagcggcgcgccagtactggcagccgttggctgcagagaagaagcaggctttccgtttccatcatatctccaccgacgaagtgtatggcgacctgcacggcaccgacgatctattcaccgaaaccacgccgtatgcgccgagcagtccgtattccgcctccaaggcgtcgagcgatcatctggtgcgcgcctggttgcgcacctacggtttgccgaccctcgtgaccaactgctcgaacaactacggcccttatcacttcccggagaagctgattccgttggtgatcctgaatgcggtagccggcaaaccgctgccggtatacggcaacggcgcgcaggtgcgtgactggctgtatgtcgaagatcacgcgcgcgcgctctatcaggtcgtgaccgaaggcgtggtaggcgaaacttacaatatcggcggccataacgagcgcaagaatatcgaagtggtgcagaccatttgcgatctgctggaagaactggcgccgaacaagccgcagggcgtggcgaactaccgcgatctgatcacttacgtgaaggatcgcccgggtcacgatatgcgttacgccatcgacgccggcaaaatcgatcgtgagttgggctggcggccgcaggaaaccttcgaaagcggccttcgcaaaaccgtagtttggtacctgaacaacgagacctggtggcgccgggtgcaagacggttcttatgccggcgagcgtttggggctgtcagattaa

SEQ ID NO: 425910 - DNA, 882 bp, Serratia marcescens
atgaaaggtattattctggccggcggttccggtacgcgtctgcatccgatcacgcgcggcgtgtccaagcaactgctgccgatctacgacaaaccgatggtctattatccgttgtcggtgctgatgctggcgggaatcaaagatattctgattatctccacgccggaagatctgccttcattcaagcggcttttgggcagtggtgaagcattcggtatcaatctcagctatgccgaacagccaagtcccgatggcctggctcaagcatttttgatcggtgaagaatttttggccggtgagccgagctgtctggttttgggcgacaatatttactttggtcaggggttcagtcccaagttgagaagcgttgcagcacgcaccaccggcgcgaccgtgtttggctatcaggtgatggatcccgagcgctttggcgtggtggagtttgacgaccacttccgcgcgctgtcgatcgaagaaaaaccggttaaaccgaagtctaactgggcggtgaccggcctgtacttctacgatagccaggtggtggagtttgccaaacaggtgaagccttcggagcgcggcgagctggaaatcaccagcattaaccagatgtatctggaacgcggagagctgaacgtcgagctgctggggcgtggtttcgcctggttggataccggcacgcacgacagtctgctggaagccagcagcttcgtgcagacggtagaaaaacgccagggctttaaaatcgcctgtctcgaggagatcgcctggcgcaatggctggctggatgatgagggcgtaaaacgcgcggctcagacgctggccaaaaccggttacggcaaatatttactggatttactgcatgcgcgtccacgccagtattga

SEQ ID NO: 425911 - DNA, 732 bp, Serratia marcescens
atgcgcgtccacgccagtattgagccgctggtttgggagagcgacttcttccaattagagagcgccaaattacatttcgatagctcggcggcacccgtagccgaggctgatttggatgcctatgcgttggtgcaggccaaaattcccgcttatcgcctgggatgggccgatgcgctgtcgacgctgggattccggctggtcgaaggggaagtggacctggtggtgaacgttgcgcctgaaagcgcgatggccgatgccgcttcggcggttgcggtgcgtcaggccgttcccgaggacatcccgtcattgcgcgctgccgccggtgaggtgttcgctgccagccgatttcgcgccccgtggtacgatcgcgccgatagcgggcgattctatgcggcctggatcgaaaaagcggtgcagggcacctttgatcatcaatgcttgctggtgctggatagccaggggcaacccgaaggctttgtcagcctgcgtgacattggcggccaggaaatgcgcattggcctgttggcggcgttccccggcgcatccggccggggcgtgggcgccaggctgatgacggcggcgatcgccgaatgtcggcagcaggggatgcagcgcctgcgggttgcgacccaggtgggcaatatcgccgcattacgactctatcaacgacagggtgccgtgattgaaagcaccgcgtactggttatacagaggtagacatgattccatttaa

SEQ ID NO: 425912 - DNA, 1131 bp, Serratia marcescens
atgattccatttaacgctccaccggttgttggcactgaactggaatatatgcaggctgccatgggcagcggcaaattgtgcggcgacggcggtttcacccgccgctgccagcagtggatggaacagcgtttcggcagcgcgaaagtgttgttgacgccttcctgcaccgcgtcgttggaaatggccgccattctgctggatatccagccgggtgacgaagtgatcatgccaagctttaccttcgtttccactgccaacgcctttgtgctgcgtggcgccaaagtggtgttcgtcgacctgcgtccagacaccatgaacatcgacgaaaccaaaatcgaagcggcgatcaccgataaaacccgcgcgattgtgccggtgcactatgccggcgtggcctgcgagatggataccatcatggcgctggcgaagaaatataacctgttcgtggtggaagacgccgcgcagggcgtgatgtcgacctacaaaggcaaggcattgggcaccattggccatatcggctgcttcagcttccatgaaaccaaaaactacaccgccggcggcgaaggcggcgcgacgctggtgaacgatccggccctgatcgatcgggcggaagtcatccgcgaaaaaggcaccaaccgcagccagttcttccgtggccaggtagacaaatatacctggcgtgacatcggttccagctatctgatgtccgacctgcaggccgcctacctgtggggccagctggaagtggcggagcgcatcaaccagcgccgtttggctctgtggcagaagtactacgacagcttcctgccgttggcccggtcaggccgcatcgaactgccggtaattccggccgactgcgtgcataacgcgcacatgttctatatcaagttgcgcgatatcgaagagcgcacggcctttatcgactacctgaaggaagccgaaatcatggcggtgttccactatatcccgctgcatgattgcccggccggcgaacgctttggccgctttgccggcgaagatcgttacaccacgcaggaaagcgcgcgcctggtgcgcttgccgctgttctacaatatgtctgatgtcaatcagcgtacggtaatcaataccatcctgagtttctttgcctga

SEQ ID NO: 425913 - DNA, 1251 bp, Serratia marcescens
atgtcgttggcaaaagcatcgatatggaccgctggctccacgctgatcaaaatcggcgtggggctgttggtggtgaaactgctggcggtggcgtttggccccagcggggtggggcaggcgggtaacttccgccagttgattaccgtgctgggcgtgctgtccggcgcgggcatttttaacggtatcaccaaatacgtggcggagtaccaccaggatccgcagcgtctgcgtctggcggtgggcaccgcgtcgagcatcgtgctgggcttttcgaccttgctggcgctggtgtttctgttcgccgccgaaccgatcagcatcgggctgttcgggcatgccgattacgtcgatgtggtgcgcgccgtcgctttcattcagatgggcatcgcctacgccaacctgtttatggcggtgctgaaaggctatcgcgacgcgatgggcaatgcgctggcggtgatcggcggcagcctgctcggcgtggtggcttattacctgtgcttcaagctgggcggttatgaaggcgcgctggcggggctggcgctggtgccggcgttggtggtgctgccggccgggctgatgctgtggcggcgcaaaacgctgccgttgcgctacctggcgccgcgctgggacaaactcgtggccggcaacctcggcaagttcaccgtcatggcgctgatcacttcggtgacgctgccggtggcctatgtgatgatgcgtaacctgttggccgcgcattacggttgggatgaagtggggatctggcagggcgttagcagcatttccgatgcctatctgcagttcatcaccgcctcgtttaccgtctatctgctgccgacgctgtcgcggctgacggacaagggcgccatctcgcgggagatcgtgcgctcgttgaaattcgtgctgccggcggtagcggcggcgagttttacggtgtggctgctgcgtgatttcgccatctggctgctgttctcggacaaattcgtcgccatgcgcgatctgtttgcctggcagctggtgggcgacgtgctgaaagtcggggcttatgtgttcggctatctggtgatcgccaaagcgtcgctgcgcttctatatcctgacggaagtcagccagtttctgctgctgacgctgttctcgcactggctgatcccgctgcacggcgcgttgggggcggctcaggcctatatggcaacctacatcgtgtatttcgcgctctgtagctgcgtatttcttatctatcgtagacgagtatga

SEQ ID NO: 425914 - DNA, 1086 bp, Serratia marcescens
atgaccacactgattcacgttctgggatccgatatcccgcatcataaccagacggtgctgcgcttcttcaacgacgtgctggcgccgcgtctgccggctgagcagacgcggcattttatggtggcggccaaggatgtggcggcactgggtgatttccccgccctgaacattgagccctacgcagacaagaaaagcctggcggcggcggtcatcgcccgtgcccaggccgatcgcgatgcgcgcttcttcctgcacggccagttcaatccggggctgtggctggcgctgctgagcggcaagatcaaggcgcgtcaggtcagttggcatatttggggtgccgatctgtatgaagacgccaccagctggaaattccggctgttctatctgctgcgccgcattgcgcaggggcgggtggggaacgtgtttgctacccgcggcgacgtgatccactaccagcagcgccatgcgcgggtgccggcctcgctgctgtacttcccgacccgcatggatccggcgctgaccgacgttcacgtcgagaaaaacctggccgggccgatgacgattctggtgggtaactccggcgatcgcagcaatcggcatatcgaagcgctgcaggcgattcatcagcagttcggcgccgacgtgcgcgtgatcctgccgatgggctatccggccaataacgacgcctacatcgagcaggtgcgcgccgccgggttgccgctgttcggcgagaaaaacctgcagctgctcacgcagcaggtggcgtttgaggactacctcaatattctgcgcgcctgcgatctcggctatttcattttcaatcgccagcaggggattggcaccttgtgtctgctgattcagttcggcgtgcctttcgtgctcagccggcaaaacccgttctggcaggatttggcggaacagcatctgccggtgctgttctacggcgattcgctggacgaggcggtggtgcgtgaagcgcagcgtcagctggcggcggtggataaacaggcgatcgccttcttcaatccgaactatgtcgacggttggcagcaagccctggcgttggcggcgggagagcactcatga

SEQ ID NO: 425915 - DNA, 1368 bp, Serratia marcescens
atgacgttggcgcaattcggcggcctgttcgtcgtctatctggtcagcctgacgtttatcctgacgctgacctatcaggagtttcggcgcgtgcgctttaacttcaacgtcttcttctcgctgctgtatttgctgacgttttatttcggttttcctttgacctgcctgctggtgttccagtttgacgtcgaggtggtgccggtggagtttctgctgtacgccctgctgtcggcgacggcgttttacgccatctattacgttacctacaagacccggctgcgcaagcgccgcacgcagccgcgcgctgcgctgtttaccatgaaccgggtggaaacccatatgacctgggtgctgctggcgctggtggcgatcggtaccgttgggatcttcttcatgcagaacggcttcctgctgttcaagctcaattcctacagccagattttctccagcgacgtgtccggcgtggcgctcaagcggttcttttacttcttcattccggcgatgctggtggtctatttcctgcggcaggatctgcgcgcctggttcttgttcctggtggcgacggtggcgttcggcattctgacctacgtgatcgtcggcggcacccgcgccaacatcatcatcgccttcgcgctgttcctgtttatcggcatcgtgcgcggctggatcacgctgtggatgctggcggcggcgggcatattcggcgtggtcggcatgttctggctggcgttgaagcgctacagcctggacgtcagcggcgcggaggcgttttataccttcctctacctgacccgcgataccttctcgccgtgggaaaacctggcgctgctgttgcaaaattacgacaagatcgatttccagggcctggcgccgatcttgcgtgatttctacgtctttatccctacctggctctggcccggccggccggacgtggtgctgaactcggccaactacttcacctgggaagtgctgaacaaccactccgggctggcgatttcgccgacgctgatcggttcgctggtggtgatgggcggcgcgctgtttatcccgctcggcgcgattctggtgggcatgatcatcaagtggttcgactggctgtatgagctgggcaaaaccgagccgaaccgctataaggcggccattctgcaggggttctgcttcggcgcggtgttcaacatgatcgtgttggcgcgggaaggggtggattcattcgtgtcgcgcgtggtgttcttctgcattattttcggcgcctgtctggtgctggcgaagttgctgtattggctgttcgataccgccgggctgatcaaggccagagtgacgcgcacccgcgcgctggcgtcgccgcctcgggccaacggtcttttgtaa

SEQ ID NO: 425916 - DNA, 741 bp, Serratia marcescens
atggaagcaaagatttcggtgccgcagtatgagctgcgcggtttcagcctgtggggctttcgcgatatggcgcactgcatggactttttgttcgacggcggccgggtaaaacagggcacgctggtggccatgaacgcggaaaagatcctgaaggcggaagaggaccaggcgctgcatgcgttgctggatgaggcggagtacaagtacgcagacggcatcagcatggtgcgctcgattcgccgcaaatacccggcggcggacgtttcgcgcgttgcgggcgccgatctgtgggaagccttgatgcaacgcgccggccgtgaaggcacgccggtcttcctggtcggcggcaagccggaggttttggcggaaaccgagcaaaagctgcgcagccagtggaatgtcaacctggtgggcagccaggacggctacttcaaaccggatcagcgcgaggcgctgttcgagcgtattcgtgccagcggcgccgcgatcgtgacggtggcgatgggatcgccgaagcaggagattctgatgcgcgactgccgcaaggtgcatccgcaggcgctgtatatgggcgtgggcggcacctacgacgtctttaccggccatgtgaagcgtgcgcccaaggtgtggcagaacctcggtctggaatggctctaccgcctgctcagccaacccagccgcatcggccggcagttgaagctgttgaagtttgtcggctactactacagcggcaagatgtaa

SEQ ID NO: 425917 - DNA, 1404 bp, Serratia marcescens
atggcacacaaagagaaaccgcaagggctacaccggggccttgaggcccggcatatcgagcttatcgctctggggggcaccatcggtgtcggcctgtttatgggctcggccagtacgctgaaatgggcggggccgtcggtgctgctggcttacatcatcgccgggctgttcgtgttcttcattatgcgttcgatgggggaaatgctgttcctcgagccggtcgccgggtcgtttgccgtttacgcgcataagtacatgaatccctacttcggttacctgaccgcctggggctactggtttatgtggattgccgtcggcatttctgaaatcaccgccatcggggtgtatgtgcagttctggttcccggaaataccgcagtgggtgccggcgctgatcgccgtggcgatggtcgcgttggccaacctggcggcggtgcgcctgtacggtgagctggagttctggttcgccatgatcaaggtcaccaccatcatcgtgatgattctggtggggctgggggtgatcttcttcggcttcggcaacggcggtgaacctatcggtttcgccaatttgacggcgcacggcggtttctttgccggcggctggaaaggcttcctgtttgcgctgtgcatcgtggtggcgtcctatcagggggttgaactggtgggcatcaccgccggggaagccaagaacccgcaggtgacgctgaaacgcgcgatcaacaatatcctgtggcgcatcctgatcttctatgtcggtgcgatcttcgtcattgtcaccatcttcccgtggaacggcatcggcaccaccggcagcccgttcgtgctgaccttcgccaagatcggcatcgttgccgccgccggcatcatcaacttcgtggtgttgaccgccgcgctctccggttgcaacagtggcatgtacagcggcggccgcatgctgtacgccctggccaagaaccgccaactgccggcggcgctcaccaagctttccgccagcggcgtgccggtgaactgcatcgccgtcaccatcggctgcctgttggtgggctccgcgctgaactacatcatcccgaatccggagcaggttttcgtttatgtctacagcgcgagcgtgctgccgggcatggtgccgtggttcgtggtgctgataagccaactctatttccgccgcgcccataaggaagcgatcaaaaaccacagctttaagtcgatcatgttcccgtatgtgaactatctgaccatcgcttttctggtttgcgtgctggtcggcatgggaatcaacccggatacgcgcatttccctgctggtcggggcgattttcttagccggcgtcagcctgtgctacttcgctttcggcatgcacaagaaacatcatccggttgaaaatcgggtagaaacgcgccaataa

SEQ ID NO: 425918 - DNA, 1254 bp, Serratia marcescens
atgccaaactctaatcacaatctgggccgccgtcgtttattacagggcgttgccgccagctggttgctgagtgtgagtcgcacaggcttcgccgcgtcatcgcacgtgatcgccgtgcgcgtctggccatcctccacctatacccgcgtcacgctggaatccaacgtcgagctgaaatacaagcagtttgccctgaccaatcccgatcgcgtggtggtggatatcgaaggcgtccacctcaacagcgtgctgaaaggcatcgccgggcaggtgcgcgccgacgatccgtatctcaagcaggcgcgcgtcggccagttcgatcagaataccgtgcggctggtgctggagctcaagcagagcgtcagcccgcatattttcacgctggcgccggtgccggagtatcgcaaccgtctggtgatggatctctatccgaccaagggcagcagcggcggcgaggagtatgatccgctgctggcgttactggaagattacaacaagggcgatctggagcgcacgctgccgccggaagcgccgcaggccggcaaggcggggcgcgatcggccgatcgtcatcatgctggatcccggccacggcggcgaagatcccggcgctatcggcaagtacaagacgcgcgagaaagacattgtgttgcagattgcccgcaagctgagcgccatgatcaagcgcgagccgaatatgaaagtgttcatgacgcgcaacgaagacgtgtttatcccgctcaaggtgcgcgtcgccaaggcgcgcaagcagcgcgcggatttgttcgtttcgattcacgccgacgccttcaccagccgcgccgcgcgcggttcgtcggtgttcgcgctgtccaccaagggcgccaccagctcggcggccaagttcctggcgcagacgcagaacgcctcggaccaaatcggcggcgtcagcaagagcggcgaccgttatctcgaccacaccatgttcgatctgatccagaccgcgaccatcaacgacagcctgaagttcggcaaggaagtgttgaatcggatggggaaaatcaaccggctgcacaagaatcgcgtcgatcaggccggttttgcggtgttaaaggcgccggatatcccgtcgatcttggtggagacggcgtttatcagcaatatcgaagaggagcgcaagctgcgcaccagccatttccagcagcaggtggcggagtcgattctggcgggcatcaaggcttatttcgccaacggcggcgcgctggcgagccgatag

SEQ ID NO: 425919 - DNA, 1326 bp, Serratia marcescens
gtgaaggaacgtagtacagagctggtgcaaggattccgtcactcagtcccctatatcaacgcccaccgcggcaaaacgtttgtcatcatgctcggcggggaagccatcgaacacgagaatttctccaacatcgtcaacgatatcgggctgttgcatagtctgggcattcgcctggtggtggtttacggcgcgcggccgcagatcgacgccaacctggcgcagcataactttgagccgatctaccacaagcacacccgcgtaaccgacgcccatacgctcgaactggtcaagcaagccgccggtttgttgcagctcgacatcaccgcccggctgtcgatgagcctcaacaatacgccgctgcagggcgcgcatatcaacgtggtcagcggcaacttcatcatcgcgcaaccgctgggcatcgatgacggtatcgactactgtcacagcggccgcattcgccgcatcgatgaagacgcgatccaccgccagctcgacagcaacgccatcgtgctgatcggcccggtcgcggtttccgttaccggcgagagcttcaacctgacttcggaagaagtggctacccagttggcgatcaagctgaaagcggaaaaaatgatcggtttctgctcctcgcaaggtgtgaccgacgcggagggtaacattctttccgagctgttccccaacgacgcgcaaaagcgccttgaagagctcgaggaaggcggcgattaccattccggcaccgtgcgcttcctgcgtggcgcggtgaaaggctgccgcagcggcgtgcgccgtagccacctgatcagctatcaagaggacggcgcgctggtgcaggagctgttctcgcgcgacggcatcggcacccaaatcgtgatggagagtgccgaacaggtgcgtcgggcgacgatcaacgacatcggcggcatcctggagctgattcggccactcgagcagcagggtattctggtgcgccgttcgcgtgaacagctggagatggagatcgacaagttcaccattatcgaacgcgacaacctgaccatcgcctgcgcggcgctgtacccattcttggaggaaaaaatcggtgagatggcctgtgtcgcggtgcatcccgattaccgcagctcatcacgcggcgagatgctgctgcagcgggtggaaaatcaggcgcggcagatggggctgaagaagctgttcgtgctgaccacccgcagcatccactggttccaggagcgtggctttaccccggcggaggtcgacgtgctgccgatgcagaaacaggcgttgtacaactaccaacgccgctccaaaattctgctggcggatctgtaa

SEQ ID NO: 425920 - DNA, 1851 bp, Serratia marcescens
atgatcgcactgctggagcaggcggtggcgcttggcgtgctgcgcccgcttgacgtgcagttcgcccgcgtggtggcgagcgaagacgagcccgatattttgctggccgccgcctgcctgagcgcagaggcgggagccggtcacgtctgcctgatgctggaacagctgcaggcggacacgctgtttgaagggcgccagccggcgttggcgctggcggtgtgggaggcggccgggcgaccggatagcgcgcgttggcagcagcgtttggcggccagcgcggcggttggggacggcagcggcgctacgccgctggtgctgcgcgggccgcgcctgtatctgcagcgcatgtggcaaaacgaaggcgaagtggcggcgtttatcggcggcgaaggcgagtcgctggcggtgccggaggctgagctgcgcaccattctcgaccgcttgttcggcgccgcgagcgacgagcccgactggcagaaaatcgccgccgcggtggccgccacgcggcgcattgcggtcatttccggcgggccgggcaccggtaaaaccaccaccgtcgccaaactgttggcagcgctggtgcagctggatgaaagcgcgcgcttgcgcattcagctggcggcgccgaccggcaaggcggcggcgcgcctgacggagtcgcttggcagcgccagccgccagctggcgttgaccccggcacagcaggcgctgttcccgacggaggcggcaacgttgcaccgtctgttgggggcgcaaccgaacagtcagcgcatgcgctatcaccgtggcaaccggctgcatttggatgtgctggtggtggatgaggcctcgatggtcgatctgccgatgatggcgcgcctgattgccgcgctgcccgatcgggcgcgggtgattttcctcggcgaccgcgatcagctggcttcggtggaggccggcgcggtgctgggcgatatttgccgttttgccgagcagggatacagcgatgcgcgcgccgctgagctgagccgcctgaccggttgttcgctcacggggcagcaggccgacgcggaagcggcggtgcgcgacagcctgtgcctgctgcgcaagagctatcgcttcgacgcccgttccggcatcggtcagctggcgttggcggtcaacgccggagcgggggatcgcgcgctggcggcattaaacggcagtttcggtgatgttgcgggctatgcgctggcgacgagcgaagagtatcaggcgctgttggatgcctgcgtggcgggctaccgcgactatttgcggctgaccgcagaaggggcggacgcggcgacggtgctggcggcctttggccgtttccaggttctatgcgcgctgcgtgaagggccgttcggcgttgccggcctgaacgagcgcattgagctcgggctgcagcgtgccggtttaattgaccgcaagccgggcgtgctcggccgctggtaccgggggcggccggtgatgatcggccgcaatgacagcgcgctggggctgttcaatggggatatcggcattacgctgccggatgagcacggcgatctgcgcgtgcatttccaactgcccgacggcagcatcaagtcggtacagccaagccgtttgccggcgcatgaaaccgcttatgcgatgacggtgcacaaatctcagggatcggagtttgaccatacggtgctggtgttgccgaatcactttctgccggtgctgacgcgtgagctggtctataccgcgatcactcgcgcgcgtaagctgctttcgctgtacgctacggaggcggtgctgctgcgggccattcgcacgccgacccagcgccgcagcggattggctgaacggctgcaggcgacggaataa

SEQ ID NO: 425921 - DNA, 3552 bp, Serratia marcescens
atgacggaaactgccccgcagagactggagccgctgacgctgccgctgttcggtgaacgcctgatcgaggcgtcggcgggcaccggcaaaacctttaccatcggcgcgctgtacctgcgtttgctgctggggctgggcggtgaagcggcgtttcctcgcccgctgacggttgaagaaatcctggtggtgacctttaccgaggccgccaccgaggagctgcgcgggcgtatccgcgacaatatccacgggctgcgcatcgcctgcgtgcggggcgtcagcgccaacccgctgttttcggcgctgatggctgaaattgacgatttgaccgacgccgcctcgcagctgctggcggcggagcggcagatggatgaagcggcgatctacaccattcacggcttttgccaacgaatgctgacgcacaacgccttcgaatccggcatgctgtttgaacaaacgctggtgcaggacgagttgccgctgcggcggcaggcctgtgctgatttctggcgtcgccactgctatccgttgccgctgggcgtggcgcgtgcggtcagccaggagtggagcggcccggaagcgttgctggccgacctttccggttacctgcacggtgaggcgccggcgctgcgccggccgccgaaggacgaagaaaccgtcctgatgcgccacgagcagatcgtcgcgcgcatcgatgccatcaaggcgcaatggcgtgcggcggcgggcgatctggaggcgttgatcgcccagtccggcgtcgataaacgcagttacagcagtaaacacctgccgaactggctgaacaaggtcggcgaatggagcgggcaggagactcaggactaccagttgccgaaggaactggataaatttcgccagtcggtgctgctggagaagaccaagaaaggcgagccgccgaggcatgcgctgttcacggcgatcgacgaactgttcgatgagcccttgacgctgcgcgacctgatcatggcgcgcgcgctcagcgagatccgcacttccattcaacaagaaaagcgccagcgcgccgagctggggtttgacgacctgcttagccgtttggacggcgccttgcaaagcggcggcggcgaacagctggcgcaggcgatccgccagcgttatccggtggcgatgatcgatgaattccaggacaccgatccgcagcaataccgcattttccaaaaactttacgtcggccggcccgattgcggcctgctgttgatcggcgatcccaagcaggcgatttacgccttccgcggcgccgacatctttacctacatgcgggcgcgctcagaggtgagcgcccactatacgctggagaccaactggcgctcgtcgccgtcgatggtcgccagcgtcaatcacctgttttctcaggtagaaaagcctttcctgttcggccaaatcccctttatcgaggtcagcgcggcggaaaagaaccaagggttggcgtttgacctgcacggcaagccgcaaccggcgatgcagttctggctgcagcagggggaaggcgccggtgtaagtgattaccaacagttgatggcgcgcctgtgcgccacgcaaattcgcgactggctcagcgccgggcagcagggccaggcgtggctgcagggcggcaaagagccacggccggtgcaagcctccgatatcacggtgctggtgcgcagccgcaatgaggcggcgctggtgcgcgatgcgctgagcgcgctgtccattccgtcggtctacctgtccaaccgcgacagcgtgtttgacaccccggaggccaaagacctgctgtggctgttgcaggcggtgttggcgccggaacaggagcgcacgctgcgcagcgccatggccaccgggctgatggggctggacgcgccgacgctggacggcctgagccgcgatgaacgcgcctgggacgagctggttaacgagttcgacaattaccgcacgctctggctgcgccgcggcgtgttgccgatgctgagcgaggtgatgaaagcgcgccagctggcggagaacctgctggccagcgccggtggcgagcgtcgtttgaccgacgtgctgcatctgggggagttgttgcaagaggcggcggcgcaactcgacagcgaacatgcgctggtgcgctggctggcacagcagatcgcccagcctaatcgccagtccgataatcagcaactgcggctggagagcgaccggcatctggtgcaggtgatcacgattcataaatccaaggggctggagttcgatctggtgtggctgccgttcgtcggcaatttccgccagcaacagcaggcgctgtatcacgatcgccacagtttccaggcgttgctggatctcgacgccaatgaagagagccaggcctgggcggaggaagagcggttggcggaagacctgcgcctgttgtacgtggcgctgactcgctcggtgtaccactgcagcatcggcatcgcgccgctgttccagggcacgcgcaagaaacagggcgataccgatctgcaccgcagcgcattgggttatctggtgcagggcgggcaggccggcgacgccgcgtatctgcaggatcgcctgcagcaattggcgggcggcggcatcgcgctgtcgctggtggaaccgccggacgaggcgccctggcagccccaggcatcgctggccgctacgctggcggcgaaaagctttacccgacggatccaggatttttggcgggtgaccagctataccggtttgcaacagcacggttcgagcctgatgcaggatctgctgccgcgtctggatgtcgacgccgcgggcgagcggggtgaggagagtgagccagcgctcacaccgcataccttcccgcgcggcgcaacgcccggcaccttcctgcacagcctgtttgaaacgctggacttcacccagccgctggacgaacagtggctgcaggaacagctgcaacagcaaggatttgccgagcactggcagccgattctgctggcgtggatgcaggtgttgctcaatacgccgctcgacgacagcggcgtgacgttgtcggcgctgacgccgcagcacaagcaggccgagctgcagttctatttgccgattaaccggttgttgcaggcgaaggcgctcgatgccctggtgaagcgttacgatccgctttccgcccgctgcccggcgctagattttcatcaggtgcagggcatgctgaaaggctttatcgacctggtgttctgctggcagggcaaatactacctgctggactacaagtccaactggctgggggaagacagtagcgcctatacccggccggcgatggagcaggcgatggcggagcatcgttacgatctgcaataccagctgtatacgctggcgctgcatcgttatctgcgtcatcggttaccggattacgattaccggcgccattttggcggggtgatatatctgttcctgcgtggcgtggatgcggcgcacccgggcaacggcattttcacctgtctccccgagcttgagctggtggaggggatggatcgcttgttcagcggcgaagctgcggcgacggaggaaggatcatga

SEQ ID NO: 425922 - DNA, 2889 bp, Serratia marcescens
atgcgcagacagttggcccgtatcaccgggctggtattattggctatgtgttgggcgccgttgagttgggccgcgcaaggatggcaaccgctggcggagaagatcaacaaaagcgaacacgatccgcgtcagtatgaggcgatcaaattgactaacggcatgacggtgttgctggtgtccgatgcccaggcgccgaaatcgctggcggcgctggcattgccggtcggctcgcttgaagatccgaacagccaactgggtttggcgcactatctggaacatatggtgctgatgggctccaagcgctatccagagccggaaaacctgtccgaattcctgaaaaagcatggcggcagccacaacgccagcacggcttcttatcgcaccgccttctatctggaagtggaaaatgacgcgctggagccggcggtcgatcgcatggccgacgccattgctgagccgctgctggatccgggcaatgccgatcgtgagcgcaacgcggttaacgccgagttgacgatggcgcgttcgcgcgacggtatgcgtatggcgcaggtgggcgcggaaacccttaacccggcgcacccgagcgcgcgcttctccggcggcaatctcgatacgctgaaagacaagccggacagcaagctgcacgatgagctgaccggcttctataaacgctactactccgccaacctgatgatgggcgttttgtacggcaatcagccgctgcctcagttggctgatattgcggcgaaaacctttggccgcgtgccgaatcacgacgccaccgtgccgccgatcaccgtgccggccgtgacgccggaacagcagggcatcatcattcactatgtgccggcacagccgcgcaaacagttgaaggtcgagtttcgcatcgataacaacagcgccgcgtttcgcagcaaaaccgatacctacatcagctacctgatcggcaaccgcagcaagaacaccctgtctgactggttgcagaagcaggggctggcggacgccatcaatgccggcgccgatccgatggtggatcgcaacggcggggtcttcgccatcagcgtttcactgaccgacaaaggcctggccaagcgcgacgaggtcgtcgccgccattttcaactacctgaaaatgctgcgcagcgaaggcatcaagcaaagttacttcgacgaaatctcgcatgttctcaacctggatttccgttatccgtcgatcacgcgcgacatggactacatcgaatggctggtggacaccatgctgcgcgtgccggttgaacatgcgctggacgcgccttacctggccgatcgctatgatccgaaggcgatcgccgaacgcttggacgccatgacgccgcaaaacgcccgcatctggttcgtcagtccggatgagccgcacaacaagacggcctatttcgtcaacgcgccttaccaggtcgacaaaatcacgccgcagcgctttacgcagtggcagcagttagggagtgggatttccctgtcgttaccgacgctcaatccgtacatcccggatgactttaccctgaccaagccgtcgcacgagttcaaaaagccggaaatggtggtggataaccccggcctgcgcgtgctgtacatgccgagccgttacttcgccgatgagccgaaggccgacgtcaccgtcgctttccgcaacgccaagaccatggattccgcgcgcaaccaggtgctgttctcactgacggattatctggccggcctcgcgctggatcagctgagctatcaggcatcggttggcgggctgagcttctcgacctcgccgaacaacggcctgatgtttaacgccaacggctttacccagcgcctgccgcagttgctgacggcgctgatcgaaggctattccagcttcacgccgacggaagatcagctggcgcaggccaagtcctggtatctggagcagttggacgccgccgagaagggcaaggcgtttgaattggccattcagccggtgcagatggtttcccgcgtgccgtattccgaacgcagcgaacgccgcgaagtgctgaagacgctgacgctgaaagacgtgctggcctatcgcgacagcctgctggccgaggctacgccggagctgctggtggtgggcaatatgagcaagcagcaggtcgacacgctggcgtcgacgctgaaacatcgcctgggctgtaccggcatcgaatggtggcacggcgaagacgtggtagtggacaaaaatcatctggccaatctgcaacaggtgggcagcagcaccgattcggcgctggcggcggtctatgtgccgaccggttacgacgaagtggccggcatggcctacagctcattgctggggcagattattcagccgtggttctatagccagctgcgcactcaggagcaattgggatatgcggtcttcgccttcccaatgtcggtggggcgccaatggggcgtgggcttcctgttgcagagcaacagcaaacagccggcatacctgtaccagcgctatcaggatttctacccgaaaaccgagaaacgcttgcgcgacatgagcgaagcggactttgagcagtacaaacaggcgctcatcaatgagctgaagcagcggccgcaaaccctgagcgaagaggccagccggttcgccaacgatttcgatcgcggcaatttcgccttcgatactcgtcagaagctgatcgcgcaggtgcaacagctgacgccggccaaactggcggattatttccaccaggcggtgatccagccacaggggctggctgtgctgtcgcaggtgagcggcagcgggcaagacaaggcggattacgcggcgcctaagggctgggtcacctatccgaacgcgtctgcattgcagcagatcctgccgcgcaaagtggcgacgccatga

SEQ ID NO: 425923 - DNA, 3372 bp, Serratia marcescens
atgttcacggtttatcattccaatcagctggatttgttgaaaacgctgaccagcgcactgatagccagagatccgttggccgatccttttcaacaggaagtggtgctggtgcagagccccggtatggcgcaatggctgcagatgcagttggcggaacagttcggcatcgccgccaatattgcgtttccgctgccggcgacctttatttgggacatgttcacccgggtgttgccggatatcccgaaagagagcgccttcagcaaggacgccatgacctggaagctgatgtggttgctgccggagatgctgactcagccggcgtttgcgccactgcagcactatctgaccgatgacggtgacaagcgcaagattcaccagttggccggccgggtcgccgacctgttcgaccaatatttggtttatcgcccgcagtggctggagagctggcagcgcggggagcgcatcgacggcctggcggaggctcagcaatggcaggcgccgctctgggcgcggctggtggagtacacgcgcgagctggggcagccggaatggcaccgcgccaatctgtacagccgatttatccacgcgctggagcaggcaaaaacctgcccgcccggtttgccgccgcgggtgtttatctgcggcatctcggcgttgccgccggtctatttggaggcgctgcaggcgctggggcggcatatagatatccacctgatgttcaccaacccctgtcgctactattggggcgatattcaggattacgctttcctggcccgcttgcagagccgcaagcgccgtcactaccatcaggcacgcgagcaggggctgttccgccagccggatgatgcggcgcgcctgtttgacgccgaaggccagcagcagctcagcaacccactgctggcctcttggggcaagctggggcgcgatcacctctatctgctgtcgcagatggaaggggcgcaagaggttgacgcctttgtcgatatcccggccgataccatgctgcacgccgttcagcgcgacatgctggagctggaagaccatgcggtgatcggtattaccgcggaaacgctggaaagcagcttcagcaaacgtccgctagatgagaacgaccgttccctcagcctgcatgcctgccacagcccgcagcgggaagtggaggtgctgcacgatcaactgctgaccatgctggcgcaggatccgtcgttgacgccgcgcgacatcatcgtgatggtcgcggatatcgacagctacacgccttacattcaggcggtgttcggcaatgcccctgccgagcgctacctgccgttcgccatttccgaccgtaaagcgcgccaggcgcatcccgcgctgcaggcgttcatttcactgctcgatctgccgcaaagccgttttacctcggaacaggtgctggcgctgcttgaggtgccggccctggccgcccgtttcgccattggcgaagaggggctgcgcctgctgcgccattgggtcggtgaatccggcgtgcgctggggcctggacgacgataacgtgcgcgaactggatctgcccgctaccggccaacatacctggcgctttggcatcacgcgcatgttgcttggctacgcgatggacagcaatgccggcgattggcagggcattttgccttacgacgaatcgagcggattggtcgccgaactggcggggcagctggcagacctgctggcgcagctcagccactggcggcaaatcttgagcgaagcgcgcccgctcgaagcgtggctgccgctctgccggcaactgctggatgccttcttcgctgcggacagcgacaccgaggtggtgctggcgctgatcgaacagcagtggcagcaggccatcaattttggcctggcggcgcgctatcccgatgaggtgccgttgaccattctgcgggacgatctggcggcgcgcctcgatcaggagcgcatcagccagcgcttcctcgccgggcaaatcaacttctgtacgctgatgccgatgcgttccattccgttcaaggtggtgtgcctgttgggcatgaacgacggcgtgtatccgcgcacgctgccgccgctgggtttcgatctgatggcgcagcaggtcaaacgcggcgaccgcagccggcgcgatgacgaccgttatctgttcctggaagcgattttgtccgcgcaacagcggctgtatatcagcttcatcggccgttccattcaggacaacagcccgcgctacccttcggtactggtcactgagctgctggagtacctggaacaaagctattgcctgccgggagatgaagagcttagcgcagacgacagcgcccggcgggttggtgagcacttgctgaagtggcacgcgcgcatgccgttcgccgccgagaacttcttgccgggctcggaggagcaaagctatgccgccgagtggctgcccgccgccgatgggcgcggtgcggcgcatccggcgttcaaccagccgctgcccgccgaagcgctgcagcaaatatcgctggatgaactgctgcggttttaccgccatccgattcgcgcgtttttccaactgcggctgggcgtcagttttatcctggaagagaccgagctgccggacgaagagcccttcacgctggataacctcagccgctaccagttcaacagccaactgctgaatacgctgatcgacggtgacgatcccgaacggctgttccagcgggtgcgcgccgccggcggcttgccctatggcgccttcggcgaaatttattggcaaaagcagcaggaagagatgagcgaactggccgagcaggtgcgtgcggaacgcgcagagagccatagcctggagctggatatcgatatcgccggcgtgcgcctcagcggctggctgcatcaggtgcagggtgacggcctgctgcgctggcggcccgcgacgctgtcggcggtggatggcatattgctgtggctggagcacctggtgtactgctgcgccggcggcaccggcgagagccgcatgtatggccgcaagaactccgcctggcgctttgccgcgctggcgcctgaagaggcacaggcgcagctggcggaactgctgacgggctatcagcgcggtctgagtcagccgctgctgttgctgaacaagagcggctgggcgtggctgagtcagtgctatctgccggaaacgcagcaaatcgactgggaggaagaagcgcaaatcaaggcgcgcgccaaattgctgcaagcctggcagggcgatcagcgcattcccggagaaggggaagatccctacgtgcagcgagtgtttcgccaattggataatgaatacttagcgcaaatactggccgaaacagagcgttatctgctgccggtggcgcggcataacctggggtaa

SEQ ID NO: 425924 - DNA, 357 bp, Serratia marcescens
gtgacggctaacgctcgggcagggcggctatcccgcaacggcttcagcctgccggaagtgttggtggcggccttgctgttctcggtgtcgctgcttggcttgttacagtatcatcaggtgctgttgcagtcgtttcagcgccagtggcactaccggcaagcctgggcgctggcgcatcagcagttagaagcgttcgccgtcaccgggcggctcgaggccgaatcgccgccggaaggttggcgacgcgagaccgcgcttgacgatgcggagagtgattgccgccgattgacggttagagtccaaacgccgcagcggcagtgggcgacgctgagccgctggtattgcacccgcttttaa

SEQ ID NO: 425925 - DNA, 447 bp, Serratia marcescens
atgaattggcgaacccagcggggcggtagcactctggcggcggtgatgttgctgttggcgctggggctgatgttgcttaacgctcagcatcggcagttggataacgcgctgttactggccgccgatcagcagcgttaccttcaggcttataatcaggccgcttcggcgctgagttggggcatgagccagcgctggccacgcgccgagctgagtgcggcggcctggttatgcaggcagcgcgcggaactgacggcctgcgcccggctgtctgccagagcgggcgttgtgacgatacgcggccttggtgagatgcgcggcggtgaaccgctttggctgtatcagtggggtacctttaacggcgcagagaccgctggcaaggtgcaagctcagccgggcggtcggctggatttttgcccagagaaaaggctgaccgactgtgacggctaa

SEQ ID NO: 425926 - DNA, 579 bp, Serratia marcescens
atgttgactttagaacgcggttttaccttgccggaggtgatgttggcgttggtcttcggcagcgtgatcgcgctcggcgcggcgaaaacctatccgttgttgcgccagcaaagcgtggtcgtcagccagcactttcggctggagtcaacgctgcggcaactggcgttcggcattgagaaagatctgcgccgcgccggtttttgcgccgggcagtgcgccggccgtccgttgctgatcggtcaggcatcgggagaagcggcgggcagttgcgttatcgttgcctacgacatcgctcgcagcgggcaatggctcgattcgggcgaggatgcgggctatttcggttaccggctgcgcaatggcggcttggaagggcagcgcggcgtgagccaatgcgatggcggtggctgggagcggttgctcgattatgacgaagtgcgcattgagcggtttcatgtggcgatcgagcggggcgatcatggcgcgaccttggctcgcctgacgctggcggggcgctccgccagcgatacgcgtatcaggcgcagcctgagtgcgagcgtcgaaatggcggcgctgccatga

SEQ ID NO: 425927 - DNA, 504 bp, Serratia marcescens
atgaaagacaatactctctcgaacatcgatgatcgccagcgtggcatgacgctgattgagctgttggcggcgatattgatcgccggcatgctcaccggctggggcgtcgggcaatggcgttatcatcagcaagcgctgcggctggaacacacggctcagcagctgctggcgtttttgctgcgattgcaggcggacgccaactggcgtaaccgcgcgacgctgctgtggttcaagaacggcacgccctggtgtctgggcggtggcgtgccgccgacggattgcgcttccgccgaaggcgccgttttctcgccgtcttatcacgacgtcgctttgagcggctacaccggcaaagagattgggttttacggtttgcgcaatactgcgcaggcggggcacatccttctcagcaacgacgcaggcagcctgcggctggtgctgtccgcccgtgggcggctgcgtttgtgcagcgaagggcagcgggtcagaggcattgcgctatgttga

SEQ ID NO: 425928 - DNA, 795 bp, Serratia marcescens
atgaaacagtatctggatttgatgaacaaggtgctcgccgagggcacccctaaagccgaccgtaccggcactggcacgctgtcgattttcggccatcagatgcgtttcaacttgcaggaaggtttcccgttggtgaccaccaagaaatgtcatcttcgttcgatcattcatgagctgttgtggttcctgaacggcgataccaacatcgcctacctgcgtgacaacaaggtcaccatttgggacgagtgggctgatgaaaacggcgatctcggcccggtgtacggcaaacagtggcgcgcctggggcgcggcggacggccgtcagatcgatcagctgagcaacgtgctccaacagctgaagcaggatccggattcgcgccgcatcatcgtttccgcctggaacgtcggcgagctggatcagatggcgttggcgccgtgccacgcgttcttccagttctacgtcgcggacggcaagctctcttgccagctgtaccagcgttcctgcgacgtgttcctcggcctgccgttcaacatcgccagctacgcgctactggtgcatatgatggcgcagcagtgcgatctggaagtgggcgatttcgtctggaccggcggcgatacccacttgtacagcaaccacatggaacaaactcagctgcagctgacgcgtgaaccgcgtccattgccgaaactggtgatcaaacgcaagccggcttcgctgttcgattaccgtttcgaagacttcgagatcgaaggttacgatccgcatccggccatcaaggcgccggtcgcgatctaa

SEQ ID NO: 425929 - DNA, 873 bp, Serratia marcescens
atgagcaatagctatctggcgtttcctaaatttgatccggtcattttctccattggcccggtttctctgcattggtatggcctgatgtacctggtcggcttcgtttttgccatgtggctggcggtgcgccgcgccaacaagccgggcagcggctggaccaaagacgaagttgaaaacctgctctacgccggtttcctgggcgtattcgtcggcggccgcgtaggctatgtgctgttctataacctgccgctgttcctggataacccgctctatctgttcaaggtctgggatggcggcatgtcgttccacggcggcttgatgggggtgattctggtgatgttctggttcgctcgccgcaccaaacgcaccttcttccaggtttccgattttatcgcgccattgatcccattcggcctgggcgccggccgcctcggcaacttcatcaacggtgaactgtggggccgcgtgaccaccgataccccttgggcgatgctgttcccaagttcgcgcagcgaagacgtggccctcgccgccgccgatccttccttgctgccgttattgaatcagtacggcgtactgccgcgccacccgtctcagctgtatgaactgctgctggaaggcgtggtgctgtttatcattctgaacctgtttattcgcaagccgcggccgatgggcgccgtctcgggcctgttcctgatcggttatggcgcattccgcatcatcgttgaagcgttccgccagccggatgcccagctcggcctgttcgacggcgtgatcagcatggggcagatcctgtccatcccgatggtggtggccggtattattatgatgatttgggcgtaccgtcgtcgcccgcagcaacaaatgtcgtga

SEQ ID NO: 425930 - DNA, 2247 bp, Serratia marcescens
atgctcacgcgcttgcgagaaattgtagagaaggtggctgcggcggccagtctgacggatgcgctggatctgctggtcaatgaaacctgtctggcgatggacaccgaagtgtgttccatctatctggcggacaacgatcgccgctgctactacctgatggccacgcgcgggctgaaaaagccgcgcgggcgcactatcgcattggcgtttgacgagggcgtcgtcgggttggtcggccgcagagccgagcctatcaacttggccgatgcccaaagccaccccagtttcaaatacgttccgcaggtgaaagaggatcgtttccgatccttcctcggggtgccgatcattcatcggcgccagctgctgggcgtgctggtggtgcagcagcgcgagctgcgccagttcgacgaaagcgaagagtctttcatggtcaccctggccacgcagatggccgggatcctgtcacagtcgcagcttaacgccattttcggccagtatcgccaaacgcgcgtgcgcgcgctggcggcctcgcccggcgtggcggtggcggaagggtggcaggacagcagccagccttcactcgatcaggtttaccgcgcttcgacgctggacaccgccagcgagcgcgagcgcctgacgctggcgctggaagaggccggcgcggagtttcgccgcttcagcaagcgttttgccgccagctcgcaaaaagagagcgcggcgatcttcgatctttactctcacctgctaaacgacgcccgcctcaagcgcgaactgttcgccgaaatcgacaacggttcggtggcggagtgggcggtgaaacaggtgatagaggcctttgccgagcagttcgccaaactgcaggacacttacatgcgcgagcgcggcagcgatctgcgcgcgctgggccagcgtctgctgttccacctcgacgacaccactcagggcgctacccagtggccggcgcgttttgtgctggtggcggatgagctgaccgcgacattgctggccgaagtgccgcaggatcgcctggtcggcgtggtggtgcgcgacggtgccgccaactcgcatgcggcgattctggtgcgggcgatgggggtgccgacggtgatgggcgccgacatccaaccttctctgctcagccaacggctgctgatcgtcgacggttatcgcggtgaactgctggtcgatcctgaaccggtgctggtgcaggaatatcaacggctgatcagcgaagagctggagctgagcaagctggcggaagacgacgtcgagcagccggcgcagttgaaaagcggcgagcgcattcaggtgatgctgaatgccggcctcagcccggaacatgaacagctgttgggcggccgggtagatggcgtggggttataccgcaccgaaatcccgttcatgttgcaaagcggcttcccctccgaagaggaacaggtcgcgcagtaccagggcatgctgcagctttacccgagcaagccggttacgctgcgcactctggatatcggcgccgacaagcagctgccttatatgccgatcagcgaagagaacccctgcctgggctggcgcggcatccgcatcaccctggatcagccggagatctttttgattcaggtgcgcgccatgctgcgcgccaacgccggcaccggcaatctgggcattttgttgccgatgatcaccagcctggaagaggtcgacgaggccaaacgcctgattgaccgcgccgggcgcgaggtggaagaggtgctcggctatgcgatcccgaaaccgaaaatcggcgtgatgctggaagtgccgtcgatgattttcctgatcccgcatctggccgggcgcgttgatttcatctcggtcggcaccaatgatttgacccagtacctgttggcggtagatcgcaacaatacccgggtcgcctcgctgtatgacagtttgcatcctgcgatgctgcaggtgctgaaattgatcgccgagcagggaaacgcggccgggttgcagcttagcctgtgcggtgaactggccggcgatcccatgggcgcgctgttgctggtgggcatgggctatcgcaatctgagcatgaacggccgcagcgtggcgcgcatcaaatacctgctgcggcatatcgaccttgccgacgccgaaatgttggcgcagcgggtgttgaacacccagatgaccaccgaagtgcgccatttggtggcggcgtttatggagcgacgcggcatgggcggattgatccgcggggggcggtag

SEQ ID NO: 425931 - DNA, 381 bp, Serratia marcescens
atgtaccgtgagctgttcgaagaagtggggctgagtaaaaaggatgtgcgcatcctggcttcgacccgcaactggttgcgctataaattgccgaaacgtttggtgcgttgggacacaaagccggtttgtatcggccaaaagcaaaaatggtttttgttgcagctactgtgcaatgacgctgatatcaatatgcagcgcagcagcacgccggagttcgacggttggcgctgggtgagcttctggtatccggtacgccaggtggtgtcgttcaaacgcgacgtctaccgccgggtgatgaaagaattcgccgtgaccgtgatgccgatgcaagagcaggcggcgccgcggcaggctcctgcttatcgccgaaagagaggttaa

SEQ ID NO: 425932 - DNA, 687 bp, Serratia marcescens
atggcgtttttatcccctttgccgcccccgccggaaaatgaacggcagctgttcgagcgcgctcaggcgctggccggcgccagctttggcgaactggccgctcgcgcgcagttgccgatccccaaggatctgaaacgcgataaaggttgggtaggcatgctgctggagctgtatctcggcgccatggccggcagcaaaccggagcaggactttcccgagctgggcatcgagctgaaaaccattcctgtcgacgccgccggcaaaccgctggaaaccacttttgtctgcgtcgctccgctcaccggcaacagcggcgtcacctgggccaacagccacgttcgctacaagctggcgcgcgtgttgtggataccggtagaaggcgaacgccagatcccgctggccgaacgccgcgtcggttcgccgctgctgtggagcccaagcgcggcagaagacgaaatgctgcgccgcgattgggaagaattgatggatctgatcgtgctcggccacgtagagcgcatcaccgcacgccacggcgaagtgctgcagctgcgccccaaagcggctaacagcaaggcgctcaccgaagccatcggcgaacaaggacaaccgatcatgacgctgccgcgcggcttctatctgaaaaagagttttaccggcgcgctgctggcaagacatttctcaatctaa

SEQ ID NO: 425933 - DNA, 717 bp, Serratia marcescens
atgttcgaatggattatggatcccaatgcctggttagcgttaggcacgctaaccattcttgagatcgtactgggtattgataacatcatttttctgtcgctggtggtggccaagctgcccaaagcgcaacagaacaaagctcgccggatcgggctggccgccgccatgcttatgcgcctggcgctgctggcttccatcgcctgggtgattcgcctgactcatccgctgtttaccgtgatggagcacagcgtatccgctcgcgatctgatcctgctgctaggcgggctattcctgatctggaaagccagcaaagagatccacgaaaccatcgaagggtcggaagaagagcaccacaccaaggtgcacagcttcttcggcgcgatcgtgcagatcatgctgttggatattatcttcagcctggattcggtgattaccgccgtgggcctttccgaccatctgttcatcatgatggcggcagtggtgatcgccgtcggcgtgatgatgttcgctgcccgaccgatcggcgaattcgtcaaccgccatccgtcggtgaaaatgctggcgctggcgttcctgatcctggtgggcttcacgctgatgctggaaagcttccaggtgcacgtgccaaaaggctacatctacttcgccatgttcttctcgatgtcggtagaagcgctcaatctgatgcgcagcaaaaaaaatcgcgcgccggaataa

SEQ ID NO: 425934 - DNA, 219 bp, Serratia marcescens
atgaaaaagtgggtaatggcagtgtctgcgctggtgatggtggctggcctggcggggtgttccagcgactacgtgatggcgaccaaagacggcaacatgatcctgacgcaaggcaaaccggagatcgatgaagataccggcctcatcagctataaagacgagaaaggcaaccagcgccagatcaacggcgatcaagtttctcaggttatcgaacgctaa

SEQ ID NO: 425935 - DNA, 1041 bp, Serratia marcescens
atgcaataccaccgtattccccacagttctttagaagtgagcgtgctgggactgggcaccatgacctttggcgaacagaacagcgaagccgacgcccatgcgcaactggactatgcattggccgcaggcgtgaacctgatagacaccgccgaactgtacccggtgccgccccgtccggaaacccagggcctgaccgaaagctatatcggcagctggctcaaggcgcgcggcaatcgcgaaaaaatcgtcctggccagcaaagtctcgggcccggtgcgcggcaccgacagcagcattcgcccgcagcaggcgctcgatcgcaaaaacatccgcgccgcgctggactccagcctcaagcggctgaataccgattatctcgatctctaccaattgcactggccgcagcgcgccaccaactgttttggcaaactcaactatcaatacaccgacgacaaagccacggtcacgctgctggaaacgctggaggcgctgaccgagcaggtgcgcgccggcaagatccgctatatcggggtttccaatgaaacgccctggggcgtgatgcgctacctgcagctggcggagaaacacgagctgccgcgcatcgtgtcgattcaaaacccgtacagcctgctgaaccgcagctttgagattggcctggccgagatcagccagcacgaaggggtggaactgctggcctattccagcctggcgttcggtaccctgagcggtaaatacctcaatggcgcaaaaccggccggtgcgcgcaatacgctgttcacccgcttcaaccgttattcagggcagcaaacccagctggcgatcgccgagtacgtggcgctggccaaaaaacacgggctggatccttcgcagatggcgttggccttcgtgcgtcaacagccgtttgtcgccagcaccctgctgggcgccaccacggtggatcagttgaaaatcaacatcgacagcctcgatgtggtattggatgaagacgtgctgcaggcgctcgaagaaatccatacccggtttaccattccggcgccttaa

SEQ ID NO: 425936 - DNA, 1185 bp, Serratia marcescens
atgaatccttcgaccgagtcccctttgctgtcacgcggcatgatcgccgtcatcagcgcgcagttcctctcggcgttcggcgacaatgcgttgctgttcgccacgctggcgttgatcaagcagcagctgtatccggactggagccagccaatcctgcagatggccttcgtcgccacctacatcatcctggcgccgttcgtcggccaggtggccgacagctttgccaaagggcgggtgatgatgttcgccaacgccttaaaattgacgggggcgttggtgatctgttttgggggaaacccgttcctcggctacagcctggtcggggtgggagccgccgcgtattcgccggccaaatacggcattctgggcgagatcaccagcggcgagaagctggtcaaggctaacggcctgatggaggcctcgactatcgccgccattctgaccggttcggtggccggtggcattctggcggactggcatgtggtggcggcgctggcggtctgcgccttggtttacgcgggggcggtggtcgccaacctgtatattccgcgcctcgcggcggcgcgcccgggggcttcctggcgcccgcgggccatgacgaacagcttctttaccgcctgcgtcacgttatggcgcgatgggcagacgcgtttttccttgatcggcaccagcctgttctggggggccggcgtgacgctgcgttttctgctggtgctgtgggtgccggtagcgctcggcatcgccgataacgccacgccgacgctgctgaacgccatggtagccgtcggtatcgtggtgggggccggcgccgccgcacgctttgtcacgctgaagacggtgaagcgctgcatgccggccgggatcctgatcggcgttgcggtcgcggtattcgcgctgcaaaccaccatgctcaatgcctatgtcttgttggcgatcatcggcatgctggggggctttttcgtggtgccgctcaatgcgttgctgcaggagcggggcaagcattcggtcggcgccggcaatgcgatcgcggtgcaaaacctgggtgaaaacgccgccatgttgctgatgctggcgctgtattcgctggtggtgaagctgggcgtgccggtggtgggcgtcggcgtagggtttggcgtggtgtttgcgctggcgattagcgcgctatggtggtcgcagcggcggtga

SEQ ID NO: 425937 - DNA, 2157 bp, Serratia marcescens
atgatcttttcactgctgcgcgcgctgtttcgcctgctgtttcgggtacgggtcgaaggggacgttcagcacttcgagcggcaaaaactgctgattacgccgaaccacgtctctttcctcgacggcgtgctgctggcgctgttcctgccgattaaaccggtgtttgcggtttacgccagcatcggcgaaagctggtttatgcgctggctgcggccctacattgatttcgtctcgctcgatcccaccaagccgatggccatcaagcaactggtgcgcatggtcgagcaggggcggccgatcgtggtgttccctgaagggcgcatcaccgtgaccggcgcgctgatgaaaatctacgacggcgcggcgtttatcgctgccaaatcgggcgccaccgtggtgccggtgcggatcgacggccccgagttcagcccgttcggccgcatggccggggtgttcaagatccgctggttcccgcaaatcagcatccgcatcttgccaccgaccacgctgccgatgccggaagcgccgcgcgcgcgtgaacgccgggcgctggcgggcgatcggctgatgcagatcatgatgcgggcgcgaatggatacgcgcgaaccgcagacgctgttccatgccttgctggcggcgcagcaccgctacgggcgccgcaagccctgtatcgaagacatcgctttcaaagaagacagttaccagacgctgatcaagaaatcgctgggcgtcagccgcattctgcagcgctttaccgccgaaggggaacacgtcgggctgctgttgccgaacgccaccatcaccgcggcggcgatcttcggcgcttcgctgcgtaaccgcattccggcgatgctcaactacaccgccggcgccaacggcctgaacagcgcgatgctcgccgccggcatcaagaccatcgtcacctcgcgccagtttctggagaagggcaagctgacccacctgccggagcaggtgacgcaggccaactgggtgtatctggaagatctgaaagacaccgttacgctggcggacaagctgtggattttgcggcacttgctgcagccgcagcgcgcggcgttgccgcaacgcccggaggacgcggcgctgatcctgttcacttccggttccgaaggccaccccaagggcgtggtgcattcgcatgccagcctgctggctaacgtagaacaaattcgcaccatcgccgacttcacgccgcgcgaccgtttcatgtcgtcgctgccgctgttccactcgttcggcctgacggtggggctgcttacgccgctgatcaccggcagccgcattttcctctaccccagcccgctgcactatcgcgtggtgccggagctggtgtatgaccgcaactgcacggtgctgttcggcacggcgaccttcctcaacaactatgcgcgcttcgcgcatccgtatgatttcgcccgcctgcgctacgtggtggccggcgcggagaaactggcggacagcaccaaacaaatctaccaggacaaatacggcatccgcattctggaaggctatggcgtgaccgaatgtgcgccggtggtgtccattaacgtgccgttggcgaccaaggtgggcaccgtcggccgcatcatgccgcagatggaggcgcgcctgattgcggtgccgggcatcgataacggcgggcgcctgcagctgaaggggccgaacatcatgaaaggctatctgcgggttgagcgccccggcgagctggaaccgccggcggcggaagatgcgaacggcgtgctgcagccgggctggtacgacaccggcgatatcgtcagcctggatgagcagggctattgcaccattcgcggccgcgtgaaacgcttcgccaagctggcgggcgagatggtgtcgctggagagcgtcgaattgctggcgcaacggctgtcgccggaaaaaatgcatgccgccacggccaaaggcgacagtagcaaaggcgaggcgctggtgctgttcaccaccgatcccgccatcactcgtgaagcattgctgcgggtggcgcgtgagctgggcagcccggagctggcggtgccgcgcgatattcgcctgttgaaaacgctgccggtgctcggcagcggcaaacctgatttcgtcaccctgcgtcatatggccgaacagccggagagtgcccgatga

SEQ ID NO: 425938 - DNA, 2259 bp, Serratia marcescens
atgtccattaaacgctatccgcagctcgcccattggggcgcctataccgccgtggttgaagacggccggcttatccgctgtgaacccttcgccgacgatcccgacccttcgccgttgctcgattccatcgtaccgatggtttactccgacaaacgtatccgcaagccggcggtgcgccgctcgtggctgcaaaagcgcgagggcagcgaccgcacgctgcgcggcagggaagatttcgtcgaagtggactgggaactggcgctcgatttggtggcgcaggagaatcgccgggtgcgcgatcgctacggcgcctccgggctgtttaccggctcttatggctggtcgtcggccgggcgcttgcatcatgcgcgctcgctggtgcgacggttctatttcagcggcggcggcggggtcgatcagcagggcaactacagctggggcgcggcgcagtttttcctgccgtatgtgatcggcactttctcgccgttgaccgggcgcgtcaccagttggccaagcgtggtggagcattgcgagctgtttgtggcgtttggcgggctggcgctgaaaaatgcccaggtctcttccggcggcgcggcggagcatgcgctcaaaccctggctgcaaaagctggcgcacaagggcacgccggttgtcaacatcagcccgatgcgcgacgactgccccgggttcgtcaacgcggagtggatcccgatccggccgaataccgacgtggcgctgatgctggcgctggcttacgaaattcagcggctgggcgcgcaggacgaagccttcctgcgcagccactgcgtgggctatcaacagttggcggattacctgaacggcgtgagcgacggcgtggcgaaaacgccggcctgggccagcgccattaccggcattccggcggcgcgcatcgcactgctggcgcggcagctgatcggcgtgcgcagttttatcacctgttcctactccgtacagcgcgcgcaccgcggcgagcaaccctattggatgatgatcgcgctgtcgtcgatgttgggccaggtgggcctgccgggcggcggcttctcgttcggccacggctcgatgaacggcgtcggcaacccgcgcgtggacacccccgcgccgaccatgccggtaggggaaaacccggccgggctggcgatcccggtggcgcgcatctgcgacatgctgctgcaccccggcgaaacctatcaattttgcggcgagacgcggcagtacccggatatccacctggtgcactgggccggcggcaacccgttccatcaccatcagcagctgaaccggctggtggaaggctggcagaagccggatacggtgatcgtacaagatatctggtggacggcggcggccaaaatggcggatatcgtgttgccggtcaccagttcgctggagcgcaacgacatcggcggctcctcgcgcgatcgctacgtgctggcgatgcatcaggcgattgcgccgcagcatcaggcgcgcaacgatttcgatatcttcgccgatctggcggagcgcctgggctatcgcgagcgctttaccgaaaaccgcggcgagcgggcctggatcgaagatatctatcggcaatgcggtgcggcgcagcggcgcgccggcgtcgcctggcccgagtttgaggatttttggcgccggggctatgtcgaactgcccgcgccggccaaggagttcgtgttttttgacgcgtttcgcgccgatccgcaggctaacccgcttcagacgcccagcggcaagatcgaactgttcagcgagcggctcgccggttatcgctacgaggatttcgctccgcatccgcagtggcggccgccggtcgagtggctgggggcgccgcaggccaaaacctggccgctgcatctgatctccattcaaccgagcgatcgtctgcacagccagatggatccggcgccgctggcgcagggcaataagaccgccgggcgcgaaaccctgtatatgcatccggaggacgcggcgcagcgcggcgtggcggacggcgccgaagtgctggtcagcaatgcgcgcggcagctgtctggcgggggcctccctcaccgacggcgtgacgcgcggcgtggtgctgatggcgaccggcgcctggttcgagccgggttacgacgcgcagcgccggccggtcgagcaggcgggcaacccgaacgtgctgacgctggatatcggcacctcgccgctgacgcaggggccgaacgccatgagttgcctggtggaggtcagcgcgcgatga

SEQ ID NO: 425939 - DNA, 1020 bp, Serratia marcescens
atggctacgataaaggatgttgccaggctggcgggtgtttccgtggccacggtatcccgcgtgataaacaattcccccaaggccagcgaagggtcgcgcaccgcggtgctggccgccatggaacagctgcagtatcaccccaatgccaacgcacgggcgctggcgcagcagtccaccgaaacgctgggcctgatcgtctccgacgtttccgatcccttcttcggcgcgatggtcaaagcggtcgagcaggtggcctacgccacccacaattttctgctgattggcaacggttaccacgacgccgaaaaagagcgtcaggcgattgaacagctggtgcgacatcgctgcgaggcgctggtggtgcacgccaaaagtctgagcgatcgggaacttggcggctggatgcagcagatcccgggcatggtgctgatcaaccgcacgctgccgggttttgaaacgcgctgcgtggcgctcgacgatcgctacggcgcctggctggcgacccgtcatctgatccagcaagggcatcagcgcatcgccatcatctgctccacccaccagatttccgacgccaccgatcgcctgcaaggctatctcgacgcgctgcaggagcacggcattgcggtggatgaaaagctgatcgcctacggcgaaccggacgagatcggcggcgaacaggcgatgaccgaattgctcggccgcggccgctctttctccgccgttacctgctacaacgatccgatggccgccggcgcgctttcggtgctgagcgacaacagcgtcgacgtaccggggcaaatttcgctgatcggtttcgacgacgtactgatttcgcgctacctgcggccgcgcctgaccaccgttcgctacccgatcgtggcgatggcgacccaggcggcggaactggccctggccttggccaatcgtcaaccgctgccggaaatcaccaacatgttcagcccgacgctggtgcgccgccactcggtcgccaccctcaacaacgcgcacgaacagccgtaa

SEQ ID NO: 425940 - DNA, 345 bp, Serratia marcescens
atgtggcaagtggtgaccgtcgaacggttcgacgactggtttttagcgctgaacaacgcccagcaaacaagcatcctggcggcgatcttcaaattgcagacgttcggcccgcagttgacgcggccgcatgccgatacgctgtatttttccgacgcggtccggcagttgaaggagctgcgcgttcaacatcgcgggcgccctttcagggtgtttttcgcctttgacccacagcggcaagcggtattgctgtgcggtggcgataaaaccggcgacaaacgcttttaccagcgcatgttgcccatcgccgccatggagttttcacattatctggcaacccggaggtag

SEQ ID NO: 425941 - DNA, 303 bp, Serratia marcescens
atggccaaacctttatcccaactgatcgataaactcgatcccgccgtcgttgccgccgccaggcaaaaagcggaccaggaaattttcgagctgcggctggcgatgctgagggaagagctggcggtctctcaggttgaattggcgaagcggctcggcatcagccaaccctccgtcgccaatttggaaaagcgcggcagcgaaataaagctgtcgtcgctcaaacgctatatcgaggccatgggcggcacgctgtcgctggatgtgcaattgcccaatggtcaacaccgccgcatgacgctgtga

SEQ ID NO: 425942 - DNA, 1263 bp, Serratia marcescens
atgccacgcccgttgcacgacacctccaccgcgttgaacgccaccaacctgctggccttgccgcagcgcttcggccgcccggtttgggcctatgatgcggacatcatcagccagcgcatcgctcagctgcgccatttcgacactatccgtttcgcacagaaggcctgttcgaacattcatattttgcgcttgatgcgcgagcagggcgtgaaggtggattcggtgtcgctgggcgagatcgagcgggcgctgcaggccggttttcagccgggcggcgaaccgagcgaaatcgtgtttaccgcggacgtgttggatcacgccacgctggcgcgcgtcagcgaattgaagatcccggtcaacgccggttccatcgacatgctggatcagctcggccaggtttccgcagggcacccggtgtggctgcgcattaacccggggtttggccacggccatagccagaaaaccaacaccggcggcgagaacagcaagcacggtatctggtatgccgatctgccgcaggcggtggagaaaattcgccgctacggcctgagactgatcggcgtgcatatgcacatcggttccggcgtcgattaccagcatctggagcgcgtctgcgatgcgatggtgcagcaggtgatcgatctcgatcatgatatcagcgccatttccgccggcggtggcctgtctatcccgtaccagtacggcgaagaggcgatcgataccgaacactatttcgggttgtggaaccgggcgcgtgaacgcatcgccgcgcatctggggcatccggtgcagctagagatagaaccggggcgtttcctgatggcggaagcgggcgtcttggtggccgaggtgcgggcggtaaaagacatgggcagccgccacttcgtgctggtggacgccggttttaacgatctgatgcgcccggcaatgtacggcagctatcaccatatttcgctgttgccggccgatgggcgcgacacctcgcggcaagcgctgcgcgagacggtaattgccgggccgctgtgcgaatccggcgacgtgttcacccagcaggcgggcggcggcgtggaaacccgcgaactgccgccggtgcagatcggcgattatctggtgttccacgacaccggcgcctacggcgcatcgatgtcctccaactacaacagccgcccgctgttgcccgaagtgctgttcgaaaacggcgaaccgcggctgatccgccgccgccagaccatcgaagagctgatcgcgctggagcttatctga

SEQ ID NO: 425943 - DNA, 924 bp, Serratia marcescens
atgcacagcatctctttgcggcagatcgaaatctttcgggcggtgatgaccaccggcaacctgaccgaggcggcggccctgctgcagacctcgcaaccgaccgtcagccgcgagctggcgcgttttgaaaagctgattcggctgcagctgttcgatcgggtgcgcgggcgcttgtcccctaccgtgcagggattgcggctgttcgaagaggtgcagcgctcctattacggcctcgatcgcatcgtcaacgccgccgccggcatccgccagtttcagcaggcgcagctgtcgatcgtgtgcctgccggtattttctcaatcgctgctgccggcggtgtgccggccctttatcgaacgttacccggaagtcagcttcagcgttatcccgcaagagtcgccgctgctggaagagtggttgtcagcccagcgccacgatctcgggctgacggaaaccaccctgacgccggcaggcaccgagcgggtgacgctgatgacgttgaacgaagtgtgcgtgctgccgacgggccacccgctactgttgaaagatcggctgacgccgcaggacttcgccgggcagaactttatcagcctgtcgagcaccgacagctatcgacacctgttggatacgctgttcggcgagcagggcgtcgagcgccgcatggtgatggaaacgcacagcgcggcatcggtatgcgccatggtgagggccggcgtgggggtgtcgatcgtcaacccgctgacggcgctcgactatgccggcaacggcgtgcacgtgcggccgttcagcatcgacgtgccgttcaccgtcagcctgattcggccgctgcaccgcccctcgtcggcgctggtgacggcctttatcgaccaccttcatcagcaggccgccacctttgtcgcccggctggccgccgccgtcaggcgctga

SEQ ID NO: 425944 - DNA, 909 bp, Serratia marcescens
atggatcgcattaccgccgcagaggtttttgtcaccatcgtcgatcgcggcagcatgatcgccgctgcggaaacgctggagatgtcgcgcgcgatggtgacgcgctacctggcgcagatggagcaatgggccggggcgcgtttactgcaccgcactacccgtaagcttagtctgaccgacgccggtgagcgtactctggagcgctgccggcaaatgctggcgctggcgggggagatcgacctggtggaggaagggcagagcgacgagctgcgcggcttgctgcgcatcacctgttcgcagtcgctcgggcaaacggcgctggtgggggccgtcgctcagtatctgaagcgtcacccgcaggtggcggtcgatctgcagatgaacaaccgggcggtgaacctggtggaagagcgcatcgatctggcgctgcgcatcaccaacgagctggatcccaacctgatcgcccgcccgctgtccacctgcgcatcggtggtgtgcgccgcgccggcatatctggcggcgcacggcaccccgcgtcaaccgcaggatctggcgttgcacaactgcctgacctactcctatttcggcaaaagcctgtggcacttcgatgctcagggcgtgaaatcggcggtagcggtcagcggaaacctgagtgccaacgagtcggtggtgctgatggccggcacggtgcagggggcgggcatttccatgcagccctattattcggcggcgccgctgctggccagcggcgaactggtcgaactgttgccggattaccggccgcagtcgatgggcatctacggcatctatacctcacgccgccagatgcccgccaccttgcgcaccatgctggactttctggtggagtggttcgccaccgatccgcagtggcaggcgacgctgcgctga

SEQ ID NO: 425945 - DNA, 885 bp, Serratia marcescens
atgtttaagaaatcactgttaactctggccttcaccggcgtcgccaccctcagcgcctacgccaccgcggccgataccctgaccatggaagtgtataacccgggcgagaaaagcgtgttcccggtgtcttccgaaatcatcagcggcaaacacgaagtggcgctgatcgacgctcagttccagcgtaacgacgccgaagcgctggttaaaaagatcaaggcgaccggcaagaaactgaccaccgtttatatcagccactcagacccggatttctatttcggtctggacgtgattaaagcggccttcccggaggcgaaaatcatcgcttcgccaggcactatcaaggacatcaacgctaccaaagacggtaaagtcgcctattggggcccgatcctgaaagacaacgcgccgaaaaccgtgatcgtgccgcagccgctgcagggcgacagcttcaccatcgacggccagaaagtggaagtgaaaggcctgaacggcccgacccccgatcgcaccttcgtgtggatcccggcgttgaaagcggtagtgggcggtgtcgcggtcgccggtgacaatatccatccgtggatcgccgacaaccagagcgtggaatcgcgccagcactggcagcagacgctgaaaaacatcgaagcgctgaagccgcaggtcgtcgtgccgggccacttcctgccgggcgcagcgcaaacgctggcatcggtgcactttacccagaaatacctgaccacgctggaagccgagctgccgaaggccaaggattccgccgcgctgattgaggcgatgaaaaagcactacccgacgctgaaagacgagtcgagcctggaactgagcgcgaaagtgctgaaaggcgagatgaagtggccgcaataa

SEQ ID NO: 425946 - DNA, 648 bp, Serratia marcescens
atgaccgaaaccactctgcattacattttcgatccgctgtgcggctggtgctacggcgccgcaccgctggtgaaagcggctcagagcctccctgggctgaagatcgtgccgcacgccggcggcatgatgaccggtaacaaccgccgccaaatcaccgacgaatggcgcaactacgtcattccgcacgacaaacgcatcgccgagatgacgggccaaccttttggcgaagcctatttcaacggcctgctgcgcgacaccacggcagtgatggattccgagccgccgatcaccgccatcctggcggcggaaaagctggcgggccgcgggctggacatgctgcaccgcattcagcaggcgcactatcaagaaggccggcgcatcgccgatacgccagtgctggaagcgttggcgaaagagctggggttaccttcggcggcgtttatcgccgaaatgcgtttcaacaccggtgcgccgaccgcgcaacacatcgcggaaagccgggcgctactggccaaagtgcaaggccagggcttcccgacctttgcgctgcaggacagcgaaggccgtctgcatctgctgccggccggcaactatctgggtaacgtggaagcctggaaaaacctgctgggcgccgccgcgctggcgtaa

SEQ ID NO: 425947 - DNA, 708 bp, Serratia marcescens
atgaaggcttggtttcccctgttgctgacctgcggcgtcttcgccggcgcccgggcctgggcgcacattgacgagccggacatcgccgccgactgccaaaaggtggcgagctacgccgaactgggaaaaaaggcctatcagcggcaggattacgccaaagctgccgacatctttcgcgatcaggcggcctggagcgagttttgcggcctgagcgagcaggccatcgccacggcctacaacaacgtggcgctgtcgctgatgcgcgccggggaattgctcaaggcacaggcctacctggcgctggcgccgcacgatgacaaatcgcagcacaacatgagcctgttgcgccaacgcctggcgcagcggccgcagccgcaggggccgggcggcgtgtattggcaatacgccgggcgtggcgtgtggagcgaagtggcggtgaagccgcagggcgagcgctggctgatcgatttttccggctacgccatgccgcagatggggctgtattacgggccgaacatgggtgacttcaccgccgagctgccaatcgagcacggcaaagcggtctaccatcagcatgactcggaaagcgcgcaggtctgcgacgtcacgctggaatttggcgagcaagcgctggagatgcacacgcggggggattgcgggttcggtcacaacgtgcgcgcggaagggcggttcgtgcgggtcgaatga

SEQ ID NO: 425948 - DNA, 1728 bp, Serratia marcescens
atgaacgcaacccccttgcagaaacacgccgtttggcagctgatcaaacccttttgggtgtcggaggaacgatggcgcgcctggatgatgctgatcgccatcgtcgtcctgtcgctcggtctggtctatatcagcgtgcagatcaaccagtggaatcaggtgttctacgatgcgctgcagaacaagaactacccggtattcaaggcgcagctgtggcgttttacctatctggcgctgatcttcatcgtgctggcggtctacaagatctacctgactcaggggctgcagatgcgctggcggcgctggatgacggaaaagttcatggcaaagtggctggcgcaccaggcgtattaccacgccgagcagcagcagatcgtcgataaccccgatcagcgtatcgccgaagatctcaacgtcttgacccaatataccctgtcgctgtcgctcgggctgctctccagcctggtgacgctgttttcctttatcgacatcctatggcacgtcagcgggccaatgaccttcgcgctcggccagcatgccatcaccttgcccggttatatggtgtggttcgcgctgctgtatgcggtgctgggatcgctgctgatctggtgggtcggcaaaccgctggtcatgctgggcttcaaccaggaacggtatgaggcaaacttccgtttcggcctgatccgcatccgcgaaaacaacgacgccatcgcgctgtaccacggcgaaccgcgcgaggcgcagcagctgggcgaccgttttgacaccattcgcagcaactggtgggctattatgcgcatcacccggcggctgaacatcgccaccaacttctacggccagttcgccatcgtatttcccctgctggtggcggcgccgcgctacttctccggcgccattcagatgggcggcctgatgcagatcgcctcggccttcggccaggtacagggtgcgctgtcatggtttatcgacgcatttaacgatttggcgacctggaaagcctgcgtcaaccgtttggccggcttcaacgccgccgtcgatcaggttcatcatcagccgcgcggcattcagctgcgggaagagaccgcccatccgttgacgctggataacctcagcctgaacttgcccgacggccagccgctgctggccggcgccgagatgacgctgcaacgcggcgatcgcctgctgatcgtcggcccttccggctgcggcaagtcgacgctgctgcgggccatcgccggtatctggccttacggcgcgggcgccatcgggttagcggccaatgccaacacgttgttcctgccgcagcgcagctacattccgatcggcacgctgcgcgaagcgttgagctacccgagcctggcgtcggaatacagcgatccgcagctgatgcgagtgctggaaaactgccgcctgaagcacctgcagcgttggctggatacctccgccaactggagccatcgcctgtcgccgggcgagcaacagcggctggcgttcgcccgcgccctgttgattcgcccgagcatcctgttcctcgacgaagccaccagcgcgctggacgacgaaaccgaacagttgatgtactgcctgctggtggatgaactgccggaggtcacgctgatcagcgtggcgcaccgcaacagcgtggcgaagtaccaccagacctgctggcgcttcagccgcagcgaagatcaaccggcgcgcctgatgctaagcccgctgccggcataa

SEQ ID NO: 425949 - DNA, 435 bp, Serratia marcescens
atgccaggcattgtgattaccggccacggcggcttcgccaccgggctgttgcaggcggtggagcaggtggtggggccgcagcggcactgcgcggcggtcgatttccctgaacagatgagcaccgcgcagctcaacgacgccttgcgctcggcgctggcggcggtggcgcagccggacggcgtggtgtttctcaccgacatgctcggcggctcgccgtttcgcagcgcctgcgaactggcggatgcgcagggcgattgcgaagtgctgaccggcgtcaacatgcagctggcggcggaaatgatgctggagcgcgacgggttgagcctggatgagtttcgcgaggtggcgctggcgtgcggcaaacgcggcctgaccagcctgtggcatgagcgccgccgggtgaaatgcgaagacgtgccggccgacggcatctga

SEQ ID NO: 425950 - DNA, 894 bp, Serratia marcescens
atggcatttaacgattccgacgatctgctggcgcaaaaggccgagcaacgcatggcgcaggcgctggccaccagccaggtggagcaggacgactatctggacagccagcccgccgaagcgctgacgcgcggcgacatcaaccgcatggcctggcgttcgctgctgctgcaggcgtcgtttaactatgaacgcatgcaggccggcggttggctgtaccagctgatccccgggctgcgcaagatccaccgcaacccgcaggatctggccaactcgatgaagatgcacatggaatttatcaacgtgcacccgttcgacgtcaccttcctgtccggtctggtgctggcgatggagcagaacaaggagaagatctccaccattcgcgcggtgaaagtggcgctgatggggccgctcggcggcatcggcgacgcgctgttttggctgacgctgctgccgatctgcgccgggataggcgcttcgctggcattggagggcagcctgttcgggccgatcgtcttcctgctgctgttcaacctgttccacttcggcctgcgcttcgggctggcgcactacggctatcaggccggcaccagcgcgctggcgctgttgaagacccacacccggcgcatttctcacgccgcgtcgatcgtcggcatgacggtgatcggcgcgctggtggcctcgtatgtgcatctgtccacgccgttggtgatgcatgccggcaaggccagggtggcgctgcagaccgacgtgttggacaagctgatgcccaacctgttgccgctgtgcttcacgctgctcattttcttcctgatgaagcgcggtttctcgccggtgaagctgattggcgtcaccgtagcgatcggcgtggcgggcaaatttatcggcattttgtga

SEQ ID NO: 425951 - DNA, 780 bp, Serratia marcescens
atgttgacggatgcgttattgattgcgttgttggccgggctggcgggggtggacctgttcgacggcctgacccacttccatcggccggtggtgatggggcctctggtggggctgatcttgggcgatgtctacaccggcttgctggtgggcggtacgctggagctggtgtggatggggatggtgccgctggcgggcgcccaaccgccgaacgtggtgatcggcggggtgatcggcaccgcgtttgccattctgaccaaggccgaccctaaagtggcgatcggcgtggcggtgccattctcgattgcggtgcagggctgcatcacgctgctgtttacgctgttctcgccgatgatgcaccgctgcgatcgcatggtgaaagagctgaactggcgcggcgtcgaacgggtgaactatctcggcatcggcatcctgttcatcttctatttcgtggtggcgttcctgccgatttacttcggcgccgatgcggccagcgccatggtgcagaaagcgccgggttggctgctggacgggctggcggtggcgggcggcatgatgccggcaatcggcttctcgctgctgatgaaggtgatgatgaaaaaaacctacgtggcctattttatcctcggctttatctcggtcactttcctcaagctgccgatcctggcggtggcgctgggcgccctggcgatcgccctgatcgatttcttcaacacgcaacgcggcgcggcagaggcgacggcccggcccgctccgcaggaggacgccgaagatggcatttaa

SEQ ID NO: 425952 - DNA, 477 bp, Serratia marcescens
atgccgaacattttaatgacccgcatcgacaatcgcctggtgcacggccaggtgggcgtgacctggaccaacaccctcggcgccaacctggtggtggtggccaacgacgaggccgccgccgatccggtgcagcagaacctgatggacatggtggtggcggaaggggtgcagacccgctacttcacgctgcagaaaaccatcgacgtgatccacaaggcggcggatcggcagaagatttttctggtgtgcaaaacgccgcaggacgtgttgacgctggtgcgcggcggggtgccgatccgtttcgtcaacgtcggcaacatgcacttcgccgaggggaagcggcaggtgcacaaaacggtgtcgctggacgacggcgacgtggccgcgtttcgcgcgttagcggcgctgggcgtggagtgcgaagtgcgccgggtgccggatgaggcgggcgaggctatcggcaaattgctcttttga

SEQ ID NO: 425953 - DNA, 1284 bp, Serratia marcescens
atgcagcagttgttacagcttgtcgagcagcacaaggccggtatgccggtcgggatcttttccgtctgttccgcccatccctgggttctgaaggccgcgctgcggcaggccaaagcgcgcggcacgccggtattggtggaggcgacgtccaaccaggtcaatcagttcggcggctataccggccaaacggcggcccagttccgcgatgcgctgtggcatctggcggatgaggttggcctggcgcgcgatcgcgtgtggctgggcggcgatcacctggggcccaacgcctggcaagatcgcccggctcaggaggcgatggcgctggcggaaaccttgatcgacgattacgttcgcgccggatttcgcaagattcacctcgattgttccatgtcgtgcgccggcgatccctcgcccctgggggatgccacggtcgccgagcgtgcggcgcgcttgtgcgcggtggcggagcgggcctggatgcagagcggcggcgaagcgccggtctatgtgattggcaccgaagtgccggtgccgggcggcgcgcaggaggcgctggcgagtctgcaggtcaccacgccgcaggcggtggcgcaaacgctggaaacgcaccgtatcgcctggcaacaggccgagctgaacgatgcctggcagagaaccatcgcgctggtggtgcagccgggcgtcgagttcgatcaccaccgcgtcgaacgctatcagccgcagcgcgccgacgccttgagccatttcatcgaacgccagccgggcatgatctatgaagcgcactccacggactatcagccgccgcaggcctaccgccaactggtgcgcgatcacttcgccatcctgaaggtggggccggcgctgaccttcgcgctgcgcgaagcgctgttcgccctcgatcgcatcgagcgtgaatggctgggggagcgccagtcggcgcagctgtgcgccacgctggagcaggtgatgcgcgaacagccgcagcagtggagccgctattaccacggcacgccgcaccaacagtacctcgatcgccactacagcctgagcgatcgggtgcgttactactggccgcagccgcaggtgcagcaggcggtcgacgggctgctggacaacctgcgccgcagcccggcgccgctggcgctgctcagccagtacctgccggatcaggcgcgggcgctgaacgccggcgaattgagcgccgatccgcaagagtgggtgctgcataaagtgacgcaggtgctcgacgattaccacgccgcctgctacccggagggccgctga

SEQ ID NO: 425954 - DNA, 774 bp, Serratia marcescens
atgccagtgaataccgcaaagcgacgtgaacacattatcgatctgttatgcgagcacggcagcgtgcgcgtggagcagctcagcaaacagtttgcggtatccacggtgacgatccgcaacgatctgcgctttctggaacgaaaagggtgtgcgctgcgcgcttacggcggcgcgatgctcaatcagcaattcgctttcgatcggccgctgcgggacaaggggcggttgaatcgcgacgtcaaaacgctgatcgccaacgcggcggccggctatgtgcgcgacggcgatgcgctgatcctcgattccggctccaccaccacgcagatcgtgccgttcctgaaggggcggcgcgatctggtggtgatgaccaatgcgctgaacattgcctacgagctttcgggaaacgacggggtggaggttatggtgctggggggcagcgtgcgccgcaactcttactcgctctacggtccggccgccgagcagcaattgcgtcagtaccgcttcgacaagctgtttttgggcgtcgacgggttcgatctgagcgccggcattaccacgcctcaccccggtgaggcgcacctcaatcgcgtgatgtgcgaggtggcgcgcgagattatcgcggtggcggatgccagcaaattcggtcgcaagagcttttgcatgattcgcgaagccggacaaatccatcggctgatcaccgacagccgtcttccggacgattacgagcgggcgttaaccgagctgggcgtggaggtcatcatcgccgatcggtag

SEQ ID NO: 425955 - DNA, 1221 bp, Serratia marcescens
atgccgcaacccgcttcacccccagcgtccaccgcgaccccgcgtcgccgattacaccgccccgttctgctgattgtcggcattatgctgatcgcggccaacctgcgcgccgccctgaccagcgtcggcccgctgctggaacagatccagcagcagctggcgttgtccgccaccgccgccggcctgatcaactcgctgccgctgatcctgttcgccatcctctcgccattgactccggcgctggcgaaacgcatcggcatcgagcgcaccctgggtctcgccctcgcgctgctggtctgcggcatcgcactgcgttccctgccgcaagacgccatgctctggccgggcagcatcctgatcggcgccgccatcgccttcgccaacgtggtgctgccgacgctggtgaaaagagatttcccgcatcgcgccgccgcgatgatcgccgcctatgcggcggtgatgtcgctggttgccgccatcgcctccggcctggcggtgccgctggctgccctggccgacctcggctggcggttctccttactgtgctgggggttgcccgcgttgctggcgctgctggtgtggctgccgcagctgcgacgctcagccactcccgccgccaaagcgccgcagccgacggagccacagcgctatcgctctccctggggcagcgcgctgggttggcaagtggcgatgttcatggggctgcaatcgatcgccttctacaccatcatcggctggttcagcgcctttgccgccagctacggcacctcagctcagcaggcaggtttcgagctgttcgtttaccaggtggtggccatcgtcgccaactttgtcatggtggtgattttgccgcgcgcacacgatcaacgggcgatagcgctgggcagctcgctgctgatctttatcggcgtcgggggattgttggtgcaacccgccagttcactggtgtggctgacgtttgccggattgggggcggggagttcgctggtgctggcgctgtcgttctttggattgcgcagccaacatcatcatcaggcgacgctgctgtcgggtatggcgcaatccgtcggttatctgttggcggcgctggggcccaccctattcggcctgctgcacgatctgacggcaggttggcgtttgccgttgatcgccctgctgtgcctgaccgtcttgcaaatgctgttcggcgcgctggccggccgccgccgcgtgatcagctaa

SEQ ID NO: 425956 - DNA, 1653 bp, Serratia marcescens
atggaactgctacgggtggtttatcaccagtatcgttggccatttctggctgtcatggcgttgaccatggccagcgccggcttaggtatcggtatcattgcttttatcaatcaatacctgatggatgccggcggcgatgccttggccgtgctgccggtgtttctcgccctgttggcattgttgatagcggtcaccttgggttcgcaattggcgctgacgacattgggccattacttcgtctatcgcctgcgtgggcagttagtgaagcgcattttggataccgatattgaacgcctcgaacaattgggcagcgcctcattgttggccagcctgtccagcgatatccgcaatatcaccgtcgccttcgtgcgcctgcctgaactggtacaaggggtgattttaaccctgggggcagcggcctatctggggtggctatcgccgaaaatgctggcggtcacggcagtctgggtggcggtgaccgtcgtgggcagcggctgcctggtatcacgggtttatcgtcacatggccagtttgcgtgagtcggaagagcgtctctatcatcgttatgaatcggtgattgacggccgcaaggaactgacgttgaaccgcaagcgggcgcaggcgctgtacgaacaggcctatcagcccgatgcgcaagcttatcgccaccacatcattcgcgccgataccttccatttgagcgcgctcaactggtcaaacatcatgatgttgggcgcgattgggctggtgttctttatggccaacagtctgggatgggcggactcggcggtggccgccacctattcactgacgctgctgtttttgcgcacgccattactgcaagcggtcggagcgtttccgacgctggtcagcgccgaagtggcctttaacaagctgaagacgctgcgcctggccgagtatcaaccggcgtttcctgccgccgttggccgcccttggcagacgctggagctgcgcgacgtggtttttcactatgcagataccgaacagcagcccggttttgccgtcgggccgctcaatctgacgctgcggcgtggtgagctggtctttctgatcggcggcaacggcagcggcaagtcaacgctggcgatgttgttgaccgggttgtaccggccggtgagcggccatatcgttctggatggcgtcgcacagagcgcagcggatatgccggactaccggcggctgttttcggcgattttcaccgattttcatcagttcgatcgcttgcaagggccggaaggcggcgaaccggatgcggatctggtcgccatctggctcgagcggttgaatatgaaaagcaaactgcagtttgacggcaccagggtgaccaatccgcaactgtcgcaggggcaacgcaaacgtctggctttgctgctggcggtggcggaacagcgcgatatcttgctgttggatgaatgggccgcggatcaggatccgcaatttcggcgcactttctatcgtgaactattgccggagctgcgcgcgatgggcaaaacggtgtttgccatcagccatgacgatcactatttcgaacacgccgatcggttgcttgagatgcgctcaggccatttacgtgagctgaccggcagcgaacgtgaacacgccagccgggattccgtcagcagaatcggttaa

SEQ ID NO: 425957 - DNA, 552 bp, Serratia marcescens
atgaaaaaaaggaagtttcttagtcaggttgaaattgagcaactgatagccgctgtgcatgaaggaaaaaatagcattcgagatcgttgtttactattaatgtgctttattcacggcttgcgggttagcgaactgcgtgcattgcgccttcaggatattgaccttacctccaataggatccatatatcccggttgaaaaacgggttttccgttcagcaccccattcaaccgcgagaacggcaggcgctgttaaactggctggcccaacgggcgaactatcctgacgctgaagcgccatggctattcctgtcgcgccacggtgggcagatatcacgtcagcagctctatcggttgatgagaatgtatggcgagatggccggcattagcgttcaggtccatcctcacatgttgcgacattcctgcggttacgcccttgcggataaagggatcgatacgcgtttgattcaggattatttagggcacaaaaatatccagaatacggtgatttacaccgcgaccaacgttgagcgattccgcacgatcaacatttaa

SEQ ID NO: 425958 - DNA, 684 bp, Serratia marcescens
atgcattcatggcgtcagcagccgctgaacatagcattaatggacagatgcccattaacgctggaggggttggcgagttttttaaaaacgctgccaacccaggcaaaagtcgtcgtaaaggaaaccagcgtccgcgcggtggcggatagcgtggtctatcagcaggctgacgtgctgattagcgagatggatggtgaagatgaaacggtcgctcagggcagggaaacgttgcttgccttgtgcacgcagttgcccgaattgcgggtgatcgtctatacccgctgccagaatgcagaagaggtggggcgtctgttgaaccagcccaatattagcatcgtagccagagatgacgctttgccgctggtggcggagttttttaatcgcgtgctgcttggggaacgcgttttgagcccgcagataggcgcttttctggcgccttccgttagcggagaggaggcggcaacgcgaaagttgacccgctgtgagagcgacgtcttggcctttttgttcaacggaatgagcctgcggcaaatcgccgagttgcaacggcgcagcatcaagacgatcagcgcgcataaatgcagcgccatgcgtaagctgcaggtgaagaatgacagcgaactgttttctctgcacggcaatattacgcggcaattgggggggaaatggtcaaagggcacctaa

SEQ ID NO: 425959 - DNA, 696 bp, Serratia marcescens
atgaatattaattatccctatggaacaaccttggcggccggcaatgcggcgacgggggccgtggctatcatggagccttgccccctcacggcgttggggatgagaaaccgattgattgagtcctgcggtctacagcccgacaacgttcgacaggtgacgaacctggtggcgctgagagccttattcactcagcacacgcatcgtttactggtgatggatttgtgcggcaaatcagaattggtattggacggcttcaggctgattgccgatgtgcgtgaaagctcgccggacaccgcgataattatttgtacggcattggatgagcccaggctgctgcggcaactgatcgcatccggcatccgcggcctgatgttgaagcaagagccggccattgcgttgactcattgcgtccaacaggtcttggcgggctgcagcagtttcagccatcgggtgcgtcagcgtcaattgcatgaggcgacagccgacaagcctctgacggcgaaggaactggatgtgctgacccagttgttttccggcaaaagcgtgaccagcgtggcgttaacgatgtgccgtgatattcgcaccgtcagcacgcataaacgcaatgcgatgttgaagttgggatttcacagcgatggggaattgtatcttcaggggaaatggatggctgcgcaaggttcgtcttttgttcgctag

SEQ ID NO: 425960 - DNA, 528 bp, Serratia marcescens
atggggaaggtttttagcggtattggctgtaaattggcgctggcgggcctgtttctcctggcgatgccgtcggcgcatgccgtatcaaaaatagtgattaccggcaacatcaaagcggcaccctgtgaaatcgacggcgcgaacggcacggtttcggtcaatctgggggacgatatttctgccgctgtactggcgacctccggtgcctttagcccgtgggtggagttccctttgacgctaaaaaactgcccaagcaccaccacgtcggtcgtcgcgaccttcagcggaacggctgcggatgaaggtgccagcttgtacaaaagcaccggcagttctcgccgagtgcaaattgaattgcaaaatagccagggggcaaacctgggcaatggcaagagtatggcccagttagttaatcgggcgacgaatgaagccaaattcaatttgcgggcgcgggcattcagcgtcaatggcggttcaacgcccggttcgatagaaggggctctgcaggtcactttcgtctatcagtag

SEQ ID NO: 425961 - DNA, 1062 bp, Serratia marcescens
atgatggcgacaggaatatcgattcaacgagggatcatcgtcggtgggctattggcgtgcgcaacgttgggcgcaccacaggtgcaggcggctttcgggcagtgtgttcctatttcggggacccatgggttttcattccttttttccccggttttaaccgacccgtcgcaaaacgtggtggggcggattattaagaatgctgacggcggcaactggaatttgcccggttcttatcgggtgaagtgcgaatgtcagacgcgtacggcgtcttatgtcaccgccaaaatgctgctgagcgagccggtattcagcagcgggggattaacgtattacgcgttgaatgaatacctgggcgtggccagcgaagttttcgttgcggggtatcgcaacgcgtttattgccgcaccgttcaccaatgagtctaactttaagaccgatatggatggtgatgacgaatcctgtgccagcacgccctacaacagcggtgctcgcgggcgaattcacctgtatttccgccgccctttcgttggcgtgaccacaatccccagcacccgcctggtagacacctacgtctccgtggtgagcggggtgaaaagcgatgtgccggtctccactatctccatgagcggcaccgtcaccgtgccgcagagctgtgaaatcagtccgcaaacggtcacgatcgattttggcgatatcttgacgtcgaatattcaaaccaagggggcgatggcgtctggcgtcacgccagaagagagaacgctgacgctggcttgccgcaatatttccgccggcgtcaaggtcagcctgtcatttcgcggtgaggcggacggcagcatgcccgaggctctgaagaccagcaatcgcgacattggcgtgatgattaaggatatgcagggcaatgttattcggcctcagagcgggcgcttgccgatcgataacttccaatatcccaaccagagtggcagctcacggatcagcgtatatccgatcaataccaccggccaacctcctgccgtggggcagttcaatgcaacggcgaccattcaggcagaaattcaataa

SEQ ID NO: 425962 - DNA, 2550 bp, Serratia marcescens
atgaataacccgaattgcattggtttaccaggggcgcgatcggttcttgccggcctgatatcttgccaggtggcgctgctgagcccgatcggcacggcttatgcacgcgattatttcaacccggcgttgctggaaatcgataatccggcgctgcgcggcgccgatctctccgtatttgaggagaacagcagccaggcgcccgggaactatcgggtcgatctttacctgaacggcgaacagatagacagcctcgacgtcgagttccggcttatgccaggggccggcggtaaacaaacgctgcaaccttgtttcagcactgaaaaattggctgaattgggcgtgagggttgccatgtttccggcgatggtgcctggggagagttgcgtcaatttggcgcaggccattccacaagcctcttcgacattcctgtttaatcagttgaggctgaatttgagcatcccgcaggcggcgctgcgcttgaatgcgcgcgactacgtttccccggataaatgggattccggcataccggcgctgttggtcaattacaatttcagcggcgccaatagccagatgcgcgccagcgaacggcaaaacaacaataactattacctcaatctgcgctcgggcatcaactggggcgcctggcgcctgcgtaactattcgatctggaatcattactccggtggttcttcttcctggcgctcaatcaatacctacctgcagcgcgatatcgttgcgttgcaaagccgcctgaccctgggtgacagcacaacatccagcgatgtgttcgatagcgtgcagttccgcggcgggcagttggcctctgaggacgatatcctgccggacagcatgaaagggtactcgccggtagtgcgcgggatcgcacgcacgaatgcgcaaatcataatccggcaaaacggctacgtgatttatcaaagctatgtgccgccgggggcgtttgaaatttccgatctgtatcccacgggtggcagcggcgacctgaatgtaaacgtgcgtgaggcagacggccaggagcagcattttgtggtgccgtacgccgtggtgccggtattgcagcgcgaagggcggtttaaatacagcctgaccagcgggaaataccggtcatacagcggcggcgttgatgaacgcccgttcagccaggcaaccgggatctacggtttgccttggggggccacgttgtatggcggcgtgcaggcggccagtaaatatcagtctttggcgctgggatgggggcagaacatgggggcggtaggcgcgctgtctgccgatgtcacccaagcctggaccaagcaggaaacccggccgaaggaacaggggcaatcatggcgtctgcgttacggtaaaaacttcattgaaaccggcaccaactttagtttggccagttaccgctactccacgcgcggcttttatagcctgcaggaggcgctggagagctatggcggcaacagcgccgtctatagcgatcacaagaagagccgcgccgagctgacgatgagccaaagcctgtgggagcggggaggaacgctgtcgctcagcctgtttaacgaagactactgggataacaatcgccgttcgcagtctgtcagcctcagctacaacaacagctgggaagcggtcagttacgggctgaattacacgttcaaccagaacggttacgacagtaacggcaatcgcagcagtattcgtgaccatatcgtggctttcaacgtcagcgtaccgctcagcaaatggctgccgggcagctatgccacctacagtatgaacgccagtcgcaatggtgccaccagcaacaaccttgggttgagcggtacggcgttgccgggaaacaacctgaactacagcatcagccagggctataccggcagggatgtgggggcgaacggcaatattcaggcggattataaaggctctctcgccgagttgaacctggggtacggctacgatcgccatcgccggcaggtgaactacggcgtgcagggcggcgttctggtgcaccaaaacggcatcacgctttcccaaccgctgggcgatacggtggcgttggtgcaagcgcctggtgcttcaggggtgaatgtcctgaaccagaccggagtcagcaccgactggcgtggctatgcggttgtgccttacctgacgccttaccggcgcaacatcgtcggattggacggtgaatctttcgcagaggacgtcgacatgacgctgagtagccaaacggtgatcccaactcgcggcgccgtggtgcgcgcccgctttaatccggacgtcggtgcccgcgtgttgctgaccttgctgacgcgcagcggcgctccggtgccgttcggcgccaccgtcagcactctcaacagcccctctgacaatgcagccatcgtcggtgatggcggccaggtttatctggctggcctggcggatagcgggcggttgcgggttaagtggggcaatgacgcggctcagcaatgtcaggccaactatcaattggctaatcagcccgagagcggtgggattcgcctcgttaacgggcagtgtttataa

SEQ ID NO: 425963 - DNA, 678 bp, Serratia marcescens
atgaaagcgggatactttgtgctgacggcggcgttgctgatgacgctttggactccggtacgggccggtgtagtagtggggggaacgcgcctgatctacgacggcggcaaaaaagagtctgctctgaatatcagtaatccggatgcgatgccttatctgatccaatcctgggttgatgcgcaagaaggcgatagcgcgaaagcgccttttatcattacaccgccgctatttcgcttggatggcggccaaaataacctgctgcgcgtggtacgtgcgggcggcaatttaccgacggacagagagtcgctgtattggctgaatgtgaaggcgatcccctcggtggaaaagaaagaaaataccctgcaaatcgccatcaagacccgtatcaagttgatttaccgcccgcaggggctcaccggcaatctggaggaggcggccggtaaagtgacgtggcggcgcagtggcgatcgtctgcaggtgaccaacccttcaccctactacctcacctttttcaatttgaagctgaatggccgcgccattaccggcaacaccatggtagcgccgcaggcgagcgccagtttcccgttgccgacggcgaatggcgcaggaggcggtctgagctggcaaatcatcaatgactatggcggcaccggccagaccttcaccagcacattataa

SEQ ID NO: 425964 - DNA, 522 bp, Serratia marcescens
atgaaaaagaatctgttggctgtagctatattgaccgcgtccgcatttaccacttctgcatttgccgccgacggcgcgctgaatattactggcaccatcaccgatcagtcttgcaccgtcgatgcggattccaaaaacaagcaggtcgctctgggcaagatcgccaaagatgcgttcaccctgtccaaaaccgccggcgccaaggcgttcaatctggtgctgaaaaattgcccggccaccgtcaccggcgccaccgtgcgttttgacggcactcaggtgcaggggcagtccgggctgctgcaactgaccggcgccggcaccgccggggtcgcgggcggcattggcgtgcaactgctggacgacggcagcaacgtgttaaatatcggcaacgattctcgcgtctataccctggcagagaacaaagacaacgttctgggctttgttgcgcgctatttcgcttatgacaacgtttccgtcggtagcgccaacgctacggccaacttcaccatcgtttatcagtaa

SEQ ID NO: 425965 - DNA, 549 bp, Serratia marcescens
atgtctaatcgtaaacatctgacgccttctgaagtggagagactgcttgaggtcacgctgcatggaaagaatccagaacgcgattattgtttgatttatatgtgttttattcatgggtgccgcgccagtgaaatagggggatggcgtttgtcggatatcgatctggaaggcggtaatatctatgtgcatcggttgaaaaatggtttttccaccgtgcatccgctttatctgcgcgaaagacaatgtttgcggcgctggttggataaacgtcagcggcaccgctgggccgatcaggagtggctgtttctttccaatcgcggcggccgcctgtcgcgtcaacgtatttacgggttgattcgccattacagcaaggtggctaaattggaggtcaatgcgcacccgcacatgctgcggcatggctgcggatttgcattggcggatcgcggtgtcgacacccgtttaattcaggattacctcgggcaccgaaatatccagaatacggtgatttataccgccagcaatgcgcagcgcttcaaggaaatttggtaa

SEQ ID NO: 425966 - DNA, 204 bp, Serratia marcescens
atgttgcatgaagcccgagggctggagagaacgctgctgtcggcagacatgccgctacagcagcttgggctggacagcctggattatatggagctgatgttgttggttcggcgagaattcggcattacgctcactgcggaaatgcttatcgagcatcctgaattaaccctcggcgaattgtgccacctgataacccgtcaataa

SEQ ID NO: 425967 - DNA, 1254 bp, Serratia marcescens
atggagaaaacaagacgcgtagtggttaccggttacggtgccgtcaccgcgctggggggcaacgcgcagcaaagctggcaggctatcatggccagccgtctggcctatcgttatcacgataaatcggcggcggggatccacgcgcgcttttttgctttgctggaggccgaaccgccgttggagggcgttgccgcgcgggtaagccgccgcttgcccagattcgccagactggcgcttgccgccgccgcggaggcgatcgaaatggcgttttcatccagttttgttgggcccgcgcacttttattcgtcgttggagtgcggagcgattatcggcagcggctggggcggccaggatgagatcatgcaaaacaatgcggactatctgcaatccgggctggggcagctgtttggctgttttcatgcgatgccgaatatcgcgaccgccatatgcggccagcattggttgctacggggctatcaaggctcgccggcggcggcctgcgcgaccggcggcatcgcgatcggcgatgcgtttgaggtgatacgctgcggccgcgcttcaatgatgctggccggtgcctcggagtcgctgcgcggcaacggcgcgatctggaatatggatgcgttgcgtttgttgagccgggagcaaaaggatatcaccaaagccagttgcccgtttagccgggaacgcaacggtttcgtcctggcggaaggggccgccgtattatgccttgaggaacgggaagcggctttagcgcgcggtgcgacgattttgggcgaaatcaaaggatacggcaacttttcagacgcttttgatcttaccgcgccgtcgaaggatcctcaggccaaggtgaaaaccctacgacgggctttggagcaggcggggctcggcagccatgaaatcgactatatcaatgcgcatggcacgtctacgttgcaaaacgacgtgaacgaaaccgaggcgatcaaggcggcgctggggcgtgatgcctatcgcacaccgatttccagcacgaaatcttataccgggcacctgcttggtgcatccggcagctttgaggcgatcgtctgcctgcaagcgttacagcagcaaatgatgccggcaacctgccatttgcacgaaaccgatcccgcatgcgatctcgattatattcgcgaaggacatcggcatggtcgtctgcgtaatgtcatgagcctcagtttcggtttcggcggcgccaatgcggcgctggtatttggcaatcactatgaataa

SEQ ID NO: 425968 - DNA, 1380 bp, Serratia marcescens
atgagccgactttgggtttacgggctggtgatgctgtcgctgagcgcctgcggagggcggccgatcgacgccacggcgccaccgtcgttgccgcagcagtggcgcgtggtcgatgagcgttccggttcgctgcgggcgggcgtcgcctggtgggaaaacttcaatgatccgcagctctcctcgctgatcgatggcgtgctgatcgcgaatcaggatttggcgctggccggattgcagtggcgcgaggccatgttggaggccggattaacggagggcaacttgacgccggatttcaccgccagcctgagcggccgcaatacccgagcgttgcggggtgcgtctacggcgcaggaaagctaccgtgcagggctttctctgagctatgaactggatttatggggcaagctggcgcgcattcgcgaacaggccgaatggctggccgtcgcctcggagttggaccggcgcaataccgcgttgaccttgatcggtgctaccgcgcgcgggtactggcagattgccgacttgaatcagcaagtcctccatcagcaacaggcgctggcgatcgcgcgtgaaactttgcggctggtggcggcacgtcacaccgccggcgacgttggccgattcgagctgttgcaggcggagcaaagcttgttggcgcgagagaatcagctgcatgagctggagcggcagcgggaagatgcgcgtaactcgttggcactgttgttcgggcgatcgccgctgctgcgctatagcgaacggcgttcgttgccgcttgacgaggtagctgtcgcgcagcgtcagccggcgtgggtgattgcgcgccggccggatgttcaggcagcagaacgccgtctgagagcggcgctggccggtgccgaggcggcaagattgagtttttatccggcgctgagcctggaggccgggttggatgccggcagcggacttttccgccagtggttcagtgaaccttctcgctcgctgggcgccacgttgacgctgccgtttatcgaatggcgcaagatgcgcttgtccagcgacaaagcggcgttgcaggcgcagcgggcggagattcaatttcgcgatgcggtctaccgtgcgctggccgatgtggacaacgccatgcgacaacgcctggaagcacagcggcaaatcggcaatcagcggtggcatctggcgatgagccgacaagccgtggcgttggcgcgacatcaatatcaggctggttccgttgcgctgcaaacgctgctggatgcgcaagaggcggtgttggccagcgagaattcgctgtcggcactgcaattccgctatctgaacgccacgatgcaactctggctggcgctgggcggcaacgaggctttcgcatccgggcaaggagaataa

SEQ ID NO: 425969 - DNA, 1953 bp, Serratia marcescens
atgtcagttaacaccgctcccatcattgcgttggataacgtctcgcgcgagtttcaggcgggggagcagaaaattgcggtcctcaagcgcgtttccctgagcattcaacggggggaaatggtcgctatcgtcggcgcctccggttccgggaaatcgacgttgatgaacatcatcggctgtctggacaaaccttctcagggcgacgtgcacatcaacggagtggctattgggcaagccgacgccgatcgcctggcgcagcttcgcagccggcatatcggctttatcttccagcgctatcacctgatgccctatctgaccgccggtgagaatgtggcgatcccggcgttgtataccgccatgccggccgccgaacgccgcctgcgggcagcgcatttgctggcccggctcgggttggcgcagcgcggcggtcatcgcccggcgcagctttccggtgggcaacagcagcgggtcagtattgctcgcgccctgatgaacggcgcggaaattattttggccgacgaaccgacaggtgcgctggatagcgccagcggtcaggcgttgatgaccattttgcacgagctgaacgctatcgggcataccgtcgtcatcgtgacacacgatcggcggatcgccgaacaggcgcggcggatcattgagatcggcgacggcgagatcgtggcggatcgtcgccatgaagcctcccgacatctttctacgttcgaacgaccgctggcggcgccgctgaaacgcatggcgccgggcgcggcgttgaaagaggccgtcggcatggcctggcgggcattgctggggcaccgggtccgggcactgctatcgatgctcggcatcattatcggcattgcggcggtggtctccgccatcgccatcggagaaggcacgcggcgtaatattctcaaggaaatcagtcagcttggcaccagcacgctggagattcgcccaggcctcgggtgggagaaaccgcggcccgaccttgcgcgctcgctgagcgagcgggatgccgcattattggcggcgctgccttacgtcgacagcgtctcgccggtgatcggcacccaactgctggccgttcgcgaaggcaaacaggtgccgcttgccgtgatgggcgtcggcgaagggtatttccgcacgcagggcattcgcctgctttccggcggcctgtttaccgcgcaggatctgagtgagcgcgcaccggtagcggtgattgatcccttgctgaaacaggcgctgtttgcttcccggcaagatccgttgggcgcggtagtgctgatcgcgggcgtgccttatcgggtgatcggcgtcgcgcagcgccgcggcgctcaatacgccggctctcaaccgcttgcctggctgccctatacctctctgaccggccgcatcgccggcgatatgccgctggaatccattgtgatgcgagtgaatgaaaaactgacgctggaagaggcaggacgggatgcgacccggcgtttgatcgtagaacacgggcggcgtgatttcttcacgttgaccgacgatcagctgacgcaatccattcagcgcgcctcaggctccatgcaactgttgattaccgcgattgccgccatctcgctgctggtgggcggtgtgggggtgatgaacatcatgctggtctcggtgacggaacggacccatgagatcggtattcgaatggcggtgggcgccgccgagaaggacattatgcggcagtttttgattgaggcggtggtgatctgcagcttgggaggcgtgttggggatcgcctgcgccgcgctggtcaaaggggttctgagcggattggcgccgcaggtgacgatgatctttacctggccgccgttgctcctggcctgcggattttcggcgttgatcggtgtcgggttcgggttctttccggctcgcaccgccgcgcgcctgcagccggtggaggcgctggcgcgagaatga

SEQ ID NO: 425970 - DNA, 1128 bp, Serratia marcescens
atggccgttttggcggcgttgcttggcgggctgtcgttgctgaatcggccccctgacacgcaaccaccgcaaacggcgcgcgtcgagcgcggggacatcgaaaaaagcgtgttggcgaccgggattctgaaaccgcttcggcaggtgaacgtgggcgcgcaggtcaacgggcagttgaaaaaactgtatgtcaaacagggtgacagggtgatccaggggcagctgttggccgagatcgatccgacgctgcagcttaacgagctgcgcaagtcacaggctgaattacgcagcgcgcaggcgcagaaactggcgagccaggcacagctgaagcagtaccagctggagctgaagcggcaaagagcgctggcgcgagaccgcgccggcgtggccagcgatttggaaaaagcgcaggcgcagcacgacgcgcaactggcgcagttgaaagtgaacgagtcgcagatcgtccaggccgaagtggcgcaggaaaccgccagggccaatctggcttttacccgtattaccgcccctatcgacggcgaggtgctaggcatcgtcacccaggaagggcaaaccatcgtctcgtcgcaaagcgcgccgaccattttggtgatggcagacgtggatacgatgatggtgcatacccgcatatcggaaaatgacatcttgcaggtgaagacggggcagccgctgtggttttacgtcgccgccgatcccagccgccgatatgagggggcgatgggcgcgatacagcaggtgccggcggaggcgctggaaaccgacccgctgggcaggaattcaagccagcaaacggcggcggtgtattacaacggcgtgtttgccgtcgccaacggcgagcgtcgattgcgcacctcgatgacggcgcaggtattcatcatgaccgaacgcgcacagggggtggtgcgggtaccgatggctgcgctgggcgcggcattggatgaaggaagctatcaggtcaaggtgctggaaggcgggcaaacggtggtgcgccgcgtgcgtatcggtacccgcgatcgccgctatgccgaagtgttggaagggctgaacgcaggagagcaggtgctgctggagcaacagcctgatgtggaggagggcgctgatgtcagttaa

SEQ ID NO: 425971 - DNA, 2124 bp, Serratia marcescens
atggaaaacacccttcctacgccggtcttgcagagcgaaatcaatgagtgcgggctggcctgcatcgccatgctggcggaaactcagggcattcgcgcaccgttgacggagctgcgggagcgttatcccgcttcgcagcacggcacttcgctggcgacgctgtgcgccattttgggagagctggcgctaccggcttatccggtggcgttcgagcaccgggatctggcggcgctgccgttaccggccattttgcattacggcgcgggccactatgtgttattggcgtatcgccagggggggtacgtgtgcgtaatgaacccggcgttggggcagcagttgctgccgtacgccgctctgaaagcagaaatcagcggttatgcgttggtgctggatcgcgatgatttgccagccaccgtcccggcccggcgcagccaccgccgcagcgctttcgccagcttaagcctgaaggataccgccggcatcgccggcatctatcgcctggcggcgatgacgttttttatctcactgacgctgttcatcatgccgatgatggtcgccagcgcgatcaatcaggtgttcgccatggccggcgaggtcgcgttcccctacgcctattatctgctggcgtttgtggcgtccacggcgttggcgctgattgcgcgcaccctcaccgaacgcttcatcaaaaatttcgtgttgttgcacggcgccgccggtttttctcgcctgctggaaaactcactcaatttcttcagcaagcgcgcccccggcgagatcttcagccgtttcaccagctggcagatggccgccggccagaaaatcgaactggacaacggcctgcgcaccgactggatcatcggcgccatcgcgttggcggtgatgtgctacctgagcccgatgctggcgctggtgccggttgtcggcgtgctgctgatgggggcggtcagcgtatgggccatctaccgcgatcggcattacacccagcagctgcaggtgcgaggcgcggtgcaaaatgacttcatcctggaaaccatccaggggttttcgaccatcaaatcagccggcttggctggccagcggcaggaagggttcgccgaacatgcccgctcgctgttcaattgcctgcaacagcaaaagatctatgaacagataaaaggcagcatttaccagctgatcggcagtctggagatggtgttgttcatgctgctggcgttgccgctgctcaaggagggcgaactcagtctgggggcattcttcgcctacagctttctgcgcgaaatctttacttcgtacagcagcaagatcttttttgccgttttgcagaaaaaccagctgcacgtcatcgatgaacgcgcgcgggatctgtttcctgcagtatccgctcgggcccagtctgcggacgaaagcgtgagccattttgacgcgcggttggcgtatcggagtgtggccttcgcttacgacgccggtcaaccggtgttgcgcgatttgtcgctgacgctggagcgtggcgagtgcatcgccatttgcggcggttccggcgcgggcaagagcacgttgctgaaggtgctcgcctgcctgctgacgccgcagcagggggagctgacgctggatgggcgcgtactggcaagtgccgccgcgcagcggctgttcttcctgcaaagccaggaggacattctgttcaacgcctcggtgttgcagaacatcacgctgttcgcgccgtctgcgccgggccagcaacggcaggtggaacaggcgttgcgcagtttggggctggcggacgcggtggcgcagctgccggggggcgtgaacgccctggtgcgggagagccatgccgggctgtcgctggggcagcggcagcgtctgttgctggcgcgcgccatgtacagccgttgcccggtgttggtgctggacgaaccgacggcgaatctggatgaaaagaccgcggcggcggtgatgtcggctctggtggcgcattgccgtgaaaaccgtaaaaccctggtgacggtcacccataatccgcggctgttgccgttattcgatcgggtcttgcgcatgtcgcaggggcggctggtggctgagcccaccgacgacgccaggatgaatgattgtgcagaggtggagtga

SEQ ID NO: 425972 - DNA, 945 bp, Serratia marcescens
atgcgcctgctcgcggttcgagggtatttggcctggcgcaacggcctggacgcgatggcccgcttatcggctgccggtgccgggatgggcaaccgcctgacgtgtgccctgctgcggcgcgtggactatcgcctgtggctggcggtgcgccggcggttgaggggaagcaggccgcagcgccgctttcgccaccggcatgcggtagcgctggcgaaccgccaaagcctgttgggtgaaggcaagctggacttcgcctggctgatgcagcggcggcagtggctggacatggcggcggtctctgcccgcaatgcggcgttgatgagccatttggcgcactgttccgcgcagcttgatcaggtcgtggaaccgctgcatcgcgcgggcgtgccggtgctgctggcgccgatgcatacggtctccgacgtgttggcgacgctggtcggcgcgggcgtttatcccgggcgggccacggtgatcgtttccggcgatgtgcaggcgtttgcgcggcgatcgccggaagacgaatggcggcagcggctcgactattgctcgattcacgacgatccgcggcacatcgccggcaccctgtcgcaggcgatgctggaagcggcggaacatcggcgcaacatcatcctcttccccgacatcacgccggattacaccctgcacagcaatcaggatgtggcggccaaactggcctgtcatttgttcggccggccggcgcatttgcacagcggcatcgttcggctgtcccgggcgttgcgggctcaggtggtgttctattcgctttatttcgatcgcggcatccgcattcacattgaagagccggtcgccgcagatcgggtcggccgcgccatgccggcgatcgtcgagcgaaccctccggcggcatgcggatgattggttgctatggcattcgcactctttattttttattaacgaataa

SEQ ID NO: 425973 - DNA, 666 bp, Serratia marcescens
atgtataaacgtcccttgctttttatcggctacacgctcgttattatttttgcctcttcttttttgaccgcattttattttcaacattacgtcatgcaaccggcggaggcggaaagcctgagttttatctccccggaaaaaatcgaacaaagcccgttgcaagacgataatactattgtcgaagtcttctcttacgcctgccactattgtgaagtcaacgaaagcggcgtggcagagctggaaaaacgtttgccggcgggcgccaaattggtgcgcttgcacctcagcgacgacagtcaagccggcatggcggcctttgcgcccctgttcgccacgctgacgatcatggggatcgaagcacagcatcgccccgccgcttatcgcgccattatcaaagaaaacctcaacctggcggacgacaagcagctcagcgcctggctgacggccaacggtatcgatgaggctgcctatcggcaggccagagagtcagagcgggtcaaggcgttgttggcgcatatgacggcggtaagccgctattaccagatcaacgcgacccccagttttatcgtcaatcgcaaatggctggcgctgcaagatcgcgagttttccgctttcagccggcagctgctgtcgctgttgcagcacgataaaccgctggccccctga

SEQ ID NO: 425974 - DNA, 204 bp, Serratia marcescens
atgaagaaaatcaatctgtcagaagcgggaaacatcgtcggcggtacttttgtttgtaccaaggagtttgcttgggtgggcagcggcaataaccgcacctgccagctggtgaaaacctgtgcgaacaaattcggtggcgtacagaagtcttattacccggcgccggtagcaagctgcccgtctaacccaaccacgccaagctga

SEQ ID NO: 425975 - DNA, 921 bp, Serratia marcescens
atgctcgccactcacgaatacgccaacgacctgattctgttcgccctgattgtcgactgcggctcgttcagcaaggccgcagagagcgccggcatcaccagctcggtgatcagtaaacgcatcgggcggctggaaaaatcgctgggtgcccggctgttgtaccgcaccacccgcagcctgacgctgaccgaaagcggccaggcgctctaccagcaggccaaagagatcggcgccaaagtgcaggaggcgctgtacgccgtcagcgaaaagagcgaagagttgaccggcaccattcgcatgtcggtgccgaccatttccggcgagctgctgctgagcgagagcgtggcggaattttgcgctctgcaccccagcctgaaggtcgagatgcggctggaaaaccgctttgtcgatctggtggaagaaggtatcgatctggcgatccgcaccggcaccatgccggattcgagcctgattgcccggccgatcttcgattcccgctgggtgatcgtctgctcgccggggtacctggaaagccacccggaaccgcgtagcgccgaagacctgcttggccacaactgcctgacctacacctaccaggagagcggcaccgccaactggctgatgaaacgaccgggacgcaacgaaatctacgagctgcaggttaacggcaacctgtcggccaacaatgcgcgagcgatccgcaaagcggtgatcggcggccacggtatcgccatggtgccgcgctgcatggtgtatgaagatttgcaggacggcaagctgaccgagatcttggccggccactgcggcaaagtattgggcatttacgccgtctatccttacacccgcaatctgccgttaaaaacccgtctgctgatcgaacatatcatcggttcctaccaaaatatcagccattatttttga

SEQ ID NO: 425976 - DNA, 1584 bp, Serratia marcescens
atgcccctgcttttcagtattgcgcccatcgtcctgctgatttggatgatgaccaaaaggaatggcgtgccctcttacctcgccctgccgctgacggccgccgtggtgtatgccgtacagctcctgtggttcgatgcctcgctgcggctgctgcatgccaatatcatcaccgcgctggtgtcgacgctgacgccgatcaccatcatcgccggcgccatcctgctcaacaaactgatgcagataagcggcgcggaaaacgtggtgcggcgctggctggaaaccatcagccccaatcccgtggcccagctgatgattatcggctgggccttcgcctttatgattgagggcgccagcggctttggcacaccggccgccatcgccgcgccgattctggtcgggctgggcttcaacccgctgcgcgtcgccctgttgacgctggtgatgaactcggtaccggtttccttcggcgccgtgggcacccccacctggttcggctttgccaacctcggcctgtcggacgccagcctgctggaaattggccggcaaaccgcgctgatccactttgtcgccggcttcgtcattcctctgctggcgctgcgctttatcgtttcctggcaggatatccgccgcaacctaccgtttatcctgctcagcgtgctgagttgcaccgtgccctatctgctgctggctcaggtgaactatgaattcccggcgctggtcggcggcgccatcggcctggcgctctcggtactgttggcacgctgcggcatcggcctcacccgcagcgacaaatcgcagagcgccgggcaggcggtgccgttcttacaggtggtcaaggccatgaccccgaccctgctgctgattgctattctgatagtgacgcgcatccatcagctgggcctgaaggcgctgctcaacaacaccgcgctgctgtggcaggaaaacctcggctggctcggggagctgcgcatcagccgggcgctgatcgtcgaactgcagcaggtgctgggtacctccgccgctgccggctacaaaacgctgtatgtcccggcgctgatcccgttcctgctggtggtgctactgtgtattccgctgttccgcctgaatggcgaccaggtgcggcaaatgttcagcgaaaccggcgggcgcgtcgcacggccctttatcgccctgttcggcgcgctggtgatggtcaacctgatgatgcagggcggcgacaacgcgccggtgatcctgatcggcaaagcgttggcggcgctgaccggcgagagctggctgctgttctcgtcgttcctcggcgcgctgggctcgttcttctccggttccaataccgtctcgaacctgaccttcggcggcattcagcagtcgatcgcccagagcagcggccttgacgtcaatctgacgctggccttgcagtccgtcggtggcgccatgggcaacatggtgtgcctgaacaacattatcgccgtctgttcgatcctcgggatcggcaacgccgaaggcaaaatcatcagaaagaccgtgctgccgatgctggcgtacggcgggattgcggccggtatggcagcgatcctcacgctctga

SEQ ID NO: 425977 - DNA, 1140 bp, Serratia marcescens
atgatcatctccgcgtcaaccgactaccgggccgccgcccaggccaaactgccaccgtttctgtttcactacatcgacggcggggcctacgcggagcatacgctgaagcgcaataccgcagatctggccgatattgccctgcgccagcgcgtgctgcgcaatatgtccgaactcagcctgcagaccacgctgttcggcgagcagctggcgatgccggtggcgctggggccggtggggctgaccggcatgtacgcccgccgcggcgaagtacaggccgcgcgcgccgcggctaaaaaaggcattccgttcacgctgtccaccgtgtcggtctgcccgatcgaagaggtggcgccggcgatcgatcggccgatgtggttccagctctacgtgctgaaagatcgcggctttatgcgcaatgcgctggagcgcgccaaggccgccggcgtgaaaacgctggtgttcaccgtcgacatgccggtgcccggcgcccgttaccgcgacgcccactcggggatgagcggccctaatgccgccctgcgccgcgtgctgcaggcgtttgcgcatccgcagtgggcctgggatgtcggcctgctcggcaagccgcacgatctgggcaacgtctcggcctaccgcggtaaaccgaccagcctggaagactacatcggctggctgggtgccaacttcgatccgtcgatttcctggaaagatctggagtggatccgtgaattctgggacggcccgatgatcatcaaaggcattctcgatccggaagacgccaaagacgcggtgcgcttcggcgccgacggcatcatcgtctccaaccacggtggccgccagctggacggcgtgctgtcgaccgcgcgcgccatgccggcgatcgccgacgcggtgaaaggcgacattaccctgctggccgactccggcatccgcagcggcctggacgtggtgcgcatgatcgcgctgggcgccgacagcgtgctgctgggccgcgccttcgtctatgcgctggcggcggccggcgaagccggggtggctaacttgctggatctgatcgacaaggaaatgcgcgtcgccatgacgctcaccggcgcgaaaaccatcgcggaaatcaacgccggatcgctggtcagaaacgcctga

SEQ ID NO: 425978 - DNA, 810 bp, Serratia marcescens
atgtcagcagaacaatccgtactgaatcagaatgccgaaccggactggaagaattacgacgattttgcgcgcggtatcgacactaaccggctgccgggcactcaggattggcgcggcaaaacgctgcagatcgcttttgaaagcagcggggaaatcacgttgcgcttcagcgccgatcggcagcgggtgctgtgggcctggggcggggagagcggcgaggacgcttacgaagaggtgcaaacctccgccgcgcgctatttcttcaatattccgctgcagtcgccgggcaacgagtgcctgacgctggtactcaatcgtgacagcggccgggcgctgctggtgcgcagcacgctgttgccggaacaggcggtggaaaagggatcccgcctcaagcaaagcttccacgtcggccggattgtcggcgccacgccgggtggcgtcgcgccgcatctgacccgcgagcttatcggctatcgcacgctgaatgtctacagccccaaccactattacgaacatttctatgtcaacaccgagcgctacgcctggcaaaatctgcgcggcgaacaattcggccacggcgacatggactacgccacctactacaagtttgaggacgagatgttcctgttcaccttccgggaaaagatcatcccggtgtgctcggtgttcttcttcgactttatttccgggcgctgcaccggcaccttcctcgggctggacgccgccggccgggtgttggtgtcaccggccggggccttcatcagcaagatgagctataacgcctacccggaaggcgtgcagccgctttga

SEQ ID NO: 425979 - DNA, 1266 bp, Serratia marcescens
atgaataattcgccaggacagcgctcgcgattgagcgaagagaaccgattgctgatcattttgtttttcgttttcggctgcgtgttcgtcgatcgtctgaccatctcttttctgtttccgatgattgccgccgatttgaagctgagcaacgtgcatcttggcacgctgtcggcggtgctggcattgacctgggcgctatctggcgcggggctgggggcgattgccgatcgctttaatatccgcaaaccgatgctgatcctgtcgatcctggtgttttcgctgttctccgcgctgtcggggctggtcagcggctttgccatgttattgatcttccgcgggctgatggggatcgccgaagggccggtgctgccgatcgcgcaatcgctgatggtggaaaaatcgcagccgcagcgccgcggcttcaatatggggctgatccagggggcggcgccgggattgttgggcggtattatcgcgccgccgctgatcatctatctggcgcagaagtggggctggagcatggcgtttcacctgaccgccgtgccgggcatcattctggcgtggctgatctatcgttatgtgaacggcaagaaggatcccgctttcagcgccgcgccggcggccgacaaggcggcgaacaaaggcgcttacggcgagctgtttaaaatcaagaacgtagcgctgtgcattctgatctcctgcgtgttcgtcacctggttcatgatcatcattaccttcacccccaactttttggtgaccgaccgtggcttcagcgagggcacgatgggcggcatcatgagcgccatcggcgccgcctgggtgttttggggcgtggcggtgccggcgatttccgatcgccttggccgcaagccgacgctgatcttcttttcgctgctggcggtgtgctgcccgctgttcctcagctacgtcgataacccgtggctgctgggcgtgctggtgttcctgtcttataccggccttggctgcttcacgctgtttatggccaccatcccgtctgaaacggtgtcgccggcccgcatcgcgaccgcgttggggctggtgatggggattggcgaggtgattggcggctgtctggcgccgtttatcgccgggctgatcgccgatcgctatgggctggtcagcgtgatgtggctggcggctaccggcgccgtgtgcgccggcgtactgagttgttttctcgatgaaactgcacctgcggtggtgagccgcagagcggtgaaaccggcgggcgtcgccgacgtttga

SEQ ID NO: 425980 - DNA, 432 bp, Serratia marcescens
atgacgacagcattgacaaaagccggtttctggcgcaaaaccgccgactcttcatcgctgcgtgagccgcgcgtgctgattcgggtctacgttggcgaaggcgaaatcgaccgcgccatcgcgttttacgagcagctgcacggcgtaacggcggacatgcgcttcgattttcccgaacatcggctggtattggcggcggtggggccgtttctgatcctggaaggggcggaagagcagttgcgccctttccgcagcaccgtcggcacgctgctggtcgatgacatttatccctaccaccagcggctgctggccgccggcgccgagattttcttcggcccggtggaggtgcccaccggcgcctgtttcaatgcgcgcctgccggacggcacgattgtcgagtacgtgcatcaccggccgcgcgcgggcgaataa

SEQ ID NO: 425981 - DNA, 1545 bp, Serratia marcescens
atgacaacaaaaactcccccatcgcttgacgaagaacctgtcagattgaatgttccggtatttttcggctcggcggcggtgatcctgctgctgggaacgctggtcgttctgttcccctccgccagcaaactgtggctgaacgccgcgcaaagctgggtcgccgacgtattcggctggtactacatgttattgatggtcgcctgcatggcattcgtgttctggctggcgctgtcgcgcttcggccatattcgcctcagccaggatgacgagccgccgcagttcagctatccctcgtgggtggcgatgctgttctcgtcgggcatcggcattgcgctggtgtactacggcgcctatgagccgctggatcacttcctgtcgccaccggaaggcagcggcggcaccgtgcaggcggcgcgacaggcgatggcgctgacctttttgcactgggggctgcacggctgggcgctgtatgcgctgatcgccaccgcgctggcctatttcgcctattgccgcggcctgccgctggcgctgcgctctgcgctatacccgatcttcggcgagcgcacccacggttgtgtcggtcatctggtggacagcttcggcattctggtgacggtgatctcgatggtgaccaacctggggatcggcgcgctgctggtgaactccgggctgttttatctgttcgacatcccgcaaagcaccggcgtgctgctggcgctgatcgtggtgatgatggtggtggccacgctggcggcggtcaccggcgtcgagaagggcatcgccatgctgtcgaacatcaacgtcggcttcctgtgcctgctgctgctgttcgtgttttttgccgggccgacgctgaacctgctgaacggcatgttgcagaacctcggcgattatctcacctcgctggtcagccgcagcttcgatatgtatctgtacggcaaggcgcgccagtggcagggtgcctggacgctgttctactgggcctggtgggtggcgtgggcgccgttcgtcgggctgttcatcgcgcgcatctccaaagggcgcaccattcgcgaactgattttcggcgtgctgctgatcccgctgggcttcacgctggcgtggctgtcgatcttcggcaataccgccatcagtctggtgctggaaggcgggcaggcgatcctggggcaggtggcgcaaagcgatccgccgatggcggtgttcaagctgttcgaatacttgccctatacccaactgaccgccggctttgtggtggtgatcagcttcgtgctgttcttgacgccggtcgattccggcacgctgatgatagccaacctctcctgccagggcggctccgcccatgatgacgcgccggcctggctgcgcgtgttctgggcagcggtcaccacgttggtatgcgccggcttgctgtacgccggcagtttcagcgcgatgcagaccgcggtggtgctgtgcggcctgcctttctcggcggtgatcgtgctgtacatgatcagcctgcgcaaggatctgcgccgttacgccatgaagccggcgctgccctga

SEQ ID NO: 425982 - DNA, 597 bp, Serratia marcescens
atgtaccgaagagacattccggaacagcgtaaggagcagttgattaacgccgccttcgagaccattaacgtcgtcgggctggccggcgtcaccctgtctcaggtggcgaaagaagccgggctgtcgaccggcatcgtcagccactattttggcgataaagaggggctgctgagcgccaccatgcgcaaaatcctgcgcgacctgcgcgatgcggtggccgagtgccgcgcgcaggcggcaagcgacagccagtcacagctgttcgccattatccagggcaacttccaccccagccaaaccaatgccgtgtccatgcgcgcctggctcgacttctgggctgccagcatgcatcagccggtgctgcgccgcctgcagcgcgccaacgatcggcggctctattccaatatttgcagccagttccgccgcgagctgccgctgccgcaggcgcgcgacgcggcgcgcgggctggcggcgatgatcgatgggctctggctgcgcggcagcctggccggcgacgagactgacctgaagcaggactgccgcatcgcctgcgactacgtgatacaacggctcaaggccgcgccatcggcggcgtga

SEQ ID NO: 425983 - DNA, 1773 bp, Serratia marcescens
atgatggatcgttcccgtttgctgaaattcctgctgccctacctgtggccgaaagacaacccgcggctgcgcgggtatctggtggtggccttcgtgttcatggtggcggccaaggtcagcaccacgctggtgccgctggcctacaaagcgatggtcgatgcgctgagcggtgagacggcgaaagtgctggcggtgccgctggggctgatcgtcgcctacggcgtggcgcgggtgggcggcgcgctgtttgaggagctgcgcaacgtgatgttcattcacgtcagccagaacgccacgcgcctgctgggcgtgcgggtgtttcgccagctgcatgcgctgagcctgcgcttccatctggagcgccagaccggcgggctgtcgttgtccatcgagcgcggcacccaggcggtgtccacggtgctgtcgcggctgctgttctccatcgtgccgatcctgttcgagctctcgctggtcacggcgatcatgtggcacatgctgaacggctggttcgcgctggcgatcctgacgacggtcggctgctacatcctgtttaccgtgctggcggtcagctggcgcacccgctttcgccgtgaactcaacaaggccaacgccgacgccaacagcaaatccatcgacagcctgctgaactatgagaccgtgaagtatttcggcaatgaagagttcgaggccgagcgtttcgacctgtcgcgccggctgtacgaatacgccgccatcaagaaccaattcagttttacggcgatcaacctggggcaaaccgccattatttcgatcgggctgatcgtgatgatggccatggcggcgcagggcattacccaggggaggatgacggtcggcgacttcgtgctggtcaacgcctatctgctgcagctgtatcagccgctgaacttcttcggctttatttattccgaggtgcgccaggcgctgatcgacatggaaaacatgttcgatctgctgcaggaaaagcgtgagatcgtcgatagcccggatgcgcagccgctgcgtctcgatcgcggcgaagtgcggttcgacgcggtcagcttcggttacgacacgcggcggccgatcctcaagcaggtgagttttaccattccggcgggccacacggtggcggtggttggcgcctccggcgcgggcaagtccacgctgtcgcgcctgctgttccgtttctacgacgtgcagggcggcgccattaccctcgacggccaggacattcgccaactgacccaggccagcctgcggcaggcgatcggcatcgtgccgcaggatacggtgctgttcaacgatacgctgcgctacaacatcggctacggcaaaaccggctccagcgatgaagaaatcgagcgggcggcgcggctggcgcatatccatgattttatcgtcggtttgcccgacggttacgacacccgggtgggcgagcgcgggctgaagctgtcgggcggtgaaaagcagcgggtggcgatcgcgcgcaccattctgaaaaatccggccatcctggtgttcgacgaggcgaccagcgcgctggatacccagaccgagcgcgaaatccaggggcacctgcgcgaggtaagccgcaaccacaccacgctggtgatcgctcaccggctctccaccgtggtggacgccgatgaaatcatcgtgctggaggcgggggagatcgtcgagcgcggggggcatgaggcgctgctggcggcgaacggccgctacgccgcgatgtggcaaacccagtacagcgaagagcaggagccacactga

SEQ ID NO: 425984 - DNA, 858 bp, Serratia marcescens
atgacccagacgtatgcaaagcgctttgcgcaggtctttgactatatcgaccgccacctggacgaggcgctcaccgtcgaaaaactgagcgaagtggcccacttttcgcgctttcactttcaacgccagtttagcgcgtattgcggcatctcggtgtggcgttatatccagtggatgaggctcaaacgcgcctcgtaccgcctggcgtataacccgctggagccggtgattgacatcgcgctggacgccggttttcaaaacccggagtccttcagccgcgccttcaaacaggcgttcagccaaacgccaagccagtttcgcaaacggccggcctggatcgattggcagcagcgctttcccgagccgaaacacacaaggaaacaacccatgaaggtagacattgtcgacttcccggccacgccggtggcgatgatcgaacatcgcggcccgtccgcgctggtcaacgaaaccgccgcacgctttatcgagtggtgcaaaaccagcggcctgtcgccggtcagaagcagccgcacttacggcatcgcaccgcacgatccggccaccaccgaagcgcaggacttccgcttcttcatttgcggcgaggtcactgcgccgatccccgaagacaacgccttcggcgtggtgaacagcacgctgccggccggacgctgcgcggtgctgcgccatcacggctcgctggatgggctgtctgaaagcgctcgttatctctacagcgagtggttgccgaacagcggcgaggaaccgcgcgattttccgctctatttccactaccacaactttgtgcacgaggtggcggaatatgaactggtgaccgatctttacctgccgctgaagtaa

SEQ ID NO: 425985 - DNA, 717 bp, Serratia marcescens
gtggcggtgtgtttggcattggggctgctgttggccgggtgttcgggcaaaaacacctataaccgcgactatgacaaactgccgaagggcagttattccggcaaaacctataccgtcaaacggggcgatacgctgtactacatcgcctggatcaccgacagcgaagtcagcgagctggccagaatcaacaaaattcgtccgccttatagcctcgaggtggggcagaaactgcggctgagcggcagcgcgccggccaaaaccgccgctacgcgccgtaaaaagtcgtcttccgccgcaatcgtcaaacaaacgccgccgccgggcgcttcccgctgctggcgctggccgaccagcggtcggatcgtgcaggcgtactccaattccgacggcggcaacaagggcatcgatatcgccggcaagcgcggccagccgatctacgcttccgccaagggcaaagtggtgtacgtcggcaatcagctgcgcggctacggcaatctgatcatgattaagcacggtgaggacttcattaccgcctatgcgcacaacgacaccacgctggtgcgcaacggccaggatgtgaaggcggggcagaagatcggcaccatgggcagcaccggcaccgattcggtattcctgcacttccagatccgctaccgcgccactgcgctcgatccgcagcgttatctgccgccgcagggatcgtcgccgtcctgttga

SEQ ID NO: 425986 - DNA, 570 bp, Serratia marcescens
atgttgaacctcgaccgcaataatctgcccctcctgagcgaagagctgctcaaaaagcaacgcactacccttttgatcatcgccttcctgctgctggcgggcgggatactgtgcctggtcaatcctttcgcctccggcgcagcgctgagcatcgtggtcggcatcctgctgctgttgagcggcgccgggctgattatcgccatgatcgctaaccgggcgcagaatacctggccgatgatcggcggcattttgctgggcgtggcctacctgattatcggctatgtgttcatcaccagcccgctggcgggcattctggcgctggcggtgtacctcgccgtactgttcgctctcggcggcatcgcgcgcctggcggcgggctacatgcgccgcgggctgccgggcaactggctgcagttcgttatcggcgtgctcgatttgatcatcgcctggatgctgattggctcaggcccggcagcgtcggtcacgctggtgacggcgatcgtcggcatcgagatgctggtcagctcctttgcgctgttccaggcggcgaatctgtttaaaaaaagctaa

SEQ ID NO: 425987 - DNA, 1260 bp, Serratia marcescens
atgtcaaatgtcatcacccactcatggaaaaatagccggacttctccaggtgagccggtcatgccagatcctgttgttatgattaaagatgatggccatattttaattattgccgatgcagatacggatgccgatggtagtcctgatgcggaggaaatcgatccgacaggtcaaaaggaaaccagcttaagaagaggaaatggttggcgaggtgagggagattatgtcaatgcgcgaattattccttattttgttattccaggtaattggaagaagatcaccggagtcgctgtaaatatgggggatatggctaaaataaattatagagatagtcatatctatgcaatctgtgcagacgtcggtggaaaagagtctatcggagaggcttccattgccgcagttgaagcgcttggcgttaacccatggagtaaaaataagaaaaaaataatcagagggatcgggtatggagtgacctatgagatcattgcaggctctgcaagcttgggggccacggtgagttttgaaacgatccaggcatatggtcgagagttgttcaaggaaaatttgccttttagtttgccgatgaaaatcgaagatatctcaggtgttatgttaggtagtaatggaaagggaacgccgacggtagttatctcgtcgaaatcgggagaaagtcatgttaaagaatatagtgatactcaggaacttgctctgatattgcaactgctgcccaaaacaaaggtcacgatagatgcaccgtttgtcgcgcaactggctgatgccgtggtgtgggatgatcatttttacagcagcgctgagcggtttgtcgggatgtttaaagaagattaccgttcaatccgggaagcggtagaagactggtttgtgccggaatacagccctaccgcgacaagcaatgcctgcgttgcacaccaggttagttgccttaagctctgtggcttgccttatccgaaacttggcagcatgcagtctatcaatgttgattacttcgttgaatgggctctagagcagggatggcagaagataacccaccgtgcgagtctggcgccgggagatatttgtgtctccgggccgattggccaccccaaggaatttgaccacgtttattgctttgtctcgttttctaccgagcaggttggttatgcagttatttttgataatcaatattttggcatccatacacgttctctcgacggtataggttcaaagataggggaatggcgttacgcaataagaatgccctag

SEQ ID NO: 425988 - DNA, 267 bp, Serratia marcescens
atgtgggaaattatctttaccaaaatctgggggggggtggtatatgaattggaaatcaggctggcgggtgttgaattaatcacgcctaatcttgatgcactggcagaggccattaaaaaagaacaacaaaacaaagcaaggttgttgggtgtcgcaacgattcaggggtataagttttacagtaaagaagacaaagagttagctatcgattctgtgaagttgaaaataaaaatctgccgaattaatatggccgacaaaccgtcataa

SEQ ID NO: 425989 - DNA, 645 bp, Serratia marcescens
atgttacagaaacacgaaaacgtaataagtatgactgtactaagcccgcaagccacccaacaactgatgccttcgttttcctccttgccccacacgcaacacgccgacggcaaatatcgcctgcgccgttattcggtcgttaaatacctcaaccccaacgtcgccgaagtggggccacgcaccttcatgcagtccgatcagatcaaccacttccagggcaacgtggtgcgccgcttcgagcctatcgacagcgccgtactgcagagcgccggcatggcggagatgtgcaacctgtttgcagaaagcaacgagctgccggaaggcgccgagattgagatccatcagatgcgcgtggtcgccatcgagaaagacacccaggtggcgccggaaggcattcaccaggacggtttcgaccatatcgcgatgatcgccattcaccggcataacatcgtcggcggtgaaatcatgctgtacgacgacagccaccacgatcccttctttaaaaaagcgctggcggacggtgaggccgtgctgctggcggacagcaaactgtggcacaacgccacgccgatcaacgccgtgaacccaactgaggaaggccatttggatctcttcgtcctcaccgcgcggggagagaaagcatga

SEQ ID NO: 425990 - DNA, 1233 bp, Serratia marcescens
atgacctttacgcccgagctcgcccgacgccagttcagcgccctatctcagcaaatcgacggcaaaccggcgatctttttcgacggccccggcggagcgcaggtttcacggggcgtgctggaaaaaatgacggactacctggggaaatacaacgccaacctgggcggccactacttctccagccgggtcaccggcgaggtgatgggccaggcgcgagaatcggtgcgcgccttgttaaatgcgccgtcgcccaacaacattgtcttcggcatgaacatgaccacgctgactttccatctcagccgcatcatcagccgcgactggcaggccggcgatgaggtcatcgtcaccgcgctcgatcactacgccaacgtctccagctggcagcaggccgccgccgacaaaggagccatggtgcatcagataccgctggagagcgcagactgttctctcgacgccgcaaaggtgtgtgaacgcatcaacgccaacactcgcctggtggcggtcagctacgcctccaacgtcaccggcagcatcgtcgatatcaaaaccatcgtcgaagccgcgcatcgggtcggcgcgcaggtgtatgtcgacgccgtgcactatgcgccgcacaacctgatcgacgtgcaggcgctgggctgtgatttcctggtatgctccgcctacaagttctttggcccgcacgtcggcatggcctatatcgcgccgcagtggctgcaacgcctgcggccatataaagtcgagccggccaccgacgtcggccccggccgtttcgagaccggcacgcaaagcttcgaggcgctggccggcgtcgcggcggcgatcgactatctggcgcagtggggcacgcccggcgcgccgttaaggcagtgcttgcaggagagtttcgccgcctaccaccagcatgaagaggcgctgtgccgccactttttgcaacggctgcagcaactcgacggcgtgcggctctacggccattcacaggcggacagcgcgcgccgcacgccaaccttcgccctgaccttcagcggccagacgcctgacgcaatcgtccgtcatctcgggcagcacaacatctgcgccggcagcgggcatttctatgcgctgggcctgatccagcagttggggttacaggacggcggcgtgctgcgcatcggcatgatgcactacaacacccagagtgaaatagacacgctgtttaaagtgatcgccgaagatatcctcagttaa

SEQ ID NO: 425991 - DNA, 1998 bp, Serratia marcescens
atgagtgagaaagacacccccctaaaaaatccgcaaagccatatcaacaaagcggtattcttcacctctgcagtcctcatttttcttctggtcgcgttcgccgcctttttccccgacgtcgctgacaagaacttcaaacttctgcagcaacaaatcttcaccaacgccagctggttttatattttggccgtggcgctgattttgctcagcgtgacgtttctggggctttcccgctacggcgacatcaaactcggccccgatcatgcgcaacccgattttcgctaccactcatggtttgccatgctgttttcagcggggatgggcatcggcctgatgttcttcggcgtggcagaaccggttatgcactatctttcgccgccggtcggcacgcccgagagcgtcgaggcggccaaacaggccatgcgcctgacctttttccactgggggctgcacgcctgggcgatctacgccatcgtggcgttgattctggccttcttcagctatcggcatggcctgccgttgaccctgcgctctgcgctttatccgatcatcggcgaccgcatttatggccctatcggccacgccgtcgatatcttcgcggtcatcggcaccgtattcggggtcgcgacctcgctgggttatggcgtgttgcaggtcaacgccgggcttaaccacctgtttggcgtgccgatcaacgaaaccgttcaggtgatattgatcgtggtgattaccgggctggccaccatttccgtggtttcagggctggagaaaggcatacgctttctgtcggagctgaaccttggcctggcgctgttgctcctggccttggtcttgctgttggggccaaccgttctgctgttgaaatcctttgtggaaaataccggcggctatctgtccgagttggtcagcaagacgttcaacctgtatgcctatgagccgaaatccagcaactggttaggcggatggacgctgctctattgggggtggtggctctcctggtcgcctttcgtcggtatgttcatcgcacgagtttcccgcggccgaaccatccgcgaatttgtcacgggcgtgctgttcgtcccggccggcttcaccctcatgtggatgacggtgttcggcaacagcgccatttacctcatcatggaaaagggcgcgacagacctcgccgctacggtacagcaagacgtggcgctggcgttgtttaacttcctggagcatttcccgttctccagcgtgctttcgtttatcgccatggcgatggttatcgtctttttcgtcacctccgccgattccggcgccatggtcgtggatacgctggcttcgggcggctccagcaacacgccggtttggcaacgcattttctgggcgtcgctgatgggcatcgtcgccatcgccttgctgatcgccggggggctcagcgcgctgcaaaccgtcaccatcgccagcgcattgccgttctcggccatcttgctggtctccatctacggcttgcttaaggcgctgcgtcgcgatctgaccaagcgcgacagccaaaatatggccaccatcgcccccaccgccgcccgcaaccccattccctggcagcgcaggctgcgcaatatcgcctatctgccaaaacgctcgctggttaagcgctttatggatgaggtcatccagcctgccatgacgctggtgcaggaagagctgagtaaacaaaacacgctcagcagcatcaacgccactgcggaagaccgcattcgtttcgaggtcgatttgggcgatgagcttaactttatctatgaagtcagactgcgcggctacagttcgccgacgttcgctctggccgggctggataacgatgaacagcaagccgagcagcacaagtattatcgcgcggagatctacctgaaagaaggcggccagaactatgatgtcatgggctggaatcaggagcagttgatcaacgatattcttgaccagtacgagaaacacctgcatttcttgcatctggttcgctga

SEQ ID NO: 425992 - DNA, 1518 bp, Serratia marcescens
atgtctgaacaacaagtacagggcgccgatcaggcgctggatctcaataacgaactgcagtcccgccgcgagaaactggccggcctgcgcgagaacggcattgcgttcccgaacgacttccgtcgtgactccacctccgacaaactgcatgccgcgtacggcgataaagacaacgaagagctggaagcgctgggcgtagaggtgaccgtcgccggccgcatgatgacccgccgcattatgggcaaggcatccttcgtcacgctgcaggacgtgggcggccgcattcagctgtacgtcgcgcgcgacgatctggctgaaggcgtgtacaacgaccagttcaagaagtgggacctgggcgatatcctcggcgcacgcggcaagctgttcaaaaccaagaccggcgaactgtcgattcactgcaccgagctgcgtctgctgaccaaagcgctgcgcccgctgccggacaaattccacggcctggcggatcaggaaacccgttaccgccagcgttacctggacctgatcgccaacgaagaatcgcgcaacaccttcaaggtgcgttctcaggtgatgtcggctatccgcaacttcatggtggaacgcggcttcatggaagtcgaaaccccgatgatgcaggtgatcccgggtggcgcgtccgcgcgtccgttcatcacccaccacaatgcgctggatatcgatatgtacctgcgcatcgcgccggaactgtatctgaagcgtctggtggttggtggctttgagcgcgtgttcgaaatcaaccgtaacttccgtaacgaaggcgtttctccgcgtcacaacccagagttcaccatgatggaactctacatggcttacgcggattacaaagacctgatcgagctgaccgagacgctgttccgcaccctgaccgagaaagtgctgggcacctctcaggtgcagtacggcgacgaagtgttcgacttcggcaagccgttcgaaaagctgaccatgaccgaggcgatcaagaaataccgcccggaaaccgatctggctgacctggccgacatgggtaaagcggtggccatcgccgaatccatcggcatcaaggttgagaagagctggggtctgggccgcgtcgtgaccgagatcttcgaagaagtggcggaaagccatctgattcagccgaccttcatcaccgagtacccggctgaagtgtcgccgctggcgcgccgcaacgacgttaacccggaaatcaccgaccgcttcgagttcttcatcggcggccgtgaaatcggcaacggcttctccgagctgaacgacgccgaagaccaggcacagcgctttgccgatcaggtgaacgccaaagacgccggcgacgacgaagcgatgttctacgacgaagactacgtcaccgcgctggagcacggcctgccgccgaccgccggtctgggcatcggtatcgaccgcatggtgatgctgttcaccaacagccacaccatccgcgacgtgattctgttcccggcgatgcgcccacagaaataa

SEQ ID NO: 425993 - DNA, 963 bp, Serratia marcescens
gtgtggaacgagccggagcgcgcacaggcgctcggcaaagagcgcgccgcgctggaagccatcgttgaaaccatcgatcagctggagcagggcggcgaagacgtcggcgggctgctggaactggcggtggaagccgacgatgaagagaccttcaacgaagcggtcgccgagctggatcaactgatgagcaagctggatcagttggaattccgccgcatgttctccggcgaatacgacagcgccgactgctatctggatatccaggccggctccggcggcaccgaagcgcaggactgggccagcatgctgctgcgcatgtacctgcgctgggccgaagccaagggcttcaagaccgaagtgatcgaagagtccgacggcgacgtcgcgggcctgaaatctgccaccatcaagatcatcggcgattacgcgttcggctggttgcgcactgaaaccggcgttcaccgcctggtgcgcaagagcccgttcgactccggcggccgtcgccacacctcgttcagctcggtgttcatctacccggaagtcgacgacgatatcgatatcgaaatcaacccggcggatctgcgtatcgacgtgtaccgcgcctccggtgcgggcggtcagcacgtcaacaaaaccgaatccgccgtacgtattactcacctgccaaccaacatcgtggtgcagtgccagaacgatcgttctcagcataagaacaaggatcaagcgtttaaacagctgcgagccaagctgtacgagtttgagatgcaaaagaaaaatgctgataagcagacgatggaagacaacaagtccgacatcggctggggcagccaaatccgttcttacgtgctggatgactcccgcatcaaggatttgcgcaccaacgtcgaaacgcgtaacacgcaggccgtactggatggcgacctggataaattcattgaggcaagtttgaaagccgggttatga

SEQ ID NO: 425994 - DNA, 1734 bp, Serratia marcescens
gtgagtattaaaacgcaactacgccgccgcccggcggcggacgacacgcatctgcccgccagtttgccgccgctgctgcgccggctttacgccctgcgcggcgtgcaggctgagcaagagctggaacgcggcgtcaagggcatgttgccctggcaacagctggacggcatcgacgacgccgtcagcctgctgcaacaggcgctggccgacggccgccgcatcatggtggtgggcgatttcgacgccgacggcgccaccagcactgcactgacggtgctggcgctgcgcagcatgggcggcgccagcgtcgactacctggtgccgaaccgcttcgaagacggctacggcctgagccccgaagtggtggagcaggcggcggcgcgcggcgcggagctgatcgtcaccgtcgataacggcatctcctcccacgccggcgtcgacgtggcgcacgccaagggcatgcaggtgctggtgaccgatcaccacctgccgggcgagaccctgccggcggccgaagcgatcgtcaatcccaacctgcgcggctgcgccttcccgtccaaatcgctggccggggtgggcgtcgcgttctacctgatgctggcgctgcgcgcccggctgcgggacagcggctggttcgaacagcgcgcgctggcgatgcccaatctggcggaactgctggatctggtggcgcttggcaccgtggccgacgtggtgccgctggacgccaacaaccgcattctggtgtatcaggggttaaaccgcatccgtgccggcaaatgccgaccgggcatccgcgcgctgcttgaggtggccaaccgcgatgcccgccagctggcggccaacgatctcggtttcgccctcggcccgcgtcttaacgccgccggcaggctggacgacatgtcgatcggcgtggcgctgctgctgagcgacgacattgcgcaggcgcgcatgctggccaacgatctcgacgcgctgaaccagacgcgacgggagatagagcagggcatgcaggtggaagccctgcagctgtgcgaccagttggagcgcaccagtaccgagctgccttacgggctggcgatgtatcacccggaatggcaccagggcgtggtgggtatcctcgcctcacgtatcaaagagcgtttccaccgcccggtgatcgcgttcgcgccggcgggcgacggcatcctgaaaggctccggccgttcggtgcctggcctgcacatgcgcgacgcgctggagcggctggatatgctgaaccccggcctgatgatgaagttcggcggccacgcgatggcggccgggctgtcgctggaagaggcccggttcgacgagttccgccagcgcttcggcgagctggtgggggaatggctcgatccggcgatgctggaaggggtgatctggtctgacggcgaactggcgatgcaggagctgtcgctgacgacggcggagctgctgcgcgagggaggcccctggggccaggcgtttccggaaccgaccttcgacggcaagttccgcattctgcagcagcggctggtgggcgagaaacacctgaagctgatggtggaaccgctcggcggcggcccgctgctcgacggtatcgcgttcaacgtggacaccacgctgtggccggacagcagcgtgcgcgaggtcgaactggcctacaagctcgacgtcaacgagtttcgcggcaaccgcaacgtgcagctgctgatccagcatctttggccgcgctga

SEQ ID NO: 425995 - DNA, 717 bp, Serratia marcescens
atgaaaaaaggtttaatgctgctctcactgctggtggcttcggtgaccggcgccgcccatgccgatgacgcggcgatcaaaaaagcgctcgccagcctgggcatccagcaggcggacgtgcagccttcaccggtcaatggactgaaaaccgtgctgaccgacagcggcgtgctgtacgcctccgaagacggcaagcatatcctgcagggcccgttgttcgacgtcagcggcaaagagccggtcaacgtgaccaaccaactgctgggcagcaagatggacgcgctgaaagatcagatgatcgtctacaaggcgccgaaagagaaacacgtgatcaccgtgttcaccgacatcacctgcggttactgccacaagctgcaccagcagatgaaagagtacaacgatctgggcatcaccgtgcgctacctggcgttcccgcgccaggggctggcctctcaggctgagaaagacatgcagtcgatctggtgcaccgccgacaaggccaaggcgttcgacgccgccatgaagggcgacgccatctccccggcgacctgcaaaaccgacatcagcaagcattacgaactgggtgtgcagttcggcattcagggcacgccggcgatcatcctggaaaacggcatgatgatcccgggctatcaggggccgaaagagatggccgccatgctggatgcgcaccaggccgccaccaaagccggtggttaa

SEQ ID NO: 425996 - DNA, 936 bp, Serratia marcescens
atggcgcgggtggaaatgcaacaaagagaggaccgcgtgcaacagcaagaccatgcgctgattgaacaattcctggatgcgctgtggcttgagcgcaatctggcggaaaatacgctggcctcctaccggctggatttgcaggcgctgggcacctggcttggccagcaaaacaccgccttgctgcaggcgcaggcgttggatctgcaggcgtttctcgccgagcgggtggacggcggctacaaggccaccagctccgcgcgtttgctgagcgccatgcgccgcctgtttcagtacctgtaccgcgaaaagctgcgcgccgacgatcccaccgcgcagctggcgtctcccaagctgccgcagcgtttgccgaaggatctgagcgaggcgcaggtcgatgcgctgctgcaggcgccctgcgtcgatcagccgctggagctgcgcgacaaggcgatgctcgaagtgttgtacgccaccgggctgcgggtttccgaactggtggggctgagcatcagcgacgtcagcctgcggcagggcgtggtgcgggtgatcggcaagggcaacaaggagcggctggtgccgctgggcgaagaggcggtctactggatcgaaaattatctggagcacggccgcccgtggctggtcaacggccagacgctggatgtgctgttccccagcacccgctgccagcaaatgacccgacagacgttctggcatcgcatcaaacactatgccatccttgcgggcatcgacagcgagcgtctgtcgccgcacgtgttgcggcacgcgttcgccacccatttgctgaaccatggggccgatctccgtgtcgtacagatgttgttagggcacagcgatctctcgaccacgcaaatttatactcatgtagcgaccgaacgactgaaacagctacatcaacagcatcacccgcgcgcctga

SEQ ID NO: 425997 - DNA, 519 bp, Serratia marcescens
atgaagattggtctgttttacggctccagcacctgctacaccgagatggcggcagaaaaaatccgtgagattctgggtgaagacctggtcgacctgcacaacctgaaagacgtctctcccaagctgatggaggactattccattctgatcctcggtatcccgacctgggatttcggcgaactgcaggaagactgggaagcgatctggccgcagctgccggcgctggatctgaaaggcaaaatcgtcgccatgtacggcatgggcgatcagctcgggtacggtgagtggttccttgacgcgctgggcatgctgcacgatcacatcgcgccgctgggcgtgcagttcatcggcttctggccaaccgagggcttcgagttcaccagccccaaaccgctgagcgccgacggcaaacacttcgtcggcctggcgctcgatgaggtcaatcaatacgatctgagcgaagagcgcctgcagcaatggtgcgaacagatcctgctggaaatggagccgctgctgtag

SEQ ID NO: 425998 - DNA, 1362 bp, Serratia marcescens
atgaaatcggtacttttctggaaaataaccacgctgctgggattgatggtggtgatgttgatccccatcgcccaactgatgagcgtgatcgacgaacgcagcggctatcggcaaagcgtggtcgggcaggtgagcgaaagcaccagcggggcgcagcgcgtgctcggcccgttgattgtcattccttatgtcgaacaagaagaaaaaaaagacgagaaagggcaaacggtggtgcagcgggtgcagcatcaccgctatttgctgccggagtcgcttcaggtgcagggggcgccgaatgtggaagtgcgcaagttgggcatttatcagacgcaggtttaccaggggccgctgaacttcaaggtgcgtttcggccagccggagctggcggatttgcaacgcgccaacgtgaccgtcggccagccgttcctgctggtggcgctgagcgattctcgcggcatcaagagcatttccccgctggcaacgccgcagccggtggcgtttgagccgggcaccggcgtgggatcgttgcgccaggggatccacgcaccgctgacgctggcggcgctgcaacaaaaagcggggctgagcgccgacttcaccctgacgctggcgggcaccagcagcttgtcgctggtgccgctggggcgcagcagcgagctgcagctgcaaagcaactggccgcacccgaatttcctcggcaacttcctgccggacgaacgcaaggtgacggagcaagggtttagcgctcgctggcgcagcacctggttcgccaacaacatcaacagtgcgttccattacgacgatggcattatcgacgaggacaagctgccggccttcagcgccagcctggtcgaaccggtcgatcactatcagttgaccgagcgcgcggtcaaatacgcgctgctgtttatcgggctgacatttatggcgtttttcctgttcgaaaccctgaccgggctgcgggtgcacccgattcaatacctgctggtcggcgcggcgctggtgttgttctacctgattctgctggccttctccgaacacctgggattcgctctcgcttacctggcggccagcatcgcctgcagcggactgatcggcttctacctgagcgccgtgctgcgcggcaagctgcgcggtgcgctgttcgccgcgagcctattgctgttgtacggcgtgctctatttgctgctgcagtcggaggacaatgcgttggtgctgggagcggggctgctgttcgccattctggcgggcattatgctgttgacgcgcaagttggactggtatcaggtggccgatccggcgcgtctggcaaaggaaacgccggccggcgaagatgagccacgcttccgtctgtggaaataa

SEQ ID NO: 425999 - DNA, 1419 bp, Serratia marcescens
atgaaaattggcctgcgcctgctgctggggtactttctgatcgtagcggtggccgggtacttcgtgctgagcattttcgtccaggaagtgaagcccggcgtgcggcgcgctaccgaaggcacgctggtggacaccgccaacctgctggcgcagatcgcccgtcaggacatgcagcgcggcgatgcggcgcatggccaactggcgcaggcgtttacgcagctgaatcagcggccgatcggcgccaacatttccggcatccgcaaggatcgcagtgaataccacgtctatcttaccgatgcccagggccgggtcatcttcgattccgccggccgcgcgcaggggcaggattattcgcgctggaatgacgtttatcgaacgctgcgcggccagtacggcgcccgcagcacccgcagcgacccgcaggatgaaaacagttcggtgatgtatgtggccgcgccggtgatagaacaagggcgcattatcggcgtgctcaccgtgggtaaacccaacagcaccatggcgccggtgatcaagcgcagcgaacggcgcattctgtgggccggcgcgttgctgctggggatcgcgctgctgatcggggcggtattcgtctggtggatcaaccggtcgataggccggctggtgcgttatgccgacggggtggcgcagggcgaaaatgcgccattgcccaaagtgggcggccgggaactgacccagctggcgcaggcgctggagagcatgcgcctgaagctggaaggcaaagcctatatcgaacaatatgcgcatgccctgacgcatgagctgaaaagcccgctggcggcgatcaggggcgcggcggagctattgcaggagctgccgccgccggaaaccgcccggcgttttctcaccaatatcgagcagcaaagcgcacgcatccagcaactggtggataaactgctggtgcaggcgcggctggagagccggccagaaatggagactgcgcccatcgcgatcgcggcgttgatcgaccagacggtggcgggtaaagaggcgcaggcgacgcagcgcggcgtcaggttgcggctggaggcgctggcggaggtgacgctgaacggcgatgcgttgctgatcagccaggcgctgaccaacctgctggacaacgcgatcgactttaccccgccgggcggttgcgtcagcgtgcgaggagaacggcgggaacagcattactgcatcagcgtttgcgacgacggcagcggcattcctgactatgcgttcgataaggtgttcgagcgcttttattcgttgccgcgcgccgaacggccaaaaagcagcgggctggggctgaacttcgtgcaggaggtcgcccgtctgcatcatggcggcattcacctgcgcaaccgccggccgcacggggtggaagcgacgttcaggttatcgctgtga

SEQ ID NO: 426000 - DNA, 696 bp, Serratia marcescens
atgaaacccgtactctggttggtggaggatgaacccagcattgccgatacgctggtttacacgctggagagcgaaggcttcgcggtgcgctggttcgaacgcgcggaaccggcgttgcaggcgctggcgcaaggcgcgcccgcgctcgctatcctcgatgtcggtttgccggatatcaacggctttgaattgtgtcgccgcctgctggctcaggcggccgacctgccgattctgtttctcaccgcccgcagtgatgaagtggatcgcctgatcgggctggagatcggcgctgacgactatgtcgccaagccgttctctcctcgcgaggtcagcgcgcgggtgcgcaccattttgcgtcgcctgcacaagcagcagcgcctgcagcagagcgcgccctaccatttcggcgctttcgcgctcgacgaagacgcggccaccatctcctaccatcagcggccgctgccgctgacccgttacgaatacctgctgctgaagacgctgctgttggcgcctggacgggtgttctcgcggcagcaactgatggaaagcgtttgggcgcaggcggaagaaagcctggatcgcaccgtcgatacccacatcaaaacgctgcgcgccaagctgcgtgcggttgaacccggtgaaccgccgatccacacccaccgcggattgggctacagcgtgagccgccagccatga

SEQ ID NO: 426001 - DNA, 423 bp, Serratia marcescens
gtggcccagtggcgatgtgatatccgcatttcctggcgcacccagctgttttcactgttgacccacggcgtgttgatcctgctgatcctgatttcgccctggccggaaggttttggcccgctctggctggtgctgctgacgctggtggtgtttcagtgcattcgcagccagaagcgcatcgccgcggcgcagggcgagctgcggctgctggcggaccggcgcttcagctggcacggccgcgagtggcggctggcgaaaaaaccgtggatgccgggttacggcatgctgctgacgctgctgccgatggagggcaaaaagcgccgccggctgtggctggcttccgactgcatgagcaaagaggagtggcgccacctgcggcagctgttgctgtatccgccggcgggtgacgacgaggatccctga

SEQ ID NO: 426002 - DNA, 267 bp, Serratia marcescens
atggatattaacaacaaagcacgaattcactgggcttgccgccgtggcatgcgcgagctggacatctccatcatgccgttcttcgagtacgaatacgacagcctgaatgacgcggacaaggcgctgtttatccgcctgctggagtgcgacgatcccgatttgttcaactggctgatgaatcatggcgcgccgcaggacggcgagctgcagagaatggtgaccctgatccaaacgcgaaataaagaccgtggcccagtggcgatgtga

SEQ ID NO: 426003 - DNA, 993 bp, Serratia marcescens
atggcgcataacattccattcccaccccgtcagccctccgcttccacccatctgcccctcacgctgatctcgctggaagattgggcgctggtgacgctgaacgggccggacacggtgaaatatctccagggccaggtgacggcggacatcgacgcgctggcggccgatcaacacgtgctgtgcgcccactgcgacgccaagggcaaaatgtggagcaacctgcgtctgttccaccgtagcgaaggcttcgcctatctggaacgccgcagcgtgctggacagccagctggcggaaatcaaaaaatacgcggtgttctccaaagtcaccatcgccgccgataacgacgcggtgctgctgggcgtcgccggtttccaggcgcgcgccgcgctggcggatctgttcgccacgctgccgagcgccgagcacccggtagtgcaggacggcgagaccacgatcctgcacttcaatgcgccagcggaacgttttctgctggtgacccgccccgccgtggccgaacagctgatcggcaaactgcatgaccaggcggaactgaatgacagcagccagtggctggcgctggagatcgaggccggttatccggttatcgacgccgccaacagcgcgcagctgatcccgcaggccaccaacctgcaggcgctggaaggcatcagcttcagcaaaggctgctataccggtcaggagatggtggcgcgcgccaaattccgcggcgccaacaagcgtgcgctctactggctggaaggtaaggcggcccgcgccccgcaggcggcggaagacctggagctgcagctgggtgaaaactggcgccgcaccggcaccgtgctggcgtcgagccaactggccgacggcaggctgtgggtgcaggtggtgatgaacaacgatttggacgccgacagcaagctgcgggtgcgcgaggatgccgccagccagctggcgatcaaaccgctgccgtattcgctggccgaagagaaataa

SEQ ID NO: 426004 - DNA, 498 bp, Serratia marcescens
atgatcgttcgcttatccaaagcgctgctggtctgcgctatcgctttgttcgcttcgctggtggccttcggcaatatcaccgattacggctccaacttcgccttcgtgcgccacgtctttatgatggacaccattttccccgacgctaccatcggctaccgttcgatacaaacgccgtggctgcatcacgccggctatattttcatcattgcgctggagagcctgaccgcgctgctgtgctggatcggcggcctgcgcttgctgtgcggcctgaaactgcccgctaaagctttcaacggcaggaaaaagctggcggtagtggggctgacgctgggcttcctcacctggcaggtcggctttatgtcgattgggggcgagtggtttggcatgtggatgtcgaaacagtggaacggcgtgcccgatgcgtttcgcttcttcgtcaccatcattctggtgctgatttatctggtgcagcgcgacggggagttggacgagtaa

SEQ ID NO: 426005 - DNA, 675 bp, Serratia marcescens
atggggaaaacggacgtagtgaaagccgggaacaataagattgtcgcctcggcttatccgtgggcggaagagatcgccaacagcatcagccacggcatcgggctggtgttcggtatcgtcggcctggtgttgctgctggtgcaggcggtgaataccggcgccgatgcgacggccatcaccagttacagcctgtacggcggcagcatgatcctgctgtttctcgcttccacgctgtaccatgcgatcccgcatcagaaggccaagcattggctgaaaaaatttgaccactgcgccatttatctcctgattgccgggacttacaccccgtttctgctggtagggctggattcgccgttggcgaagggcctgatggcggtaatctggggattggcgctgctgggcgtgctgttcaagctggccttcgcccaccgctttgaagccctgtcgctggtaacctacctgacgatgggctggctgtcgctgatcgtgatttatcagctggttacgcggctggaggccggcggcgtcacgctgctggcgatcggcggggtggtctataccctcggcgtgattttctacgcctccaagcgcattcgctttggccacgccatctggcacgccttcgtgctcggcggcagcgcctgccatttcatggcgatctacctctacgtctaa

SEQ ID NO: 426006 - DNA, 609 bp, Serratia marcescens
atgtcatccgctgtacccgcgttagatttcggctcaatgacccaggtcatccagttcctgatggaaatcgataagttgaaaggcgtgcaacgccgcaccaaagtgctgggcacccagcgccaggaaaactccgccgaacacagttggcacttcgccatcgccgccatgagcctggcgccctacgccggtgatgacgtagacattcagcgcgtgatccagatggcgctgctgcatgacattgtggaaatcgacgccggcgacgtgctggtctacgatctggcggcccgcgcggcgatccacgatcaggaagtggcagcggcgcgccgcctgttcggcatgttgccggaggctcagcgcgagtatttcaccgctttatggcaggaatatgaagatggcgaaagcgccgatgcacgcttcgccttgctgctggatcgcaccatgccgatgctgatgaacctgcacaatgaaggccagagctgggtagagaacggcatcagcctggagcaggtgctggcgcgcaatgcatcgatcgccgacgtgcaccccgagctgtggcaccacatggagcaacacctgcgggatgcgcagcgcaaaggctggttgaagtaa

SEQ ID NO: 426007 - DNA, 1854 bp, Serratia marcescens
atgctgaatgacattacgttgaacgtcatgaaatcaggcactgtcgacattagtcaattgaatgggtggcatacccttaccattgacggtactgagaatattttgctgaagttgttcacgcaagcgctcaataatattaatatattcctgaaaaacccgaatgtcaccttggcaaaccctattactgggaacaatcaaaacgttatcatcacggcagatgcggatatggcgcatgccaccggtgagcttcgattcaattttgcaaaaaatatcaatgtacagtggcaaggcaatagcatcaatgacggcgccaatagcgttagcaatactttcaaaattaaggggtatgaccaaggttcggtattaacggctaacctcatcaccaagaatgtgtatctcaccacaggtagcgatggtacgctttccggcacgattgccaccaatgtaggtaactttacgcttttcccccagatcgatttggcgggctatcgcggtacgggttctatctaccttgacggacaattagtcggcaacgagggcaggcacgtatttgatatcggcctcttggccgatccctctatcgctaacatacacaacaaggattataagcatatcaccgacctgaaagcccccgagctttgggatcctgcgtggggaatgccaaacggttttacgggttcatacggttttgcgctgtctggctttgccgataacgttacggtgattaatgtgccggtagattcatttatggatgccccttttagccaacgcgctctggaaatcaccggtaatgccggtgaaaacagccatattaccttcgagtacgcccctgattaccgttataaaaatttttcacccgtgatgacaattagttttgatgcgaaaaatatagttcacgctgatgccggcactttatcgttcaaaaccaatacggtctatattgactctggcattccagaggtcagagagtttttggaaatatcatccaagggagatgcggaaaacaccctacgccttgagggccatgacaaccatatcagtgaaattaacattaccggtgataaggcgcttaacctcaccatcaaaaacaatttcagcgaagaattgaaatccatcaccagtcacatggctaatagcacaccactgcatttgaccatggaacaagggggaaccggcggcgggcagttctatcagctgctaaaacaattagacggactgacgggatacgatgccatcatgtcccaattggccggttaccaactgtcgatcgccaacgatgcccctacgaccagcggcatccaggctaatcatatctacaacgtaatgggcaatacgagtctggcaaccggcaaaggcgctgatacggtggtattcaaccacagtaccattgataacatggtcacctttaacgattacgaaaacagcagtacgcaaaatgcatcatgggttgaaggcgacaacattgccgtcggtgatatcgaccggcagtggctcttttccgcgggtggcagcaagactatcgatctcgtcggcagcttatccctgaatgagctgacagtgctactctccggaatgaatgtccagacgaatacgactccgcaacaattgttcattgaactggtatctacagtcactcaaggccacagtcagagtgcattgagcgaagtcagcgccttatcgttgaatggattctattttgtgatggtggataagaatctgaatcacagtttagacaacgatgacattatttttggtctcacaaacgacaatgccttcaacatggcccattacgattcacccgttctggaaattaatggcattggcagttttacccatgatgccgtcgctgcatag

SEQ ID NO: 426008 - DNA, 927 bp, Serratia marcescens
atgaaaggcaaagtctgcgtgttcggttcgttcaacctggatatcgtcgccggcatggcgcgctttccgcagcctggcgaatcgctgatcgcccgcaacagcatgatgggggcgggcggtaagggggccaaccaggccaccgccgcgctgcgcgccggggcgcgggtgcattatatcggcaaggtggggcgcgacgacttcggcacctttgcccggcgccatctcgccgccgccggtttcgatgcggtgacgctgttctcgaccggcgattgcccgaccggcaatgcgcttatctatgttgccggcgaggaggcggagaacatgatcgccgtcgatcccggcgccaacctgacggtcagcgaaaatgaggtgcgccagtgccggccggcgatcgccgcggcggacattctgttgacccagctggagaacaatctgccggcgattgagcaggtgatcgccatcgcccgcgaggcgcagacgttcatcattctcaacccggcgccgtttcagccggtgccggacagcctgttggcgcaggttgatatgctgacgcccaacgccaccgagtgtacgttgctgaccggcgtgccggtgcgggatgcggcttcggcgcgccaggcggcgcaggtgctgcacgccaagggcattcgcttgctgatcgtgaccctggggacgcagggagcgttgttctcggacggggaaaacagcgagctgatcccggcgtttccggcgcagccgaaagacaccaccggcgcgggcgatgcgtttaacggcgccctggcggcgcagctggcgaatcaggtgccgttagccgatgcggtgcgcttcgccgccgcctacgcggcggtctgcgtggagcgcgccggggcggcgggatcgatgccgagctatgaggaggcgttggaacgccaacgggcgttcgcgtga

SEQ ID NO: 426009 - DNA, 909 bp, Serratia marcescens
atgatgcggcattttcttggcgtagacgtcggcggcaccaacacccgcctgctgttgatggatgatgacggcgagttcagcggttaccgcaagatagcgaccgccgattgggcacggcaggccgatccgctggcggcgttgggccgcctgatcgccgggcattgccaggatcgtcaggtggcgcaggtgatgctcgggctgccggggatcctcagccgcgatcgctcgcgggtgctgtcgctgccgttcattccggcgctggatgcccagccggtggcggcgctgttggccgatttgctggcgctgccggtgcggatggataaagacgtcaatcacctgctgtggtgggacttgcagcagctgccggcgctgccgcaggtggcggtggggttgtatttgggcaccggcatgggcaatagcctgtggctgaacggcaatttttaccacggggcgcacggcgccgccggcgagctggggcacattccctggccgggccatcagggcgagtgcccgtgcggtaaacggggctgcgtcgagagcctgacctccggtcactggctgaccggctgggcgcgcgccaacgcggcgcaaacgccgttcgaacggctgttcgaacgccacggcgaacatccggatctgcggcgcttcgtcgaacgattggcgcagaccatcgccatcgaaatgaacgtgctcgatccagagcggctgatcctgggcggcggcgtgatcgccatgagcggtttcccgttggcgcagctggagcaagagatccgccgccatctgcgcgagccgcagccggcgcaggggctggcgatctctatcagccgccttagcgatgagaccggcagcaaaggcgcctgcctggccgcccggcgccatttccaattgagcagggagtacccgcaatga

SEQ ID NO: 426010 - DNA, 672 bp, Serratia marcescens
atgaaataccagatttcaccttcactgatgtgcatgaacctgatggatatccggcagcaattggcggtgctgaactgccgcgccgatatgctgcatatcgacatcatggacgggcactacgttaaaaacatcacgctgtcgccgttctttatcgaacagatccgcccgcacacctcgttgctgctggacgtgcatctgatggtggagaacccgaccgattttatcgacccgatcgcccgcgccggcgcggactttatctgcccgcacgctgaaaccatcaaccgcgacgcgttccgggtgatcaaccagatccgcgcgctgggcaaaaaagtgggtgtggtgctgaacccggctacgccggtggagtttatccgccactaccttcatctgctggacaaggttacggtgatgaccgtcgatccgggctatgccgggcagccgttcattcccgaaatgctggaaaagatccgccagttgcgcgatctgaaacgccaacaaaacctgagctatctgatcgagatcgacggatcctgcaatcagcgcacctaccgcgatctgatgggcgccggcgcggaagtgttgatcgtcggcagctccgggctgttcaacctcgatccggatctggagacggcatgggaaaaaatgctggatcagatgcggcaggcggcctga

SEQ ID NO: 426011 - DNA, 1035 bp, Serratia marcescens
atgggcaactacctgaaatttcgtccggacggcaccgccgtcggcctgttggcgctgctggtggcggtggtgctggccttcagcctgctgatgccggggcgcttcttcagcggcgccaccttcaccagcgtggcgttccagctgccggagctgggcctgctgacgctggcgatgttcatcccgatcctcagcggcggcctgaacctgtgcattatcgccagcgccaacctgaccagcctgctgatggcctggctgttcatcagctatctgccgccggacgccggattgggattgcaggcgctgtggctggtgttggcgctggcggcggcgatgctgctggccgtgacgatcggcgcggcgaccggcgcgctggtggcctacgtcggcgcgcatccgattctggtgacgctggcgaccatgactacggtcaacggcatcggcatctacctgacgcgcggcgcggccctgagcggcatgccggagatcgtgcggtttatcggcgccgagcgcgtgctgggcgtaccggtaccgctcctgatcttcctggcggtcgccgtgctgctggcgctgttcttgcagaaaacccggctcggcaaatgcatctacatgagcggcagcaacatcaacgccacccacttcagcggcgtgaatacccatcgggtgctgatcgccatttacaccctctccagcctgctgtgcgtcattgccgggctggtgatgatggcgcgcttcaactcggcgcgcatgggctacggcgactcttacctgctgctgacggtgctggcgatcattctgggcggcaccgatccgttcggcggttttggccgggtcagcggcgtggtgctggcgctgatcgtgctgcaggtgatcgccaccggtttgaacctgatgaacgtcagcccgcacttcagtctggcgatgtggggcgcggtgctgattgcggtgctggcgctgaagtttttccgccatcgctatcggcagcggcgggcgatgcgccgcagcgcggcccaggccagagccgcggcaggccactga

SEQ ID NO: 426012 - DNA, 987 bp, Serratia marcescens
atgcgtagattcagcctgaaaccgcgcggcaacgaaggctacctggcctgggtgctgctgctgacggtcatcgtcttttcgctgctcagcgagcagtttttaacggtgcaaaacctgctcgatctctgcgaaagctatgcggtgagcggcatctttgccctcggcctgttcgtggtgctggtgaccggcggcatcgatatctccttcgctgcggtggcctcggttgtgcagtacctgatcgccacgctggcgacccattacggcctggccagcccggcgggcagcattctgctagcgttggcgatcggcgccgcgctgggcatggttaacgcgctgctgatctactgcctgcgcatcgtttcgatcatcgtcaccatcagtatgcaggcgttgttgttcggcatgctgatgtggctgaccaacggccgcagtctgtacgcgctgccggactggtggacgctgccgcgcagcgtgctgccgttccagttgggtgaacagagctatcagctcggtttgccgacgctggtgatgctggcggtggcgctgctgacctggctgctgctgaacaagacgcacctcgggcgccagctgtttgccgtcggcggcgatgcggaatcggcgcggcgcatcggcattcgcgtcggcctgctgcacctgttcgcctacggctatctgggcgtgatggcggcgatcggcggcctggtgcaggtgtaccgcatgggggaggtggtgcccaatgcgctggtgggcggcgagctcgacgtactggcggcggcggtgctgggcggcgccagtctgaacggcggcaagggcagcgtgatcggcacgctgatgggcgtattcctgatcggcgtgctgaaaaacggcctcaacctgatcggcgtgtccagctacttcatgaacgtggtgatcggcctggtgatcgtcgcggcgatcaccgtcactcactacaagaaacgcaaagaaaccgacgtcggtttcgcctga

SEQ ID NO: 426013 - DNA, 1518 bp, Serratia marcescens
atggcgatttccggcaatacggcaacccagggcgcgccgctgatcgcgctgcaacagctgtcgatgacctttggcgggcagcgtgcgctgaacgctatctcgctggcgctgatgccgggggaagtgcactgcctggccggcaccaacggctgcggcaagagtacgttgatcaaggcgatcgccggcgtgtatcaaccggacgacggcagccgcatcaccatcgacgggcaaaccttcggccggctgtcgccggatcaggcgcgcgccttcggcattcaggtgatctaccaggatctgtcgctgtttcccaacctgacggtggcggaaaacatcgccttcgagcacaacctgcatgggctgctgggatggtaccgcccggcacggctgcggcgcaccgccgagcgcctgctgcaagagctgagtttccatctggatctcgacaaacgggtggcggagctgccgatcgcccagcggcagcaggtggcgatctgccgcgcgctggtggcggaggcgcggctagtgatcatggatgaaccgaccgcctcgctgacccgcaccgaggtcaatcagctgctgcgcacggtggattacctgaaagcgaaaggcatctgcgtggtgttcgtcagccaccggctggacgaggtgctggagatttcggatcgcgtcacggtgatccgcgatggcaacaagatcgggacctggccggcggcggagatcaccggcgatcgtctgaccgagctgatgaccggtctgaagctggactatcgcctgaagtcacccagcatgaataaggatcgggtgctgctggaggcggatcgcctcagccgcgccgggcaatatcaggacgtgagcttccggctgcatcagggcgaggtgctcggtctatgcgggctgctcggctccgggcgcaccgagctggcgctgagcctgttcggcatgacccggccggacagcggcaagctctacctcgacagcaaaccggtgcgctttcgcggccatgaggacgcgatcaaggccggcatcggctacgtctcggaggatcgcctgacgctcggcctggtgcagcaacagtcggtggcggacaacgcggtgctgaccattcttgataagctgcgcgggcgttttcgcctgattgacgactaccgcaagaatcgcatcgtcgcggagtggatcgccaaactcggcgtgcgggtggcggatccggagcaggcggtttcgacgctgtccggcggcaatcagcaaaagatcgtgttggccaagtgggtgctgacccagccgcggatcctgatcctcgactcgccgaccgtcggcgtcgacgtcggcgccaaggccagcatctaccaactgatccatctgctggcgcaggaggggatcgccattttgctgatctccgacgaagtgccggaggtgtattacaactgcgatcgggtgctgcacttcagcggcggcagcgtgatcggcgagtacctgccggggcaggtgagtcagcaacagctggcggaggcggtcaatgcgtag

SEQ ID NO: 426014 - DNA, 984 bp, Serratia marcescens
atgaaaaaatccgtactggtcggtctgtttgcctcgctgctgctgtcgctatccgcgcaggcggcggacaagctgaaaatgggcgtggtggtgaagatcggcggcattccgtggttcaacgccatggaggccggcatcaaaagcgaaggcgccaaacgcggcatcgacgcctggatggtcgggccgacggcggcggatccggcgctgcaggtgcgcgccatcgaagatctgatcgcgcagaaggtggacatcattggcgtggtgccgaacgacgcccgggtgctggagccggtgctcaagcgcgcgcaggaggcgggcatcaaggtgatcgtacacgaatcccccggccagaagtacgccgactgggactttgagctggtggacgcctcgcagcacggggtcaaccacatgaaagcgctggccgcctgcatgaaagagcagggcaagtacgcggtgtacgtcggcagcctgacggtgccgctgcacatcacctggtcggactcggccatcaactaccagaagcagcactacccgaacatgcagctggtgggcgacaagttcggcgtgggggaatcgctggatgacagcgtgcgcaccaccaacgatctgatggccaaatatcccgatctgaaaggcgtgctggcgttcggatcgcaggggccgatcggcgccgggcgcgcggtgctcaaccgcggcaaaagcaacgatatctgcgtcatcgggccgttcagcccgggccagggcgcttcgctggtcaaccgtggcgccatcaagggtggctatatctggaatccgctggtggcgggcgaagtgttcgtgcgcatcgccgacatgatgcacaagggagaaaagatcaccgacggcatgaccatcgaaggcatgggcaaggtgcaggtggatgcacagcagcacaccattctcggcaacgccaccgaaagtctggataagcaaaacctgccgaagctggtgaagatggggctgtaa

SEQ ID NO: 426015 - DNA, 819 bp, Serratia marcescens
atgctgcctgtagaacgtcatcgttttatcaccgaagtcttgagccagcgcggccgcgtgatggtgcaggaggtggcgcagctgtgccacatctctatcgagacggcgcggcgtgatctggccttgctggaacggcgcggcctgctgctgcgcagccacggcggcgcggtattcgtcgagccgccggcggtggagaaaacctatgtgcccgccgagatagaccagggggaatctttccgccagcgcagcaacgaggcgccggagcagaagacgcgcatcgccaaacgcgcgctggagtttatcgcgccgggggattgcctgctgctggacagcagctccaccagctggtttttggcgcgccaactgccggatatctcgctggtggtgttgaccaactcgctgcacatcatccagacgctggcctgcaaggccaacgtgcgcaccatcggactggggggcgagtattccgccaagtatgaggattttatcggcgtgctggcggagcagatgctgaaagagttcgtgatcaacaagctgtttttctcctgccacggcatctgccaggacggcggcatccgcgaaagcaacgagcaccatgcgcggctgaagcagcagatgctgctggcgtcggaacgcaagttcctgctggtggacagcaataagttcggccgccgctcgttcgcgcgcatctgccactaccgggagatagataccttaatcaccgatcggctcagcgacgacgaatttcgtcaggaactggcctggaacaacgtcgacgtgattgaagtttcacccgccgcgaaaagggcggcgcgataa

SEQ ID NO: 426016 - DNA, 1326 bp, Serratia marcescens
atgaacgcatacaccactgaaacggcacaggctgccgtgcctgccgcagaaagtgccgccgcaccgcccaataccggcaagttggcggcggccagctcgatcggcacggcgttggaatggtacgatttcaccgtctacaacatcatggccgcgttgattttcaaccatgtattcttcccatcgttcgatccgctggtgggcacgattctggcgttctccacttacgcggtgggttatgtttcccggccgatcggtggcatcgtgttcggccaccttggcgatgtgttggggcggcgctttgtactggtcaccacgctggtgatcatgggcgtgaccacggcgctgatgggattgttgcccggctatgccagctgggggatttggagcccgttgctgctggtgacgctgcgctttattcagggcattgcgctgggcggagaatgggcgggggcggtgctgttgtcgatggaacacggtaagccgcatcagcgcgggcgcaacgcgtcctttgctcaggtagggccgtcctgcggttcgctgatcggcaccggcctgattacgctggtgacgttggcgatgtcggcggacgatttccagcaatggggctggcggatcccgttcctgctgagcctggtgctggtcatcttcggtttgtggctgcgtcggggggtgggtgagacgccggcatttttgcaactggaggcgtcgaaagatgttacgcagtcgccgatccgcgaagtcttcacgcagcacatgcgcccactgctgatcgccggcggatcgcgtatcggctctgacgtgctctatgcgttggtggtcgtgttcacattgacctacgtcaccaccgtgctgaatctgccgcgcccgctggcgctgggcgccaccatgctgggggcgataggtaacgccgtcgcggtaccgctgtttggcgcattgtcggatcgcttcggccgtcgtccggtgtatatcggcggtgcattggcggcgatagcgtgggcgtttgcgttcttcgtcctgctcgacagcagtcaaccggtgttgatctgcatggcagtggtgatcgggctgttgatccatgcggcgatgtatgggccacaggcggccttcatcacggaacagttcccgacacgggtgcgttatgccggatcgtcgttagcctataccttggcggggattatcggtggcggctttgccccgctgatcatcacttcgttgtttaaatcttacgacagcacgctggcgatttccgcctatgtcgcgttggctctgcttatcacgctttgggcggtatgggcggcgcgggaaacggcgcataagccgctgtaa

SEQ ID NO: 426017 - DNA, 654 bp, Serratia marcescens
atgaacgattccccgaacggaatgctgtttgtcgcgacggatgtcgccacgcaggatgatgcggatttcaatcgctggtatgaccgcgaacacgtggaggagcgggtgcgggtgcccggctttttatccggcacacgctatcgggcattgcagggcgggcgtcaatatttggggctgtataaaaccgaatcgttggccagttttacctccgaagcctatcgcgccgcgtttcaacaccaaacgccttggtcggtggccagcctggagaaaatgcgcgatccaatgcgccgggtgtgtgcggtggaggcggtcaccggccaagggtgcggcagtcatctctgtatcttcgtgctgccgtcggcggcatcggaagcgctgcatgcccgcatcttgcaactgggcgcacggctggctgaacagcctggctttgtgcgcagcagcctgttgacgccggatgccgaactcagttccccgctgccgaaagaatcgcgagaaaaccgccgaatgctgccgatgctattgatcgaaagcagcgacgccgaagccggcctgcgtttaagcgagcaggccgctgaagcgctgaacatgcccgccgccgatgcctggcactatgcccttggctggcaactgaccgcacaggagctgacatcatga

SEQ ID NO: 426018 - DNA, 1347 bp, Serratia marcescens
atgaaaaagctgacgttgatgcaggccagcgccggcctggctagcggggagttcaccgcagcgcagctgaccgccgccgctttggcgcagatcgccgatgagcggggggagggcgcgcgcgcgtttacgcgaacctacgccgagtgggcgcaacggcaagcgcaggcctccgatcggcggcgcgccgccggctcgccgctgtcggcgctggatggcgtgcctgtctcaatcaaggatctgtttgacgtggccggtgaggtgaccacggcgggctcgcgcgtgttagccgacgcgccgcccgcagaaaagcacgctgcggtagtggaacggctgttgcaagccggcgcggtggtggtgggcaaaacgacgatgacggaattcgcctattccgggctgggcatcaacccgcattacgggacgccggccaacccctgggagcgccaggcggcacgcattcccggcggctcctcttccggtgcggcggtggcggtggccgacggcatgtgcctgggcgcgattggcagcgataccggcgggtcggtacgcatacccgccgcgctgtgcggattgaccggttataaacccactgcacggcgcatcaatgacgctggcttattgccgctgtcgccttcgctggattcgatcggcgtaattgctcatgacgtcgccagctgtattgcgctggacgcactgattgccgacagcccgctgcgggtgccgcaaaaaagcttggcgcaggcgcattttgccgtgccgcaaacggtggtgctggatgaactgcagccggcggttgccgaggcattccagcgcagcctgcaatgcctgtcccaggcgggggcgcagattgaattcattcccgctacggcgttcgccgaactggccgcgatcaatgccaacggtggtttcaccgcgctggagtcctggcgctggcatcaagcgttgatcgctgaacgggccgagggctatgacccgcgggtgctgtcgcgcattcgccgcggtgcatccttgggcgacgccgatctgcagctgttgcagcggcaacgcgccgactggcagcggcggattacggcggagctgcagaggtttgacgctctgctgatgccgaccgtgccgatgattgcgccaactatcggcgagctggcggcggatgatgcctacttccgttgcaacggactgatgctgcgcaatcccgcgatcgtcaatttcctcgacggctgcgcgctgtccttgccctgccagcggccaggcgccgcgccgatcggcctgatgctggcgggcttgccgatgtgtgatgaggcgctgctgggatgggcgctggcgatcgaacgccgtcttgccgaggcgtga

SEQ ID NO: 426019 - DNA, 714 bp, Serratia marcescens
atgagactaaccttcactttacctgaatcccgcggcgcggcgacgttgaatgttgagattgatcatctggtgatcgccggttggaccgggcgcgatcgcgaagcgatcttgcaccatattcgtgaattggccgaactgggcgtgccccagcccagtgcaatccccctgttttaccgcgttgccgccaatcagttgagccagcaagagaccattgaagtcattggcaacgcgacgtccggcgaagcggaaccgctgatttttgcccatcgcggcgaactgttcgtgtcattggcgtccgatcacaccgatcgtcaactcgaagcgcacagcgtggcgctgtcgaaacagatttgcgttaaaccggtggcgcgagccgcctggccgctgcaggaggtgctggaacattgggacagtttgatcttgcgttcgtggatcaaggaagagggcgaatggcgattgtatcaacagggcagccttgccgcactgcgtacgcccggtgatttgctggagcgttacttcaccggtatgcagccgccggagtgcgggctggcgcaaccgcaaacgcccaacgggttggcgatgacttgcggcacggtggcggcgatcggcggcattcgaccggccggcgagtttcgcatggaactggtggacgatgtgcttgggcgcaccatcagtcacggttatcgcagcattgaactgccggtggtggcgtga

SEQ ID NO: 426020 - DNA, 681 bp, Serratia marcescens
gtgaagactgttgatgcagaaagcccgcagcgcccgatgatggaagaagccggcgtctcactgaacgagctggcctaccggcgcttcaaacaggcgctggtcacactcagctacaagccgggcgaatatctcaataccgcgcaggtgatgaacgatctggatatgggcagaacgccgatcaatcaggcaatccaccgcttggccaacgaggggttactgcaggtcatcccgcgcaaaggcgtgatggtttcaccgttgtcgatggacgatgcgttggaattgatcgaagtaaggctggctaacgagatgctgtgcatgcagctggcgagccagaggattaccgagaggcaaatcgcgacgctgaccgaactcaatcggcaaatcgaagccgcgagccaggagcgagatagagtgcgaatgatgacactcgatcatgagtttcaccaggagctggcgcagatcgccggcaataacatgctggcggatatcctgagtgtgctgcacgccagggcgcagcgtttttgggccagcaccctgtcgcgggaagggcatatgcgcgaagtgatcgacgaacaccgggcaattatcgccgcactggccgcacaagacagcgccgccgccgccgaggccgcgcaggcgcatatcttgtcattccgcagcgcgctgctgcacgacgggtaa

SEQ ID NO: 426021 - DNA, 318 bp, Serratia marcescens
atgaagcgcaaaaattccgccaaaaatctggcgcatagcgtactccctccgttgacggaggagcagaaagcgcaaattgcttcactgagcgcgctgccggatgaggatatcgattataccgatgccccggccctgggtgaggagaagtggcaggctgcggttcaggggcgtttttataaaccgatgaaagtatcgaaaaccatccgaatcgatgcggatgtgttggcctggcttcagcggccaggcaagggctatcagaaacgcctgaacgctgtgctgcgtgaggcgatgttgaaagagcatgagcacgaggaataa

SEQ ID NO: 426022 - DNA, 324 bp, Serratia marcescens
atgtatgtttattttgaatggaatcaggataaaaatcacagtaaccagcgtaaacaccgcgtcagttttgagattgcgcaacgggtttttctggatcccaaccatttggccgtgctggaaaggattgaggatggagaagaacgctggcaaacgatcggtatggtcggctcctgtttgttgctgctggtggcacatacgacgaccgaaacggatgtcgaaggcgatgccgtagagatcgtgcgcatcatttcagcacgcaaggccgatgccaaagagaggggaagatatgaagcgcaaaaattccgccaaaaatctggcgcatag

SEQ ID NO: 426023 - DNA, 747 bp, Serratia marcescens
atggcgaaagtggcattggtgaccggcgcgagccgggggattggccgtgcggccgcgttgttgctggcccggcagggttatgcggttggcgtgaattacctgcgtgacgaaagcgcggcgcggcaggtggtggcggaaatcgaggcgcagggcggcaaggcgctggcgttgcaggccgacgtggccgatgaagcgcaggtgatggcgatgttcgccgcgctggacgcccggttgggcacgctcagtgcgttggtcaacaatgccggcattctgttccggcaggcgaacattgagcagttgaccgccgagcgcatcaatcaggtgctgagcactaacgttaccggttacttcttgtgttgccgcgaggcggtgaagcgcatggcgctgcgccatggcgggcagggcggcgctatcgtcaacgtttcctccgcggcgtcccggttgggggctgccggggaatacgtcgattacgccgcctcgaaaggcgccgtcgataccctgaccatcgggctagcgcgcgaggtggcggcgcagggcatccgcgtcaacggcgtgcggcccggattcatctataccgagatgcatgccagcggcggcgagcccggccgggtggatcgcgtgaaggacagtttaccgatgcagcgcggcgggcagccgcaggaagtggcggaggcgatcgcctggctgctgtctgacgccgcgtcttacgtgaccggcacttttatcgaggccgcaggcgggcgttga

SEQ ID NO: 426024 - DNA, 531 bp, Serratia marcescens
atgagcgcccctgtcctgctgcaacggcagcaactcgaccgactatgggatattgaccgcagcgaaattatcgacaccctgtatcgcctgcaggacggtaaactgcaagcctacccggactactacgacgtgcgcggttgggatccgcacgaccgggaaacctatacgccgatccatgaagcctgcttcgatcgcggcggcgcgttcttcgcgcggttcgaaggcgaggagatcgtggcggcggcggcgctggataccgagccgcgcggcccgcagcgggatctgcgccagctgctgttcttttacgtcagcgcgcaccaacgcggccaggggttaggcaagcagctgttccagctctgcctgcgtcaggcggcgcaagaaggcgccgccgggctgtacgtctcttccatccccaacaaaagcaccgtagacttctatctggcgcaagggtgccggctcatcgagcgcccggatgccgagctgttcgcccgcgagccggaggatattcacctggtctgcccttgccgctag

SEQ ID NO: 426025 - DNA, 966 bp, Serratia marcescens
atgcaagcggcaatcgtaacagcgctggggcaagccccggttttcggcacctttgaggagcctcaggcgcaggcgaatgaagtgccgatcgacgttctggcggccggcatcaaacagctggatcgcgccaccgtcgccggcacccattactccagcccgaagcagttgccgatcgtacccggcaccgacggcgtgggccggacggccgacgggcaacgggtgtatttcgcctccttccgccgcccttacggcgcgatggctgagcgcagcgtcgcgtcatggacggtgccggtgccggaggcggtggacgacgccacggcggcggcgctgatcaatccggccttcgccgcctggctgccgctgcgatggcgggcggatctgcagcccggtgaaacggtgctgatcatcggcgctaccggcacttcgggaaaactggcggtcgccgcggcgcgtcaggcgggagccgggcgcatcgttgccgccggccgtcggctgagcgtgctggaagcgttgggcgtggatgccacggtggatctgagcctgcagggcgaggcgctgacgcaggccttcgcggcggcggcggggccgggcggttatcaggtgatcgtcgattatatctggggcccggcgaccgaagcgctgctcgcgacgctcaataatcacgatctctcgtcttacgccggcgggcgcggcattcgcctggtcaacgtcggctcgatggccgcgccggacatccggctgccggcggcggtgctgcgcagcaatcagctgcagatcctcggcagcggcaccggcaacttcccgccgatcccggagatgcagcgctacgcgaccgaaattctggcgctggcggtaacgggcgcactcactatcgagacgcaggagcacgcgctggcggagatcgccgaggtatgggatctgaacaagaaaagcgacgtgcgttcggtgatacgcatcgcccgctaa

SEQ ID NO: 426026 - DNA, 2880 bp, Serratia marcescens
atgacccagacactcagccaactcgaacacagcgaagcgttcatcgaacgccacatcggctcttctgcggaacaacgccaggagttgctggcagcggtgggcgctcgctcgctcagcgcgctgatccaacagatcgtgccggcggacattcagctgccggggccgccgccggtcggcgacgcggcgaccgaacaccaggcgctggctgagctgaaggcgatcgcctcgcagaatcagcgctacaaatcctatatcggcatgggctacagcgccgtgctgacgccgccggtgatcctgcgcaacatgctggaaaatccgggctggtacaccgcttacaccccttatcagccggaagtgtcgcagggccgtctggaagcgctgctgaactttcagaccgtgaccctcgatctgaccggcctggatctggcttccgcttcgctgctggatgaagctaccgccgccgccgaagcgatggccttggccaaacgcgccagcaagctgaaagacgccaaccgcttcttcgtggctgacgacgtgcatccgcagacgctggacgtggtgcgcacccgcgccgaaaccttcggcttcgacgtcatcgtcgataaagcggaaaaagtgctggagctggacggcgtgttcggcgtgctgctgcaacaggtgggcaccaccggcgagctgcacgactacagcgcgctgctggccgaactgaaatcgcgcaaaatcatcaccagcgtggccgccgacatcatggccctggtgctgctgaccgcgccgggcaagcagggcgccgacgtggtgttcggctccgcgcagcgcttcggcgtgccgatgggctacggcggcccgcacgccgccttcttcgcctgccgcgacgagttcaagcgctcgatgccgggccgcatcatcggcgtttcccgcgatgccgccggcaacaccgcgctgcgcatggcgatgcagacccgcgagcagcatatccgccgcgaaaaggccaactcgaatatctgtacctcgcaggtgctgctggccaacatcgccagcctgtacgcggtgtaccatggcccacaggggctgcagcgcatcgccgggcgtatccatcgcctgaccgacattctggccgccgggctgcagaaggccggcctgacgctgcgtcacaacacctggttcgacaccctgaccgttgaagtgaaagacaaagcggcggtgctggaacgcgcgctgagcttcggcatcaacctgcgtaccgatatccacggcgccgtaggcatcacgctggacgaagccacctcgcgcgaagacgtgcaaacgctgttcgcactgctggccggcgacaaccacggcctggacatcgacgcgctggacgcggcggtgagcaagagcagtcaatcgatcccggccgccatgttgcgccaggatccgatcctgacccacccggtattcaaccgctatcacagcgaaaccgagatgatgcgctatatgcatcgcctggagcgcaaggatctggcgctgaaccaggcgatgatcccgctgggctcttgcaccatgaaattgaacgccgcggcggaaatgatcccgatcacctggcctgaattctccgagctgcacccgttctgcccgccggagcaggctgccggctaccagcagatgatcggccaactgtctcagtggctggtgcaactgaccggctatgacgcggtgtgcatgcagccgaactccggcgcgcagggcgaatacgccggcctgctggcaatccgccgctaccacgaaagccgcaacgaagcgggccgtcacgtctgcctgatcccgagctccgcgcacggcaccaacccggcctccgcccagatggcgggcatgagcgtggtggtggtcgcctgcgacaagaacggcaacatcgatctgcacgatctgcgcgtcaaggcggagcaggcgggcgaagagctctcttgcatcatggtgacctacccgtcgacccacggcgtgtatgaagaaaccatccgcgaagtgtgccagatcgtgcatcagttcggcggccaggtgtatctggacggcgccaacatgaacgcccaggtgggcatcaccacgccaggctacatcggcgcggacgtttcgcacctcaacctgcataaaaccttctgcatcccacacggcggcggcggcccgggcatgggcccgatcggcgtgaaagcgcacctggcgccgttcgtgccgggccacagcgtggtgcagatcgacggcgtaaccacccagcagggcgcggtctccgcggcgccgttcggcagcgcctccatcctgcctatcagctggatgtacatccgcatgatgggcgcggaaggcctgaagcaggccagccagatggcgatcctgaacgccaactacatcgctacccgcctgaaagacgcctatccgattctgtataccggccgcgatcatcgcgtggcgcacgaatgtatcctcgatattcgtccgctgaaggaagagaccggcatcagcgaaatggacatcgccaagcgcctgatcgacttcggcttccacgcgccgaccatgtcgttcccggtggcgggcacgctgatggtcgagccgaccgagtcggaaagcaaagtggagctggatcgctttatcgatgcgatgctggcgatccgcagcgagatcgaccgcgtcgccaaaggcgaatggccgctggaagacaacccgctggtgaatgcgccgcacgtgcaggctgagctggttaacgactggcaacatccgtacagccgtgagctggcggtgttcccggtggccggcgtgcgcgagaacaagtactggccgagcgttaagcgtctggatgacgtgtacggcgaccgtaacctgttctgctcttgcgtgccgatgagcgactacgaataa

SEQ ID NO: 426027 - DNA, 387 bp, Serratia marcescens
atgagcaatgtgccaacagaattgaaatacgcatcctcccacgagtgggttcgttcagaaggtaacggcgtttacaccgtaggcatcaccgaacacgcgcaggaactgctgggcgatatggtgtttgtcgatctgccggaagtgggccgccgcgtcgccgccggtgaagattgcgccgtggcggagtccgtcaaggcggcgtcggacatttacgcgccaatcagcggcgaaatcgtggcggtgaacggcgagctggaaagctccccggaactggtcaacagcgaaccttacggtgacggcttcctgttccagattaaagccgccgacgaaggcgagctggcgaacctgctggacgccgcggcttatcaggcctcgatcgacgagtaa

SEQ ID NO: 426028 - DNA, 1098 bp, Serratia marcescens
atggcaaagcaaaccccactgtacgaccagcacgtggcgtgcggtgcgcgcatggtagactttcacggctggatgatgccgctgcactacggctcgcagcttgatgagcaccacgcggtgcgtcaggatgccggcatgttcgacgtgtcccacatgaccattgtggatctgcacggcgcccgcacccgcgagttcctgcgctacctgctggcgaacgacgtcgccaaactgacccaacccggcaaagcgctgtacaccggcatgctgaatgcctccggcggcgtgatcgacgacctgatcgtttatttcctcactgaagactatttccgcctggtggtgaactccgccacccgcgacaaagacctggcctggatcgaagagcacgccgcgccgtatggcgttgcgctgacggtgcgcgacgatctggcgctgatcgcggtgcagggcccgcaagccaaagagcgcgccggcacgctgttcaccccggaacaaaaaagtgcggtcgaaggcatgaagccgttcttcggcgtgcaggccggcgagctgttcatcgccaccaccggttacaccggcgaggccggctatgagatcgcgctgccgaaagatcaggcggcggatttctggcaaaaattgctggccgcgggcgtcaagccggccggtctgggcgcgcgcgacacgctgcgtctggaagcgggcatgaacctctacgggcaagagatggacgaaggcgtttcgccgctggccgccaacatgggctggaccatcgcctggcagccggaagatcgccgtttcatcggccgtgaagcgctggaacaacagcgcgatcagggcaccgagcaactggtcggcttgatcatgacggaaaaaggcgtattacgtaatgagctgccggtgcgtttcaccgacgcggcggggcaaacccacgaaggcgtgatcaccagcggttcgttctctccgacgctgggcttcagcatcgcgctggcgcgcgtgccggcgggcatcggcgagcaggccatcgtgcagatccgcaaccgtgaaatgccggtcaaagtgaccaagcccggtttcgttcgcgccggcaagccgctgacaaattga

SEQ ID NO: 426029 - DNA, 1203 bp, Serratia marcescens
atgcaatcatttgacgtgattatcgccggtggcggtatggtggggctggcgttggcctgcggcctgcagggcagcgggctgcgcgtggcggtgctggagcagcgccagccggacatggcgccgccgtcggagcagcctgcgctgcgggtctccgccatcaatgccgccagcgagcgtttgctgcagcatatcggcgtgtgggatgacattctccagctgcgcgccagcgcttataacgcgatggaagtgtgggatcgcgacagcttcggcaaaatcgccttccgcggcgacgagtgcggcttcagccatctcggccacatcatcgaaaactcggtgatccagcaggcgctgtggaaacgcgccgaaagcctgtcggacatcacgctgattaccccggccgcgctcaagcaggtggcgtggggcgagaacgacgctttcgtcacgctggaggatggccgcatgctgaccgcccgcctggtgatcggcgccgacggcgcccagtcgtggctgcgccagcacgccgacattccgcttaccttctgggattaccgccaccatgcgctggtcgccaccattcgcaccgaagagccgcatcaggcgacggcacggcaaattttccacggcgacggcattctggcgttcctgccgttcagcgatccgcatttgagctccatcgtctggtcggtgacgccggaagacgccgagcggctcaagcagctggaaccggcgcagttcaaccgcgaactggcgatggccttcgacatgcgcctgggggcttgcagcctggaaagcgaacggctggcgttcccgctgaccggccgctatgcgcgcagtttcgccgcgcaccgcctggcgctggtgggcgatgcggcgcataccgtgcatccgctggccgggcagggcgtgaatctgggctttatggacgccgccgagctgatttccgaactgcgccgcctgcagcggcagggcaaggatatcggccagcacctctatctgcgtcgctatgagcgccgccgcaaacatggcgcggcggtaatgctggccagcatgcaggggttccgcgaactgttcgacggcaaccacccggccaaaaagctgctgcgcgacgtgggcctgcggctggcggatagcctgccgggcgtcaagccgaagctggtgcgtcaggcgatgggcctgaacgatctgcccgagtggcttgcctga

SEQ ID NO: 426030 - DNA, 1152 bp, Serratia marcescens
atggcgggcgcgacgctggcgctggctatctcgtcgcttactcagggaagaatggcggtggatctggtcgaggcgactcggccggatgaccacagccatccgggctttgacgcccgcgccatcgcactggcgcagggcacttgccaacagctggcgcgcatcggcgtttggccggcgctgcgcgattgcgctacgccgatcgctcaggtgcacgttagcgatcgcggccacgccggtttcgtgaatctgcaggcgcaggattatcaggtcgatgcgctcggccaggtgatcgaactgcatgacgccgggcagcggctgttcgcgctgctggcgaaggcgccgggcgttacgctgcactgccccgcgcgggtggtgggcgtgattcgcaccgccgagcgggcggaagtacaactggataccggtctgcgcctgtgcgggcaactgctggtggcggccgacggttcgcgttcggcgctggcgcaggcctgcaacgtgcagtggcggcaggaggactatccgcagttcgccaccatcgccaacgtcaccacggcggaagatccgcaggggcgcgccttcgagcgttttacccgctacgggccgctggcgctgctgccgatgtcgcaggggcgcagttctttggtgtggtgccatgcgcgcgaagatcgcgcccgggtggatgcttgggacgacgagcgttttatcgccgagctgcaacaggccttcggctggcggctggggcgcatcctcaaggccggtaaacggcacagctatccgctcagcctgctgaccgccgatcgccatgtcagccatcgtctggcgctggtgggcaacgcggcgcagacgctgcatccgatcgccgggcaggggttcaacctcggtctgcgcgacgtgatgtcgctggcggaaacgctggcagaagcgatgaacagcggcgaagacgccggtggttatgcgctgctgagccgctatcagcagcggcggcaaaacgatcagcaggcgacgatcggcgtgaccgacggattgatccgcctgttcgccaaccggtatgccccgctggtggtcggccgcaacctggggctgatggcgatggagcgtttgccggcggtgcgcgacgccttcgccaagcgcacgctgggctgggtggaacgttag

SEQ ID NO: 426031 - DNA, 1317 bp, Serratia marcescens
atgactcagcaggaattcaacaaccgccgtcaggcgctgttggcgaaaatggcgccggccagcgcggcggttattttctctgcgccggaaacgacgcgcagtgcagattcagactatccctatcggcagaacagcgacttttggtacctgaccggcttcaatgagccggaagcggtgctggtgctgatcaaaagcgacgaaacgcacaaccacagcgtgctgttcaaccgggtgcgcgatctgacggcggaaatctggtttggccgccgcctggggcaagacgccgcgccggcgaagctgggcgtggatcgcgcgctgccgttcgatgaaatcaatgaccagctgcacctgctgctcaacggcctggacgtggtctaccacgcgcagggcgaatacgcctatgccgatcagatcctgttcggcgcgttggacaagctgcgcaaggggtttcgccagaatctgcaggcgccggccaccgtgaccgactggcggccgtggctgcatgacatgcgcctgttcaaatcgccggaagagctggcggtgatgcgtcgcgccggtgagatcagcgcgctggcgcacacccgcgcgatggaaaaatgccgcccgggcatgttcgaataccagctggaagcggaaattcaccatgaattcacccgcctcggcgcccgctacccgtcttacaacaccatcgtcggcagcggcgaaaacggctgtatcctgcactacaccgagaacgagagccagatgcgcgacggcgatctggtgctgatcgacgccggttgtgagtaccaggggtatgccggcgacatcacccgcaccttcccggtcaacggcaagttcagcaagccgcagcgcgcggtgtacgacatcgtgctggcgtcgttgctgcgcgctttggaactgtttaaacccggcaccagcatccgcgaagtcaacgacgaagtggtgcgcatcatggtggtcgggctggtggaactgggcgtattgaaaggtgaagtcgatcagcttatcgccgagcaggcgcaccggcagttcttcatgcacgggctgagccactggctgggcctcgacgtgcacgacgtcggccactacggcacgccgagccgcgatcggctgctggagccgggcatggtgctgaccgtggaaccggggctgtacattgcgccggatgcggacgtgccggcggaataccgcggcatcggcatccgcatcgaggacgacatcgtgatcaccgccgacggcaatgaaaacctgaccgctaccgtggtgaaagacgccgatgccatcgaagcgttgatggcggcgacaaggtcataa

SEQ ID NO: 426032 - DNA, 585 bp, Serratia marcescens
atgcgcatgtctatacagaatacatttccaagttaccaatctttgaccgtggccctcaaccagcagtcggtggcgctgaccgcggcagaaatgcacggcctgatcagcggcctgctgtgcggcggcagccgtgatgccggctggcaggcgctggtgcacgatctgaccaatgaaggcgtcgccttcccgcaggcgctcagccaaccgctgcaacagctgtatgaagtgacgcgcgaaacgctggaagacgacgaattcctgttccaactgatgttgccggaaggggaagccgtcagcgtgttcgatcgcgccgacgcgttggccggttgggtcaaccacttcctgctcgggctgggcatgatgcagcccaaactggcccaggtgaaagacgaagtcggtgaagcgatcgacgatctgcgcaacatcgcgcagctgggctacgacgaagacgaagatcaggaagaattggagcagtcgctggaagaagtggcggagtatgtgcgggttgccgccatcatgtgctacggcgaattcacccgtcacaagccaacggcgccggaaaacatcaaaccgacgttgcactaa

SEQ ID NO: 426033 - DNA, 330 bp, Serratia marcescens
atgtctgcacaaccggtagatattcaaatttttggccgctcgttaagagtcaattgcccgccagaacaacaagatgcgttgaatatggcggcggacgatcttaaccaacggttgcaagatcttaaagttcgcactagagtctccaatactgagcaactggttttcatcgcggcattgaacgtctgtcacgaacttgctcaagaacggttgaaaacccgtgactatgcgtccaatatggaacaacgcatacggatgctgcagcagaccattgaacaagcgttgcttgaacaaggtcgcatctctgaacgtcaggatgcacaattcgaataa

SEQ ID NO: 426034 - DNA, 609 bp, Serratia marcescens
atgccttttcaaccccaatttgcgcagcagcgccaagccattcgtcaactcatacgccaacgtcggcgcgagcttacgccgggccagcaacgctttgccgcagacaagatagccgagcgcctcgtcgcgcatacgcacattaaggcggcgcacagcatcgcggtattcctgtcgtttgacggtgaactcgacaccgggccgctgatcgagcaactgtggacgctcggcaaacgggtttacctgccggtgctgcacccgttcagcccgggccacctgctgttcctgcgctatgcgccggaaacgccgctggtgcgcaatcgcttcaatattctcgaaccgcgcctcgatgtgcgccaggtgctgccgctgggcgagttggacgtcgtgctgacgccgctggtggcgttcgatcataccgggcagcgtctgggcatgggcggcggcttttacgatcgcaccctgcaaaactggcgcagcggcggcccctatcctatcggcctggcccatgattgccagcaggtggagcgcctgccgatcgagcactgggatatcccgctgccggaaatcctcaccccgctctgcagctgggcgtggcacgagcccaaatag

SEQ ID NO: 426035 - DNA, 1239 bp, Serratia marcescens
atggcaaaagtatcattggagaaagacaggattaaattcctgttggtggaaggggttcatcagagcacggtcgataatttacgtgccgccggttataccaacatcgaataccacaagggtgcgttagacaccgaatcgctgaaggcatccatccgcgatgcgcacttcgtcggcatccgatcgcgtacgcatctgaccgaagaggtgtttgccgccgcagaaaaactggtggcggtgggctgcttctgcatcggcaccaaccaggttgatctgaaagcggcgaccaagcgcggtattccggtcttcaacgccccgttctccaatacccgatccgtggccgaaatggtgctgggcgagctgctgttgatgctgcgcggcattccggccgccaacgccaaggcgcaccgcggcgtgtggcacaaactggccgtgggctcctacgaggcgcgcggcaaaaagctgggcatcatcggctacggccacatcggcacccagctgggcattctggccgaagggctgggcatgaaggtgttcttctacgacatcgagaacaagctgccgttaggtaacgcgcagcaggtgcgccatctgtccgatctgctcaatatgagcgacgtggtgacgctgcacgtgccggaaacgctggccaccaagaacatgatgggggcggaagagctggcgctgatgaagccgggcgccattctgatcaacgcttcgcgcggcaccgtggtggatattcccgcgctgtgcgacgcgctggccagcaatcacctggcgggcgcggcgatcgacgtcttcccggaagaaccggcgaccaacagcgatccgttcaactcgccgctgtgtgagttcgacaacgtgctgctgacgccgcacatcggcggctccacccaggaagcgcaggagaatatcggcgacgaagtggccggcaagctggcgaaatactccgacaacgggtcgaccctgtccgccgtcaacttcccggaagtgtcgctgccggcgcatggcccgaacgccagccgcctgctgcacatccacgaaaaccgcccgggcgtgctgacgcagattaaccagatcttcgccgaagagggggttaacatcgccgcacagtatctgcaaaccgggcctgaaatcggctacgtggtgatcgacatcgaagcggaaaccgcgcgcgccgacgccgcgctgcagcgtatgaaggccatcgacggcaccattcgcgcccgtctgctgttctga

SEQ ID NO: 426036 - DNA, 657 bp, Serratia marcescens
atgacgcaggatgaactgaaaaaagcggtgggctgggcggcgctggaatacgtgacgccgggcaccatcgtcggggtcggcaccggctctaccgccgcccactttattgacgcgctgggctccatcaagcaccagatcgaaggcgcggtatcgagctccgacgcctccaccgccaagctgaaaagcctcggcatccatgtgttcgacagcaatgaagtggactcgctcgatatttatgtggacggcgcggacgaaatcaacggccatatgcagatgatcaaaggcggcggcgcggcgctgacgcgcgagaagatcatcgccgccatcgccaagaaatttatctgcatcgtcgacgccagcaagcaagtggacgtgctgggcaagttcccgctgccggtggaagtgatcccgatggctcgctcttacgtggcgcgtgagctggtgaaactcggcggcctgccggagtatcgccaaaacgtggtgaccgacaacggcaacgtgatcctcgatgtgcataacctgagcatcaccgacgccatcgcgctggagaacaagatcaacggcatcgccggcgtggtgaccgtggggctgttcgccaaccgcggcgcggacgtggcgctggtcggcaccccggaaggcgtgaaagtggtcaaataa

SEQ ID NO: 426037 - DNA, 894 bp, Serratia marcescens
atgaaacgcccagactatcgtacgctgcaagcgctggacgcggtgatccgtgagcgcggcttcgagcgcgccgctcaaaaactctgtatcacgcaatcggcggtatcccaacgcatcaaacagctggaaaatctgttcggccaaccgctgctggtccgtaccgtgccgccgcgccccaccgaacaagggcaaaagctgctcgcgctgctgcatcaggtggaattgctggaagaagagtggctgggcaacgataccggcgtcgatacgccgctgctgctgtcgctggcggtcaacgccgacagtctggcaacctggctgctgccggcgctgaagccggtgctggcggattcccccattcgcctgaatctgcaggtggaagatgaaacccgcacccaggagcggctgcgccgcggtgaggtggtgggcgcggtgagtattcagccgcagccgctgccgagctgcctggtggatcggctgggggcgctggattatctgttcgtcgcctcccgcggcttcgccgagcgctacttcccgagcggcgtcacccgctccgcgctgctgaaagcgccggcggtggccttcgatcatctcgacgacatgcatcaggcgttcctgcagcagaacttcgatctgtcgccgggcagcgtgccctgccatatcgtgaactcgtcggaagccttcgtgcagctggcgcgtcagggcaccacctgctgtatgatcccgcatctgcagatcgaaaaggagctggcttccggtgagctgatcgatctgacgccggggctgtatcagcgccgcatgctgtactggcaccgcttcgcgccggaaagccgcatgatgcgcaaagtgaccgacgcgctgctggaacacggccaccaggtgctgcgccaggattaa

SEQ ID NO: 426038 - DNA, 732 bp, Serratia marcescens
gtgaagctaaaagcattggctatggccgcaatggtcggattagggacgttaccgatggcgctgcaggcggctgaagtgcctgaagggccgcacgtcgtcacctccggcaccgccagcgtggacgccacgccggatatcgccaccctggcgatcgaagtgagcgtttcctccaaagacgccgcccaagcgaagaagcaggtggacgagcgcgtagcgcagtactttgatttcctgcagaaaaataacatcgagaagaaagacatcagcgccgccaacctgcgcacccagccggagtacgactacctgaaaaccggcgagtcggtgctgaagggctaccgggcggtgcgtcaggtgcaggtgaccctgcgtcagttggacaagctgaacgagctgctggacggcgcgctgaaatccggcctgaacgagatccgcgcggtggagctgggcgtcgccaagccggacgtgtatcgcgagcaggcgcggcaaaaagcgatcgagaacgcgactcagcaggccgaatccctggccaaaggcttccacgccaagctggggccggtgtacagcattcgctaccgggttgccaactaccagccgatgccggtggcgcggatgtataaggcggccggtgcggcggcggaaagcgacgcggcgcaaacctatgagcagcaaagcattcacttcgacgatcaggtggatgtggtgttcgagctgcagcgcaacgccgcgcagtaa

SEQ ID NO: 426039 - DNA, 618 bp, Serratia marcescens
atgttagccgtcttcctgcagggttttgccctgagcgccgctatgatcttgccgctgggcccgcagaacgtattcgtgatgaatcagggcattcgccgccagtatcatttgatgatcgcctcgctgtgcgcgttgagcgatatcgtgctgatctgcgccgggattttcggcggcagcgcgttgctgacccgctcgccgctgctgctggcgctggtcacctggggcggggtggcgtttctgctgtggtacggctggggcgcgtttcgttccgccttcagcccgcaaccggcgcaggccgcggcgcaggagctggcgcagagccgctggcgcctcgtggtcaccatgctggcggtcacctggctgaacccgcacgtttatctggatacctttgtggtgctcggcagcctgggcgggcaactgacggcggacgtgcgctcctggttcgcgctcggcgcggccagcgcgtcggcggtgtggttcttcgggctggcgctgctggcctcctggctggcgccgtggctgaacacccagcgggcgcagcgcatcatcaacgcgctggtcgggctggtgatgtggggcatcgcgctgcagctggcctggcagggggcaaatttataa

SEQ ID NO: 426040 - DNA, 819 bp, Serratia marcescens
atgagcctgaaagccgtcgacgagaaagatgacaagaaagacaaaccgctgggcagccaaagcctgttccgcggtttgcagttgattgagatcctgagcaatttccccaatggatgcccactggcgcatctgtccgagctggccggcatgaacaagagcacggtgcaccgcttgctgcaggggttacacaccagcggctatgtgacccaggcgccgtcgccgggcagctaccgcctgaccaccaagttcatttccatcggccagaaggcgctgtcgtcactcaatatcattcacgtggccgcgccgcatttggaacagctgaacctggaagtgggtgagacggtcaacttctccagccgcgaagacgaccacgtcattctgatctacaagctggagccgactaccggcatgatgcgcacccgcgcctatatcggccagcatatgccgctgtactgttcggcgatgggtaaaatcttcatggcctacggcaacgacgattacccggcccactactggcagagccatcagcaggagattcagacgctgacgcgcaataccatcaccgagctgccgaaaatgtatgaggaactggccgatattcgccagcgcggtatggcgatggatcgcgaagaaaacgagctgggggtctcctgcgtggcggcgccggtattcgatattcaacagcgcgtgccctatgcggtgtctgtttctctgccgaccgccaagctgcagcaaatcggcgtcaaaagcctgattaaaccggtgctggccactgcgcaacgcatctcgcaggagctggggttcgtcacaccgatttaa

SEQ ID NO: 426041 - DNA, 1554 bp, Serratia marcescens
atgactatggataatgcggcacaacccatccttacccttagccacatcgtcaaacgatttggcggcaacgtggcggtcaacgacgtcagcctgcaggtaatgccgggcgaggttctggcgctactgggcgaaaacggcgccggcaaatcgacgctgatcaaagtgctggcgggcgtctacccgcgcgacggcggcgatattcgttttcagggcgcaagcatcgcctccgccgccgccataaaaagcgccagccgccagccgatcgcctttattcatcaggatctcggcctgattgaatggatgacggtggcggagaacatggcgctggtgatggggtttccccgccgctttgggttgatcgactggcgcgccattcgccgccgggcggcgcaggcgctccaagacgtcggtatcgcgctcgatcccgatgcgcgcgtcttcgaactgtcgcgcaccgaaaaatcgctgctggcgatcgcccgcgcggtggcggtcaacgccgagctgctggtgctggatgaaccgaccgccttcctgcccgccaacgacgtgcgccatctgttcgccgtgatcaaccggctgcgcgccaaaaaggtcggcatgatttacgtcacccaccggctggacgaagtgatcgaaatcgccgatcgggtctgcgtaatgcgcgacgggcgctatgtcgccggcggccgcaccgccgactactcgctgcgcgatctagtgcaaaccatcgtcggcgaagcgatggcggacgatcagcgcgaaccgctgccggtacatcgtccgccggtgctgcagctcgatagcgtcacggtaggcgacatcggcccggtgagcttcgatttgcagccgggcgagatgctggcgctggccggcctgcgcggggccgggcaagaagagattggccggctgctgttcgggttgcgtcaggccgacggcggcgcgattcggtttcgcgatcggccctatcaggcgagctccccgcagcaggcgatggcgtgcggcgtttcgctggtggcgggcgatcgcaccggcgaaagcctggtgatgtcgatgagtgtgcgtgaaaacctgtttatcaacccctgcgccagcggccaccggctgctctcccgctacgggcggcgagcggagatcggcgccagttggtggaaagtgcagctgttcgacgtgcgccccaaggacgtcaatatcgatatcagcgcactgtccggcggcaaccagcaaaaggtggtgatggcgcgttggatgcacctgggggcgccgctgctgatcctggaagatcccaccgccggcgtggacgtcggcgcgcgagcggaaatctaccacctgctgaataaatccctggcggaaggcgtggcggtgctggtgatctccaacgatttcgaggagatcgcccatatttgcaaccgcgcgctggtgttcaaccgcgggaaagtggtcggcgagctgaaaaatcagcaggtgtcattcgccaatttattggagctggcctctgccagcaccggggaaagcgtcgcaatcacgtcagaatccgaggtaggccatgtctaa

SEQ ID NO: 426042 - DNA, 1083 bp, Serratia marcescens
atgtctaaaacatccgttaaatcaaccgcgctggagcagcgcgtcagtcaggcgcaggacggcgccggcccgtggctgatgcaggttcttacccgctatggcctgctgctgctgtgcatcgcgctggtcgtgctgttctcactgctcaccccctccttcgcatcgatgttgacgctgcaggcgatcctgtcgagcaaggccaaaatcgccctgttggcgctggcggcgaccatcccgatgatcgtgggcaagatcgatcttaacgtcggtttcggcattgtgctgtggcacattctggcgatcacgctgcaggtggaatacggcttctcctggcagatggcggtgctgacggtgctggcgatctcggcgctgtatgggttgctgaacggcattctggtggcgctggccgatatcgacagcttcgtcgccacccttggctccggcaccgtgctgtacgccattgccctgtggcactccggcgggcggcagatcgtcggcgacttgccggatgcctttatcgcgctgcaccacaccgagatcgccggcattccgatcgtggcgttttacgtgctgatcgtcgcggtggtgctgtggctcatcaccgaacacaccccgctcggccgctgcatgtatgcggtgggcggcaacccggcggcggcacgcctgaacggcatctcggtcaaccgcttcaccatcggcgctttcatcgcctccagcgtgctcaccggtttcagcggcgtgttgatcgccgccgaacagggcgtcggccaggccagcgtcggcatggactatctgctgccggcgctggtcggcgccttcctcggcagcaccaccattcgccctgggcgcgtcaatgtctggggcaccgtggtcggcatcgccattctggctatcggcatcgccggcattcagcagttcggcggtgaattctgggtcgagccgctgttcaacggcgcgacgctgttgctgtcgatcaccctggccggctatgcccaacgccgccggctgctcaatcagaaagcggtacaacgcagccaggcgacgccggctgacaacaacaatcagacagcgacccacccttaa

SEQ ID NO: 426043 - DNA, 1101 bp, Serratia marcescens
atgaaacgcatttggctgttaccggggttcaccacattcttgctcgccgcatcgccggcctgggccgacgtctatctcgatcaggccaccgccgccgtcgcgaaggccaccgccagcgccacccagtgggacggccccaccagcggcccgcagctgcaggccaacaagaagatcatttttatcgcctccgacatgaagaacggcggcgtgcaaggggtgcaacaggggttgagcgaagcggcgaaagccgccggctggaagctggaaacgctcgacggcggcggctcggtgaaagatcagctggcatcgctcaatcaggccatcgcccagaaaccggacggcatcgtgatcggcggctggaaccctaacgttgccaagatcccgctgaaaaaggccgtacagcagggcatcgtgctgaccgcctggcatgcggtgccagaaccgggccccatcgccaaatataacgtgctctataacgtcacgtcggactccaacgaagtggcgcgcatcgccgcgcaatacgcggtggtgcagtccggcggcaaggcgagcgtgctgatcttcaccgactcgctgtaccaaatcgccttggacaaggccaacgtcatgaaagaagagatcgccaaatgcagcggctgcacgctgctggaattcatcgacacgccgctggccgataccgccaaccgcatgccggcgatgaccttcagcctgctgcagaagtacggcgacaaattccaatatgcgctggcgatcaacgatctgtacttcgactttatggcgccggcgctgaagaccgccggcaaaggtggcaagaacgcaccttacaacgtatcggccggcgacggttcaatctccgcttaccagcgtatccgctcaggcgacagccagtcggcgacggtgccggaacccttgaagctgcacggttggcaactgctggacgaattcaaccgcgccttcgccaagcagccgccttccggctacgtcaccccggcgcatctggtcacccacgacaatatcgccgccgacggcggcgccaataacctgtatgacccgcaaaacgattatcagggccattacaaagcaatctggggcgtgaagtga

SEQ ID NO: 426044 - DNA, 867 bp, Serratia marcescens
gtgaacggcgattcattgcgcacgcacgcccggctcgagcgcctgtgttcgccggcgatctgggccgaggggccggtgtggctgccgcaggaggatgcggtggtgttcagcgacgtgaaaggcaatcgcatgttccgctggtcgcgccggggtgagctaagcctataccgctcgccgtcgcactacgccaacggcaatgcgcgcgacggcgaggggcgcgtggtcagctgcgaacacgggcggcgcggcattagccgcaccgaaagcgatggcgaggtacgcctgttgatcgaccgcgtcgacggcaagcgctttaattcgccgaacgacgtggcggtgcgctccgacggcaccctatggttcaccgatccgccctacggcatcatcggcgacgaagagggttacaaatcggaaagccaggtggtcggctgttatctctacagcttcgatccgcgcgacggttcgctgaccatcgccgcctgcgacctgcagcgcccgaacggcctggcgttttcaccggatgaaaaatggctgtacgttgcggacatgtcgatcgtggattttccgacgctgggccgccgcgagctgcgcgtctatgcggtcaacggccgcgagctggaagccggccgccgtttcgcgacggtggagcccggtttcccggacggcttctgcgtcgatcgggccggcaatctgttttgcagctgcgccgacggcgtgctggtctttgatccacaggggcgacagatcgacaaaatcagcgtgccggaacgcgtctccaattgtaccttcggcggcccgaacggcgatgagctctatatcaccgccaccacctcgctctaccgcatggtgctgaacacccgcggttag

SEQ ID NO: 426045 - DNA, 999 bp, Serratia marcescens
atgagagtgagttacagcgagttaaaacagcaattcaaacgcgtgctgctggcgcgcggcgtggcggaacacaccgccgacgactgcgccggcatgttcgccgacaccaccgccagcggcgtttactcccacggcgttaaccgctttccgcgctttattcagcagttggacgccggcgatatcgtgccggacgccgaacccagcaaactgttgtctctgggggcgatcgagcaatgggatgcgcaccagggcatcggcaaccttaccgcccgccgcatgatggatcgcgccatgcaattagccgacgatcatggcatcggcctggtggcgctgcgcaacgccaaccactggatgcgcggcggcggttacggctggcaggcggcggagaaaggctatatcggcatttgctggaccaactcaatcgccgtgatgccgccgtggggcgccaaaacgtgccgtatcggcaccaacccgctgatcgtcgccgtgcccggcaacccgatcaccatggtggatatgtcgatgtcgatgttttcctacggcgcgctggagctgaaccggctggcgggcaaaaccctgccggtggacggcggcttcgacaacgacggccacctgacccgcgatccggccaccatcgaagagaaccggcgcattttgccgatggggtattggaaaggatcggcgctgtcgatcgtgctggacatgatcgctaccctgctgtccggcggcgcctcggtggcggaagtgacggaagagcaccgcgacgaatacggcgtctcccaggtgttcatcgcgattgagatagaccggttgatcgacggcgacagccgcgatcaaaaactgcagcgcatcatggactacgtcaccagcgccgaacgggacaatcccgacgtcgccattcgcctgccgggccacaagttcccgcgcattctggaagaaaacctgcgcgacggcattccaattgacgaacgagtctgggcgcgcattcaggcgctataa

SEQ ID NO: 426046 - DNA, 471 bp, Serratia marcescens
atgatattcggccacatcgccaacaccgcgcccgagcagtatccgacgccggtcgccaacgccgtcgcctatctgcaacgcatcgatttcagcgtcttgcccgcagggcgttatgaagatcccgccaccggctacgtggtgcaagtgctggatctgcatacccaaccaccggatgcgctgcgcccggaagtgcataggcaaaacgtcgacgtgcagtttctggtcagcggcaccgagcttatcggcgtagcggcggacagcggcgacaacgtcgttcatcaggagctgctggcgcagcgcgacatcctgttttatcaggacgtggccgacgaatcctggctcacgatgcaacccggcaacttcgcggtattttttccgcaggacgtgcatcgcccggcctgcattaaccagcgccccagcgcgatacgcaaggtggtggtgaagataccgctggcgtcgtttagcgcctga

SEQ ID NO: 426047 - DNA, 1296 bp, Serratia marcescens
atgaatacagcctccgtttccgtcagccaaagccaggcgatacccaagctccgctggctgaggatcgtgccgccgatcctcatcacctgcatcatttcttacatggaccgggtcaatatcgccttcgccatgcccggcggcatggatgacgaactcggcatcaccacctcgatggccgggctggccggcggcattttcttcatcggttacctgtttctgcaggtgcccggcggcaagctggcggtatacggcaacggcaagaaattcatcggctggtcactgttggcatgggcggtgatctcggtgctgaccggcctggtcaccaaccaataccagctgctgttcctgcgcttcgccctcggcgtttccgaaggcggcatgctgccggtggtgctgaccatgatcagcaactggttcccggataaggagcgcggccgcgccaacgccatcgtcatcatgttcgtaccgatcgccggcatcctcaccgccccgctgtcgggttggatcatcaccgcctgggactggcgcatgctgttcctggtggagggggctctgtcgctggtggtgatggcgctgtggtacttcaccatcagcaaccggccgcaggaagccaaatggatctcgcaggcggaaaaagagtatctggtgaagaccctgcacgacgaacagctgctgattaaaggaaaaacggtgcgcaacgcctcgctgcgccgggtgctgggcgaccggatcatgtggcagttgatcctggtgaatttcttctaccagaccggtatctacggctacaccctgtggctgccgaccattttgaaagggctgacccacggcgatatggagcaagtgggcctgctcgctatcctgccctatatcggcgccatcttcggcatgctgatcatctccaccctctctgatcgcaccggcaagcgcaaagtcttcgtcgccctaccgctggcctgctttgctgcctgcatggcgctgtcggtgctgctgaaggatcacgtctggtggtcttacgctgcgctggtcggctgcggcgtgtttattcaggcggcagccggggtgttctggaccatcccgcccaaattgttcaacgccgaagtggccggcggcgcgcgcggcgtgatcaatgcgctgggcaacctcggcggcttttgcggcccgtatatggtcggcgtcctgatcagcctgttcaacaaggatgtcggcgtctacagcctggcagcctcgttggcgatcgcctccgtgctggcgttgatgctacccaataaatgcgaccacagcgcgaggaacccatga

SEQ ID NO: 426048 - DNA, 1494 bp, Serratia marcescens
atgatggaatattggctggggctcgactgcggcggcaccttcatcaaggcgggattatacgaccgcaggggccatgaacacggcgttgcgcggcgcaatctggcgatcgtcgcgccgcagcccggctgggccgagcgcgatatggcatcgctgtggcgcaccgccgccgacgtgatccgtgaagtgctgtccgccagcggcgtcgccgccggcgccatccaggccatcggcatctcggcgcagggcaagggcgcatttctgttggataagcaggggcagccgctgggcaacgccatgctctcttccgatcagcgcgcgctggcgctggtgcaggaatggcagcgacagggcgtgccgcaggcgctgtatccacaaacgcgccaaacgttgtggaccgggcacccggtctcgctgctgcgctggctgaagcggcatcagccggaacgttacgcccgcatcggcagcgtgctgatggcgcacgactacctgcgctattgcctgaccgacgagctggcctgcgaagaaaccaatatctccgaatccaacctgtatcagatgcgcagcggacgctatgacccggcgctggcgcagctgctgggtatcggcgacatcatgcccgccctgccgacgattgtcggttcggccgatatcgccgggcgcgtcgcggcaaacgccgcggccatcaccggcctgcaaaccggcaccccggtggtcggtgggctgttcgacgtggtgtccaccgcgctgtgcgccggcctgcaggacgaaacccggctcaatgcggtgatgggaacctggtcggtcaccagcggcatcaccgacgccatcgtcgagggtttcgatcatccctttgtctatggccgccacgccgaaaacggccaatacattgtgcacgaagccagccccacctccgccgccaacctggaatggttctgccgccaatgggggctgcaggactacggccagcttaactgctgggtcgccgccctgccgaaagccgccggcgatctgctgttcgcccctttcctgtatggctccaacgccggcctggggctgagcgccagcttctacggcctgcaggccttccaccagcgcgagcacctggtgcaggcgatctacgaaggcgtggtgttctgccacatgacgcaccttaaccgcatgcgccggcgtttccctgagacgcaggcgctgcgcgtgaccggcggccctgccaaatccctcccctggatgcaaatgttcgccgacgtcagcggcctgccggtggagctgccgcaggttgaagaaaccggctgtctgggcgcggcgatggcggccatggtcggcagcggcgccttcaacgatttcaccgccgcccagcaccggctggcgccgcgtatcgagcggctgctgccagatgcggccgccgctgaagcttacgacaacaaacaccaacgttatcaggcactgattgctgcattgcaaaatctgcagcccgccaacaaggaggctccatga

SEQ ID NO: 426049 - DNA, 657 bp, Serratia marcescens
atgagcacgaaaccgcgcctgcagttggcgctcgatcaaacccgtttggatacggcgctgcgcaccgccgagaccctcagtccccatgtggacatcatcgaggccggtaccattttgtgcatcagcgccggcattcaggcggttagcgcgctgcgcgagcgctgcccgcagcacacgctggtggccgatctcaaggtggccgacgccggcgcgacgctggccgagcaggccttcggccagggcgcggactggatgacggtgatctgcgccgcgccgttggccaccatggccagcgcgcgggaggtcgccgagcgtcacggcggtgaaatccagatcgaactgttcggccgctggacattagaggatgcgcggcaatggcgcggcctcggcattcgccaggcgatctatcaccgcggccgcgacgcgcaggccagcgggcaaacctggggccggcaggatctggatcggatgaaggcgctgtccgatctgggtatcgaactgtcggtgaccggcggcattacgcccgccgacctgccgctgtttaaagagatcgccgtcaccgcttttatcgccggccgcgcgctggccgaagccggggatccgccggcggccgccaggcaattccgcaccgccatcgatgacatctggagatcatga

SEQ ID NO: 426050 - DNA, 861 bp, Serratia marcescens
atgcgtcagcacccgttgggaatttacgagaaagcgctgccgaaacacctgagctggcccgaacgcctggcgctggccaaggcctgcggcttcgacttcgtcgaaatgtcggtggacgaaagcgatgaacgcctggcgcgcctgagctggagcaaagtgcagcgcctggcgctggtggacgccatgctggaaaccggcatccgcatcccgtcgatgtgcctctccggccaccggcgctttccgtttggcagccacgatccggcgctgcgccagcgcgccttcgacgtgatggaacaggccattaagctggcccaagacgtcggtatccgcaccatccagctggccggctacgacgtgtattacgaagagcaggacgaggggacgctggcgcgctttagcgaaggcatgcagtgggcggtagaacgtgccgccgccgcccaggtgatgctggcggtggaaattatggataccgcctttatgaactcgatcggtaaatggaaagcctgggacgccctgctggcctcgccgtggttcacggtgtatccagacgttggcaacctcagcgcctggggcaacgacgtgccgcgcgagctggagctgggcatcgatcgcatcgccgccattcacctgaaagacacctacccggtcaccgccgcttcgccggggcaattccgtgacgtgccgtttggcgaaggctgcgtcgacttcgtcgaggtgtttcgcacgctgcagcgcctcaattaccgcggcgcattcctgattgagatgtggacagaaaaagccgaggagccggtggccgagatcgttcaggcccgccgctggatcgaacagaaaatgcaacaagggggcatgacatgctga

SEQ ID NO: 426051 - DNA, 696 bp, Serratia marcescens
atgctgactcagttaaaacaacaggtgctggaggccaatctcgatctgccgcgccataagctggtgacctttacctggggcaacgtcagcgcggtggatcgcgaacgcggcctggtggtgatcaagccttccggcgttgaatacgagcatatgacggcggaggatatggtggtggtcgatctggccagcggccgcaccgtcgaaggggcaaagaaaccgtcgtcggacaccgccacccatctggcgctgtaccgcgaatttgccgatatcggcggcatcgtccacacccattcccgccacgccaccatctgggcgcaggccgggctggacatccccgcctggggaaccacccacgccgactatttttatggcgctatcccctgcacgcgcctgatgacccaggatgaaattgagcacgattacgaactggaaaccggcaaggtgattatcgaaaccttccgccggcgcgatatcaatcccaacgctatcccagcggtactggtcaacgcccacggccccttcgcctggggcaaagacgcccacaacgcggtgcataatgcggtggtgctggaagaaattgcctacatgggcattttctcacgccagctgacgccgggcattcacagcatgcagcgcgagctgttggacaaacactacctgcgcaaacacggccaaaacgcctactacgggcagtag

SEQ ID NO: 426052 - DNA, 699 bp, Serratia marcescens
atgtctactgtcaccgatacctttatcgccccgccatgccatgaccaaatagagatcctctatcaggacgaccatctggcgctgatcaataagccggccgggctgctcagcctgtcgggcaagaatccgcagaatctcgattcggtacaccatcggctggtacagatcttccccggctgcgccctggtgcaccgcctggatttcggcacgtccgggttgatggtggtggcccgcaacaaggccgtcaacgccgcactctgccggcagttcagcgagcgcaccgtcggcaaagtgtacagcgcgctgctgtgcggccatctggcggataacgaaggggtaatagacgcggcgatcgccaaagatccggcgctgttcccgctgatgtcgatttgcgccctccacggcaagcccgcccgctcccgctatcgggtcgtcgagcgtttttatcgtgaagcggaagacgggatctcgctgccgctgacgcgggtgcagctcatcccggagaccgggcgcacccaccagctgcgtattcacagccggcagttgggccaccctattttaggctgcgatctgtatggcgggcgactgctgccgggtaccgaacagacgccgcggctgatgctgcacgccagcgagctggactttgtgcaccccattagcggggagcggatcgccgctcgtcacgccgcgccgttctga

SEQ ID NO: 426053 - DNA, 540 bp, Serratia marcescens
atgacaaaactcaccttacaagagcagatgctcaaagcgggcttggtaaccagcaagaaaatggccaaagtccaaagaacggctaaaaaatcacgcgttcaggcccgcgaggccagagaggcggtggaagagaataaaaaggcgcagcttgagcgcgataagcagctgaacgagcagcaaaagcaggccgcgctgtccaaagagtacaaggcgcaggtgaaacagctgatcgaaatgaaccgcatcgttctggcgaaaggcgatatcggtttcaacttcaccgacggtaacctgatcaagaaaatcctggtggataaggcgacgcaaacccagctgatcaatggccgcctcgccattgcacgcctggtggtcgagaaccgggaagagtgtgaatacgcgattatccccgcgagcgtcgccgataaaatcgcgcagcgcgatgcggccagcattgtgctgcacagcgcgctgagtcaggaagaacaggatgaagacgatccgtacgccgactttaaagtgcccgacgatttgatgtggtaa

SEQ ID NO: 426054 - DNA, 978 bp, Serratia marcescens
atgaatagagactttgcctttacgattaagagcagttctttcgatgaagattataacccttctgaaagtacgcgtatcaccaccaacttcgccaatttggccagaggggaaaaccgccgggagaacctgcgcaacacgctggtgatgattaacaatcgcttcaattcgttggcgcattgggataaccccaaggccgaccgctattcggttgagcttgacatcatttcggtggagatgcgcgttgaagatcagggcgccagcttcccggtgatcgaaatcctgaaaaccaacatcatcgataaaaaaacgcaaaagcgaattgagggcatcgtcgggaacaatttctcgtcttacgtgcgcgattatgactttagcgtcttgctgccggcgcacaataaaaacacggcggaattcactatcccgaatgatttcggcgatttgcacggcaatatctttaagcacttcgtcaattcaaacgaataccatgagaatttcagcaaaccgccggtgatctgcctcagcgtgtccagcaaagacacctatcatcggacgggcaatcaacatccggtgttgggcgacgagtatcggcaagacggcgcttcgctgaccgaccggtattttaaaaaaatgggcctgcaggtgcgctatttcatgccgaaaaatagcgtcgcgcccctggcgttttatttccccggggatttgctaagcgattacaccgatctggagctgatcggcaccatcagcacgatggagaccttccaaaaaatctatcggcctgaaatttacaatgccaactcggcggcggggcaatgctatcagccaagcctgaataaccaggactattcattaaccaagattgtttacgatcgcgaagagcgtagccagttagcgattgagcaggggaaatttacggaagagcaatttatcaaaccctacaagcccattcttgagcaatggtctgctcactacgcgctttga

SEQ ID NO: 426055 - DNA, 1032 bp, Serratia marcescens
atgaaaatattgctccctacctcgaccgccggcagcttgcccaaaccttcctggctggcccaaccggaaaccctgtggtcgccctggaaattgcaaaatggagaattaatcgaagggaaacaggatgccctgcgtttgtcgctggctgaacaacaacaggccggcatcgatatcgtcagcgatggcgagcaaacgcgccagcacttcgtcacgacgtttatcgagcaccttagcggcgtcgatttcgagaaacgcgaagtggttaaaatccgcaatcgctatgaggcgagcgtgccaaccgtcgtgggtgcggtggcgcgccaaaagcccgttttcgttgaagacgccaaatttttacgccagctgaccaagcagccgattaaatgggccctgccggggccgatgaccatgatcgacacgctttatgacaaccactataaaagccgcgagaaattggcctgggagttcgccaagatcctcaatcaggaagccaaagagctcgaggccgccggcgtcgacattattcagtttgatgagcccgcatttaacgtgttctttgacgaggtgaatgactggggcatcgctgccctggaaagggccgttgaagggcttaagtgtgaaacggcggtgcatatctgctatggatacggcattaaggccaataccgactggaaaaagacgctgggctcagagtggcggcaatatgaagaggcgttccccaagctgcaaacgtctaccatcgatattatctcgctggagtgccataactcgcacgtcccgatggatctgctggaactgattcgcggtaagaaagtgatggtcggtgccattgatgtagcgaatcataccgttgagacgccggaggaagtggccgctacgctgcgcaaagcgctgcagtttgtcgatgccgacaagctctatccatcgaccaactgcggcatggctcccctgcctcgccaggtcgccagcggcaagctgaatgccttgagtgcaggcgccgagatcgtgcgccgagaactgctggccaaataa

SEQ ID NO: 426056 - DNA, 1350 bp, Serratia marcescens
atgagcccagataccgctcgcatcagcgaaattatcgatcgcgccaggatctcgccttatcaaatcctcattctcaccctgtgtttcctgatcgccctgctggacggcttcgataccgccatcatcggctatatcgccccggcgctgcgtgaagagtggggcctacagccctcgcagctctctcccgccttcggcgcggggctgttcggcctgctgatcggcagcctgctgttcgggccgatcgccgacgccatcggccgcaaacgcgtgctgctcgtcgcggtgctggtgtttggcggctgcaccctggcttcggcctatacgcattcgatcgaatccctgaccctgctgcgcttcatcaccggcattggcctcgggggcgcgataccgacctgcatcaccctcagctcggagtactcaccggcgcgtcgccgcatgctgatggtcaccctgagctggagcggctttaccgccggcttggccctgggcggcctgctggccgggcagatcattcctgcatttggctggcgcggcgtgctgctggtcggcggcatcgcgccattggcgctgctgccgctgctggcctggcagatgcccgaatcggtgcgctttatggccgccagcgccaggcatgccgatcggctgcgccgggtggtcgagcgtatcaccggccaacgttggacggggataaccattgtcgatgacgagcgcccagcgcaggccaagtcgccgatctcgcacctgtttatcgaaggacgcgccgtgcgcaccctgctgctgtgggcggcgttcttctgctcgctgttcgtgttctacctgctcaccagttggctgccgacgatacttaaagacgccggttacgatatcgcccacgcctcgcgcatcggggcgatggtgccgctcggcggcaccctgggcgccatcctgatggcgctgctgatggaccggatcgggcactaccgcgtgctggccgtctcctacctgggcgccgcgctggtgatcggcgcgaccgggtatctgatgggcgatgtctacacgctggccgccgtcgtgttcctgataggcttcggcgtggccggcgcgcagaacggcctgaatctggtttccgccaccctttatccgaccgcggcccgcgtcaccggcgtcagctgggccatggccaatggccgcttcggctcaatcgtcggctcgatgctcggcgcctggatgatgaccgccgccggctcggcggaagtgttcttcctctggctggcgctgccggcgctgctgggcgcgggcgccatcttcctgctctatcacctcagcctgcgccgccgcgcgccgctcgccaagccggtcgccggcgcttga

SEQ ID NO: 426057 - DNA, 867 bp, Serratia marcescens
atgaaagatttgaatgtagtagacggcatcaacggtgccggcaactggttggtgaagaaccaggatctgttgatccagtacgcggtgaatatcgtcgccgccatcgttatcctgatcatcggttcgatcgtggctcgcgtggtcggcaatgcgctgaaccgcgtgatgaagctgcgcggcatcgacgccacggtggcagacttcctggcggcgatcgtgcgctacggcgtgctggcgttcaccttcatcgccgtgctggggcgtgtcggcgtgcagaccacctcggtgatcgccgtgctgggcgccgccggtttggccgtcggcctggcgctgcaaggctcgctgtccaacttcgccgccggcgtgctgctggtgatcttccgtccgctgcgcgtgggggaatatgtcgatctgggcggcgtggccggtaccgtcgatcaggtgcagattttctccaccaccctgcgtaccgcagacaacaaaaccatcgtggtgccgaacggtaaaatcatcgccggcaacatcatcaactattctcgcgagccgaaccgccgcgtggatatcgtggtaggcgtggcctacaacgccgatatcgacgtggtgaagaaggtgctgggcgatgtgatcgccgccgacaagcgcatcatgcacgccaaaggcgtgaccgtgcgtctgaacgagatggcgccgtcttccctgaactttgtcacccgttcctggaccaccaacgcggaatactggaacgtgtacttcgatctgatggaaaacttcaagcgcgcgctggatgcccacaacatcggcattccgttcccgcagatggacgtacacctgtatcgcaccgaagacgcttccgccaaggcggaataa

SEQ ID NO: 426058 - DNA, 669 bp, Serratia marcescens
atgcacattcgctcttcgctcaaacattattggcaagtgcggcccaggctgctgttttccgtcggcgccgggctgttgtgctttctgctgctgcccgcccagctctcgttgctgcagcgcttgatgatcggctggaatacgctggcctggctctatctgctgtttctctggcggctgatgctggtcagcacgccgcagcacattcgccagatcgcccggcgacaggatgaaagcgccagcacggtgttggcgctggtcagtttcggttgtctggtgagcattctggcaatcctgttcgaattgagcagcgccaaacaggccagcgactcgctgaaaaccctgcatctggcgttaaccggcggaacgctggcggtctcctggctgctgctgccgaccgccttcaccatgcactacgcccatcaattttatcgccagggtgcgcagcaggagcctttgccgctgctgttccccggcaatctcaccgagccgacctatctggacttcgcctacttctctttcaccatcgcggtcgcgtcgcaaaccgccgacgtggcggtcggcgccgcggaggtgcgtaaaatcgcgctcgtacagtcggttatttcgttcgtgttcaacatgctgatcctgggcctgtctatcaacgtcggggccggcctgctgggctga

SEQ ID NO: 426059 - DNA, 1080 bp, Serratia marcescens
atgtctaaaatttttgatttcgtaaaaccgggtgtcatcacgggtgatgacgttcagaaagtcttcgcagttgctaaagagaacaactttgcgctgccagcggtaaactgcgtgggtaccgactccattaacgcagtgctggaagccgcggctaaagtgcgcgcgccggtcatcgttcagttctccaacggcggcgccgcgttcatcgccggcaaaggcgtgaagaccgatgtgcctcagggcgcagcgattctgggcgctatctccggcgcacaccacgttcaccagatggctgaacactacggcgtgccggtgatcctgcacaccgaccactgcgcgaagaaactgctgccatggctggacggcctgctggacgccggcgagaagcacttcgccgctaccggcaaaccgctgttctcttctcacatgatcgatctgtctgaagagtctctggaagaaaacatcgagatctgcagcgcctacctgaagcgcatggccaaaatcggcatgacgctggaaatcgaactgggctgcaccggcggtgaagaagatggcgtggacaacagccatatggacgcttccgcactgtacacccagccggaagacgtggcttacgcgtacgaaaaactgaacgccatcagcccgcgcttcaccatcgctgcctccttcggtaacgtgcacggcgtgtacaagccaggcaacgtcaagctgaccccgaccatcctgcgtgattcccaggactacgtgtccaagaaattcaacctgccgcacaacagcctgaacttcgtgttccacggcggttccgggtctaccgacgcagagatcaaagagtctgtgggttacggcgtgatcaagatgaacatcgacaccgacacccaatgggcgacctgggacggcatcctgcagtactacaaagcgaacgaagcttacctgcagggtcagttgggcaacccgaaaggcgccgatcagccgaacaagaaatactacgatccacgcgtatggctgcgcgcagcgcagaccagcatggtgacgcgtctggagcaggccttcaaagatctgaacgcggtagacgtcctgtaa

SEQ ID NO: 426060 - DNA, 1164 bp, Serratia marcescens
atgtctgtaattaagatgaccgatctggatctggcgggtaaacgcgtactgatccgctccgatctgaacgtgccggtaaaagacggtaaagtgacttccgacgcgcgtatccgcgcttccctgccgactatcgaagctgcgctgaagcaaggcgcccgcgtgatggtaacctcccacctgggtcgtcctaccgaaggcgagtacaacgaagaattctccctgctgcctgtggtcaactacctgaaagatcacctgaaatccccagtgcgtctggcgaaggattatctggatggcgtcgacgtcgccgaaggcgaactggtggtgctggaaaacgtccgtttcaacaagggcgagaagaaagacgacgaaaccctgtccaagaaatacgcggcgctgtgcgacgtgtacgtaatggacgcgttcggcaccgcgcaccgcgcgcaggcttccacccacggcgtgggcaagttcgcgcctgtcgcctgtgccggcccgctgctgtccgccgagctggaagcgctgggcaaggccctgggcaacccggcccgtccgatggttgccatcgtgggcggttctaaagtctccaccaaactgaccgtgctggattccctgtccaaaatcgccgatcagctgatcgtcggcggcggcatcgccaacaccttcgtggcggcgcagggcaacaacgtgggccagtccctgtacgaacctgacctgatcccgaacgcgcagaaactgctggaaacctgcgacatcccggttccgaccgacgtgcgcgtagcgaccgagttctccgaaaccgcgaccgcgaccgtgaagcaggccaacgagatccaggacaacgagcaaattctggatatgggcgacgtctctgccgagcgtctggccgttatcctgaagaacgccaagaccattctgtggaatggcccggttggcgtattcgagttccctaacttccgtaagggcaccgaaattgtcgcccgcgcgatcgccgatagcgacgctttctctatcgctggcggcggcgacactctggcagccatcgatctgttcggtatcgctgacaaaatttcctacatctccaccggcggtggcgcattcctggaattcgttgaagggaaaccgctgcctgcagtcgtgatgctggaagagcgcgctaagcagtaa

SEQ ID NO: 426061 - DNA, 1017 bp, Serratia marcescens
atgaccatccgcatagcgataaacggctttggccgcatcggccgcagcgtattgcgcgcactgtacgaatcgggacgacgggcggaaatctccgtggtggcgatcaacgagctggcgaacgccgagggcatggctcatctgctgaagtacgattccagccacggccgcttcgcctgggatgtgcggcaagagtgcgacacgctgagcgtcggggacgacgcgattcgcctgttgcatcagccggcggtggagcagttgccctggggcgagctgggcgtcgacgtggtgctggactgcagcggcgtgtacggcagccgggcggatggcgaagcccatctggcggcgggggcgaagaaagtgctgttcgcccatccgggcggcaacgatctggacgccaccatcgtgttcggcgtcaaccatcagacgctgctggcggaacatcgcatcgtgtccaacgcctcgtgcaccaccaactgcattattccggtgatcaagctgctggacgacgcctacagcatcgaatccggcaccgtgaccaccattcactcggcgatgaacgatcagccggtgatcgacgcgtatcacgcggatttgcggcgcacccgcgcggcgagccagtcgatcattccggtcgacaccaagctggccgcgggcatcacccgtatcttcccgcagttttgcgatcgcttcgaggcgatctcggtgcgcgtgccgaccatcaacgtgacggctatcgatctcagcgtcagcgtgagcgccgcggtgaaggtggcggaggtcaaccagctgttgcaaaaggccgcacgggaatcatttcgtggtatagttgactacacggaattaccattggtctcgatcgattttaaccatgacccgcacagcgctatcgtcgacggtacgcagacccgggtcagcgggcagcacctgataaagaccttggtctggtgcgacaatgaatggggctttgccaatcggatgttggatacaacacgggcaatggccgccagcggtttctag

SEQ ID NO: 426062 - DNA, 1071 bp, Serratia marcescens
atgattgaactttcggtagagaatctgcatttgacctatggcgacaacccggtgctgaaaggggtgtcgatggacctgaaacggggcgaagtggtctcgctgctgggcccgtcgggcagcggcaaaaccacgctgctgcgggcggtggccgggctggagaaaccgagccaggggcggatcgtcatcggcaataacgcggtgtacaacggcagcgcacgcagcgaaattcccgccgaagagcgcaatctggggctggtgtttcagtcctacgcgctgtggccgcataaaacggtgtttgagaacgtcgcttacccgctgaagctgcgtaagatcgcctcggcggaaatcacccagcgggtgcaggcggtgctggaacagctcgggttggggcatctggccaagcgccatccgcaccagctttccggcggccagcagcagcgcgtggcgatcggacgggcgctggtctacaacccgccggtgatcctgctggacgagccgctgtccaaccttgacgccaagctgcgcgaagaggcgcgggtattcctgcgcgagttgatcatcaagcttggcctgtcggcgctgatggtgacccacgatcagaacgaggcgatggccatctccgatcgcatcctgctgctcaataacggcaaaatcgaacagcagggcacgccgcaggagatgtacggttcgcccaccacgctgttcaccgccgagttcatgggcagcaacaaccgcttgccgggcaaggttgtcgcgctggaaggcgaccgggcgcgcatcgaaggcaaggattgggcgctgtggggcaaagcgggcgcaggcgtgcaggtcggccaggagggctcggcggtgatccgcgtggagcgcgtgcggttgggcgaagatccgcagggcaaccagcttgagctgccgctgctggccagcatgtatctcggcgatcgctgggaatacctgttccgcaccgtggccgaggatttcgtggtgcgcgcctatggccacgaagcgcgcgatcgggcgctgtgccggctctccctgccggccgagcatctgtggatattcccgaaagcctaa

SEQ ID NO: 426063 - DNA, 1770 bp, Serratia marcescens
atgcaagcatggcgcagaaagtggcagagcctgccgcgcggcctggtggtgttgataaccgcgctggttatctatgtccccctgtcgtttatcatcattcaaagcttcctctcggcaccgtttttctctccctccaaggtcttcagcctggaggccttcgagttcatctttaccgatcctgatttctacaaggcgctgaagagcggctttattctggcattcggcctggtgatcatcgccatccccctcggcggcattttggctttcctgatggtgcgcaccgatctgccggggcggcggatcatcgagccgctgattctggtgccgatcttcgtgtcgccgatggtgctgggcttcggctacgtggtggcggcggggccggtgggcttcttctcgctgtgggcgcaggcgctgctgggcttcgtgccgtggaatatctattcgatggccagcatcgtggtgatagccggattgacgcacgtgccccacgcgtatctgtacatctcctcggcgctgcgcagcgtgggctccgacgttgaagaagcggcgcgcaccgccggcgccacgccgctgcaggtgatgaccgccgtcagcctgccgatggtgcggccgtctatcctgtacgccggggtgctgctgttcttcctcgggctggaagtgttcggcctgatgctggtgctgggggatccggagggcaacctggtgctggcgacctacctgtaccagttgaccaacaagctgggcacgccgtcttaccacctgatggcggcggtggcggtggtgctgatctgcatcaccattccgctggtgatgctgcagcgccggctgatgcgcaccgccaaccgcttcgttaccgtcaagggcaaagcctcgcaggcccgcgcgctgccgctgggcaaatggcgctgggtggccggcgcggtggtggtgttctggctgaccgtgaccatcggcgtgccgctgataggcgtggtgctgcgcgcctttatctccaactggggcgtgggcgtgtctgtttgggacgagctgtcgatcaacaccttccgcaccatctgggcgcagcccaacctgctgcgggccatcgtcaactcaatggcgattggggtgattggcggggcgctggcggtggcgtgctacctgttcatcggcattgccatgcaccgcaagccggatggcgccacgcgcttcctcgattacagcgtgctggtgccgcgcgctgtgccggggctgctggccggtctggcattcctgtgggtgtttctgttcctgccgatgtggctggacaaatcgctcaaggagggctggctgtcggcgctgccgatggccgagtggctgcgtgctaactggatcgtctggctgcgttcgctgcgcagcaccatcttcagcgtctggctggcgtacaccgtggtgtggatggcttacggcctgcggctgatctcctcgacgctgctgcaggtggggccggagttggaggaggcggcgcgcagcgccggcgccagccgcggtcagatcacccgccacgtcaccattccgctgtcgcgctacggcctgatcggctcctggctgctgatgttcctgatttttgagcgcgaatactccaccggggtgtatctgctgtctcctggcacggaaaccatcggctcgatgctggtttccctgtgggccgcgggcgctatcgatatcgtcgccgcgctgtcgttcatcaatatcctgctggtggtgctggggttagggatcgccttgcgctttggagtgaaattacatgattga

SEQ ID NO: 426064 - DNA, 1092 bp, Serratia marcescens
atgatgatgaaaaaaatcagcgcgaccgtagctgcaatcaccttactgggctccgtttccgcctatgcggccttcccggcgggctaccccgccgactatcagaaatgggtcgacggcgcgaagaaagaaggcaaagtggtgatttactcgaccaccgacaccaaggcggcggcgccgctgattcaggggttcgaggcgttgtatccgggcatcaaggtggaatacaacgacatgaacagcaccgaactctataaccgcttcatcagcgagcaggcggccggcggcaccagcggcgacgtggtgtggagctcgtcgatggacaccattttgaaactggcgggcgattacgcgcaggagtatgcctcccctgagcaggcccagctgccgaaatgggcggtatggcaagataaagtgtatggcaccacctatgagccggtggtgtttatctataacaaacgcctgatcccgcaaggcgatgtgccggattcgcacgcggcgctggccaagctgatcgccggccagacggacaaattcaagaagaaagtcaccacgtacgacatcgaaaaatccggcgtcggcttcatgctgtcggtgcaggacttcaaggccgatcccaactacttcaaaacgctggccgacgtggccaagggcgggctggcggtgcaatcctccaccggcaccatgatggaacgcgtctcctccggtgaaaacctgatcggcttcaatatcctcggttcgtacgccgaggcccgcgccaaaagcgacccgtcgctcggcatcgtctatccgaaagactataccctggtgctgtcgcgcgtgagcttcatcagcaaagaggccggcaaccctaacgccgccaagctgtggttcgactacgtgctgtcggagaaagggcaaagtattctcgccaatcaggcggatatcccctcgatccgcaacgacatcgaaggcaagaacgacatcgacggcatgaccaagctgttgggtaacgcgctcaagccgatcccggtcgacgacagcctgctggaatatctgcagccggccaaacgcctcgactacatcaaacagtggcgcgccgccgcggcgaaataa

SEQ ID NO: 426065 - DNA, 1323 bp, Serratia marcescens
atgaccaagaatttatccccgaaagacattatcgccctgggctttatgaccttcgccctgtttgtcggcgccggcaacatcattttcccgccgctggtgggactgcagtccggtgaacatctgtggccggccgccctcgggtttatggtgaccgccgtcgccctgccggtgatcgccgtgatcgcgctggcgcgcgtcggcggcagcatcagcctgctgaccggccccatcggccgcaccgccggcctgctgttggcgaccgtctgctatcttgcgctcggcccactgttcgccacgccgcgaaccgccaatgtctctttcgccctcggcatcgcgcccttcaccggcgacggcgccctgccgcagttcatctacagcctgctgttctttaccctggcgatgatcgtgtcgctgtatcccggccgcttgctcgataacgtcggccatattctggcgccgctgaaaattctggcgctggccgcactcggcatcgccgccctggtttggcccgccggtgcgccgatctccgccgtcggcagctatcaggcagcggcgttttccaccggtttcgtgcaggggtatcaaaccatggacacgctgtcggcgctgatgttcggctcgattatcgttaccgccgcccgctcgcgcggcgtcagcgacagcggcctgctgctgcgctacaccctgtgggccagcctgatcgccggcgtcggcctgacgctggtctatatctgcatgttcaagctcggcgccggcagcggcggcctggtcgagagtggcgctcaggatggcgcggcgatcctgcacgcctatgtgcagcacaccttcggcgatctgggcagcatctttatggcggtgctgatgttcatcgcctgcctggtgacggcggtcggcatgacctgcgcctgcgcggacttcttctcccgctacctgccgctctcttaccgcgcgctggtggtcatcctagccctcttcgccatgctggtctccaacatggggctggccaatctgatccgcgtctcgctgccggtgctgacggcgatctatccgccctgcatcgcgctggtgttactcagcttcagccagaaccgctggcgcagcgccaagcgcgtcttcgcgccggtgatcgccaccagcctggtgtttggcctcgccgacggcctgaaggcctccagcttcagcggcctgctgcccgcctggttcgataagctgccgctggccgaacagggtctggtctggctgcagcctacgctgctggtgctgttgctggcggcggcttacgaccggttgcgcagcgtcgaaagcgccaacgccgcgtcgtaa

SEQ ID NO: 426066 - DNA, 864 bp, Serratia marcescens
atggctacgctactccaggaagagaatactacctcactggaagctataccttctaacagcaccgccacacctcgcccgacggtgctggttttcgattccggcgtcggcgggctgtcggtatatcaggagattcggcagttgctgccggatctccactatatatacgctttcgacaacgtggcgttcccctacggtgagaagtccgaagagtttatcgttgagcgcgtgatggagattgtcggcgcagtgcagcagcggcatcctctggcgattgtcgtcattgcctgcaacaccgccagcaccgtttccttgccggccctgcgcgagcgtttcagcttcccggtcgtgggcgtggtgcccgccatcaagcctgccgcccgtcttaccgttaacggcatcgtcggcctgttggcgacccgcggcaccgtacaacgcagctacacccacgaactgatttcccgtttcgctaccgactgcaagattgaactgctgggctcttcagagctggtggagttggcggaggccaagctgcacggcgaagccgtgccgttgccggtactgaagaagatcctgcatccgtggctgagcatgcgcgagccgccggataccgtcgtgctgggctgcacccatttccctctattagctgaagagctgatgcaggtgttgccggaaggcacccggctggtggattccggcgcggcgattgcccgtcgtaccgcctggctcatctcgacgcaggaaaatctggtctcgagccaggaagagaatctggcctattgcatggcgttgaatgaagatactgacgctttattgcccgttttgcagagctacggctttaaatcgttgaaaaaactgccgctttaa

SEQ ID NO: 426067 - DNA, 1872 bp, Serratia marcescens
atgacaattacaaaaaatacgctgctggcggtggtttcctccgtcacggctttttctggatgggcgcaagacaacaccacaaccacgaatggcgataacctggtggtgaccgccaaccgcttcccgcagccggtttcttccgtgctggcgccgacttccatcgtcacccgcaacgatatcgatcgctggcaggccaagagcctgaccgacgtgatgcgccgcctgccgggcgtggatgttggccagaacggcgggctggggcaaaagagctcgctgtttattcgcggcaccaactccagccacgtgctggtgctaattgacggcattcgccttaaccaggcgggcgtcagcggctcttccgatcttagccaaatcccaatttcgctggtgcagaaagtcgaatacattcgcggcccgcgctcggcggtgtacggctccgacgccatcggcggcgtggtcaacatcattaccacccgcgaaaagaacggcacgacgctttccgccggcctcggctccaacggctatcaatcctatgacgcgtcgacccaacagcagctgggcgacagcaccgtggcgacggtggcgggcgactacacctataccaaagggtatgacgtggtggcctatggcagtaccggtatgcaaagccagcaggatcgcgatggttttatgagtaaatcactgtatggtgcgcttgagcatcagttcagcgaatcggtcagcggttttgtacgtgggtatggctacgacaaccgcacggcgtacgatagttactattcctctccggccagctctctgctagatactcgcaagctgtacagccaaacctgggataccggattgcgttataaagaaggcatttacgcaacacaattgaccggcagctacagccatagcaaggattacgattacgatcctcgccgcggtatgcatgacagctcggccagcctggtggattccgaacagtacaacctgcagtggggcaatacgctgcaggttggacagggtaccgtaagctctggcgtcgactggcagcaacagaaaatcaaaccggactccaccaccgtaaagggtgaaaaaagccaacgtgatgcaggcatctatctgaccgcgcagcaactggttggcccggtgacgctggaaggcgcggttcggggtgacgatcattccgagtttggctggcacggcacctggcaaaccagcgcggcctgggagttcgtcgagggataccgttttatcgcgtcgtatggcacggcgttcaaagcacccaatatgggccagctatacggcaactttggcaataacaccgatctgaagccggaagaaagcaagcagtgggaaggcggttttgaagggctgaccgggccggtgacctggcgcatctccggttatcgcaacgacatcgacaatttgatcgattcgacgggggaaaccaactacgtctactacaacgtgggtaaggcgaccatcaaagggattgaagcgacggcgtcttttgataccggcccgctgacgcaccagattggttacgattatgtcgacccgcgcaacgcaaaaactcacgaagtgctgctgcgccgcgccaaacagcaggtgaaatatgagctggactggcagctgtatgactttgactgggcggtgacttatcaatatttgggtcaacgttatgacaaggactacagtacctatccggagcagagcgtgaaactcggcggcgtgagcctgtgggatctcgcagtttcgtatccggtcacatctcatctgacagttcgtggtagaattgccaacctgtttgataaagattatgagacggcctatggctacgctactccaggaagagaatactacctcactggaagctataccttctaa

SEQ ID NO: 426068 - DNA, 1104 bp, Serratia marcescens
atgacgcccgagaatttgcctattgaacgttacgatgaccaactggcggagaaagtcgcccgcctgaagacgttgatgtcaccgttcgcggcgcccgagccggaagtgttccgctcgccagtcgatcactaccgcatgcgcgccgaattccgcatctggcacgacgcggacgacatgtaccacatcatgttcgatcagcagaccaagcagcgtattcgcgtcgatcgtttcccggccgccagcgaactgatcaaccgcctgatgagcgccctgatcgccgcgctgaaaccggaaccgatcctgcgccacaagctgttccagatcgattatctgtcgacgcaaagcggcaaaatcatcgcctcgctgctgtaccaccgcaagctggatgacgtttggcaacggcgcgccgagcagctgcgtgacgatctgcgcgcgcagggtttcgacctgcagctgatcggccgggcgtcgaagaccaaaatcatgctcgaccaggattatgttgacgaagtactgccggtcgccggccgcgacatgatctaccgccaggtggaaaacagctttactcagcccaacgcggccatgaacgtgcagatgctggaatgggcgctggcggtgaccgccggttccaaaggcgatttgctggagctgtattgcggcaacggcaacttctcgctggcgctggcgcgcaatttcgagcgcgtgctggcgaccgagatcgccaaaccgtcggtggcggcggcgcaatacaacatcgctgccaaccatatcgacaacgtgcagatcattcgcatggcggcggaagacttcactcaggcgatgaacggggtgcgcgaattcaaccgattgaaaggcatcgatctgagcggctacaactgcgagacgattttcgtcgatccgccgcgcagcgggctggacgaggaaacggtgaagatggtgcaggcctacccgcgcattctctatatctcatgcaatccggaaacgctgtgcgccaacctggaaacgctgcaggccacgcaccgggtcagccgcctggcgctgttcgatcagttcccgtatacccatcacatggaatgcggcgtgctgctggaaaagcaccgctga

SEQ ID NO: 426069 - DNA, 372 bp, Serratia marcescens
atggaaaaaccaggccgtgaaaatggcaccttactgctggcgttgattgccggcctttcgatcaacggttcgtttgccgcgctgttcagctcggtggtgccgttttcgatcttcccgctgatcgcgttggtgctggcggtgtactgcctgcatcagcgttacctgaaccgcgctatgccggacggcatgccgaagcttgcggcggcctgtttcctgctggggctgctgatgtacagcgccatcgtgcgcgccgaatacccgcagatcggctccaacttcctgccgtcggtgatctgcgtggcgctggtgctgtggatcgggatgaaactgaaggcgcgcaaggcgccggatgcgccgactcaagagtcgtaa

SEQ ID NO: 426070 - DNA, 633 bp, Serratia marcescens
atgggcgtcagagcacaacaaaaagaacggactcgtcgttccctgatcgaagccgcattcagccagctgagcgccgaacgcagcttcgccagcctgagcctgcgggaagtttcacgcgaggcgggcatcgcgcccacatcgttttaccgccatttccgcgatgtggatgagctggggctgaccatggtggacgaaagcggcctgatgctgcgtcagttgatgcgccaggcgcgccaacgcatcgccaagggcggcagcgtgatccgcacctcggtgtccacctttatggaatttatcggcaacaacccgaacgccttccgcctgctgctgcgcgagcgctccggcacgtcggcggcattccgtgcggcggtggcgcgcgagatccagcatttcatcgccgaactggcggactacctcgagttggaaaaccacatgccgcgcagctttaccgaagcgcaggcggaggcgatggtcaccatcgtgttcagcgccggcgcggaagcgctggatatcgacgtcgagcagcggcagcagctggaagagcggctggtgctgcagctgcggatgatctccaaaggggcgtattactggtatcgccgcgaacaagaaaaagcttctgtgtcccacgtataa

SEQ ID NO: 426071 - DNA, 1398 bp, Serratia marcescens
atgcaacagcactatcaatttgatgccattgtgattggctcgggccctggtggtgaaggtgccgccatggggctggtgaaacagggcgcccgcgtggccgttatcgaacggtacaacaacgtaggcggcggatgtacccactggggcaccatcccttccaaagccctccgccacgccgtcagccgcattatcgaattcaaccagaacccgctttacaacaactcgcgcacgctcagcgcgaccttccctgacattttacgccacgccgataacgtcatcagccagcaaacccgcatgcgccaagggttctatgagcggaaccagtgcaaactgttcgccggcgacgcgcgtttcatcgacgccaacaccgtcagcgtcagctacatggacggcacccaggacaccatccgcgccgaccacatcgtgatcgcctgcggctcgcgcccttatcacccggccagcgtcgatttcaatcacccgcgcatctacgacagcgattccattctcgagctgagccatgaaccgcgccacgtgatcatttacggcgccggggtgatcggctgcgaatacgcgtctatcttccgcggtctgaacgtcaaggtcgatctgatcaacacccgcgatcgcctgctggcattcctcgatcaggagatgtcggattcgctctcttaccacttctggaacaacggcgtggtgatccgccacaacgaggagttcgagaagattgaaggcaccgaagacggcgtgatcgtgcacctgaagtccggcaagaaggtgaaagcggactgcctgctgtacgccaacggccgtaccggcaacacagattcgctggggttggaaaacgtcggcctggaatcggacagccgcgggctactgaaggtgaacagcatgtaccaaaccgcgctgtcgcacatctatgcggtcggtgacgtgatcggctatccgagcttggcttccgccgcctacgatcagggccgcatcgccgcgcaggcgatcgcttccggcgaagccagcggtcacctaatcgaagatatcccgaccggcatctacaccattccggaaatcagctccgtcggcaaaaccgagcaggaactgacggcgatgaaggtgccgtatgaagtgggccgcgcccagttcaagcatctggcgcgcgcgcagatcgccgggatgaacgtaggcagcctgaagatcctgttccatcgcgacaccctgcagatcctcgggatccactgcttcggcgagcgtgcggcggagatcatccacatcggtcaggcgatcatggaacagaaaggtgaaggcaatactatcgagtatttcgttaatacgaccttcaactatccgaccatggccgaagcctaccgggtggcggcgcttaacggcttaaaccgcctgttttaa

SEQ ID NO: 426072 - DNA, 918 bp, Serratia marcescens
atgaatattcgtgatttagagtatctggtcgccttggccgagcaccggcacttccgccgcgcggccgattcatgccatgtaagccaacccacgctgagcgggcagatccgcaagctggaagacgagttgggcgtcatgctgctcgagcgcaccagccgcaaggtgctgttcacccaggcgggtctgctgctggtggagcaggcgcgtaccgtgctgcgcgaagtgaaagtattgaaggagatggccagccagcagggcgaagccatgtccgggccgctgcacatcggcctgatcccgaccgtggggccttatctgctgccgcagatcatcccgacgctgcacaaaactttcccgaaactggaaatgtacctgcacgaagcgcaaacccagcaactgctggcgcaactcgacagcggcaaattggactgcgccattctggcattggtgaaggaaaccgaggcgtttatcgaagtgcctctgttcgatgaaccgatgaagctggcggtgtattccgatcacccgtgggcgcagcgcgagcgcgtggcgatgccggatttggcgggagagaagctgctgatgctggaggatgggcactgcctgcgcgatcaggcgatgggcttctgcttccaggcgggcgcggacgaagatacccacttccgcgccaccagtctggaaacgctgcgcaatatggtcgcggccggcagcggcattaccctgctgccgtcactggcggtgccgccgcagcgcgaacgcgacggcgtctgctatctggattgctacaagccggaaccgaagcgcaccatcgcgttggtgtatcgccccggttccccactgcgcagccgttatgagcagttggccgaagcgatccgcgagcacatgcagggctacatcgacaacgcgttaaaacaggcggtttaa

SEQ ID NO: 426073 - DNA, 732 bp, Serratia marcescens
atgtttaccagtcaagaaggcaagaaagttcctcaggttactttccacacccgtcagggcgaccaatggattgatgtgaccactgatgacctgttcaaaaacaaaaccgttatcgtgttctcgctgccgggcgcatttacgccaacctgttcttcgagccatttgccgcgctacaacgaactgtccagcgtattcaagcagcacggcgtcgacggcattctgtgcgtctcggtgaacgataccttcgtgatgaacgcctggaaagccgatcagcatgcggaaaacatcaccttcgtgccggacggcaacggtgaattcaccaaaggcatgaacatgctggtcgagaaagcggatctgggctttggcccgcgttcatggcgctactcgatgctggtgcgcgacggcgtggtcgagaaaatgttcgtcgaaccgaacaagccgggcgacccgtttgaagtgtccgacgccgacaccatgctgaaatacctggcgccggaattcaaagtgcaggagtcggtctccctgttcaccaagccgggctgcccattctgcgccaaagccaagcaaatgctgcaagagcgcggcattcagtatgaagagatcgtactgggcaaagacgccaccaccgtcagcctgcgcgccgtcagcggccgcgccacggtgccgcaagtgttcatcggcggccgtcacatcggcggcagcgacgatctggaaactttcctgtcagcttaa

SEQ ID NO: 426074 - DNA, 1449 bp, Serratia marcescens
atgaaactgttgaacgttgatgttgcggtcatcggcggcggcaccgcagggctcggcgcctatcgcgcggccaaactgtctacccccaacgtggtgatgatcgaaggcgggccttacggcaccacctgtgcgcgcgttggctgcatgccatccaaattattgatagccgctgccgaagcggtacatcaaatcgaacgcgcgccgggctttggcgtgcacccaaccggtacaacccgcatcgacgggcgcgaagtgatggcgcgcgtcaaacgcgaacgcgatcgcttcgtcggcttcgtgctggaaggcgtggacgagatcccggccggcgacaaaattcagggctatgcccgctttatcgacgacaacacgctgcaggtcgacgagcatacgcgcatcgtggcgcagcgcatcgtgatcgccaccggttcccgccccagctggccggcgccgtggaacgaactgggcgatcgtctgatcgtcaacgacgatctgttcaactgggatgatttgccgcagtccgtagcggtattcggccccggcgtcatcgggctcgagctggggcaagcgctgcaccgcctcggcgtcgacaccaaggtcttcggcatcggcggcgccgtcgggccgctgaccgacagcgccgtgcgcgactacgccgccaacgcgctgggggaagagttctatctcgacgccgacgtgaaggtagagatgatgcagcgcgaaggcgaccgcgtatttatccgctatcgggatctgcagggccaaccgcaggagatcctggtggactacgtgctggccgccaccggccgccgccccaacgtcgatcggctgggcctcgaaaacaccggcttacagctcgacgcccgaggcgtgccgttggccgaccgcctgacgatgcaaaccagcgtgccgcatattttcatcgccggcgacgccagcaaccagctgccgctgctgcatgaggccagcgatcaggcgcgcatcgccggcgccaacgccggcagtttcccggagatcaatccgggcctgcgccgcagcgcgatttcagtggtgttctccgatccgcagatcgccatggtcggctcgaccttccgcgagctgagcgagaagttcagcgcctgcggctgctttgaagtgggccaggtctcgtttgagaatcagggccgctcgcgggtgatgctgcgcaacaaaggcattctgcacgtctacggcgagcaaggcaccggccgtttcctcggcgcggaaatgatcggcccggacgccgagcacatcgcgcacctgttggcctgggcgcatcagcaacagatgaccgtcgatcagatgctggacatgccgttctatcacccggtgatcgaggaaggcttgcgcaccgcgctgcgtgacctgcaggcgaagctcaaactcggcacggccgaaatcgagcgctgccagcgctgcccgggcgaataa

SEQ ID NO: 426075 - DNA, 327 bp, Serratia marcescens
atggaaaagcatgaacactatacctatcgcatcacctggtcagcggaagatcgtgaatatgtcgggctgtgcgccgaattcccctcgttgtcctggctggcggccacgcgtaccggcgcgctggagggtatcgaaaaagtggtgagcgaaacgatcgacgatatgttggcgcaaggtgaaacgccgccgcaggcgctggcggaaaagaacttcagcggaaaactggtgttgcgcatgacgccggaacagcatcggcggctggcgatcggcgcgatggaggaaggcgtgagtctgaaccgttatctgtgcgcacgcctggcggggtag

SEQ ID NO: 426076 - DNA, 1374 bp, Serratia marcescens
atggcactttggggcggacggttcactcaggcggcggatcagcggttcaagcaactcaacgattcgctgcggttcgattatcgcctggcggagcaggatatcgtgggctcggtggcctggtcgaaggcgctggtgaccgttaacgtgttgacggcaacggagcaacagcagctggagcaggcgctgaatgcgctactgacggaggtccaggccgatcctttggcgatcgtccaaagcgatgccgaagacatccacagctgggtggagcagaagctgatcgagaaggtcggcgatttgggcaagaagctgcacaccggccgcagccgcaacgatcaggtcgcgaccgatctgaagctgtggtgcaaacagcaagtcggcgatctgcatcaggcgatcgtccagctgcagcaggcgctggtggagaccgccgaagccaaccaggatgcggtgatgccggggtatacccacctgcaacgcgcgcagccggtgactttcgcgcactggtgcctggcctatgtcgagatgctggcgcgcgatgagagccgcctgcaggataccctgaaacggctggacgtcagcccgctgggcagcggcgcgctggccggcaccgcttatcctatcgatcgcgagcagctggccggctggctgggcttcgcctcggcgacccgcaacagcctggacagcgtatccgatcgcgatcacgtgctggagctgctgtccaacgccgccatcagcatggtgcacctgtcgcgcttcgccgaagacctgatcttcttcaacagcggcgaagcagcgtttgtcgagctgtccgaccgtgtgacctccggttcttcgctgatgccgcagaagaaaaacccggacgcgctggagctgatccgcggcaagtgcggccgcgtgcagggcgcgctgaccggcatgatgatgacgctgaaaggcctgccgctggcgtacaacaaagacatgcaggaagacaaagaagggctgttcgacgcgctcgacacctggatggactgcctgcagatggcggcgctggtgctggacggcattcaggtgaagcgcccgcgctgccaggaagcggcggagcagggctatgccaacgccaccgaactggcggattacctggtcgccaagggcgtgccgttccgcgaggcgcaccatatcgtcggcgaggcggtggtagaagcgattcgccagggcaaaccgctggaagcgctgccgctggcggacttgcagcagttcagcgcaacgatcggcgacgacgtttacccgatcctggccttgcaatcctgcctggacaagcgtgcggccaaaggcggcgtcgcgccgcagcaggtggccgcggcaatcgccgcagcgaaacagcgtttggcttga

SEQ ID NO: 426077 - DNA, 1221 bp, Serratia marcescens
atgcaaaaccaaggcatcaaaaaaatcgttctggcgtactccggcggcctggatacctcggccatcattccatggctgaaagagaactacggcggctgtgaagtggtggcgttcgtggcggacatcggtcaggagcgcagcgatctggaaggcgtggagcaaaaagccctgcagtccggtgcctctgaatgtcacgtggtcgatctgcgtgaagaatttatccgcgattacgtttatccggtgctgcagaccggcgccctgtacgagggcagctacctgctgggcacctcgatggcgcggccgatcatcgccaaggcgcaggtcgagctggcgttgaaagtgggcgccgacgcgctgtgccacggcgcgaccggcaaaggcaacgaccaggtgcgcttcgagaccacctacaccgcgctggcaccgcagctgaaagtggtggcgccgtggcgtgagtggaacctgcgttcccgtgaagcgctgctggattacctgaaagagcgcaacatcccgactaccgcgtcgttggagaagatctacagccgcgatgaaaacgcctggcacatctccaccgaaggcggcgtgctggaaagcccgtggaatgcgccgaacaaagattgctgggtgtggaccgtcgatccgcaggaagcgccggaccagcctgagcaggtgaccgtcaccgttgagaaaggccgcgtcgtggcggttaacggtaaagcgctgtcgccgtaccagtgcctggaaaccctgaacgcgctgggcgccaagcacggcgtcggccgtatcgacatcgtggaaaaccgcttggtgggtatcaaatcccgcggctgctatgaaaccccggggggcaccatcatggtggcggcgctgcgcgccgtcgagcagctggtgctggaccgcgacagcttcaaatggcgcgagcagctgggcctggagatgtcttatgtggtgtacgacggccgctggttcgcgccgctgcgccgctcgctgcaggcctctgccgaagcattggctgaagaggtaaacggtgaagtggtgctgcagctgtacaaaggccaggtgacggcgatccagaaaaaatccgccaacagcctgtactccgaagagttcgccaccttcggcgaagacgaagtttacgatcacagccacgcgggcggctttatccgcctgttctctctgtcttcacgcatccgcgcgttgaacgagaaaaagaataaataa

SEQ ID NO: 426078 - DNA, 774 bp, Serratia marcescens
atgaacccgttaattatcaagttaggtggcgtgttattagacagtgaagaagcgctggagcgtctgtttaccgcgctggacagctaccggcagcagcatcagcgcccgctggtgatcgtgcacggcggcggctgcgtggtggacgaactgatgaagcagctctctttgccggtggtgaaaaagaacggcctgcgggtcacgccggccgatcagatcgacatcatcaccggcgcgctggccggcaccgccaacaaaacgctgctggcgtgggcgattaaacaccaaatcaacgccgtcggcctgagcctggcggacggcggcagcgcagtcgtgaccccgctcgatccggcattgggccacgtcggcaacgcgcagcccggttcgcccgcgctgctcaataccctgctgagcgccggctacctgccggttgtcagctccatcggcatcaccgccgatgggcagttaatgaacgtgaacgccgatcaggcggcgacggcgctggcggcgacgctgggggcggatctgatcctgctgtcggacgtcagcggcatcctcgacggcaaggggcaacgcattgcggaaatgacggcgcaaaaagcggaacaactgatcgcgcaaggcattatcaccgatggtatggtggtgaaggtgaatgcggcgctcgacgcggcccgcaccctcggccgcccggtggatatcgccagctggcgccatgccgatcagcttcctgctttgtttaacggcgtgtcgattggcacccggatcctcgcttaa

SEQ ID NO: 426079 - DNA, 1005 bp, Serratia marcescens
atgttgaatacgctgatcgttggtgccagcggttacgccggagcggagctcacggcttacctgaatcgccacccacacatgaacataaccgctttagcggtttcagcgcaaagtgcagatgcaggaaagttgctttccgatctccatccccagttgaaaggcatcgtcgatctgccgctgcagccgttgaccgacgtcgccaaggcggcgcagggcatcgacgtggtgttcctcgccaccgctcatgaagtcagccacgatatcgcaccggccttcctggcggcgggctgcgtggtgttcgatctgtcgggcgccttccgcgtgcaggacgccgatttttatagccagtactacggtttcgagcatcagcatggcgccctgctggagcaggcggtgtacggcctggcggaatggcagagcgacaagattaaacaggcgcagctgattgccgtgccgggctgttacccgacggcggcgcagctggcgctgaaaccgttgatcgaaaaacagctgctgaacctcgaccagtggccggtgatcaacgccaccagcggcgtcagcggcgccgggcgcaaggccagcatgaccaccagcttctgcgaagtgagcctgcagccgtacggtattttcacccaccggcaccaaccggagatcgccgcgcacctgggcgtgccggtcatctttacgccgcacctgggcaacttcccgcgcggcatccttgaaaccatcacctgccgcctgaaggccggcgtgaccgcgcaggacgtggccgccgcctatcacgccgcctatgacgacaagccgctggtgcggctgtacgaccagggcgtgccggcgctgaaagcggtggtggggctgccgttctgcgacatcggctttgcggtgcagggcgagcatctgatcgccgtggcggtggaagacaacctgctgaaaggcgcggcggcacaggcggtgcaatgcctgaatatccgtttcggcttcccggaaacccagtcactcctttaa

SEQ ID NO: 426080 - DNA, 1146 bp, Serratia marcescens
atgaaattacctccatttattgagctgtaccgggcgttgatcgcaacgaagtcgatcagcgccaccgatgccggcctcgatcagagcaatgaggcgttaatcaacttgctggccggctggtttgccgacctgggctttcgcgtcgacgtgcagccggtgccggaatcgcgccacaaattcaacctgctggccagcatcggcgaaggcagcggcggcctgctgctggccggccataccgatacggtgccttacgacgaaggccgctggacgcgcgatcccttcaccctgaccgagcacgacaacaagctctacggcctgggcaccgccgacatgaaaggcttcttcgcctttattctggatgcggtgcgcgacatcgacgcgagcaaattgaccaagccgctgtacattctggctaccgcagatgaagaaacgacgatggccggcgcgcgttatttcgccgcttccaccgccattcgtccggatttcgccatcatcggcgaaccgacctcgctgcagccggtgcgtgcgcacaagggccacatggccaacgccattcgcatcgtcggccagtccggccactccagcgatccggcgcgcggcgtcaacgccatcgatctgatgcacgaatccatcggccgcctgatggagctgcgcaaaaccctgcaggagcgctacaacaatccggcgttcgccgtgccttatcccaccatgaacttcggccatatcagcggcggcgacgcggccaaccgcatctgcgcctgctgcgagctgcacctggatatccgcccgctgcctggcatgacgctagacaacatcaacgagctgatgcatcaggcattggagccggtgagccaacgctggccgggccgcctgaccatcgaagagctgcacgcgtcggtgccgggttacgaatgcccgaccgaccaccgcatggtggcggtgatcgaggagctgctgggcacccgcacgcaggtggtcaactactgcaccgaagcgccgttcgtacagcaggtctgcccgacgttggtgctcgggcccggttccatcgatcaggcccaccagccggacgaatacatcgacaccgcgtttatcgaaccgacgcgcaaactgctgggccagctggtcaatcacttttgccggcagtaa

SEQ ID NO: 426081 - DNA, 2637 bp, Serratia marcescens
atgaacgaacaatattcggcaatgcgcagtaatgtcagtatgctcggcaaattgctcggcgataccatcaaagaagcgctgggcgagcatattctcgatcgcgttgagaccatccgtaagctttccaaatcttcacgcgccggcaacgaagcgcatcgccaggagctgctctccaccctgcagaacctgtccaacgacgagctgctgccggtggcgcgcgccttcagccagttcctcaacctgaccaacgtcgccgagcagtaccacagcatttcgcccaacggcgaagccgccagcaacccggaagcgctggcgcagctgttcagccgtctcaaagacaaaaagctcagcgacaaagagctgcagcacgcggtgtcgcaactttccatcgagctggtactgacggcgcacccgacggagatcacccgccgcaccctgatccacaagctggtggaggtcaacacctgtctcagccagctcgatcacaacgatctggccgactacgagcgcaacaagatcatgcgccgcctgcgccagttggtggcccagtcgtggcacaccgatgaaattcgcaaacatcgcccttccccgatcgacgaagccaaatggggcttcgcggtggtggaaaacagcctgtgggaaggcgtgccggcgttcctgcgcgagttcaacgagcagttggaaaactccatcgattacagcctgccggcggaagcggtgccggtgcgcttcacctcctggatgggcggcgaccgcgacggcaacccgaacgtgaccgccgaaattacccgccatgtgctgctgctcagccgctggaaagcctgcgacctgttcacccgcgatattcaggtgctggtctccgagctgtcgatgaccgaatgtaccccggagctgcgcgcccgcgccggcggtgacgaggtgcaggaaccgtaccgcgaaatcatgaagcagctgcgcagccagctgatgagctcccaggcctatctggaaggccgcctgaagggcgaacgcgtgctgaagccgcacgacctgctggtgaacaacgagcagctgtgggagccgctgtatgcctgctaccaatcgctgcaggcctgcggcatgggcatcatcgccaacggtcagctgctggataccctgcgccgcgtgcgctgcttcggcgtgccgctggtgcgcatcgacgtgcgccaggaaagcacccgccataccgaggccatcgccgagctgacccgctacctggggctgggcgactatgaaagctggtcggaagccgataaacaggcgttcctgatccgcgaactgaactccaaacgcccgctggtgccgctgaaatggcaaccgagcgccgacacgcaggaagtgctggaaacctgccgggtgatcgccgaagcgccgcagggctcgatcgccgcctacgtgatttcgatggcgcgcacgccttccgacgtgctggcggtgcacctgctgctgaaagaggccggttgcccgttcgcgctgccggtcgctccgctgttcgaaaccctcgacgatctgaacaacgccgacgacgtgatgactcagttgctgaacatcgactggtatcgcggctttattcagggcaaacagatggtaatgatcggctactccgactcggcgaaagacgccggcgtgatggccgcttcctgggcgcagtaccgcgcgcaggacgcgctgatcaaaacctgtgaaaaggccggcgtggcgctgacgctattccacggccgcggcggttccatcggccgcggcggcgcaccggcgcatgcggcgttgctgtcgcagccgccgggcagcctgaagggcggcctgcgcgtcaccgaacagggcgagatgatccgattcaaattcggcctgcctgaagtcaccatcagcagcctggcgctgtatgctggcgcgatcctcgaggcaaacctgctgccgccgccggaaccgaagaaagaatggcgggcgctgatggacgatctgtcagacacctcctgccggatgtatcgcggctacgtgcgtgaaaacccggacttcgtgccttacttccgcgcggccacgccggagctggagctgggtaaactgccgctgggctcacgcccggccaaacgcaagccgaacggcggcgtagagagccttcgcgccattccgtggatcttcgcctggacgcagaaccgcctgatgctgccggcctggctcggcgccggcgccggattgcaggaggcggtgaaagccggcaagcaggcggaactggaggcgatgtgtcgcgactggccgttcttctcaacccgcatcgccatgctggaaatggtgttcgccaaggccgacctgtggctggcggaatactacgatcagcgcctggtggataaatcgctgtggccgctgggccaacagctgcgcgatcagctggaaagcgacatcaaggtggtgctgaccatcgccaacgatgcgcacctgatggaagacctgccgtggattgccgaatccatcgcgctgcgcaacgtttataccgacccgctgaacgtcttgcaggccgaactgctgcaccgttcgcgtcagcaggagcagccggacgcccgcgtcgagcaggcgctgatggtcaccatcgccggcgtcgccgccgggatgcgcaacaccggctag

SEQ ID NO: 426082 - DNA, 897 bp, Serratia marcescens
atgagctttttccacgcaaaccagcgggaagcgctgaatcagagtctggcggagttgaacggccagattaacgtatcattcgagttcttcccgccgcgcaccagcgagatggaagagaccctgtggcagtcgatcgatcgtctgagcatcctcaaacccaaattcgtttccgtcacctacggcgccaactccggcgagcgcgatcgcacccacagcatcatcaaggggatcaaggagcgcaccggcctggaggcggcgccgcacctgacctgcatcgacgccagcccggcgcagctgcgcgacatcgcggccgattattggaacagcggcattcgccatatcgtggcgctgcgcggcgatctgccgccgggcggcggcaagccggacatgtacgcgaccgatctggtggcgctgctgaaagacgtgggcgacttcgacatttccgtcgccgcctacccggaagtgcacccggaggcgaagagcgcccaggccgatttaatcaacctgaagcgcaagatcgacgccggcgccagccgcgccatcacccagttcttcttcgacgttgagagctacctgcgcttccgcgaccgctgcgtcaccgccggtatcgacgtggaaatcgtgccgggcattctgccggtgtccaacttcaagcagctgcagcgcttcgccaccatgaccaacgtgcgggtgccaagctggatgaccagcatgttcgaagggctggacgacgatgcggagacccgcaaaatggtcggcgccaacatcgccatggacatggtgaagatcctcagccgcgaaggcgtgaaagatttccacttctatacgctgaaccgcgccgaaatgagctacgccatctgccacacgctgggcgtgcgcccggtggccgccgcctga

SEQ ID NO: 426083 - DNA, 2436 bp, Serratia marcescens
atgaatgcaattgctgtagcagggccggtgagtgggcgtcaactgcacaagtttggcggcagcagtctggcggatgtgaagtgttatctgcgtgtggccgggattatggcggaatacagccagccgggcgacatgatggtggtatcggccgccggcagtaccaccaaccagttgatcaactggctgaagctcagccagagcgatcgcctgtctgcgcaccaggtgcagcagacgttgcgtcgttatcacagcgatcttatcagcggcctgctgccgccggaaagcgccgagccgctgatcgccgagttcattcaggatctggaacgtctggcggtgctgctggacggcaaagtcgacgaggtgtgctatgcggaagtggtcgggcacggcgagatctggtcggcgcgcctgatggcggcggtgctcaaccacctggatatgcaggcggcctggctggatgcgcgtgatttcctgcgcgccgagcgcgccgcgcagccgcaggtggatgaaggccgttcttatccgctgctgcagcaattgttggctcaacatccgggcaagcgcctggtggtgaccggcttcatttcgcgcaacgacgccggggaaaccgtgctgttggggcgtaacggcagcgactactccgccactcaggtcggcgcgttggccggcgcggcgcgcgtcaccatctggagcgacgtggccggggtttacagcgccgacccgcgcaaggtgaaagacgcctgcctgctgccgctgctgcgcctggacgaagccagcgagctggcgcgcctggcggcaccggtgttgcatacccgcaccctgcagccggtctccggcagcgatatcgatcttcagctgcgctgcagctaccagccggagcagggctcgacgcgcatcgagcgcgtattggcgtccggcaccggcgccaagattgtcaccagccacgatgacgtgtgcctgattgagctgcacgtcgccgctcagcatgacttcaaactggcgcagaaagaattggatctggtgctcaagcgcgcgcagatcaaaccgttggcggtgggcatccatcctgaccgcaatcgagtgcagctgtgctacacctccgaggtggtcaacagcgcgctggcgatcctgcaggcctcggcgctgccgggtgaactgcacctgcgcgaagggttggcgctggtggcgatggtcggcgccggggtgtgcaagaacccgctgcacagccatcgcttctatcagcagctgaaagatcagccggtcgaatttatctggcaggcggaagatggcatcagcctggtggcggtattacgccaggggccgaccgcgctgctgattcaggggctgcaccaaagcctgttccgcgccgagaagcgcatcggtctggtgctgttcggcaagggcaacattgggtcgcgctggctggagctgtttgcccgcgagcagaccaatatttccgcgcgcagcggcttcgaatttatcctggcgggggtggtggacagccgccgcagcctgctgaactacgaagggctggacgccagccgcgcattggcgttctttgaggacgaggcgcaggcgctcgacgaagagtcgctgttcctgtggatgcgtgcgcacccgttcgacgatctggtggtgctcgacgtgaccgccagcgaagagctggccgggcagtatctggatttcgccagctacggtttccacgtgatcagcgccaacaagctggcgggagcctcgtgcagcgatacctatcgccaaattcgcgacgccttcgccaaaaccggccgccactggctgtacaacgccaccgtcggcgccggtctgccggtcaaccacacggtgcgcgatctgcgcgacagcggcgacagcattttggcgatcagcggcatcttctccggcacgctttcctggctgttcctgcagtatgacggcacggtgccgtttaccgagctggtggatcaggcctggcagcaggggctgaccgaaccggatccgcgggtcgatctctccggccaggacgtgatgcgcaagttggtgatcctggcgcgcgaagcgggctacgacatcgaacctaaccaggtgcgggtcgagtcgctggtgccggcgggctgcgagcagggctccgtcgatcagttcttcgagaacggcgaggcgctgaaccagcagatgcagcagcgttttgaggccgccagcgaaatgggcctggtgctgcgtcacgtggcgcgtttcgacgccaacggcaaggcgcgggtcggcgtggaggcggtgcgtcctgagcatccgctggcctcgttgctgccgtgcgacaacgtgttcgccatcgaaagccgctggtatcgcgataatccgctggtgatccgcgggccgggcgccggccgcgacgtgaccgccggagcgatccagtcagaccttaaccggttggcgcagctgctttaa

SEQ ID NO: 426084 - DNA, 1161 bp, Serratia marcescens
atgacgcgtaaaccagccacgattgccgtacgcagcggcctgaacgacgacgaacagtacggctgcgttgtcccgccgattcatctgtccagcacctataactttaccgacttcaaccaaccccgagcccatgattattcgcgccgcggcaacccgacgcgcgacgtggtgcaacgcgcgttggcggagctggaaggcggcgccggcgcggtgatgaccggcagcgggatgtcggcgatccatctggtgaccaccgtgctgctgaagcccggcgatctgctggtggcgccgcacgactgctacggcggcagctatcggttgttcgacagcctgagcaaacgcggtgcctatcgcgtgctgttcgtcgatcagggtaatgaagccgccctgcaacaggcgctggcgcaaaagccgaagctggtgttgatcgaaagccccagcaacccgctgctgcgggtggtggacatcgcggcgatctgcgccgccgcgcacgcggcgggcgcgttgacggtggtggacaacaccttcctcagcccggccctgcaacagccgatcgaactcggtgccgatctggtggtccattcatgcaccaaatacctgaacgggcattcggacgtggtggccggggcggtgatcgccaaagatcccgagctggcggtcgagctggcctggtgggcgaacaacatcggcgtgaccggcggcgcgttcgacagctatctgctgctgcgtggcatgcgcacgctgtcgccgcgcatcaaggcggcgcagctaaacgctgaagcgattgttgactatttacagcagcaaccgttggtgaaaaagctgtatcatccctccctgccggagaatccggggcatgagatcgcccgccggcagcagcgcggtttcggcgcgatgctgagttttgaactggacggcgatgaagcggtgctgcgccgttttctctctgcccttgagctgtttactctggcagaatcgttgggcggcgtagaaagcctgatctcgcatgcagcgaccatgactcacgccggcatggcggcggaggcgcgggcagcggccggcatctccgagagcctgctgcgcatttccgtgggtattgaagacagtgaagatttgattgccgatctggaacgcgctttccaggcggcggcaacgaggtaa

SEQ ID NO: 426085 - DNA, 318 bp, Serratia marcescens
atggctgagtggaacggcgagtatgtcagcccttacgctgaacacggtaaaaaaagcgagcaagtcaaaaagatcacggtatccattccgctgaaggtcctgaaaatcctcaccgacgaacggacccgtcgccaggtgaacaacctgcgccacgccaccaacagcgaactgctgtgcgaagcgtttctgcatgcctttaccggccagccgctgccgaacgatgaagacctgcgcaaagagcgcagcgatgaaattccggaagccgcgaaagtgttgatgcgcgaactgggtgtcgaccccgatacctgggaatattga

SEQ ID NO: 426086 - DNA, 216 bp, Serratia marcescens
atgaaacaaggtatccacccaaaatacgaagaagttactgctaactgctcttgcggtaacgtgatgaagatccgctccaccgtgggccacgatctgaacctggacgtttgtggcgcatgccacccgttctacactggcaagcagcgtgacgttgccaccggtggccgcgttgaccgcttcaacaagcgtttcagcgtaccaggcgctaagaaataa

SEQ ID NO: 426087 - DNA, 2196 bp, Serratia marcescens
atgcccgtcgtacacgttgccttgccggttcccctcgcccgcaccttcgactatctgctgccgcccggcatgcagccggtggccggcgcgcgcgtgggcgtgccctggggcaggcagcatgcgatcggcatcgtcaccggctgcagcgacaccagtgaactgccgctggacaagctcaaaccgatcgacagcgtgatcgacgccgaatcgctgttctcccccagcctgtggcgcatcctgcgctgggccagcgattactatcactaccccatcggcgaagtgctgttccatgcgctgccgatcctgctgcggcaaggcaaaccggccgaggccgcgccgctgtggcaatggttcgccaccgaagaggggcgcgccaccccgcccgaaagcctgaaacgcgcgccgaaacagcagcaggcgctcgcggcgctgctgcaacgcccggtctatcgccatcaggtcagccagcttgagctgacggaaagcgccctgcaggcgctgcgcgccaaagggctgatcgatctgcgcgctcaggtcgcggatacgcacgactggcgccccaacttcgcagtgctcggcgagcggctgcggctgaacaccgagcaggctaccgccgtcggggcgatcagaagcgaggatgagcagttcgccgcctggctgttggcgggggtaaccggctccggcaagaccgaagtctacctcagcgtgctggaaaacgtgctggccaaaggccgacaggcgctggtgctggtgccggaaatcggcctgacgccgcaaaccatcgcccgctttcgcgagcgcttcaacgcgccggtagacgtgctgcactccgggctgaacgacagcgaacggctggcggtttggctgcgcgcgcgcagcggcgaagccgccatcgtcatcggcacccgttcggcgctgttcacgccgttccgtcagctgggcgtaatcatcatcgacgaagagcatgacagctcttataaacagcaggaaggctggcgctaccacgcccgcgatctggcggtgttccgcgcccgggaagaggacatcccgatggtaatgggctccgcgaccccggcattggaaacgctgcacaacgtgcagctgggtaaatatcgccagctgaagctcacccagcgcgcgggcaacgccaaaccggcaacgcagcacctgatcgatctgaaggggctgccgctgaaggtcggcctgtcgcaaccgcttttgaaaagcatgcagcaccatttaaaagccggcaatcaggtgatgctgttcctcaaccgccgcggttatgccccggcgctgctttgccacgagtgcggctggatcgccgaatgccagcgctgcgatcactactacaccttccaccagcatcagcgccagttgcgctgccaccactgcgacagccagcggccggtgccgcaccagtgcccacagtgcggctccacccacctggtgtcggtcggcgtcggcaccgaacagctggagcaggagctggcgccgctgttccccgacacgccgatcacccgcatcgatcgcgacaccaccagccgcaaaggggcgctggagcagcacctggcggatattcatcgcggcgaagcgcgcattctgatcggcacgcagatgctggccaagggccaccattttcccgacgtcacgctggtggcgttgctggacgtggacggcgcgctgttctccgccgacttccgctccgccgagcgtttcgctcagctgtatacccaggtctccgggcgggccggccgcgcgggcaaacagggtgacgtgctgctgcaaacccaccatccggagcacccgctgctgcaggtactgctgcaacagggttacgacgccttcgccaaacagacgctggcggagcgcaacagcgtgtttctgccgccttacaccagccacatcatcgtgcgcgccgaagatcacgacaaccagcaggccccgctgttcctgcagcagctgcgcaacctgctggaagccagcccgctgaaggacgattcgctgtgggtgatgggcccggtgccggcgctgcagtccaaacgcggcggccgtttccgctggcagctgctgctgcagcacccgacgcggcgcgtcctgcaacagctgatgaaaagctcgctgccgctgatcggcaccctgccgcaaacgcgcaaggtgaaatggacgctggatgtcgatccgatcgacagctga

SEQ ID NO: 426088 - DNA, 1005 bp, Serratia marcescens
atggcgaccatgaaagacgtcgccgaaatggcgggcgtttcaacggctaccgtatcgcgtgcgctgatgaacccggaaaaggtgtcaacgccgacgcgccagaaagtggaacaggccgtcctggccgtgggttattctcctcatgctctgtcacgcaatatcaagcgcaacgaatcccgcaccatcctggtgatcgtgcccgacatctgcgatccgtttttcgccgatgtgatccaggggatcgaacagaccgccgcccaacaaggctatctggtgctgatcggcgactgcgcgcagcaaaaccagcaggagcgcaccttcgtcaatctgatcatcaccaaacagatcgacggcatgctgctgctgggctccaacctgccgttcgacgccagcaaggaagagcagcgcaacctgccgccgatggtgatggccaacgagttcgctcccgagctggaactgccgacggtgcacatcgacaacctgaccgccgcctttgaagccgtgcattatttgcatcaattgggccaccggcagatcgcctgcgtcgccgggccggaacagatgccgctgagccattatcggctgcagggttacgttcaagcgctacgtcgtaatggcattaccgtcgaaagcagctatattacccggggtgattttacctacgaagccggcgcgcaagcgctgacggcgctgatggcacagccgaaaccgccgacggcggtgttctgccacagcgacgtcatggcgatcggcgtgctgtcccaggcgaagaaaatggggctgcgggtgccgcaggatctgtcgatcgtcggctttgacgacctcaagctggcgcagtattgcgatccgccgctgaccacggtggcgcagccgcgcttccagatcggccagcaggcgatgttgttgctgttggagcagttgaacggccagacggtggccagcggctcccggctgttggacagtgaattgattatcagaggcagcaccgctgccccgaaacgctag

SEQ ID NO: 426089 - DNA, 936 bp, Serratia marcescens
gtggcacaaaaagactatgtaagccgtgggcgcgcagcaggagctaagcgtaaaacccccagccgtaaaaaacgcagttctccgaaggtttccaaaaccgtgctggcgttagccgccgcgttgctggttgtctttgtcggtggcctctatttcattacgcacaacaagccggaagacgcgccgttgttgcctgcgcacaccacgcgccccggcaacggcctgccgccgaagccggaagagcgctggcgctacatcaaagagctggaaaaccggcagatcggcgtgcaaaccccgaccgaaccgacggccggcggcgagctcaattccaaaactcagctgaccgccgaacagcgccaactgctggaacagatgcaggccgacatgcagcagcgcccgacgcagctgaacgaagtgccgtataacgatccgggccaggccaacgcgcgcagcactcgccagcagcagcagatgcaacaacagcaaatgcagcagcagccggtgcagcaacagcagcaggtcagccagccgccgcgcaacccgttcaacaacggggccaccaccgcgccggtgcagccgcacccgcagccaaaaccgactacccagcaaccggtgcaggtgaaacagcctgagccgaagccgcaaccgaaaccggagcccaaaccggaagtgaaacaggaaacggccaagcaggaaaccaaaccggaatcaaaacagaagtggatggtgcaatgcggttcgttccgcgccaccgatcaggctgaatccgtgcgtgcgcgcctggcgttcgaaggcatcgagagccgcatcaccgccggcggcggttggaatcgcgtggtgctcggcccgtacagcagccgcgccgccgcggacaaaaccctttcgcgcctgaagggcgtcggcatgtcgagttgcattcccctctccgttgggggttga

SEQ ID NO: 426090 - DNA, 531 bp, Serratia marcescens
gtgacaacaattgtaagcgtacgccgcaacggccaggtcgtcatcggtggtgatggccaggcaaccctgggtaatacggtgatgaagggtaacgtcaagaaagtgcgtcgcctgtacaacgacaaagtgatcgccggtttcgccggtggcaccgctgacgccttcacgctgtttgaactgtttgaacgcaaactggaaatgcatcagggccacctggtgaaagccgccgtcgagctggcgaaagactggcgcaccgaccgtatgctgcgcaagctcgaagcgctgctggcggtcgccgatgaaaacgcttcgctgatcatcaccggcaacggcgatgtggtgcagccggaaaacgatctgatcgccatcggctccggcggcccttacgctcaggccgcagcccgcgccatgttggaaaataccgagctgagcgcccgcgacatcgttgagaaatccctcaacatcgccggcgacatctgtatttacaccaaccatttccacaccattgaagaattgccttccaaagcgtaa

SEQ ID NO: 426091 - DNA, 1335 bp, Serratia marcescens
atgtctgaaatgaccccgcgcgagatcgtcagcgaactggacagctatatcattggccaaaacaaggccaaacgcgctgtcgccattgccctgcgcaaccgctggcgccggatgcagctcaacgagatgctgcgtcacgaagtgaccccgaaaaacattctgatgatcggcccgaccggcgtcggtaaaaccgaaatcgcccgccgtctggcgaagctggccaacgcgccgttcatcaaggttgaagccaccaagttcaccgaagtgggctatgtgggcaaagaagtggactccatcatccgcgatctgaccgatgccgccatcaaaatggtgcgcatgcagtcgatcgagaaaaaccgcacccgtgccgaagagttggccgaagagcgcattctcgacgtgctgatcccgccggccaaaaacaactggggccagccggaagaaggccaggaaccgtccgccgcccgccaggcattccgcaagaaactgcgcgaaggccagctggatgacaaagagatcgaaatcgatctggccgccgcgccgatgggcgtggaaatcatggcgcctccgggcatggaagagatgaccaaccagctgcagtcgatgttccagaacctcggcggccagaagcaaaaaccgcgcaagctgaagatcaaagaagccttcaagctgctggtggaagaagaagccgccaagctggtgaacccggaagagctgaaagagcaggcgatcgaagcggttgaacagcacggcatcgtgtttatcgacgagatcgacaaaatctgtaagcgcggcggccaaagctccggcccggacgtctcgcgcgaaggcgtacagcgcgatctgctgccgctggtggaaggctgcaccgtgtccaccaagcacggtatggtgaagaccgaccacatcctgttcatcgcttccggcgcgttccagaccgccaatccgtcagatctgatcccggagctgcagggccgtctgccgatccgcgttgagctgcaggcgctgaccaccgaagacttcgagcgcatcctgaccgagccgagcgcgtcgctgaccgagcagtacaaagcgctgatgggcaccgaaggcgtcaacatcgagttcaccgccgacggcatccgccgcatcgccgaagccgcgtggcaggtcaacgaaagcaccgagaacatcggcgcgcgtcgtctgcacaccgtgcttgagcgtctgatggaagatatttcctacgaggcgagtgaaattaatggccaatccattacaattgatgcggattacgtgcgcagtcatctggatgaactggtggcggatgaagatttgagtcgttttatcctataa

SEQ ID NO: 426092 - DNA, 918 bp, Serratia marcescens
atgagctcatcgacccccaccaccccgatctccgcctggctggaaagtctacgcccccgcaccctgccgttggcctttgcctccatcgtggtcggttcggcaattgccgcctggcacggcagcctgaaacccgaagtggcgctgctggcgctgttgactgccggcctgctgcagatcctctccaatctggcgaacgactacggcgatgccgtcaaaggcagcgacaaagaagatcgcatcgggccattgcgcggcatgcaaaaaggcatgatcacccaggcgcagatgaaacgggcgctggtggtgacggtggtactgatcgcgctcgccggctgttcgctgatcgccgtcgcctgcgagcaacccagcgacgtggtcggcttcctggtgctgggcgggctgtctatcgtggcggccatcacctataccgtcggcaacaagccctacgggtatttggggctgggcgacatctcggtgctggtattcttcggctggctgagcgtagccggcacctactatctgcaaacgcacaccttcgacagcgtcgtgatgctgccggccaccgcctgcggcctgctggcgacggcggtgctcaacatcaacaatctgcgcgatatcgagagcgatcgcgaaaacggcaagaacacgctggcggtgcgtctcggcccgcacaaggcgcgcatttaccatgccctgctgctcggcggcgcggtgctgtgtttcgcgctgtttacgctgttcaatctccacagcccgtggggctggctgttcgtgctggcgatcccgctgctggtgcgccacggcctgcgcgtactgcgcgatccgacgccggtcggcatgcggccgatgctggagcacatggtcaaggcggcgttgctggccaacctgctgttcgccatcggcgtggcgctcagttaa

SEQ ID NO: 426093 - DNA, 486 bp, Serratia marcescens
atgaaatacgatacttccgaactttgcgacatctatcatgaagaggtgaacgttgttgaacctctgttctccaattttggcgggcgtacttcatttggcgggcagatcaccacggtgaaatgctttgaggataacggcctgttgttcgatctgcttgaagaaaacggccgcggccgtgtgctgttggtcgacggcggcggttcggtacgccgggcgctgatcaacgccgaactggcgcgcctggccgcccagaacgaatgggaaggcatcgtggtgtacggcgcggtgcgtcaggtggacgatctggaagagctcgacatcggcattcaggcgatggcggcgatcccggcgggcgcggtaagcgaaggcgtgggggaaagcgatatccgcgtcaacttcggtggcgtcaccttcttctccggcgatcacctgtatgccgacaacaccggcatcatcctctccgaagacccgctcgacatcgagtga

SEQ ID NO: 426094 - DNA, 240 bp, Serratia marcescens
atgtcatttgaagtatttgagaaactggaagcaaaagtacagcaggcgattgataccatcaccttgttgcagatggaaattgaagagctgaaagacaaaaacaactctctgtcgcaggaagttcaggctgcctccggcaaccacgaagcgctggtgcgcgaaaaccaacagctgaaagaagaacagcacgtatggcaagatcgcctgcgcgctctgctgggcaaaatggaagaggtctga

SEQ ID NO: 426095 - DNA, 846 bp, Serratia marcescens
atgagccaaaccaccagtccgacattaaaaggccagtgcatcgccgagttcctcggcacggcgctgctgatcttctttggcgtaggctgcgttgccgcgctgaaactggcgggcgccagcttcggccagtgggaaatcagcatcatttggggcctgggcgtcgccatggccatctatctgaccgccgccatttccggcgcgcatctcaaccccgcggtcaccctcgctctgtggctgttcgcctgcttcgacgggcgcaaagtggtgccttacatcattgcgcagatcgccggtgccttctgcgccgccgccctggtctatgggctgtactacaacctgttcttcgacttcgaagcggctcaccacatggtgcgcggcagcaacgaaagcctcgagctggccggcatcttctcgacttaccctaacgcgcatatctccgtcggccaggccttcctggtagaaatggtgatcgccgccattctgatgtgcctgatcctggcgctgaccgacgacggcaacggcatcccgcgcggcccgctggcgccgctgctgatcggtattctgattgccgtgatcggcgcctccatgggaccattgaccggctttgcgttgaacccggcgcgtgacttcgggccgaaactgttcgcctacctggccggctggggcaaagtcgccttcaccggcgcacgcgacatcccgtacttcctggtgccgatcttcgcccctatcgtcggctgtggcctgggcgctttcggttaccgcgcgctgattggccgccacctgccgtgcgacgtctgcgtgacggaagaagagcccgacgccaagacccagcagcgcaaagcatga

SEQ ID NO: 426096 - DNA, 1509 bp, Serratia marcescens
atgactgtagaaaaaaaatacattgtcgcactcgaccaagggaccaccagctcacgcgccgtcgtgctcgatcacgacgccaacatcgttgcggtatcgcagcgcgaattcccgcagatctatcccaaggccggctgggttgagcacgacccgatggaaatctgggcgtcgcaaagttcgacgctggtagaagtgctggcgaaagccgacatcagttccgatcagatcgccggcatcggcatcaccaaccagcgcgaaaccaccatcgtctgggaaaaagagaccggcaagccgatttacaacgccatcgtctggcagtgccgccgcaccgccgacatctgcgagaaactcaagcgcgacggcctggaagagtacatccgtcacaataccggcctggtggttgacccgtacttctccggcaccaaggtgaagtggatcctggacaacgtcgaaggcgcccgcgagcgcgccaagcgcggcgaactgctgttcggcaccgtcgacacctggctggtgtggaaaatgacccaggggcgcgtacacgtcaccgattacaccaacgcctcacgcaccatgatgttcaacatccacgagctggactgggatgaacgcatgctggaagtgctggatatcccgcgcgccatgctgccgaaagtccgtccttcctccgaggtgtacggccagaccaacatcggcggtaagggcggcacgcgtattcctatcgccggtatcgccggtgaccagcaggcggcgctgtacggccagctgtgcgttcaaccgggcatggcgaagaacacctacggcaccggctgcttcctgctgatgaacaccggcaaagaagcggtgcgttcgaaaaacggcctgctgaccaccatcgcctgcggcccgcgcggcgaagtgaactatgcgctggaaggcgcggtgttcatcggcggtgcgtctatccagtggctgcgcgacgagctgaaactgatcagcgacgccgccgactccgaatacttcgccaccaaggtgaaagacagcaacggcgtctatgtggtgccggccttcaccggcctgggcgccccttactgggatccgtacgcccgcggcgccatcttcgggctgacccgtggcgccaacagcaaccacatcatccgcgccacgctggaatccatcgctttccagacccgtgacgtgctggacgccatgcaggccgacgccaacacccgcctgcaatcgctgcgcgtggacggcggcgcggtcgccaacaacttcctgatgcagttccagtccgatattctcggcactcgcgtagaacgccccgaagtgcgtgaatcgacggcgctgggcgccgcgttcctggcgggcctggccatcggctactggaacgatctggacgaagtgaagagcaaagcggtgattgaacgcgaattccgcccaagcatcgaaaccaccgaacgcaactaccgctacggcggctggaaaaaagcggtggcgcgcgctcaggcgtgggaagatcacgagtaa

SEQ ID NO: 426097 - DNA, 1011 bp, Serratia marcescens
atgaaacgtgaattagccatcgaattttcccgcgttaccgaagccgccgcgctggcgggctacaaatggctgggacgcggcgacaagaacgccgccgacggcgcggcggtccacgccatgcgcatcatgcttaacaacgtggatatcgatgggcgcatcgtgatcggcgaaggcgagatcgacgaagcgccgatgctgtatatcggcgaacaggtcggcaccggccagggcgacgcggtcgacatcgcggtcgatccgatcgaaggcacccgcatgaccgccatgggccagtccaatgcgctggcggtattggcggtgggcgatcgcggcaccttcctgcacgcgccggacatgtacatggagaagctggtggtcggcccggcggcgcgcggcgccatcgatctcaacctgccgctggcggagaatctgcagaacgtcgccgcccggctgggcaaaccgctgtcgcagctgacggtgatcgttttggccaaaccgcgccacgacggcgtcatcgcgcagatgcagcagctcggcgtgcgggtgttcgccattcctgacggcgacgtggcggcctccattctcacctgcatgccggaaagcgaggtcgatgtgatgtatggcatcggcggcgcgccggaaggggtgatctcagccgcggtgatccgcgcgctggacggcgacatgcaggcgcgtttgctgccgcgccatgaggtgaaaggcgacagcgccgagaaccgccgcatcggcgaacaggagctggcgcgctgccgggagatgggtatcgaagccggtcaggcgctgcgtctggatcagatggcgcgcaacgacaacgtgatcttctccgccaccggcatcaccaagggcgatctgctggaaggcatcagccgccagggcaatatggccacgaccgaaacgttgctgatccgcggcaagtcgcgcaccatccgccgcatccgttcaacccactatctggatcgtaaagacccggcgctgcacgagtttttgctgtaa

SEQ ID NO: 426098 - DNA, 1185 bp, Serratia marcescens
atgagaaaactagagaattttcacctgctggtgatgcttatcctgttggtcgccgtcggccagatggcgcaaaccatttatgttcccgttattgctgatatcgcccacgatctgtcggttcgcaccggcgccgtgcaacgggtgatggcggcgtatctgctgacctacggtttctcccagctgatttacgggccgatatcggatcgtatcgggcgtcgtccggtgatcctgaccggcatgatgatcttcctgatcggcgcgctgggcgcgctgctgtccactaacctgacgatgctggtcgccgctagcgcgattcagggcatgggcaccggcgtggcgggcgtgatggcgcgcaccatgccgcgcgatctgtatgccggcaccgcgctgcgctatgccaacagcctgctgaatatggggattttggtcagcccgctgctggcgccggtgatcggcggcgcattggcgatggtgttcggctggcgtgccagctacgccttcctgctggcgctgtgcgcctgcgtcgctttcgccatgttccgctggctgccggaaacccgcccggtgcaaacggaaaaacgccgcatgctggccagtttccgccaactgctggctgacagcaccttcagttgctatctggtgatgctgatcggcgcgctggcgggcattgcggtattcgaggccagctgcggcgtgttgatgggcggcgtgttggggctgagtggcctgaccgtcagcatcctgttcattctgccgatcccggcggcgtttttcggcgcctggtacgccgggcgcgacggcaagaccttccacacgctgatgtggcattcggtgattagctgcctgctggcgggggcgatgatgtggatcccgggctggttcggcgtgatgaacatctggacgctgatcgtgccggccgcactgttcttcttcggcgccggcatgctgttcccgctggcgaccaccggggcgatggagccgttcccttacctggccggcgcggcgggcgcattggttggcggcatgcagaatatgggatcggggcttgcgacctggctttccgccatgctgccgcaaactgggcagttcagcctcggattgctgatgttcgcgatggcgctgctgatcctgctgtgctggtggccgctgtccaaccggatgcaacatcaggggcataccgcataa

SEQ ID NO: 426099 - DNA, 612 bp, Serratia marcescens
atgaaaacacctgagctgattttattgcagttaaaggctctcggcccgcactcggccaaaatgctggcggagcgtctggacatcacgccgatgggcatccgacaacatctgcaatccctggaaaaacgtgagttggtttgttacgaagaagcgcgcagcaaggtcggccgcccgacgcgctactggtcgctgaccgagcgagggcatgcctttacggccgccgaccaggagcggttgcgggcatccgcgctgcagctgtttggcggcgccggggtggaatcgttgctcagcgcgcgcgaagagcagctttatctgcgttatgccgaagagctgtccgccgagcgtagccaccaagatcggttagcccgactggtgcgcctgcggcaacatgatggttacatggctgaattgctcgatcacccgcacggcgcgctgctggtggaaaaccactgcccgatcggcgtggccggctccagctgcagcagcctgtgcaattccgagctgcagctgtttcaccgcctgttcggcaacgactaccgggtagagcgcaccgcgcacgccatttccggctcacgacattgtgcttatttgattcgaccacgggagctttag

SEQ ID NO: 426100 - DNA, 747 bp, Serratia marcescens
atggctgaatgggtaaacggcaaggttacgcaggtaaaacaatggaccgacgggctgttcagcctggtggtcaatgcccctatcgatcctttcaccgccgggcaattcgccaagctggcgctggagatcgacggcgaacgggtgcagcgcgcctactcctacgtcaatgcccccgacgacgccaatctggagttctatctggtcaccgtgccggaaggcaaactgagcccgcgcctcaatcaactgcagccgggctcggacgtgatggtaaccaaagaagccgccggcttcttcgtgctggacgaggtgcccgactgcgacacgctgtggatgctggcgaccggcaccgccatcggcccctatttatcgattctgcagcagggcatcgggctggagcgcttcaacaacctggtgctggtgcacgccgcgcgctttgcgcgtgacctgagctacctgccgctgatgcagcaactgcagcagcgctacaacggcaagctgcgcatccagaccgtcgtcagccgcgaagaggcgcccggttcattgaccggccgcgtaccggcgctgatcgaggacggccggttggaagcggcgatcggcttgaccatcgacgccgaaaccagccacgtgatgctgtgcggtaacccacaaatggtgcgggacacccagcaaacgctgaaagaccaccgccagatgcgcaagcacctgcgccgcaagccgggccacatcaccagcgaacactactggtaa

SEQ ID NO: 426101 - DNA, 420 bp, Serratia marcescens
atgacgttacaacagtggtgtttttcttttaagggccgcatcgggcggcgcgacttctggatctggatggggctgtggctggcgctgatggcggcggcgtttacgctggccaattatcagctgatcgccatccaatccatcgccttctttatcgtggcgttgctgtggccgacggcggcggtgctggtcaagcgcctgcacgatcgcaacaaggccggctggtgggcgctgctgctgatcctggcgtggatgctggcggcggggaactggcagatgctggcgccgatctggcaatggggcgtcgggcgtttcattccgacgctgattatcgtgatgatgatgatcgatctgggcgccttcgtcggcacgccgggggataaccggttcggcccggaagccgaaccggtgaagttccgctga

SEQ ID NO: 426102 - DNA, 597 bp, Serratia marcescens
atgccatacgccatgctgagaaaaaccctcgtcatcgcctgcctgctgcaggcggccgccagcgcctgggccgatccgccgcccaccgaagcgacgcccgccgcaccttacctgctggccggggcgccgacgttcgatctgacggtggtcaaattccgcgaaaaatacaaccgcgacaacccgaagctgccgattggcgaattccgcgccattcccgccgccgaagacgattcgccgctgctgacgcgcgccgccagcaaactcaacgaaaacctgtacgcctccaccgcgctggagaaaggcaccggtaaaatcaaaacgttgcagatcactcacctgccgctgcagcaggccaatgaagaaaaagccgcgcgcgccatcgccatcagctacatggcggcgctgatgcgccagttcgaaccggcgttgacggtggaacagagccagaacaaggtgaacagcctgctggaaaagggcaaaggatcgcgcttttaccaacagcaggtcggcgccattcgctatgtcgtttcggacaacggcgataaaggcgtaaccttcgcggttgaaccgattaagctggcgctttccgagccgtaa

SEQ ID NO: 426103 - DNA, 768 bp, Serratia marcescens
atgcgtcatccattagttatgggtaactggaagcttaacggcagcacccacatggtcaacgaactgatcgccggcctgcgcaatgagctgagcagcgttgacggctgtggcgtcgccatcgccccgccggtgatgtatctggatcaggccaagcatgcgctggccggcagccgcatcgcgctgggcgcgcagaacgtggacgttaacctgtccggcgccttcaccggtgaagtttccgccaacatgctgaaagacgtcggtgcccagtacatcatcatcggccactccgagcgccgcacctaccacaaagaaagcgacgaagtcatcgccgagaaattcgccgtgctgaaagaagccggcctgatcccggtgctgtgcatcggtgaaaccgaagcggaaaacgccgcgggcaaaaccgaagaagtgtgcgcgcgccagatcgacgccgtgctgaaaacgctgggcgcaccggcgatgaaaggcaccgtgatcgcctatgagccggtctgggccatcggcaccggcaaatccgctacccctgcgcaggcgcaggccgtgcacaaatttatccgtggccacatcgccaagcacgatgccgcggttgccgctgaaatcatcatccagtacggcggttcggtgaacgacaagaacgccgcggagctgttctctcagccggacatcgacggcgcgctggttggcggcgcctcgctgaaagccgacgctttcgccgtgatcgtcaaagccgctgccgcagcgaaaaaagcctga

SEQ ID NO: 426104 - DNA, 990 bp, Serratia marcescens
atgcgtaaatggggtgtaggtctgacattggtgctgttggcgtccggcgccatggcgaaggatattcagttgctgaacgtgtcatacgatccgacgcgtgagttctatcaggcttacaacacggcattcagcaagcactatcaggcggaaaccggcgacaaggtgacggtgcgccagtcgcatggcggatccggcaaacaggcgacctcggtgatcaacggcatcgaggccgacgtggtgacgctggcgttggcctatgacgtcgacgccatcgccgaacgcgggcgcatcgagaaagactggatcaagcgcctgccggacaactcggcgccttacacctcgaccatcgtcttcctggtgcgcaaaggcaacccgaaacaaattcacgactggcccgatttgatcaagccgggcgtgtcggtgatcaccccgaacccgaaaacctccggcggcgcccgctggaactacctggccgcctggggctacgcgttgcaccacaacaacaacgataaggccaaggcgcaggacttcgtcaaaaatttgtacaagaacgtcgaagtgctggattccggcgcgcgcggcgcgaccaacaccttcgttgagcgcggcatcggcgatgtgctgatcgcctgggaaaacgaagcgctgctggcggagaaagagctcggcaaagacaagttcgagattattacgccgagcgaatcgatcctggccgaaccgacggtgtcagtggtggataaggtggtcgataaacgcggtacccgcgacgtggcgaccgcctacctgaagtatctgtattcgccggaagggcagaccatcgcggcgcagcactattaccgtccgcgcgatgcggcggtggcggccaagtttgccgggcagttcccgcagctgaagctgttcaccgtggatgacaccttcggcggctggaccgaagcgcagaaggtgcacttcgccaccggcggcgtgttcgacgagataagcaaacgctga

SEQ ID NO: 426105 - DNA, 963 bp, Serratia marcescens
atgatcaagaaaatcggtgtactgacgagcggcggtgattcgccgggtatgaacgctgcaatccgcggcgttgtgcgttctgcgctttcagaaggtctggaagtttttggtatttacgatggctaccttggcttgtacgaagatcgcatggagcagctggatcgctatagcgtgtccgacatgatcaaccgcggcggcaccttcctcggctctgcccgcttcccggagttcagggatgaaaacgtgcgcgccaaggcgattgaaaacctgaagaatcgcggcatcgacgcgctggtggtgatcggcggcgacggttcctacatgggcgccaaacgcctgacggaagaaggcttcccgtgcatcggtctgccgggcaccatcgataacgacgttgccggcaccgactacaccatcggttacttcaccgcgctggaaaccgtggtggaagcgattgaccgcctgcgcgatacctcctcttcgcaccagcgtatctccatcgtggaagtgatgggccgttactgcggcgatctgacgctggcggcggcgattgccggcggctgcgaattcatcgtgctgcctgaaatcgaattcaaccgcgaagacctggtgtgcgaaatcaaggccggtatcgccaagggtaaaaaacacgccatcgtggcgatcaccgagcacatctgcgacatcgatgagctggcgcgccacatcgagcaggaaaccaagcgtgaaacccgcgccaccgtgctgggccacattcaacgcggcggttcaccggttgcctacgaccgcatcctggcctcgcgcatgggcgcctacgccatcgagctgctgctgcagggctacggcggccgctgcgtcggtatccagaacgaaaaaatggtgcaccacgacatcatcgacgcgatcgaaaacatgaagcgtccgttcaagggcgactggctggaaacggcgaaaaaactgtactga

SEQ ID NO: 426106 - DNA, 903 bp, Serratia marcescens
atggaacagcgctatgcacgcctggtaaagtccgctgcgttggccgctaccgcgctggcgtcgtcactgctgttgatcaaaatcgtcgcctggtaccacaccggttcggtcagcctgctggcggcgctggtagattcgctggtcgatatcgccgcctcgctgaccaaccttctggtggtgcgttattcgctgcagccggccgatgccgagcacacctttggccacggcaaagcggaatcgctggcggcgctggcgcaaagcatgtttatttccggctccgccctgtttctgttcctcaccggcttccagcatttgtatgcgccgcaaacgctgcgcgatcccggcgtcgggatcgtcgtgacggtgatcgcgttgatcagcaccctgattctggtcacctatcaacgttgggtggtcagaaaaacgcgcagccaggcggtgcgcgcagatatgctgcattatcagtcagatgtcatgatgaatggtgctattcttatcgctcttgggctaagctggtacggcttccagcgggcggacgcgctgttcgcgctgggcatcggcgtttacatcctgtatagcgcgctgcgcatgggctacgaagctgtgcagtcgctgctggatcgggcgttgccggatgacgaacgccaggcgattatcgaggtggtttcctcctggcccggggtgaaaggcgcgcacgatctgcgcacgcggcagtcggggccgacgcgtttcatccagctgcatctggagatggaagacgcgctgccgctgcgcgaggcgcaccggttggccgatcaggtggaacaggcgctgcggcaccgttttgcgggggcggacgtcatcattcacctggatccgtgctccgtggtgccgccgggtaggcagggacattgggagctataa

SEQ ID NO: 426107 - DNA, 480 bp, Serratia marcescens
atgcgtaaggtgaccgcattagttatggcatcactgctggcaattggttcgaccgctgccttcgctgccgacactataccggacacagcccaacctcccggcaacgacgcgatgacccgaatacccggccaacaccatatgttcgacggtgtcagcctcagcgaacagcagcgccagcaaatgcgcgatttgatgcgccaggcccggcacgatctgcctggtgtcaatgtagctgaaatggaagccatgcataaactggtgaccgcagagaaatttgacgaagccgccgtgtatgcccaggcggaaaagatggcccaacagcaggtcaagcgccaggtcgaaatggcccgggtgcgcaaccaaatgtataacctgctgacgccagagcaaaaaagtgttttagaccagaaacatcagcagcgtatgcagcagatggagcaacaaatttctggtttgcagcaagcttctgcccagaagtga

SEQ ID NO: 426108 - DNA, 699 bp, Serratia marcescens
atgaacaagattctgttagttgacgacgaccgcgagttgacctcgctgttaaaagaactgcttgaaatggaaggttttaatatcgtcgtcgcgcacgatggcgagcaggcgttgtcgctgctggacagctccgtcgatctgctgctgctcgacatcatgatgccgaagaaaaacggcatcgatacgctgaaagaactgcgccaacatcaccagacgccggtcatcatgctgaccgcgcgcggcagcgaactggaccgcgtgctgggcctggagctgggtgccgatgattacctgccgaaaccctttaacgatcgcgaactggtcgcgcgcattcgcgccattctgcgccgttccaactggagcgaacagcagcagcaggtcgacagcggcgccccgacgctggatgtcgatggcctgcagctgaaccccggtcgccaggaggccagcttcgacggccaggtgctggatctgaccggcaccgaattcaccctgctttacctgctggcgcagcatctcggccaggtggtgtcgcgcgaactgctgagccaggaagtgctgggcaaacgcctgaccccgttcgatcgcgccatcgacatgcacatctccaacctgcggcgtaagctgccggatcgcaaagacgggcatccgtggttcaaaaccctgcgcgggcgtggttatttgatggtatctgcaacatga

SEQ ID NO: 426109 - DNA, 1395 bp, Serratia marcescens
atgatcaacagtttgacggcacgcatcttcgccattttctggttcacgttagccctggtgctaatgttggtgttgatggtgcccaagcttgactcccgccaaatgacctcgctgctcgacagcgaacagcggcaggggttgatgctggaacagcacgtcgaggccgagttgcaaaacgatccggccaacgatttgatgtggtggcgccgcctgttccgcgccatcgacaaatgggcgccgccgggccaacgcctgctgctggtcaccagcgaaggccgggtgatcggcgcgcagcgcaatgaaatgcagatcgtccgcaacttcatcggccaatccgacaactcggatcatccgaagaagaaaaagtacggccgcgtcgagctggtagggccgttcgcggtgcgcgacggcgaagacaactaccagctgtacctgatccgtcccgccaacagcccgcaatccgatttcatcaacctgatgttcgaccggccgctgctgctgctgatcgtcaccatgctgatcagcgccccgctgctgctgtggctggcctggagcttggcgaaaccggcgcgcaaactgaaaaacgccgccgatgaagtagcgcgcggcaacctgaagcagcatccggaactggaggccggcccgcaggaattcctggccaccggcgccagcttcaaccagatggtcagcgcgctggaacgcatgatgaatgctcagcaacgcctgatatcggacatctcgcacgagctgcgcacgccgctgacgcgcctgcagctggccaccgcgctgatgcgccgccgccacggcgaaggccacgaactggcgcgcatcgaaaccgaagcgcagcggctggattcgatgatcaacgatctgctggcgctgtcgcgcggtcagcagaagagcgagctggcgcgcgagcagctgaaggccaacgaactgtgggccgacgtgctggacaacgcccgtttcgaagcggaacagatgggcaagcagttggagatcaccgcgccgcccggcccatggacgctgttcggcaacgcgagcgcgctggacagcgcgttggaaaacatcgtgcgcaacgccctgcgttattcgcacacccgcatcgccgtggcgttcagcgccgataatcagggcgtgaccatccaggttgacgacgacggccccggcgtcagcgccgaagaccgcgagcagatcttccgtccgttctatcgcaccgacgaggcgcgcgaccgcgaatccggcggcaccggcctcggcctggcaatagtcgaggcggctatcaaccagcatcgcggctgggtgaaggccgaagacagcccgcttggcggcctgcggttggtgttgtggctgccgctgcatcatcaacgtctgtcgactaagacagaacagtaa

SEQ ID NO: 426110 - DNA, 474 bp, Serratia marcescens
atgctgaacatcgttttatttgaacccgaaattccacccaacaccggcaatatcatccgcctgtgcgccaataccggctttaacctgcacctgatcgaaccgctgggtttcccgtgggacgacaagcgcctgcgccgcgccgggctggactaccatgagttcacccgcgtcagccgtcatgccgattacgccgcctttctcgccgccgaaaagccgcaacggctgtttgccctcaccaccaaaggcacgccggcgcacagcgccgtcagctatcaggccggcgactacctgctgttcggcccggaaacgcgcgggttacccgccgatatcctcgatgcgctgcctgcgcagcaaaaaatccgcatcccgatgcaggcgcaaagccgcagcatgaacctgtcgaatgccgtctcggtggtcgtgtatgaggcctggcggcagctggactatgccggcgcgctgatcaaggcgtaa

SEQ ID NO: 426111 - DNA, 774 bp, Serratia marcescens
atggctttcgtcgcagatattgtcacccagcttcgccggcttgagccggcgctgaacgaggcgctgttgcggctgcaacaggcgcaagacaccgaagcgctgcatgacttgcgcgtctgtctgcgccgcattcgcagcctgctgcgcccgttgcgcggctgccccggcgcaacgcggctcgatcgggccgccgccgagttgggcaggctcacgacgccgctgcgcgatctcgaggtgctgatcgccgaactggcgcgccatcgcctggattggcaggccaacgtgcgccagagcgatcttcaggcccgctaccgtcaactgctcgcccatccgcagatcatcgactttccctcgctgttgcacgcctggccgcgccgcttccgccgcacggcgcgacgcaccgccaaacaccgcctgaaccgacgcctgcagcgccagcaacagcaattgcgccgggcattggccgataccggctacgatcgccaccgcctgcggctgctgataaagcgcctgcgctacgcggccgaagcctatccgcgacgccttcccctctctcccgccgcgatggcgggcctcaaggcggcgcaaagcgccctcggcgactggcacgatcgtgaggtctggtgcctgcaggcagaacatcaggcggatctctggcccttgttgctccggtggcaagctgagcaacgccagacgctggccaaggcggacgccttgctcgccgccttatcatcggcgctggcggcgaaaaccggcggcgcatcacgatcctga

SEQ ID NO: 426112 - DNA, 672 bp, Serratia marcescens
atgaagaaacaacgcttgagcgttgccatggcgattctggcagcgggcctgttgctggcgggttgttcgtccaaagtcacccaaacgtcgcagtattcgggcttcttgtccgattacagcaaactgcaggaaaccacctcgccaagcggccataaaacgctgcgctggatagacccaagctacaaggaatccaactatcgcggcctctatttccaaccggtggtctatttcccggcggagaaacccacggcgcgcgtcagccaggacacactgaacaagattaaggcctacgcgacccagcggatcaaaaccgcgctgcagaaccgcttcaccattctgccaagcccgacgggctcgcgcgtgctggtggccaagctcgccatcaccgccgtttccgccgaaaatgaagacatgaaattctatgaggtggtgccggtcgccgcggtggtcgccagcaccatggctgctaccgggcaccggacgcaaaataccgcgctgtatatcgaaggcgagctgatcgaccaggataccggcaaaacggtgatggaagtggtacgcaaggcctacggtaaaaccgtcaacaacgacagcacgccggtcacggcggatgacgtcaaggcggcgatcgacgacatcgtcaccgatatcaccaacttcccgaaacagggctga

SEQ ID NO: 426113 - DNA, 822 bp, Serratia marcescens
atgtcgtcagaagagttggaacaggtctggaacagcattaaatcagaagcgcgagcactggctgattgtgaaccgatgctggccagctttttccatgcgacgttgctcaagcacgagaacctgggcagcgcgctcagctatatgctggccaacaagctggcgacgccgatcatgcccgccatcgcggtgcgcgaggtggtggaagaggcctacaagtccgacaaccagatgatcgtgtcggcggcgcgcgatatcctcgcggtacggctgcgcgacccggcggtcgataaatactccacgccgctgctttacctgaaagggttccatgcgctgcaggcttaccgcatcggtcactggctgtggcagcaagggcggcaagcgctggctatctacctgcaaaatcaaatttccgtcgccttcggcgtggacatccacccggcggcgaccatcggctgcggcatcatgctcgaccacgccaccggcatcgtgatcggtgagacggcggtggtggagaacaatgtctctatcctgcagtcggtcaccctgggcggtaccggtaaaaccagcggcgaccgtcacccgaaagtccgcgaaggggtgatgattggcgccggcgccaaaattctcggcaatatcgaagtgggcaagggcgcgaagatcggcgcgggctcggtggtcttgcaggcgataccgccgcacaccaccgccgccggcgtgccggcgcgcatcgtcgggcggccggagagcgatacgccgtcgatggatatggaccaatactttaacggcaccaatcacggcttcgagtacggcgacggcatttga

SEQ ID NO: 426114 - DNA, 1020 bp, Serratia marcescens
atgaacaccgtcaatgcttcaatgactgtcatcggtgccggctcgtacggcaccgcattggccattacgctggcgcgtaacggccacactgtggtgctgtgggggcataaccccgcgcaagttcaaacgttgcagcaagatcgctgcaatcaggcgtttctgcccgacgttcccttccccgataccctgctgcttgaagccgatttggcgcgggcgctggcggccagccgcgacgtgctggtggtggtgccgagccacgtgttcggtgacgtgctgcgccagctgaagccgcatctgcgcccggacgcccgcatcgtgtgggccaccaaggggctggaagcggaaaccggccggttgctgcaggacgtggcgcgtgaggcgctgggcgaggcgatcccgctggcggtgctctccgggccgacgttcgccaaagagctggccgccggcctgccgacggcgatcgcgctggcggcgaccgatgcgcagttcgccgacgatctgcaacagctgttgcactgcggcaagagcttccgcgtctacagcaatcccgatttcatcggcgtgcagcttggcggcgcggtgaagaacgtgatcgccatcggcgccggcatgtccgacggcatcggttttggcgccaacgcccgcaccgcgttgattacacgcgggctggcggaaatgagccgtctgggttctgcgctgggcgccgatccttcgacgttcatgggcatggcggggctgggggatctggtgctaacctgcacggacaaccaatcgcgcaaccgccgcttcggtattatgctggggcagggcaaaggcgtgcaggaagcgcaggacagcatcggtcaggtggtcgagggctatcgcaataccaaagaggtgttggcgctggcgcagcggcacggtgtggaaatgccgatcaccgaacagatttatcaggtgctttactgccataaagacgcccgcgaagcggcgctgagcctgctggggcgagcccgaaaggacgaaaaacccagcgcgtga

SEQ ID NO: 426115 - DNA, 471 bp, Serratia marcescens
atgtcagaacaaaacagcaccgaaatggctttccagatccaacgtatttataccaaggacatctctttcgaagcgccgaatgcgccgcaggttttccagcaggaatggcagccggaagttaaacttgatctggataccgcgtccagccagctggctgacgaagtgtatgaagtggtactgcgcgtaaccgtgacggcgaccctgggcgaagagaccgcgttcctgtgcgaagtgcaacaggcgggcatcttctcggtagcaggcatcgaaggcacgcagctggcgcattgcctgggcgcatactgcccgaacatcctgttcccgtatgcgcgcgagtgcatcaccagcctggtttcccgcggtacgttcccgcagctgaacctggcaccggtcaactttgacgcgctgttcatgaactatctgcagcagcaggcggaaggcgaaggtgccgcaccacatcaggatgcctga

SEQ ID NO: 426116 - DNA, 249 bp, Serratia marcescens
atggctaacattgatatctacaccaaagcgacctgtccgttctgccatcgcgccaaggcgctgttgaacagcaagggcgcggcgtttaacgagatcgccatcgacggcgataacgccaagcgcgaagtgatgatcgagcgcagcgggcgcaccaccgtgccgcagattttcatcgatggccggcatatcggcggctgcgatgatttatatgaactcgatgctcgcggcggcctggatccactgctttaa

SEQ ID NO: 426117 - DNA, 435 bp, Serratia marcescens
atgctgcaagaaattatgccattcgtaagcagacaccctattctgagcctggcttggatcgctctgctggtcgccgtgatcgtcatgaccttcaaaagccgtttctccaaggtcaaagagatcgcccgcggtgaagctattcgtctgatcaacaaagaagaagccgtggtggtcgacacccgcagccgcgacgattttcgccgtggtcacctggccaacgccatcaacctgaccgccagcgaaatcaaaagcggcagcctgggcgagctggaaaaacacaaagcgcagccgatcatcgtcgtgtgcgccaacggcaccgcctcccgcgagccggcggagaacctgagcaaggccggttttgaaaaggtgactatgctgaaagacggcatttccggctggagtggagaaaacctgccgctggtgcgcggtaagtaa

SEQ ID NO: 426118 - DNA, 1545 bp, Serratia marcescens
atgtcgagcaacaaaaaaccgatggttctggtgatcctggacggttacggccaccgtgaagagcggcaggacaacgcgatcctgaacgccggcactccggtgatggatcgcctgtggcgggagcagccgcatacgctgatcgccgcctccgggctggatgtcggcctgcccgatgggcaaatgggcaactccgaagtcggccacgtcaacctgggcgccgggcgcatcgtgtaccaggatctgacccggctggacaaagcgatcgccgacggcgacttcttcgccaacccggtgctgaccgccgcggtcgataaggccgtagcggccggaaaggcggtgcacatcatgggcctgctgtcgccgggcggcgtgcacagccacgacgagcacattctggccatgatcaagctggccgcccaacgcggcgccaaagcggtttatctgcatgccttcctcgatgggcgcgacacgccgccgcgcagcgccgaagccccgctgcaacgctgccgcgacgccttcgctgcattgggcgtcgggcgcatcgcctcgctgatcggccgctactacgcgatggaccgcgacaaccgctgggatcgcgtgcagctggcctatgacctgctgaccgcggccaaaggcgacgccgtggccgaggatgcgatcgccgggctgcaggccgcttatcagcgcggtgaaaacgacgagttcgtcagaccgaccgtgatccgcgccaccggtgaggccgatgccgcgatgcaggacggcgacgcgttgatcttcatgaacttccgtgccgaccgcgcgcgccagatcacccacgccttcgtgaacgcggatttcgacggtttcccgcgcgccaaacaggtgcagttcggcgatttcgtgatgctgaccgaatacgccgccgatatcgcgaccgcctgcgcctatccgccggcgtcgctggccaacaccttcggcgaatggctgatgaagcacgacaaaacccaactgcgcatctcggaaaccgaaaaatacgcccacgtcaccttcttctataacggcggcgtggaagcgccgttcaagggcgaagaccgcgtgctggtcaactcgccgaaggtcgccacctacgatctgcagccggagatgagcgccgccgagctgaccgacaagctgctgagcgccatccgcagcggcaaatacgacgccattatctgcaactacccgaacggcgacatggtggggcataccggcgtgtatgaagcggcggtcaaagcggtggaaacgctggacgcctgcatcgcccaggtggttgatgcggtgcgcgacgtcgacggtcagctgctgatcaccgccgatcacggcaacgccgagcagatgcgcgatccggccaccggccaggcgcacaccgcccacaccagcctgccggtgccgctgatttacgtcggtaaaccggcgcgggcggtcgaaggcggcaagctttcggacatcgcgccaaccctgttaacgctgatgggaatggaaatcccgcaagagatgactggtaagccgctgttcatcgtggaataa

SEQ ID NO: 426119 - DNA, 1233 bp, Serratia marcescens
atgtgcgccagcgtattttgcgctggcgtcttgctgttgccgctcgccggccaggcggcggaggacaataaatcccagctgaaagacatccagcagagcatcgccgagaaagaaaaggcggtgaagcagcagcaacagcagcgcagctcgctgcaggatcagctgcgtcagcaggaaaaaaccatcgcccaggccagccgccagctgcgcgacacccagagcacgctcacccagttgggcaaagacattgccggcctgaacgcctcgatagccaaactgcaaaagcagcaatcaacccaacaaaacctcctcgccaaacagctcgacgccgccttccggcaagggcagcacagcgccgtgcagctgatcctcagcggtgaagaaagccagcgcagcgaacgtattctggcctatttcggctatctgaacgaagcgcgtcagaaaaccatcgaagagctgaagcagacccgcgccgagctggcgaagcaaaaaaccacgctggtggccaaacagggccagcaaaaatccttactgggcgagcaacagacgcagcagcagaagctggagcaggcgcgcggtgcccgcaagaaaacgctgaccgcgctggaagcctcgctggaaaaagaccaacaacgcctggtggaactgcgccagaacgaagcccgcatgcgcgacaagatcgcccgggcggagcgcgaagcccgtgcgcgcgccgaacgcgaagcgcgtgaagcggccaaggtgcgcgaacaggtgcgcatcaaggagcagcaggcgaagaaaaccggcaccacctacaaacctagcgaagccgatcgctcgctgatggcgcgaaccggcggcctcggtcgtccggccggccagctgatgtggccggtgcgcgggcgcacgctgcacggctttggcgaacagcagcagggcgagctacgctggaaaggcatggtgatcgaagcccgcgaaggcagcgaagtgaaagccgtcgccgatggccgcgtgctgctggccgactggctgcagggctatggcctgatggtggtggtcgaacacggtaaaggcgacatgagcgtgtacggctacaaccagagcgcgttggtcaacgtcggggcgcaggtgcgcgccggccagccgatcgctctggtcggcaccagcggtggccagggaacgccgtcgctctatttcgaaatccgtcgtcagggacaggcggttaacccactgccgtggttgggaagatag

SEQ ID NO: 426120 - DNA, 954 bp, Serratia marcescens
ttgcgctatgtcaaaacccgtacagctctgttaataggctgtctgctgcaggtttacgctgcgcaggcaggaaaactctccatcgtcatcgatgacgtgggctaccgccctcacgaagaaaacgcggtgctgcaaatgccgacggcgatctcggtcgcggtgttgcccaacgcgccgcatgcccgcctgatggccacccgcgcccacagccagggccgcgaagtcttgatccacatgccgatggcgccgctcagcaagcagccgctggagcgcgataccctgcagccttccatgagcagcgacgagatccagcgcatcatccgcaacgcggtgaacaacgtgccctacgcggtcggcatgaacaaccacatgggcagcgccatgacctccagcctgccgggcatgcagaaagtgatgcaggcgctcgaaagctaccgactgtatttcctcgacagcatgaccatcggcagcagccaggcgacccgcgccgcggccggcaccggcgtgaaggtgatcaaacgcaaggtgttcctcgacgataccgcgaacgaagccgacatccgccgccagttcaaccgcgcggtcgaattggcgcgacgcaacggctctgccatcgccatcggccacccgcgcccggcgacggtgaaggtgctgcagcagatgctgccgtcgctgcccgccgatatcgtgctggtcaagccgagcgcgctgctgaacgaaccgcagggcaacggtggcggcggctacgtcccaccgccggtcaaaccgcaaaagccgcagccgaagaacccgttcagcggcggcatcaagcagtgcaaggtcaaaccgccgaaggaaaaaaccaacgccggcaccgcgctgggcgtcatcgccgacagcatcgccacctcgccgccggtgaccttcatcaagcgtcattggcagcactggacgcaagccaaaccgcaagcgtaa

SEQ ID NO: 426121 - DNA, 1026 bp, Serratia marcescens
atgaaagcactgtcaaaactgaaagcggaagaagggatttggatgaccgacgtgcctcagccggagctgggccacaatgacatcatgatcaaaatccgcaaaaccgcgatctgcggcaccgatgtgcatatctacaactgggacgagtggtcgcaaaaaaccattccggttccgatggtggtcggccatgaatacgtcggcgaagtggtggcgatcggtcaggaagtcaaaggcttcagcatcggcgatcgcgtgtccggcgaaggccacatcacctgcggccattgccgcaactgccgcggcggccgcacgcacctgtgccgcaacaccgtcggcgtgggcgtgaaccgtccgggcagctttgcggaatacctggtgatcccggcgttcaacgccttcaagatcccggataacatctccgacgaactggcttcgatcttcgatccgttcggcaacgcggtgcacaccgcgctgtcgttcgatctggtcggggaagacgtgctggtgtccggcgccggcccgatcggcatcatggcggcggcggtgtgcaaacacgtcggcgctcgccatgtggtgatcaccgacgttaacgaataccgcctggaactggcgcgcaagatgggcgtgacccgcgcggtgaacgtcagcaaggaaaacctcagcgacgtgatggccgagctgggcatgaccgaagggttcgacgtcggtctggaaatgtccggcgcgccgccggcgttccgcacgctgctcaatgcgatgaaccacggcgggcgcatcgccatgctgggcattccgccttcggacatgtcgatcgactggaaccaggtcatcttcaaagggctgtttatcaaagggatttacggccgcgaaatgttcgaaacctggtacaagatggcggcgctgatccagtccggtctggatttgagcccgatcatcacccaccgtttctcgatcgacgagttccagcagggcttcgacgccatgcgctccggcaagtcgggtaaagtggtgctgagctgggattaa

SEQ ID NO: 426122 - DNA, 1197 bp, Serratia marcescens
atgtcagcgtctttttatcagcagttggaacaacagcttgccgccactcgcagtgaagggctgttcaaggaagaacgcatcatcacctccgcgcaacaggcggatatcgccgtcgccgacggcagccatgtgatcaacttctgcgccaataactacctgggcctggccaaccatccggcgctgatcgccgccgccaagtcgggcatggacagccacggtttcggcatggcgtcggtgcgcttcatctgcggcacccaggacagccacaagcagttggaacagaaactggcggccttcttgggcatggaagacgcgatcctgtactcctcctgcttcgacgccaacggcgggctgttcgaaaccctgctcggcccggaagacgccattatctccgatgcgctgaaccacgcgtcgatcatcgacggcgtgcgcctgtgcaaggccaagcgctatcgctacgccaataacgacatggccgagctggccgcgcagctgaagcaggccaaagccgacggcgcgcgccacatcctgatcgccaccgacggcgtcttctcgatggacggcgtgatcgccaacctgaaaggggtgtgcgatctggcggacgagtaccaggcgctggtgatggtggatgactcccacgcggtgggctttgtcggcgccaacgggcgcggcacccatgaatactgcgaagtgatgggccgcgtcgatatcatcaccggtacgttaggcaaagcgctgggcggcgcgtccggcggctacaccgccgccaggaaagaagtggtggagtggctgcgccagcgttcgcgcccgtacctgttctccaactcgctggcgccggcgatcgtcgccgcgtcgatcaaagtgctggaactgctggaagagggcgatgccctgcgcgatcgcctgtgggccaacgcgcgtctgttccgcgaaaaaatgaccgccgccggcttcacgttggccggcgccgatcatgccatcatcccggtcatgctgggtgaggcgaagctggcgcaggaattcgccaatgcgttgctcaaggaaggcatctatgtgaccggtttcttctatccggtggtgccgaaaggccaggcgcgcatccgtacccagatgtctgccgaccacaccccggagcaaatcgaacgcgcagtggcggcgtttacacgtatcggtaaggatcttggcgttattgcataa

SEQ ID NO: 426123 - DNA, 930 bp, Serratia marcescens
atgattatcgtcacaggcggcgccggcatgatcggcagcaacatcattaaggcactgaacgacaagggatatcgcgatatcctggtggtggataacctgaaagacggcaccaagttcgtcaacctggtcgatctggacatcgccgactatatcgataaagaagactttatcgccagcatcgtggccggtgacgatctgggcgatatcgaagcggtcttccacgaaggcgcctgctccgcgaccaccgagtgggacggcaagtacatgatggacaataactaccagtactccaaagacctgctgcactactgcctggatcgcgaaatcccgttcctgtacgcctcctccgccgccacttacggcggccgcgaagagttcatcgaagagcgtgagtatgaagcgccgctcaacgtgtacggctactccaaattcctgttcgatcagtacgtgcgcgagatcctgccggaagcggactcgcagatctgcggcttccgctacttcaacgtttacggcccgcgcgaaggccacaaaggcagcatggccagcgtcgccttccacctgaatacccagatcaaccgcggcgaaaacccgaaactgttcgccggcagcgaaaacttcaagcgtgacttcatttacgtcggcgacgtggcggcggttaacctgtggttctgggaaaccggcaaatccggcatcttcaactgcggcaccggccgggcggaaaccttccaggcggtggccgacgcggtggtggacttccaccagaagggcgcggtggaatacatcgagttcccggagaagctgaagggccgctatcaggcgtacacccaggccgatctgaccaagctgcgcgccgccggctacgacgcaccgttcaaaacggtcgccgaaggggtgaaagagtatatggcctggttgaaccgcaccgcataa

SEQ ID NO: 426124 - DNA, 1047 bp, Serratia marcescens
atgaaaatactggttatcggcccttcttgggttggcgacatgatgatgtcgcaaagtctctatcgcaccctgaaggccgaatacccgtcggcggagatcgatgtgatggcgccggcctggtgccgcccgctgctggcgcgcatgccggaagtcaatcaggcgctggcgatgccgctgggccacggcgcgctggggctcggcgagcgccgccgcctggggcgcgccctgcgcgccaaccgttacgatcgcgcttacgttctacccaactcgttcaaatccgcgctggtgcccttcttcgccgatatcccgcagcgcaccggctggcggggcgaaatgcgttacggcctgctgaacgacgtccgcgtgctcgacaaggcggccttcccgctgatggtgcaacgctacgtggcgctggcctatgacaaaggccgcattcagcgcgccgacgatctgccgcagccgctgctgtggccacagctgcaggtgagcgacgaagagatcgccgacaccaccgcagccttcaacctgaccgacagccggccgatcgtcggcttctgcccgggcgcggagttcggccccgccaaacgctggccgcactatcactacgcgacgctggctcagcggctgatcgagaacggctatcagatcgcgctgttcggctcggcgaaagatcacgaggccggcgaacagatccgcgccgcgctgcaggaagacgcccgcgatttctgccttaacctggccggaaaaacccagctggagcaggcggtgatcctgatcgcggcctgccgggcggtggtcagcaacgactccggtttaatgcacgttgccgcagcgttgaacaaaccgctgatagccttgtacggcccaagcagccccgacttcacgccgccgctctccgacaaggcgcgggtaattcgcctgatcagcggctaccacaaggtgcgcaagggcgatgccgagcagggataccaccaaagtttgatcgatattcagccgcagcaagtattggatgcgctgacgccgctacttgtcgccagcgaggaatag

SEQ ID NO: 426125 - DNA, 966 bp, Serratia marcescens
atgcaggtgttaatcgtaaaaacctcctcaatgggggacgtactgcatacgctgcccgccctgaccgacgcgctgcaggccattcccgatatccgcttcgactgggtggtggaagaaggtttcagccaaatcccgacctggcacccggcggtggatcgcgtgatcccggtggccattcgccgctggcgcaagaactggttcggcaacgacacccggcaacagcgctgcgacttcaagcgcgcgctgcaagaacgccgttatgacgtagtgatcgacgcgcagggcctgatcaaaagcgccgcgctgatcacgcgcatcgccaaaggcaataaacatggcctggactgcaagagcgcgcgcgagccgttcgccagctggttctacaacgtgcgccatgagatagacaagcagcagcacgcggtggaacgcacgcgcgaactgttcgccaaaagccttggctacgataaaccgggcagctacggcgattacgccatcgccgcgcgctttctcagcagcccgccggccgatgccgggcggtatttggtgtttttgcacgcgacgacgcgtgacgacaagcactggccggagcaaaactggcgcgagctgatcgcgctgacggcggacagcgggttgaagatcaaactgccgtggggtgcagagcatgaacatcagcgcgcgctgcgcttggcggaaggtttttcacatgtcgaagtgctgccgaagctcagcctgcagcaggtggccgaggtgctggccggcgccaagggcgtggtctcggtcgacaccgggctcagccatttgaccgccgcgctcgacaaaccgaacatcacgctgttcgggccgaccgatcccggcctgatcggcggctacgggcaaaatcagcactcgttgatttcgccggaaaaaagcatggcgacaatcgacgccgatacggcatggcaggcgttgcaaaaggttatagcatga

SEQ ID NO: 426126 - DNA, 1167 bp, Serratia marcescens
atgaaaaaactgcacattatcaacctgggtaaaatgggcggcgtcgaacgcctgttcctgcagtacatcaacgataccaccgacggcagcaacaaggtcttgtgcatcagcggcgacattggcgaagaaatccgccgccagttgcctgcgcatcagcccgtcaccttcgccaaccgcctgatcaatgcgctgccgttgcgctgcccgcagttcctgcgcaaatttttgctgaagtggaaaatcgagcgggcgaacgccgacgtggtgatcgtctgggacctggtgccggggctggcggccaaacccaagcgcggcaagctggtttactacgatcacggctgctcctggcgttaccccaagaataaaaagacgctgcgtttcttcgccatgctgggcggcgtcatttccgcctcacacgcgtcgaagcgggtgatggagctgcgctttaatctgccttgcccaaatcacgtggtgatcaaccgcatcaaaacaccggcggggatcgatactgcgccgaaaaccctgtcgcagccggtcaggatcggcactgcctcacgcctggtcagcctgaaaggcatcagcgtgtcattattgatgatgcaggaactgctgcggcgcgggcatgacgtcacgctggaagtggccggcaaagggccggatcgcgcggcgttcgaggcgctggcggcccggctacagctcggcgatcgcgtcaccttcagcggttatcaggatgacgtcgccggcttcttcaatcgcacgcacatctacatgagcacgccgatcaccgagccgttcggcttgtcctgcatggaatcgctctatttcggcgtgccggtcatcttcccgcaggttgacggccagccggaagcggtgaaagacggggtctgcggcattggcctgacgccgtcggtcaccatcgaacaacaccggcagctcaccgatatcgaggtcgacttcccgcatgaggtctacgatccgttgaccgacagcctggtcgcgcccaagctgctgtcgcatatcgattgtgcggatgccgttgagaaattgctggagcgagaaacctaccagactctgagccgaaatgcgcagcgctatcctgcggaacattttaactatgctcagttcaaagttgaattcgacgacacgctgcgatcctttatcgcttaa

SEQ ID NO: 426127 - DNA, 1242 bp, Serratia marcescens
atgctaaaacacagaacgccgcaccctgccttcagctatctgatctatctggggtgcgccatcgctttttgcaccattcctttcggttccgcgaccggacgcaatctgttttacgtttccagctacatcgcctttatcgccgtttgcctgtacccgcgctactacttcagcaacgttagaaacctgctgctgcccgcgctgatgttcagcgtgggcatgggaaccatcctctggatgcatcacttcaaacagccgggtgagtacatcaatatttatcgctcttatatgtcgaccggcaaactgcagctcgcgaccgctttcatcttgctgattgcgctcaatgagcggttgtgcgtacagcgcctgctgatcgttgtggctctcgccaccggtctggcgatcaacggttattccctctatcaggggctgcgtctggatatcccgcgcgtagagctcaacttcgatcgcgccacggtcgccgcctatctgatgaccgccatcgatctggtcatgatgcaagccatcctgatgctgcgcacccgctaccgcctggtgttgtacattgcggcattcctgctgtccttctctgcgctggtgctcaccggcacgcgcgcggccatgttggtctatccggtggcggtctgcctgtcgctgctggccaccaagcagttggtttccagaaaacacaagcttgcgttggtggcctcggtaccgctgctgctcgtagcctgcggcctggtgtttaaaccgcagatagaagaacgcattcaggcttttgagaccgacatgcgcctgatggaccagccgcagactgaaaactccatcatttcccggctgtcgatgcaaacgctggcatggcataccgggtcacaagccccgtggggccaatccgccgaacagcgcggcgaagagatccgtgcgatggtcgcacagcaaccccgcctgtctggcgtcatgccctacatcaacgtccacctgcacaacgagctgctggaaacttactcgctcaagggcgtctggggtgtactgctgctgctggcgctgtatgtcagcctgtttttctcttccttccggccacagcgcaacgcgctgctgctgagcgtcagcgccagcctgttcgtttacggcctgagcgacgtcatcttcttcagcacggaaggtaccgccatgttcggcctggcgctgatcgccgccgttctttccgtcacgaaacagccccctgttcaggagcccaccccgtga

SEQ ID NO: 426128 - DNA, 978 bp, Serratia marcescens
gtgaatcctcagcagccgctgctcagcgttatcgtgccgttttataataacgaagcgttcgttatcgctgcgctggattcgttatttgcacagattagcgacgatatcgaggtggtgatcatcgacgatggctccaccgacgcctccggcgcactggtcagccaatatctggcgcagcggcggcacccgcgcgtggtctttacttcacaggccaacggcggcattgcgcacgcccgcaacgtcggcttacgtctggccaccggacgctatatcaccttcctcgacggcgacgatctgctgagcgacgactatctagcgatcctgcgcccccagcttaccgccggtgaatatgatctgatcgattttaattatcagaagttcaccgagcatccgccgacaccggataaccgcgcggcgcggcccgtagcctacgacttttcacaattggggctgggcagcctgcaatcgcttttcgaacgctcgatgtggcatctctggagccgggtatataaacgcacgctgctggcaggggaagcgttcgaagaaggcaggcgctacgaagacgtaatttttacgccttttcagtatttcaaaactcgccgcatcgcccatcttgacggcgaactctacttctatcgggacaacagccagggcatcacccgcaatatcaaacccaaagatattgaagatatgttgttcgccatggagaagatgctgcgttttgtggcgcagcatcccggggatgagccgctgcgccggttggccgccctgatgctggccaactgcttttccgaggtgaaaagcatgtcgaaggcggtctacggctattaccattacgcgccggcaacgctgcacatcctgcgccgcgccgccgacgtctgccgcaacagcgacgtgccgggcaaaaaagtccgccagatgcgctatgcgcgagtggatacctttctttctaagctgcgcgggcgcaggccgcgctaa

SEQ ID NO: 426129 - DNA, 1095 bp, Serratia marcescens
atgtcgaaaaaatggaaaatcaaggttgccgactggttcttgcggcgctatacggcgaagtacggtcgttttcaggataagacgacgttcgacggcgcccagcagtttgacaatatcgtcatctattccaccacggcgttgggcgacttcatgttcaacacgccggcattgagggcgatgcgggaacgctaccccaacgcacacatcacactggtggtgcacaagaaaaaccgcgagctggtggaaaacggccgctattacgatcgcgtggtgtattgggacagcaagatcaagacgatccgcccgttgctgaaatcgctgcgcgaacatcagccggatttggcgctgattctgcactcccacctgccttatgacatcatcagcgccgtactggccggggcgaagtacattatccgcgataactacagttcgggcatttgcgggctggagccttggctgaccaactatgtcttccattattacggccacttcgtgcgccgcaagctggagctgatttccattttgggctgccgcagcgacgatccgacgatggaaattcccgtggattatcagcgcggcgtcaaaagcagcgagcatcccaccatcgggtttcaattgggggcatctacggagtcgcgttgctggccggtttcgcactatgcgcggctggccgatgagctggtggcgaagcaccctaatgtacgcatcgtgctgattggcgcaccgtttgacgacggcaaggccaaacagtttatgagcctgatcggcccgcaaacgcaggcctgcgtggataaccagatcggtaaaacggggctgcaaggcttgctgacgttgatcgacagtttccatgttctggtcaccggcgataccgggccgctgcacctggcggtggcgttgaaggtgaaaaccatcagcctgttcgtgaccgccgactcacgctccaccgggccgattcaggatgctgaactgcaccgcatcattcaggtgtcgcgtaccggttatacgatgccgctggaggcggaaagcccgatgggggtcatccaaccgcagcggatttatgacgagctggtcgcacacgtgcctttagcgcgctaa

SEQ ID NO: 426130 - DNA, 957 bp, Serratia marcescens
atgactaaaccggcgtttctcatcaccattgataccgaaggcgataatctgtggcaaaaccacgatcgcatcgcgaccgaaaacacgcgtttcttgccgcgctttcaggcattgtgcgaaaaatacgccttcaaaccggtttatctcaccaactatgaaatggcgatggatccggcttacgtcgagttcgcgcgtgacgtgatcgcccgcggcgcgggtgaagtcggcatgcacctgcacgcctggaacagcccgccgctaacgccgctcaccgacgacgactggcgccacaaaccgtatttgatcgagtatcccgccgatcagatccgcgccaaggtcgatcacatgaccaagctgctggaagatgccttccagaccaaaatgctcagccatcgcgccggccgctgggcgttcaacgaatattatgcctcgctgctgctggagtatggctatcaggtggactgttcggtgacgccgcgcgtcaactggcagttttcgccgggcaatccgcagggcaacggcggcaccgattacagccggttcccgtcgcaggcctatttcatcgatccgcagaacattgccaaaccgggcgcttcggcgctgctggaagtgccgatgagcattcagtacaagcactcggcgctgatgaacgcgttcaagcaaggttatgatcggctgcgcggcaagcggcgttcgccgtccgtcaactggctgcggccaagtggcggcaacgtggccaagatgataggggtggctgaagcgtcgctggcgcaggggcatgactacgtcgaatttatgctgcactcctccgagtttatgccgggcggcagcccgacgttcaaaaccgagcaggatatcgaagtgctgtaccgcgatctggaacagctgtttgactggctgcagcagcgcacggtgggcatgacgctggccgagtattatcaacttaaagcgaattaa

SEQ ID NO: 426131 - DNA, 1002 bp, Serratia marcescens
atgctgctggtcacgccggtcatcagcagcctgcggcaaaactacccgcaggcgcagatcgatgtgctgctgtatcaggaaacgcaggagatgctggccagtaatccggaactgtcgacgctgttcgccatcgaccgccaatggaaaaaacagggtgcccgcgcacatctggggcacgagctggcgctgctgcgccgcctgaaggcgcagcgctacgatctggtggtcaacctggccgatcagtggcgcagcgccatcctcacgcgcctgaccggcgcgcgcatccgtctgggcttcgatttccccaaacgccgcggcttcctgtggcgccactgccacacgcagctggtgccggtcgacaatcacgcccacctgcataccgtcgaacaaaacctctcgctgctggcgccgctgaacctgcccgcgctcagtgatcatgtgaccatgagttacgatccgcaggattggcaggcatgtgagcaacggttacagaaacagggcgtcaccggcagttatattgtggtgcagcccacctcgcgctggttcttcaaatgctggagcgaagagaaaatggccgccaccctcaccgccttgcaggccgacggccaccagctggtgatcacctccggccccgacgccagagaacaagccatggtagagcgcattttggcgctctgcccgccgcagggcgtgatttcgttagccggccagctgacgctgcgccagttggccgccctgatcgaccacgccaagctgtttatcggcgtggattcggtgccgatgcacatggccgccgcgctgcacacgccgtgcgtagcgctgttcggcccttccaagctgactttctggcggccgtggcaggctaccggcgccgtgatctgggccggcgacttcggcgaactgcccgatccggacgccatcgataccggcaccgacgaacggtatctcgaccttattcctacagacgcggtgattgcagccgcgcggagcacgctggcatga

SEQ ID NO: 426132 - DNA, 1128 bp, Serratia marcescens
atgaaagcatttcgtttggcgatcgttcgccaaaaataccgcccggacggcggagccgaacgtttcgtttcccgcgccctggaggcgctggagcaacaggatctcgatctgaacgtcatcacccgcgaatggcagggtgacgccaatcccaactggcatatccacctgtgcaacccgctaaaactcggccgcatcagccgcgaacggggcttcgccgtggcggccagggcgctgtggcagaaagagcattttgatctggtgcaaagccacgagcgcattcccggctgcgacatctaccgcgccggcgacggcgtacaccgccgctggctgctgcaacgcgcgcgtctgctgccggaatggcgccgcaaatggctgttctccaatcgctatcaccgctatgtgatgtgcgccgaacgcgccatgtatgccgcaccggagctgaaagccgtcatctgcaacgccgagatgatcaagcaggaaatcatcgcggactttggcgtgcccgccgaaaaaatcacggtgatctataacgccatcgataatcaaaagttcccgcccgccgacgaggccctgcgccaacgtctgcgcgagcagtatcagatcccgcaacaggcgcactgcctgattttcgtcggttccggctttgagcgcaaagggctggccgccgccatccgcgccgtggcggcgaccgacagccacctgttggtggtcggcaaagacaaggccgaaaaacgctaccgggcgctggcgcagtcgctgggctgcggcgatcgggttcactttatgggcgtgcagaagcagaccttgccgttctatcaggccgcagatgcgctgctgctgccgacgctgtacgatccgttcccgaatgtgattctggaagcgatgtcgtgcggcctgccggttatcaccagcaccacctgcggcggcgccgagtttatcacccccggccagaacggcttcgtgaccgatgcgctcgacgtaccggccatcgcggaggccattcgcgcgctgccgcgccaggcgctgggatcatccatgggcgaagcggcaagattgcgtattatgccggctacgccggcgcatctgtccgaacagcttatttccctctataaccggttactggattag

SEQ ID NO: 426133 - DNA, 1101 bp, Serratia marcescens
atgcgtattctgatgatcatcgacggcctgccgggaggcggcgcggaaaaagtggtgctgaccctgtgccagggcatgcagcaacaggggcatgacgtcagtctgatctcgctgcgcgacgtctgcaattaccctatcccgccgggcattgattatcaggtggtggccgatcgcagccgcgccccctggcgcaagctgaccgagctgtcgcgccgcgccggcgcgctggatcgggcgatagccgaacacgagcgccaacacggcgcgttcgatctggtgttctccaacctgcataaaaccgatcgcatcgtcagccgcagcaagcggttggccgcggatcgcctgtggttctgcattcacggcattctctccacctcctacctcggccaccgcaagggcctggatcgctggctgaagcaacgcaaaatcgccaacgtttaccagggaagaaatatcgtcgccgtttcacgggcggtcagcgacgatctgcagcagaacttgccgatccgcccgcgccggctggcggtcatcaacaacccgttcgatatcgacgccatccagcaacaggcggcgatgccttgcgaactggccggccaggactatctggtgcacgtcggccgctttcacgccaccaagcggcatgaccgcctgctgaaagcctatgcgtactccggcattcaggcgccgctggccttgatcggcgccggggacgacgccagagtcgccgaggtcaaacgtctggcgacagacctgggcattgcagagcgcgtgctgtttctcggtttccaggctaatccctacccgtttattctccatgcctcgctgctggtgctcagctccgacagcgaagggtttggcaacgtgctggtagaatcgctgctgtgcggcacaccggtggtcagcacccgttgtccgggtggccctgcggaaattctggaaaaagccggcatggctaacgcgctggcggaattaaacgaagcgtcgctggcagaaaaaatggcggagatttacgccaatccgccgcagataaatcaacagcaattgctgagctatgggcttgagcctatttgccgccaatatctggaactggaaagaaaataa

SEQ ID NO: 426134 - DNA, 1014 bp, Serratia marcescens
atgaagaatattttaattattcgccgcgataacatcggcgatcttgtttgcaccacgcccttgattgaaggggtgaaaattgcctatccggacgcaaaagtttatctgctgatcaataaagtcagccaggacgtcgttaaaaacaaccctcatctcgagaaagtctttgtctataaaaaggccaagcacaaggcgaaaaatgaaacgacgctgggcgtttatttcgagcgtctgatgatcttcctgaagctgcgcaaaataaaattcgatgcggtcattctggctaacccggtgccttgcaaatacagtttgcgtttagcgaaaatggctggcgccacccatatcatcggcgccgatttgggcacgaaagatattcatcgcccgttccgcaaggacgatttcaacggtcaacatcaggtcgaacatacctacagctatttatcggcgataaccgatcaatccattccgatcccgccggtgcgggtgtttctgacgcctgaagagcggcaattggcggcgcaacggctgcaggagcgtctgccgccggtcgaacggatatgcgccgtgcatatcagcagccgcagcccgaaaaggcgttggccggttgaacgctatgccgaaatcatcaaccgtctggttgccgatccccacaccggcgtgctgatcttctggtcgccgcagggcacgctggcgccggacgacatcggcgaccagcagcgcgccgaacagctgctggcgctgtgtcaaaacgaacgcgtcgcgctttatccgacggcgtcggtgcgtgagctgttgggcgggtttgatttatgcgaccgggtgctgtgcagcgacggtgggcagatgcatcttgccgctgcgttgaataaggacatggtagtgttctttggcgataccgataaagcctcctggcatccatggaccggccgtcatcatattttgcaaagtgagtcggggcactgtgaggatgtttctgtcgatgaggtttggcagaaaatgcaggcgctcagctag

SEQ ID NO: 426135 - DNA, 1278 bp, Serratia marcescens
atgttgctgcgtttatatcaggtactactctacctcatccaacccctgatctggctccgcttactgctgcgcagccgcaaagctccagcctaccgtaaacgctgggcggaacgctatggcttctgcgccggaaaagtcgtgccaggcggcatcatgctgcattccgtctccgtcggcgaaacgctggcggccatcccgctggtgcgggcgctgcgccatcgttaccccgctttgccgataactgtgaccacaatgaccccaacaggttcagaacgcgtccagtccgctttcggcaaagacgtgcatcatgtctatctgccctacgatctgcccggctccatgaaccgcttcctcgatcaggtgaatcccaagctggtgatcatcatggaaaccgagctgtggcccaacctgatcaacgcgctgcatcagcggcagatccccctggtgatcgccaatgcgcgcctgtcggcccgctccgccgccggctataagaaaattggcggattcatgcgcgatatgctgcgccgcatcacgctgatcgccgcccaaaaccaggaagacggcgatcggtttatcgagctgggcctgaagcgctctcagctggccgtgaccggcagcctgaagttcgatatctccgtcaccccggagctggccgcccgcgccgttacgctgcgccgccaatgggcgccgcgccgcccggtgtggatcgccaccagtacccatgacggggaagaaaccatcctgctggaagcgcaccgcaaactgctggaaaaacaccccgatctgctgctgatcctggtgccgcgtcacccggagcgcttcccgaccgccaaggagctggtgcagaaagccggcttcagctacaccctgcgcagcagcggcgaaatcccgtccggcagcacccaggtggtgatcggcgataccatgggcgagctgatgctgctgtacggcatcgccgatctggcctttgtcggcggcagcctggtggaacgcggcggacataacccgctggaagccgccgcgcacgccatcccggtgttgatgggcccgcataccttcaacttcaaagacatctgcgctaagctttcgcaggccgaaggcctgatcaccgtgaccgacgtggattcgctggtgaaggaagtggaaaccctgctgaccgacgaagactaccgccgctactacggccgccatgcggtggaagtgctgtatcagaatcagggagcgttgcagcgcctgctgcagctgctggaaccgcacctgccgccccggagccactga

SEQ ID NO: 426136 - DNA, 774 bp, Serratia marcescens
atgagcagccgcaaaagcctgtcggtggtgatgatcgccaaaaacgaagccgggctgttgccggactgtctgcgttcggtcgagtgggccgatgaaatcatcgtgctggactccggcagcgaggacgacagcgtcgccatcgcccaaagcctgggcgccaaagtcttcacgcacaccgactggcaagggttcggcaagcagcgtcagctggcgcaaagctacgctagccatgactacgttttgatgatcgacgccgacgaacgcgtcacgcccgagctgcggcaatccatcgaacgggtgttgaacgcgccggacgacggcgccgtctacagctgtgcgcggcgcaatctgttccttggccgcttcatgcgccacagcggctggtatcccgaccgcgtcaaccgcctgtacgccaaccgaagctatcgctataacgacgatctggtgcacgaatcgctgaacatcggcggcgccaaagtgatccccctcagcggcgatatgctgcacctgacctgccgcgatttcttcgccttccagcgcaaacagctgcgctacgccgaagagtgggcgacgcaacgccaccgggccggcaagcgttgcggctacctgtctatcctgacccacacgctcggcgccttcgtcaaaacctggctgctgcgggccggcttcctcgacggtaaacaggggttgctgttagcggtggtcaacgcgcaatataccttcaataaatatgccgcattatgggcattgggccgcaactactcagagaagtga

SEQ ID NO: 426137 - DNA, 486 bp, Serratia marcescens
atgaccagcaaagccatctatcccgggaccttcgatcccatgaccaacggccacctggatttagtgacgcgcgcgtcactgatgttcgatcacgtgattctggccatcgccgccagcccgagcaaaaagccgctgttcagcctggatgaacgcgtggcgttggcgacgcaggtcacctcgcatctggacaatgtggaagtgctgggcttcagcgagctgatggcgcactttgccgctcaccaaaatgccaatatcctggtgcgcggcctgcgtgcagtgtctgactttgaatacgaattgcagctggcgaacatgaaccgccatttgatgccgacgctagaaagcgtgttcctgatgccttccgaagagtggtcgttcatctcctcctcactggtgaaggaggtcgcccgtcacggcggcgatatcgcgcctttcctgcctgacgtggtcacccaggcactgatggcgaagctcgccgccgagtga

SEQ ID NO: 426138 - DNA, 816 bp, Serratia marcescens
atgcctgaattaccggaagttgagacgagcagacgcggtatagagccttatcttgtcggccacagcattcagtatgcggtggtgcgcaacgcgcgcctgcgctggccggtttccgagcagatcctgacgctgagcgatcggcctgtgctcagtgtgcagcgccgggccaaatacctgctgatcgagctggagaacggttggattatcgtgcacctgggcatgtcgggcagcttgcgcatgctgcgcgaggaaaacgaagatgaagccggcaaacacgaccacgtcgatctggtgatcagcaacggcatgatcctgcgctataccgatccgcgccgtttcggcgcctggctgtggtgcgaagatttggcgaccagcagcgtgttggcgcatctggggccggaaccgctgagcgaagcgttcaacggcgactacctgtatgaaaaatcacgcaataagcgcacgctgatcaaaccgtggctgatggataacaagctggtggttggggtcggcaatatttacgccagcgaatcgctgttcagcgccgggatcctgcccgatcgtccggcgggatccttgagcaaagccgaagcggcgctgctggcgcagaccatcaaggcggtgttgcagcgctctatcgagcagggcggcacgacattgcgcgactttttgcagtctgacggcaaaccggggtatttcgcgcaggaactgcaggtttacgggcgggcgggagagccgtgccgcgcgtgcggtacgccgatcgaatcggccaagcacgggcagcgcagcaccttcttttgccgccgctgccagcgctga

SEQ ID NO: 426139 - DNA, 168 bp, Serratia marcescens
atggctaaaggtgttcgcgagaagatcaagctggtttcttctgctggtactggtcacttctataccaccacgaagaacaagcgtactaagccggaaaaattggaactgaagaaattcgatccagttgtccgtcagcacgtagtatacaaagaagctaaaattaaataa

SEQ ID NO: 426140 - DNA, 237 bp, Serratia marcescens
atgtcccgagtctgccaagttactggcaagcgcccggtgagcggtaacaaccgttcccacgcaatgaacgcgaccaaacgccgttttctgcctaacctgcactcacaccgtttttgggttgaggctgagaagcgctttgtaactctgcgtgtatctgctaaaggtatgcgtgttatcgataagaagggtattgagacggttctggccgatctgcgtgcccgtggtgagaagtattaa

SEQ ID NO: 426141 - DNA, 684 bp, Serratia marcescens
atgagcaacccgattgtggcgtgctggccgggcgcgctggcaccgcgtgaaaagctgctgatgcagggggcggcggcgctgtccgacgcagagctgttggccattttcttgcgtaccgggttgcccggcgtgcacgtgatgcagctggcggagcagctgctgcgccggttcggctcgctttatcacctgatgtcggccgatcatcaggctttttgcagccaaaaaggcctgggggacgccagctatacgcagctgcaggcgattgccgagctggcgctgcgcttcttttccagccatttgtcgcaggaaaacgccatgctcaatccgcgcgtcacccagcattatctgcaaagcctgctggcgcatcgcgagcgggaggtctttttggtattgtttttagacaatcagcaccgggttattcgccatcaggagatgtttgctggtaccatcagcagcgtcgtcgtctacccgagagaaattgtgcgcgaagcgttgaaggctaatgccgccgcgctgattctcgcgcataatcacccttcgggtaaggctgaacccagtcatgccgaccgcttgataacggaacaggtggtgaaagcctgtcagttattggagatccgagtgcttgatcatttggtgatcggtcggggtgaatgcgtctcttttgccgagcgcggatggctttaa

SEQ ID NO: 426142 - DNA, 1218 bp, Serratia marcescens
atgatgacgggactttccggcaaacatattgtgcttggcatcagcggcggcatcgccgcttacaaatgcccagagctggtgcgccgcctgcgcgacaggggcgcggaagtgcgcgtggtgatgacccatgccgccaaggcgttcattacaccactgacgctgcaggccgtttccggctacccggtgtccgacgatctgttggatcccgccgccgaagccgccatgggccacatcgaactcggcaagtgggcggatctggttattctggcgccggcgaccgccgatctgctggcgcgcgtcgccgccggcatggccaacgatctgctgaccaccgtctgcctggcgaccgatgcccccatcgccgccgcgcctgccatgaaccagcagatgtatcgcgccgccgccacgcaggccaacctgcaaacgctgcaggcgcgcggcatactgctttgggggccggacagcggcagccaagcctgcggcgacgtcggcccgggccgcatgttggatccgctggacatcgtcgacctggcgaacggtcatttctccgccccgcaggatctgcaacatttgcaggttatgatcaccgccggcccgacgcgtgaagcgctggatccggtgcgtttcatcagcaaccacagctccggcaaaatgggcttcgccatcgcccgcgccgccgccgcccgcggcgcgcaggtgacgctgatcgccgggccggtcagcctgccgacgccgccatcggtcacccgagtggacgtcaccagcgcgctggagatggagcaggcggtgcaacagcgcgccgcacagcagcagattttcatctcctgcgccgccgtggccgactaccgccccgagcggatcgccgatgaaaaaataaaaaaacagggtgatgaaatcatcctcaagatggtaaaaaaccccgacatcgtcgccggcgtggcggcgatgaccaaaaatcgaccgtttgtcgtggggtttgccgccgaaacccagaatgtggaagaatacgcgcggcaaaaactggcgcgtaagaagctggatttgatttgcgctaacgatgtatcgcttgcagagcacgggttcaacagcgacaccaatgccctgcaccttttttggcaggatggagagaaacgcctggcgctgagcgacaaggcactccttggccaacgtttaatagacgagatagtcagccgttatgatgaaaaaaatcgacgttaa

SEQ ID NO: 426143 - DNA, 459 bp, Serratia marcescens
atgatgaaaaaaatcgacgttaagatcctcgacccgcgcatcggtcaggatttcccgctaccgacctacgccaccccgggctccgccggtctcgacctgcgcgcctgcctggacagcgcggtagagctggcgccgggtgaaaccacgctgctgcctaccggcctcgcgatccatatcgccgacgcaagcctggcggcggtgatcctgccgcgctcaggcctgggccataagcacggcgtcgtgttgggcaacttggtcggcctgatcgactccgattatcagggccagctgatggtgtccgtttggaaccgcggccagaagcacttcaccatagagccgggtgaacgcatcgcgcagatggtcttcgtgccggtggtgcaggcagaattcaacctggtggaagaattcgacggcagcgagcgcggcgaaggcggcttcggccactcggggcgccactaa

SEQ ID NO: 426144 - DNA, 552 bp, Serratia marcescens
ttgcaggcgttagcccagatgctggagtccagcgacggcagccaacgcatcaccaccgccaagctcgccgcgaacgtgggtgtttctgaagctgcgctgtaccggcatttccccagcaagacacggatgttcgacagcctgatcgagtttatcgaagacagcctgatcacccgcatcaacctgatcttgcaggacgagaaagagacgtttaatcgtctgcgtctgattttactgctgattctgggctttgcggaacgcaacccggggctgacgcgcatcatgaccggccacgcgctgatgtttgaacaggatcgcctgcagggccgcatcaaccagctgttcgaacgcatcgaggcgcagctgcgccaggtgttgaaagagcgcaaattgcgcgaaggcaaaggctttatcgtcgatgaaacgctgctggccagccagctgctggccttctgcgaaggcatgttgtcgcgctatgtgcgttcggaattccgctatcgcccaacgcaggaattcgacgcccgctggccgctgttggcggcccagctgcaataa

SEQ ID NO: 426145 - DNA, 642 bp, Serratia marcescens
atgaaagcctatcagcgccagtttatcgagttcgcgcttaacaagcaggtattgaaattcggcgagttcaccctgaaatccggccgcaccagcccgtatttcttcaacgccggcctgtttaataccgggcgcgatcttgcgctgttggggcgcttctacgccgaagctctgatggactccggcatcgatttcgacctgctgtttggcccggcctataaaggcattcctatcgccaccactacggcggtggcgttggcggaacaccatgagcgcgacgtgccttactgctttaaccgcaaggaagccaagacccacggcgaaggcggttcgctggtaggcagcccgctgcaggggcgcgtgatgttggtggacgatgtgatcaccgccggcaccgcgatccgcgagtcgatggaaatcatcggcgccagcggcgcttcgctggcgggcgtgctgatctccctcgaccgtcaggaacgcggccgcgcggatatttccgccattcaggaagtggaacgcgactatcactgcaaggtgatttcgatcgtgacgctgaaggacctgatcgcctatctggaagagaagccggaaatggcggaccacttggcggcggtgcgcgcttaccgcgagcagtacggggtgtaa

SEQ ID NO: 426146 - DNA, 717 bp, Serratia marcescens
atgcgtcctgcaggcagagcaccacagcaagttcgccccctgacactgacccgtcactataccaaacacgctgaaggttcagtgctggttgagtttggcgataccaaagtcttgtgcaccgccacggtagaagagggcgttccgcgcttcctgaaaggccaggggcaaggttggatcaccgccgagtacggcatgctgccgcgctccacccacagccgcaacgctcgtgaagccgccaaaggcaagcagggtggccgcacgctggagatccagcgcctgatcgcccgctcgctgcgcgccgcggtagacctgaaaaagctcggtgaattcaccatcaccctcgactgcgacgtactgcaggccgacggcggtacccgaactgcctcgatctccggcgcctgcgtggcgctggccgatgcgttgaacacgctggtggccaacggcaagctgaaagccaacccgatgaagggcatggtggcggcggtttcggtcggcatcgtcaatggcgaagcgctgtgcgatctggagtatgtggaggactccgcggcggaaaccgacatgaacgtggtgatgatggaagatggccgcatgattgaggtgcagggtaccgccgaaggcgagccgttcagccacgatgagctgttggcgctattggcgctggcccgagggggcatcgaaaccatcttccaggcgcagaaagcggcgctggcggactga

SEQ ID NO: 426147 - DNA, 864 bp, Serratia marcescens
atgatccgcagcatgaccgcctacgcccggcgtgaaatcaagggtgaatggggcagcgcagcctgggagctgcgttccgttaaccagcgctacttagaaacctacatccgcctgccggaacaattccgcagcctggagccggtgatccgtgaacgtatccgtggccgcctgacccgcggcaaagtcgaatgcaacctgcgtttcgagctggatccaagcgcgcaaagctcgctgatcctgaacgaaaaactggccaaacagctggtcgaagccgccaactgggtgaaaatgcagagcgacgaaggggaaatcaacccgatcgacgtgctgcgctggccgggcgtgatgtccgcgcaggagcaggatctggacgccatcagcgccgagctgatgcaggcgctggacggcgcgctggatgacttcatcgtcgcacgcgaaagcgaaggtgccgcgctgaaaacgctgatcgaacagcgcctcgacggcgtcagcgccgaagtggtcaaagtgcgcgcccagatgccgaacatcctgcaatggcagcgcgagcgcctggtcagcaagttggaagaggcacaggtacagctggaaaacacccgcctggagcaggagctggtgctgatggcgcagcgcatcgacgtcgccgaagagctggaccgtctggaagcgcacgtgaaagagacgcacaacattctgaagaagaaagaagccgtcggccgccgcctcgactttatgatgcaggagttcaaccgcgaatcgaacaccctggcctccaagtcgatcaatgccgacgtcaccgcttccgccatcgagctgaaagtgctgatcgagcaaatgcgcgagcagatccagaacatcgagtga

SEQ ID NO: 426148 - DNA, 390 bp, Serratia marcescens
atgaataccggcacgttgctcagggcgctggccaacggcgttaatcccgacaccggcgagctgttgagaccggcttcggcggcctgtgcgccggaggctatccgccttctgttcgcgttggccaacgagttcgacggtgaagccgaactgcagaaaaaagcccggctgacgccggaggagaagcggcagaagaatctggccgagggccggccggccaatgcctacttcccttggccggaagaagaaaaactgcggctgcgtgagagccatgcggccggggcgacactggaagcgctgagcgatgagttcgagcgctcaacctggagcattgcggtgcagctgcagaaaatggggctgattgatgaagagcaggcggccgcccatcgctga

SEQ ID NO: 426149 - DNA, 1185 bp, Serratia marcescens
atgccacaaattctgcaatttattatggctctggtggtgatcatcgccctggcgctgctggtcagcaataatcgcaagaaaatccgcctgcgctatatcatccagctgctggtgatcgaaggcgcgctggcctatttcttcctgcactccgccagcgggctcagcgtgatcaaacacgtcgccggcttcttcgacaccctgctcgcctacgccgcccaaggatcggagttcgtgttcggcggcatgagcaaggatggtctggcattcatcttcctcggcgttttgtgccctatcatctttatttccgccctgatcggcattttgcagcatttccgcatcctgccgctgatcattcgcctggtcggcaccttgctgtccaaggtcaacggcatgggcaagctggaatcgttcaacgccgtcagcacgctggtgctggggcagtcggagaacttcatcgcctataaaggcatcatcggcgatatctcgccgcgccgcatgtacaccatggccgcgaccgccatgtcgacggtatcgctctccatcgtcggcgcctacatgtcgatgatcgacgcgcagtacgtagtggcggcattgatccttaacatgttcagcaccttcatcattctgtcgatcatcaacccgtatcaggtcgaagacgagccggagctgaagctgaacaaactgcatgaagatcagagcttcttcgaaatgttgggcgaatacattctggccggcttcaagattgcgatgatcatcgcggcgatgctgatcggctttatcgcgctgatctccgccgtcaatgcgctgttctccgcggtgctcggcatcagcttccagcagatcctcggctatgtgttctatccgctggcctggctgatcggtatcccggcggaagaggctctgaaggcgggcagcatcatggcgaccaaactggtggccaacgaattcgtggcgatgattgagctgaagaaaatcgcggcggaactgtcgcctcgcgggctgggcattctgtcggtgttcctggtgtcgttcgccaacttcgcctccatcggcatcgtcgccggcgccatcaagggactgaacgagcagcaaggcaacgtggtttcccgttttggcctgaagctggtttacggctcgacgctggtgagcctgctgtcggcggccatcgccggcctggtgctgtaa

SEQ ID NO: 426150 - DNA, 435 bp, Serratia marcescens
atgaaaaactccccgagattggccgccggcgccgtggtggccgccttgctgctgagcggctgcgtggcgccaggccaccaggctgtgccacccgccccggcttgccgcaccggcgatccgctggtgcaaacaacgctctacttcggcctgaatcgcccggcggggccggcgatcaccgccgccgagtggcaaacctttgtcgatagccaggtgacgccgcgctttaaagacgggctgacggtctttgatgccaaagggcagtggctgggccacgacggcaagctggcgcgcgagaacagcaaggcgctgctgctgatccatgcaccgggcaaagagagcgaggcgaatatcgaggcgctgcgcagcggctacaagcaacagtttgcgcaggattcggtaatgcgggtggatgcgccggtgtgcgtggcgttttaa

SEQ ID NO: 426151 - DNA, 702 bp, Serratia marcescens
gtgaaaaaaactcagtggcgcgcgtcctcggcggcgattaccctgccggccatcattctgacgcaagtacgctgtgaatcccttatgttactaagcatcctttatatcatcggcatcaccgccgaagccatgaccggcgcgctggcggccggccgccgccaaatggacatgttcggcgtgatcatcatcgcttcggtcacggcgatcggcggcgggtcggtgcgcgatatgctgctcgggcattttccattgggctgggtcaaacacccggaatacatcgtcatcgtcgcgatagcggcgatcgtcaccacctgggtggctcccctgatgcgccatttgcgccgcctgttcctggtgctcgacgccgtcggcctgatcgtcttctccatcatcggcgcgcaggtggccctggatatgggacacagcgccattatcgccgccatcgccgcggtgatcaccggcgtcttcggcggggtgctgcgcgacatgttctgcaaccgtatcccgctggttttccagaaggagatctacgccggcatctccttcagcgccgcctggctgtatatcggcctgcagcacctcagcctgccgcacaatctggtggtgatcctcacgctggtcgccggcctgagcgcgcgcctgatcgccctgcgcttccgccttggcctgccggtgttcaactaccagcatccggatcactga

SEQ ID NO: 426152 - DNA, 624 bp, Serratia marcescens
atggctcaaggcacgctttatattgtctctgctcccagtggcgcaggtaaatcaagtctgattcaggctttgttaaagacgcaaccgctgtacgacacgcaggtttcagtttcgcacaccacgcgcgacagccgcccgggtgaaaatcacggcgagcactatttcttcgtctcgaaagacgaattccgccggatgatcgagcaggacgcgtttcttgagcacgccgaagtgttcggcaactattacggcacctcgcgcgccgccatcgaacaagtattgtcgaccggcgtggacgtgtttctggatatcgactggcagggcgcgcagcaaatccgcgccaaaatgccgcaggcgcgcagcatcttcattctgccgccgtcgaaggaagaactgggccgacgcctgcgcgggcgcgggcaggattccgaagaggtgatcgccaagcgcatggctcaggccgtggcggaaatgacgcattacgcggagtacgattacctgatcgtgaacgatgatttcgatctggcgctgtccgatctgaagaccatcattcgcgccgaacgcctgcgtttgggccgccagttgctgcggcatgacgctttaatcagcaaactattggcagactga

SEQ ID NO: 426153 - DNA, 276 bp, Serratia marcescens
atggcacgcgtaactgttcaagacgctgtagagaaaattggtaaccgttttgacctggtgttggtcgctgctcgtcgggcgcgtcagatccagaccggcggcaaagatgcactggttccggaagagaacgacaagtacaccgttatcgccctgcgcgaaatcgaagaaggcctgatcaccagccagatcctcgacgtgcgtgagcgccaggaacagcaagagcaggaagccgcagagattcaagcggttaccgcgattgctgaaggtcgtcgttaa

SEQ ID NO: 426154 - DNA, 2112 bp, Serratia marcescens
ttgtacctgtttgaaagcctgaatctgctgattcaacgttacctgcccgaggagcagattaagcgcctcaaacaggcatacctcgtcgcgcgcgacgcgcacgagggccagacacgctccagcggtgagccttacattactcacccggtcgccgtggcctgcatcctggcggaaatgcgtctcgatcacgagacgctgatggcggcattgctgcacgacgtcatcgaagacaccccagccacctatcaagatatggaacagctgttcggcaagagcgtcgccgaactggttgagggcgtctccaagctcgacaagctgaagttccaggacaagaaagaagcgcaggcggaaaacttccgcaagatgatcatggcgatggtgcaggatatccgcgtcgtgctgatcaagctggccgaccgtacgcacaacatgcgcaccctcggttcgctgcgccccgacaaacgccggcgcatcgcgcgtgaaaccctggaaatctacagcccgctcgcccaccgtctgggtattcatcacctgaagaccgagctggaagagctgggcttcgaggcgctgtatccgaaccgttatcgcgtgatcaaggaagtggtgaaagccgcgcgcggcaaccgcaaagagatgattcaaaaaatcctctccgagatcgaagggcgactgaccgaagccggcatcgcctgccgcgtcagcgggcgggaaaaacacctctactccatctacctcaagatgcatctcaaagaacagcgtttccattccatcatggatatctacgcgttccgggtgatcgtgaaagaggtcgatacctgctaccgcgtgctcggccaggtgcacagcctgtacaaaccgcgcccggggcgagtgaaagattacatcgccattcccaaggccaacggctatcaatcgctgcatacctcgctgatcggcccgcacggcgtgccggtcgaagtgcagatccgcaccgaagacatggaccagatggctgagatgggggtagccgcgcactgggcttacaaggaaagagaacagggcgaaaccggcaccacggcgcagatccgcgcccagcgctggatgcaaagcctgctggagctgcagcaaagcgccggcagttcgtttgaatttatcgagagcgtcaaatccgatctgttcccggatgagatttacgttttcaccccggaaggccgcatcgtcgagctgcccgccggcgccacgccggtcgatttcgcctatgcggtgcataccgatatcggccatgcctgcgtcggcgcgcgcgtcgatcgtcagccgtacccgctgtcgcagtcgctgaccagcggccagaccgtcgagatcatcaccgcgccgggcgcgcggcccaacgccgcctggctgaacttcgtggtcagctcgaaagcgcgcgccaaaattcgccagatgctgaagaacctcaagcgcgacgactccgtcggcctcggccgccgtctgctcaaccacgcgctgggcggcagccgcaagctggccgaaatcccgcaggaaaacattcagcacgagctggaccgtatgaagctggcgacgctggacgatctgctggcggaaatcggcctcggcaacgccatgagcgtggtggtggcgaagaacctgcagggcgatcagtccagcctgggcgcatcctccggcgtgcgtaacctggccatcaagggcgccgacggggtgttgatcaccttcgccaagtgctgccgtccgattccgggcgatccgattatcgctcacgtcagcccgggcaaagggctggtgatccaccatgagtcctgccgcaatattcgcggctatcagaaagagcctgagaagttcatggcggtcgagtgggataaagagaccgagcaggagttcatcgccgagatcaaggtggatatgttcaaccaccagggcgcgttggccaacctgacggcggcgatcaacgcggccgagtccaatattcagagcctgaacaccgaagagaaagacggtcgggtttatagcgcctttatccgcttgaccacccgcgatcgcatccatttggcaaacattatgcgtaaaatccgtatcatgccggatgtgatcaaagttaaccgcaaccgaaactag

SEQ ID NO: 426155 - DNA, 663 bp, Serratia marcescens
atgctcgcgacccggcagccggatttgacggtctgcctggagcaagtgcacaagccgcataacgtctccgccattatccgcaccgccgacgccgtcggcgtgcatcaggtccacgccgtgtggcccaccacccgcatgcgcaccctggtttcctccgccgccggcagcaacagctgggtcagcgtcaaaacccatcgcaccatcggcgacgcggtcggtcatctgaaagcgcagggcatgcaaattctggccaccaatctgtctgcgcgcgcggtcgatttccgcgaggtggactacacccggcccacctgcgtgctgctcggccaggaaaaaaccggcatcaccgaagaagcgctggcgctggccgatcgggacatcgtcattccgatgatcggcatggtgcaatcgctcaacgtctccgtggcctcggcgctgatcctgtatgaagcgcagcgccagcggcagaacgccggcctgtatcgccgcgacaacagcatgctggatgaagaagagcagcagcgtctgctgttcgaaggcggttacccggtgctggccaacgtggccaagcgcaaagggctgccgcgcccgcagattgacgagcagggccaggtggtcgccagcgccgaatggtggacggccatgcaggcgacggtgcgcaaatga

SEQ ID NO: 426156 - DNA, 2082 bp, Serratia marcescens
atgaaaggccgcctgctggatgctgtcccactcaccacgctttccggggttggcgccagccaggcgggcaaactggccaaactcggcctcgagaccattcaggatctgctgctgcacctgccgctgcgctacgaagaccgcacccgcctctacccgatcaacgatctgctgccgggcatctacgccacggtagaaggggaagtgctgcgcagcgacatcagcttcggtcgccgccgcatgctgacctgccagatcagcgacggcaccggcatcctcaccatgcggttcttcaacttcaacgccgcaatgaagaacagcctggccaccggccgccgcgtgaccgcctacggcgagatcaagcgcggcaaccacggcgcggaaatcatccatccggaataccgcattcagggcgaagccagcgaggttgagctgcaagagtcgctgacgccggtctaccccaccaccgaaggggtgcggcaggccacgctgcgcaagctaaccgatcaggcgctggagctgctggatacctgcgctatcgccgagctgctgccgccggagctgagcggcggcctgatgagcctgccgcaggcgctgcacaccctgcatcgcccgccgccggacatccagctggcggatctggagctgggcaaacacccggcgcaaaaacgcctgatcctcgaagagctgctggcgcataacctcagcatgctggcggtgcgcgccggcgcgcagagctatcaggcgcagccgctgctgccggacgatcggctgaaaaaccgttttctcgcccagctgccgttctcgccgaccggcgcgcaaacgcgcgtggtggccgacatcgaagccgatatgcaaaaagacttcccgatgatgcggctggtgcagggcgacgtcggctccggcaaaacgctggtggcggcgctggcggcgctgcgcgccatcgcgcacggcaagcaggtagcgctgatggcgccgaccgagctactggccgagcagcacgccaacaatttccgtcagtggtttgaaccgctggggctggaggtcggctggctggccggcaaacagaaaggcaaggcgcgcatcgcgcagcaggaggctatcgccagcggccaggtgtcgatggtggtcggcacccacgccatcttccaggagcaggtgcagttcaacggcctggcgctggtgatcattgatgagcagcaccgcttcggggtgcatcagcggctggcgctgtgggagaaaggcgaagagcaaggcttccacgcccatcagctgatcatgaccgccacgccgatcccgcgcacgctggcgatgaccgcctatgccgatctcgatacctcggtcatcgacgagctgccgccgggccgtacgccggtgaccaccgtcgccatccctgatacccgccgcgccgacatcattcaacgggtgaagagcgcctgtctggaagaggggcggcaggcttactgggtatgtacgctgatcgaagagtccgagctgctggaagcgcaggcggcggaagccacctgggaagaactgaaaaccgcgctgccagagctgaaggtagcgctggtgcacggccgcatgaaagcgcaggaaaagcaggcggtgatgcaggcgtttaaacagggcgagctgcagctgttggtggccactacggtgatcgaagtcggcgtcgacgtgccgaacgccagcctgatgatcatcgaaaacccggagcggctgggcctggcgcagctgcaccagctgcgcggccgcgtagggcgcggcgccgtggcctcacactgcgtgctgctgtacaaaacgccgctgagcaagactgcgcaaacgcgcctgcaggtgctgcgcgacagcaacgatggcttcgtcatcgcgcagcgcgatctggagatccgcggcccgggcgagctgctgggcacccgccagaccggcagcgccgaattcaaggtggcggatctgctgcgcgatcaggcgatgatccccgaagtgcagcgcgtcgctcgccatctccatcagcactatccggagcacgcccaggcgctgatcgaacgctggctgccggagaaggcgcgctactccaacgcataa

SEQ ID NO: 426157 - DNA, 1212 bp, Serratia marcescens
atgtttcatcttgatacttatggcacgttagtcgcggcgacgctggttttgctcctcgggggcaaatgcgtcagaaccattcctctgctgcgaaaatataccattcccgctcccgtcgccggcggtttgctggtggccctcctgctgttagccctgaaaaagctcgtcaactgggaaatcagttttgacatgtcgctgaaggatccgctgatgctggccttcttcgccaccatcggcctgaacgccaacctggcgcgtttgcgcgccggcggcaaggtgctggtggtgttcctgttcgtggtgctggggctgcttatcgtgcagaacgccatcggcatcggcatggcgaaaatgctggggttggatccgctgatgggcctgatcgccgggtcgatcaccctgtcgggcggccacggcaccggggcggcctggagcaagctattcatcgagcgctacggcttcgagaacgccacggaagtcgccatggcctgcgccaccttcggcctggtgctgggcggcctgatcggcggcccggtggcgcgctatctggtcaagcactcctccacgccggaaggcaccccggatgacagcgtgcagccgagcggcttcgagaagccggaaagcggccgtctgatcacctcgctggtgatgatcgaaaccatcgccatgatcgccatctgtctaagtctggggcagctgattgccggcctgctgagcggcacggtgtttgaactgccgaacttcgtctgcgtgctgttcgtcggggtgatcctcagtaacacgctggccttcaccggtttctataccgtgttcgagcgggcggtgtcggtgctgggcaacgtcagcctgtcgctgttcctggcgatggcgttgatgagcctgcgcctgtgggagctggcctcgctggcgttgccgatgctggcgatcctggcggtgcagacgctggtcatggcgctgtacgcgatcttcgtcacctatcgggtgatgggtaaaaactacgacgcggcggtgctggccgccggccactgcggcttcggcatgggcgccacgccgacggcgatcgccaacatgcaggcgatcaccgatcgtttcggcccgtcgcacgtggcgtttttggtggtgccgatggtgggggcgttctttattgatatcgccaatgccatcgtcatcaagctgtatctgctgctgccggtgttcccggcggtggggtga

SEQ ID NO: 426158 - DNA, 1401 bp, Serratia marcescens
atgagcatgtcatcctccgagcttgatgccgcgcgccaagccgcctcagaaccccgcgccagtgaactgatttatcgcctggaagatcgcccgccgctgccgcaaacgctgtttgccgctggccagcatctgctggcgatgttcgtcgcggtgatcaccccggccctgctgatctgccaggcgctgggtctgccggcacaggatacccagcacatcatcagcatgtcgctgttcgcctccggtctggcttccattctgcaaatcaaaacctgggggccggtgggttccgggctgctgtcgattcagggcaccagcttcaacttcgtttcgccgctgatcatgggcggcctggcgctgaaaaacggcggcgccgacgtgccgaccatgatggccgcgctgttcggtaccctaatggtcgcctcctgcaccgaaattctgctgtcgcgcgtgctgcatctggcgcgccgcatcatcaccccgctggtttccggcatcgtggtgatgatcatcggcctgtcgctgattcaggtcggcctgacctcgatcggcggcggctacgccgcgatgaacgatcatagcttcggctcgccgaaaaacctgctgctggccggcgcggtgctggcggtaatcatcctgctgaaccgccagcgcaacccttacctgcgcgtggcttcgctggtgatcgccatggcggtcggctatctgttggcctgggcgatggacatgctgcccgccgatgcaccggcggcccccacggcggcgatcaccatccccacgccgctctattacggcctgggcttcgactggaacctgctgctgccgctgatgctgatttttatggtcacctcgctcgagaccatcggcgacatcaccgccacctccgacgtctccgaacagccggtcagcgggccgctgtacatgaagcgcctgaagggcggcgtgctggccaacggcctgaactcgatgctgtcggcggtgttcaacaccttccccaactcctgcttcggccagaacaatggcgtgatccaactgaccggcgtcgccagccgctacgtcggcttcgtggtggcgctgatgctgatcgcgctggggctgttcccggcggtggccggcttcgtgcagcacatccccgaaccggtactgggcggcgcgaccatcgtgatgttcggcaccatcgccgcctccggcgtgcgcatcgtgtcgcgcgagcgtctgaatcgccgcgccattatgatcatggcgctgtcgctggccgtcggcatgggcgtctcccagcagccgctgatcctgcagttcgcgccggactggctgaaaaccctgctctcttccggcatcgccgccggcggcattaccgccatcgtgctgaacctggtgttcccgcaggaatacgagaagaagtaa

SEQ ID NO: 426159 - DNA, 1662 bp, Serratia marcescens
atgaaatttatcggaaagctgttgctgacgttgctgctgctgatcgtgctggcggcagtggtactgtacctggtggggcaaacccgctgggcggcaggccgcctgagcgcctggatcagcgacaacagcgaataccgcctgtcgataggaaaaatcacccattcgtggagccagccgaaccagattgagctggaagacgtgcaactggcgcgcaacggccagccgcaggcgctggtcgccaaacgcgtcgatctgggcctcagcctgcgccaaatcaccgagccgcgctattttcacagcgtcacgctgcgcgacggcacgctgaacgtacagccgcaggcagcggcgctgcctgtacaggccgacgtgctgcagctgagcaacatggcgttgcagtccaacaataacgagtggcagctcaacgcgcagcaggtcactgccggcatcacgccgtggcgcccgctggccggccatctgctgggggataacaaccagttccagttcagcgccggttcgatgacgctgaacggcatccccgcctcgaaggtgttggtgcagggggagcagaagcagggccagctactgttgaacaacttcggcgccgatctggcgcagggcgacctgaccggcgtggccagccgcgccgccgacggcagttggcaggtggatcgcctgcggctgagcggcgtgcgcatgcagaccccgctgacgctggcggaattcatgcagcgctttaccaccctgccgccggtcaccctcaagcgtttcgatctgatcgacgcgcgcctggaaggcaaggcatgggcgtttaacgatctcgatctgtcgctgcaaaacgtcagcgtcgaaaaaggcgactggcgcagcgaagacggctcgctcaacgtcaacgccagcgacgtgatcaacggcggcttccacctgatcgatccgatcgccaccctgcggctctcctccgccggcatcgccattcaacagttcaccacccgctgggaaggcgggctgctgcgcacctccggcaactggctgcgcgccagcaaacgcctgcagctggatgaagtggccatggcggcgctggagtacaccctgccgagcgactggcgcgaactgtggctgaaaccgctgccggactggctggcggaggtgtacgtcaccaagctgaccaccaaccgcaatctgatcatcgatatcaacccggcattcccgttccagatcaccgcgctggacggctacggcagcaacctgctgctggcgcgcgatcgccagtggggcatatggtccggatcgctcaacctgaacggcagcgaggcgaccttcaacaagatagacgtgcggcgcccttcgctggcgctgaacgccgacgccaatcagattaacgtcaccgagctcagcgcctttatgcctaatgggttgcttgaggccaaagcgaccgtcgatcagctgccgggcaagcctttccagctgacgctgcacggccgttcggtaccgatcaacaccttgcagcaatggggatggcagccggtgccgctgacgggcgacggcaaccttgagctgcagttgaaagggctgctgaacagcgacgggccgttcaaagcctcgttgaagggaaatctgcaggccaccgccggcgacggccaagcggtgaaccagcaactgccgtaa

SEQ ID NO: 426160 - DNA, 948 bp, Serratia marcescens
atgtatcacctacgagtacccgtaacagagcaagaactgaaggagtattaccagtttcgctgggaaatgctgcgcaagccgctgcaccagccggtgggttcggaaaaggatgcctatgacgccatggcccatcaccaaatggtggtggacgaggccggtaaaatcgtcgccatcgggcggctgtacatcaatgccgacaacgaggcggcgatccgttttctggcggtagacccgacgctgcaggataaagggctggggacgctggtggcgatgacgctggagtccgtcgcgcggcaggagggcgtgaagcgggtggtgtgcagcgcccgtgaagacgcggtggacttcttcgccaagctggggttcgtcaatcagggggagatcactgcgccgcagaccaccccgatccgccactttttgatgatcaaaccggtagcgacgctggacgatatcctgcatcgccccgactggtgcggccaactgcagcaggcctggtatgaacacatcccgctgagcgaaaagatgggcgtgcgcatcagccaatacaccggccagcgcttcgtcaccaccatgcccgagaccggcaaccagaatccgcaccacacgctgttcgccggcagcctgttctcgctggcgacgctgaccgcctgggggctgatttggctgctgctgcgcgagcgccacctcggcggcaccatcattctggcggacgcgcacattcgctacagcaaaccgattaccggcaggccgcgagcggtggcggatctcggctcgctgagcggcgacttggcgcgtctggcgcgcggccgccgcgcgcgcgtgcacgccgaagtgcatctgttcggcgacgaggataaaggtgcggtgttcgaaggcacctacatggtgctgccggccgagccggatgtgccgctggatcagggcggctctgaggcgctggaagagtaa

SEQ ID NO: 426161 - DNA, 438 bp, Serratia marcescens
atgattgcgttgattcaacgggtgttaaacgccagcgtcacggtgggtggcgagacggtaggcaagattggccccggtttgttagtgttattgggcgtggagcagggcgataacgagcaaaaagcgcagcgcctgtgcgaacgcgtgttgggataccgcattttcggcgacgagaacgacaagatgaatctcaacgtccagcaggccgggggcagcgtgctggtcgtttcgcagttcaccctggcggcggacacccaaaagggcatgcggcccagcttctcgcgcggcgccgcacctttggtcgccgatcggttgtatcaatattttgttggccagtgccgcgaacgcggcgtagagacccagaccggcgaattcgccgccgacatgcaggtggcgctggtcaacgatggtccggtgacattctggctacaggtctaa

SEQ ID NO: 426162 - DNA, 894 bp, Serratia marcescens
atgtcgtttttccgccgcaagaagctgccctctgcgattaagcccggcgtcaccttcggacggctgctgtaccagcgtatcgatcacgatggcctgacgatgttggcgggccatctcgcctatgtttccctgctgtcgctggtgccgctggtcaccgtggtgttcgcgctgttcgccgctttcccgatgttttccgacatcagcgaacagctgaagagcttcatcttttccaatttcgtgccggccgccggcaacgtcatacagaactacctggaacagttcgtcgccaactccaacaagatgaccgccgtcggcacctgcgggctgatcgtcaccgcgctgctgttgatctcctcggtggacagcgtgctgaacaccatctggcgcagcaagaacaagcggccgatcgtcttctccttcgccgtgtactggatggtgctgacgctggggccgctgctggtgggtgccagcatggccatcagttcctatctgctgtcgctcaactggctggcgcagaccggcgtcaacggcctggtggatcaggtgctgcgcatcttcccgctgattttgtcgtgcgcttccttctggctgctgtattgcatcgtgccgacggtgcgggtgccgcccaaagacgcgctgattggcgcgctggtggccggattgctgttcgagctgggcaagaagggattcgcgctgtacgtcaccatgttcccttcctaccagctgatttacggcgtgctggcggtgatcccgattttattcctgtgggtctactggagctggtgtatcgtgttactcggcgcggaaatcaccgtgaccatcggcgaataccgcgactaccgccggcagaaggcggagcaacaggaacagaaaccagaagggcagcaggaatga

SEQ ID NO: 426163 - DNA, 591 bp, Serratia marcescens
atgctgtatatctttgatttaggtaatgtgatcgtcgatatcgatttcaagcgtgtgctgggcgtgtggagcaatttgagcggcacgccgttggcggtgctgtccgatcgtttcactatgggtgaggtgttccagcagcatgagcgcggtgaaatcagcgacgaagacttcgccggcaagctgtgcgatgaaatgggcatcgcgctcagcttcgagcagttcgccaccggctggcaggcggtattcgtcgcgctgcgcccggaagtgatcgacatcatgcagcgcctgcgcaacgagggccaccgggtggtggtgctgtcgaacaccaaccgtctgcactgcaactactggccgcagcactatcctgaagtggccgccgccgccgatcacctctatctgtcgcaagatctcggcatgcgcaagccggaggccgagatctacgagcatgtgctggccgcggaaaacaccgccgccgccgacgcggtgttcttcgacgatcacccggcgaacgtcctcgccgcgcaggcgttggggatcaagacggtgcacgtcaccgatcgcgacgtggtgccggcctattttgctcaatga

SEQ ID NO: 426164 - DNA, 1824 bp, Serratia marcescens
gtgatcgaaaatttgcgtaacatcgccattattgcccacgttgaccatggtaaaaccaccctggttgataagctgctgcaacaatccggtactttcggagagcgtgcggaagccaccgaacgcgtaatggactccaacgatttggagaaagagcgtgggattaccatcctcgcaaaaaacaccgccattaattggaacggttaccgtatcaacatcgtggataccccgggacacgccgacttcggcggcgaggtagagcgcgtgatgtcgatggttgactcggtgctgctggttgtggatgcaatggatggccctatgccgcaaacccgcttcgtgaccaagaaggccttcgccaacggtctgaagccgatcgtggtcatcaacaaggttgaccgtcctggcgcgcgccctgactgggttgtggatcaggtgttcgacctgttcgtgaacctcgacgcgaccgacgagcagctcgacttcccgatcatctacgcttctgcgctgaacggcatcgccggcgtcgaccacaccgacatggcggaagacatgaccccgctgtatcaggcgatcgtcgaccacgtgtctgcgccgcaggttgagctggaagcgccattccagatgcagatctcccagttggactacaacaactacctgggtgttatcggcatcggccgcatcaagcgcggtaaagtgaagccgaaccagcaggtcaccatcatcgacagcgaaggtaaaactcgcaacggtaaagtgggcaaagtgctgggccacctgggtctggagcgtatcgacagcaccctggcggaagcgggcgacatcatcgccatcaccggcctgggcgagctgaacatctccgacaccatctgcgacaccaacgccgtagaagcgctgccggcgctgtccgtcgacgaaccgaccgtcaccatgttcttcaacgtcaacacctcgccgttctgcggtaaagaaggcaagtacgtgacgtcgcgtcagatccttgaccgtctgaacaaagagctggtgcacaacgtagcgctgcgcgttgaagaaaccgacgatgcggacgccttccgcgtttccggccgtggcgagctgcacctgtcggtgctgatcgaaaacatgcgtcgcgaaggtttcgagctggcggtttcccgtccgaaagttatcttccgcgaaatcgatggccgcaagcaggagccattcgagaacgtgacgctggatatcgaagagcagcatcagggttccgtgatgcaggcgatgggcgagcgtaaagccgacctgaaaaacatggatccggacggtaagggccgcgtgcgtctcgactacgtgatcccaagccgcggtctgatcggcttccgtaacgaattcatgaccatgacttcgggcaccggtctgctgtactccaccttcagccactacgacgacgtgcgtccgggcgaagtgggccagcgtcagaacggcgtgctgatctccaacggccagggcaaagcggtcgcgttcgcgctgttcggcctgcaggatcgcggcaagctgttcctgggccacggtgcggaagtgtatgaaggccagatcatcggtattcactcgcgttccaacgacctgaccgtaaactgcctgactggtaagaagctgaccaacatgcgtgcttccggtactgacgaagcgactaccctggttccggccatcaaaatgaccctggagcaagctctggagttcatcgatgacgacgaactggtagaagtgacgccaacctcgatccgtatccgtaagcgtcacctgacggaaaacgatcgtaagcgtgccagccgcggtcctaaagacgcttaa

SEQ ID NO: 426165 - DNA, 1410 bp, Serratia marcescens
atgtccgctgaacacgttttgacgatgctgaatgagcatgaagtgaaattcgtagacctgcgtttcactgacaccaagggtaaggaacagcacgtgactatcccggctcaccaggtaaacgccgacttcttcgaagaaggcaaaatgtttgacggctcctctatcggtggttggaagggcatcaacgaatctgacatggtgctgatgccggacgccagcacggcggttctggatccgttcttcgaagaacctaccctgatcattcgctgcgacattctcgagccgggcaccatgcaaggctacgatcgcgacccgcgctccatctccaaacgcgccgaagacttcctgcgctcctccggcatcgcggataccgtgctgttcgggccagagcctgagttcttcctgttcgacgacatccgcttcggcagcagcatccgcggttcccacgtggccatcgacgacatcgaaggcgcctggaactccggtacaaaatacgacggcggcaacaaaggccaccgtccggcggtgaaaggcggttacttcccggttccaccggtcgactcttcgcaggatctgcgttccaccatgtgcttgaccatggaagagatgggcctggtggttgaagcgcaccaccacgaagtggcgaccgccggtcagaacgaagtggcaacccgcttcaacaccatgaccaagaaagccgacgaaattcagatctacaaatacgtggtgcacaacgtggcgcacgctttcggcaaaaccgcgaccttcatgccgaagcctatgttcggcgacaacggttccggcatgcactgccacatgtcgctgtccaagaacggcaccaacctgttcgccggcgacaaatacggcggcctgtctgaaaccgcgctgttctacatcggcggcatcatcaagcacgccaaggcgatcaacgccctggccaacccgaccaccaactcgtacaaacgtttggtgccgggttacgaagcgccggtgatgctggcttactccgcccgtaaccgctccgcgtccatccgcatcccggtggtcgccagcccgaaagcgcgccgcatcgaagcccgcttcccggatccggcggctaacccatacctgtgcttcgccgcgctgctgatggccggcctggacggcatcatcaacaagatccaccctggcgacgccatggacaaaaacctgtacgacctgccgccggaagaagaagccgagatcccaaaagtggccggctcgctggacgaggcgatggccgcactgaacgaagaccgcgagttcctgacccgcggcggcgtgttcaccgacgatgcgatcgatgcctacatcgaactgcgcaaagaagagatggaccgcattcgcatgacgccacacccggttgagttcgaactgtactacagcgtctaa

SEQ ID NO: 426166 - DNA, 1050 bp, Serratia marcescens
atggcaactggcaagctgcccgatgctgggcagatcctcaattcactcatcaacagcatcctgctgttggatgactctctggcggttcactacgccaaccctgcggcacagcagctgctggcgcaaagctcccgcaagctgttcggcacgccgctgcccgatttgctcggttatttttcgctgaacgtctctttgatgcgtgaaagcctgcgcgccggtcagggcttcaccgacaacgaagtgaccctggtggtcgacggccgtgcgcatatcctttccctgaccgctcaggcgctgccggaaggctatattctggtcgagctggcgccgatggacaatcagcgccgcctgagccaggaacagctgcagcatgcccaacaggtggcggcccgcgatctggtgcgcggtttggcgcacgagattaaaaatccgctgggcggtctgcgcggcgcggcacagctgctggccaaggcgctgcccgatccggcgctgaccgaatacaccaaggtgatcatcgaacaggccgatcggctgcgcaatctggtggatcgcctgctcggcccgcagcggcccggccagcacatcacccagagcatccatcaggtcgcggagcgcgtctgccagctggtgtcgctggaaatgccggataacgtcacgctggtgcgcgattacgatccgagcctgccggaaatggcccacgacccggatcagatagaacaggtgctactgaacattacccgcaacgcgctgcaggcgctgggcgaagcgggcggcaccatcacgctgcgcacccgcaccgcgtttcagattacgctgcacggcacccgctaccgcctggcggcgcgcatcgacgtcgaagacgacggccccggcgtgccggcgcagctgcaggacacgctgttctacccgatggtcagcggccgcgagggcggtaccggcctgggattatccatcgcccgcaatcttatcgatcagcattgcggaaaaattgaattcaacagttggccaggtcataccgaattctcggtctacctgcccattcgtcagtga

SEQ ID NO: 426167 - DNA, 1413 bp, Serratia marcescens
atgcaacgagggatagtctggatcgtcgatgacgatagctccatccgctgggtgcttgagcgcgcgctcaccggcgcgggcctgagctgcgccaccttcgaaggcggcaatgacgtgctggaagccttggccacgcaaacccccgacgtgctgctgtccgatatccgcatgccgggcatagacggcctggcgctgctcaagcagatcaaacagcgccatccgatgctgccggtgatcatcatgaccgcgcattcggatttggacgccgccgtcagcgcctatcagcaaggggccttcgactacctgccgaagccgttcgatatcgatgaagcggtggcgctggtcgagcgcgccatcagccattatcaggagcagcagcagccggtgcgcagccagccggccagcgatccggcggcggacatcatcggcgaggcaccggcgatgcaggacgtgtttcgcatcatcggccggctgtcgcgttcgtcgatcagcgtgctgatcaacggcgaatccggcaccggcaaggagctggtggcgcatgcgctgcaccgccacagcccgcgcgccaagtcgccgttcatcgccctgaacatggccgccatccccaaggatctgatcgagtccgagctgttcggccacgagaaaggcgccttcaccggcgcgaaccaaattcgtcagggccgttttgaacaggccgacggcggcacgctgttcctcgacgagatcggcgatatgccgctcgacgtgcaaacgcgcctgctgcgggtgctggcggacggccagttctaccgggtcggcggctatgcgccggtgaaggtcgacgtgcgcatcatcgccgccacgcaccagaatctggagctgcgggtgcaggaaggtaagttccgcgaggatctgttccaccgcctgaacgtgatccgcgtacacctgccgccgctgcgcgagcgccgtgaagacatcccgcggctggcgcgccacttcctgcagatcgccgccaaagagttaggcgtcgaggccaagaacctgcacccggaaaccgaaaccgcgctgacccgcctgccctggccgggcaacgtgcgccagctggagaacacctgccgctggctgacggtgatggccgccgggcaggaagtgctgatccaggatctgccgggtgagctgttcgaaaccgccgcgccggaaagccccagccacagtctgccggacagctgggccacgctgctggcgcagtgggccgatcgcgcgctgcgttccggtcatcaaaacctgctgtcggaagcgcagccggagatggagcgcacgctgctcaccaccgcgctacgccacacccaggggcacaaacaggaagccgcgcgcctgctgggctgggggcgtaataccctgacccgcaagctcaaagagctgggtatggattag

SEQ ID NO: 426168 - DNA, 123 bp, Serratia marcescens
atgctggactcattcatcgtattcatttctcagggcgcggagctgggctccgccgccagccacaccccgcaggcggcggttgccgcggtattgtgcgccgcgctgattaacttcttcagttaa

SEQ ID NO: 426169 - DNA, 1374 bp, Serratia marcescens
atgtcagagcagacgattgtctgggatttggccctgatccaaaaatataactactcagggccgcgttatacctcataccccacggcgctggagtttaaccagcgctacgacgaagcggcgtttcaacgcgccgctgcgcgttaccctgagcggccgctgtcgctgtatgtgcatatccctttctgtcataagctgtgttacttctgcggctgcaacaagctggtgacgcgccagacccacaaggccgacgagtacctgaacgttttggcgcaagagatcgccagccgtgcgccgctgttcgccggccgcaaggtcggccagatgcactggggcggcggtacgccgacctacctggataaagcgcaaatcagccggttggtggcgttgctgcgcgaacactttgatttcctgcccgatgcggagatgtcgatcgaggtcgatccgcgcgagatagagctggatgtgctcgatcatttacgcgtcgaaggctttaaccgtctgagcatgggggtgcaggatttcaacaagcaggtgcagcagttggtcaaccgcgagcaggacgaagcctttatcttcgccctgattgagcgggccaaagcgctgggcttccgctcgaccaatatcgatctgatctacggcctgccgaaacagacgccggaaagcttcgctttcacgctgcagcgggtggctgaattgaatcccgatcgcctcagcgtgttcaactacgcgcatatgccgaacttgttcgccgcccagcgcaaaatcaaagacgccgatctgcccagcgcccagcagaagctggatatcctgcaacagagcatcgctttcctgaccggcgccggctatcagttcatcggcatggatcactttgcgcgcccggacgacgagctggcaatcgcccaacgcgaaggcaagctgcaccgcaatttccagggctatactacccagggcgacagcgatctgctggggttgggcgtgtcggccatcagcatgctcggcgacagctatgcgcagaaccagaaagagctgaagcattactatgagagcgtaccggcgcagggcaacgccctgtggcgcgggctggcgctgacggacgacgattgcctgcggcgcgatctgatcaaaaccctgatctgcaatttccggttggcgtatcagccgctcgaacggcattacggcatcgatttcaccgcttacttcgccgaagacctgcagctgctggcgccgtttgaacgcgatgggctggtggagcgcgacgagcagggcattcgcgtcacgccacgcgggcgcttgctgatccgcaatatctgcatgtgtttcgatcgctatctgcggcaacaggcgcgcagccagcagttctcacgggtgatctga

SEQ ID NO: 426170 - DNA, 540 bp, Serratia marcescens
atgaaccagccatcaaaagcacctcgcggcagcgcggcgaagtcaaaaacgaaaaagaaaagccgtatggagctcgatcaggaagcgcgcgagcgcaaacgcctgaaaaagcgccgcggccacgcttccggttcgcgcacccaggtcgagtccggcagccagaagaacaaatcggcggcggaagccaaagatccgcgtatcggcagtaaagtgccggtagcgctggtggtcgacgaaaccaaagtaaaggccaaaccgcagccgaagccaaaggccgaagcgaaaccgcgcctgtcgccggaagaagagctggcgaagctggaaaatgacgaacgcctgaacgcgctgctggatcgcatcgacgatggcgaaacgctgaacgcggaagagcagacctatgtcgacaaaacgttggatcgcatcgatgtgctgatggacgtgttgggcatcgaactgggtgaagacgacgacgaagaagaagagaagcaggaagatattctgaagctgctgaaaggcggcaacccgaaagacgctttttaa

SEQ ID NO: 426171 - DNA, 645 bp, Serratia marcescens
ttgaccagcaagaactacaactatcatgtgacccatttcgtcaccagcgcacccgatattcgccatctgccgggggatgcaggaattgaagtcgcctttgccggccgttccaacgccgggaaatccagcgcgctgaatacgctgaccaaccaaaaaagcctggcgcgcaccagtaagacgccggggcgcacccagctgatcaacctgttcgaagtggaagacggcatccgcctggtcgacctgccgggttacggctacgccgaagtgccggaagagatgaagcgcaaatggcagcgcgcgctgggcgaatacctgcagatgcgcaacagcctgaaaggcctggtggtgctgatggatattcgccatccgctgaaagatctcgaccagcagatgatccagtgggcggtcgacgtcggcacgccggtgctggtgctgctgaccaaggccgacaagctggcctccggcgcacgcaaggcgcagctcaatatggtgcgtgaagcggtgctgccgtttatgggggatatccaggttgaagccttctcgtcgctgaagaagatcggcgtcgacaagctgcgccagaagctggacacctggtttaacgagatcccaccggaagtgctgccggaagacgaagccggcgaataa

SEQ ID NO: 426172 - DNA, 2802 bp, Serratia marcescens
atggcccagattgcagaaaacccactaatcctggttgacggttcctcctacctctaccgcgcttatcacgccttcccgccgctgaccaactcggcgggcgagccgaccggcgcgatgtacggcgtgctgaatatgctgcgcagcctgctgctgcagtatcaaccgagccacgttgccgtggtgtttgatgccaaagggaagaccttccgcgatgatctcttcgccgaatacaaatcgcaccggccaccgatgccggacgatctgcgtgcgcagatcgagccgctgcataacatggtcaaggcgatgggcctgccgctgctggtgacgcccggcgttgaggcggacgatgttatcggtacgctggcgctggaggccgaaaaagctggccacgcggtgctgatcagcaccggcgacaaagacatggcgcagctggtgacgccgaacgtcaccctgatcaacaccatgaacaacaccatcctcggcccgcaggaagtgtgcgacaagtacggtattccgccggagctgatcatcgacttcctggcgctgatgggcgattcatcggacaacattcccggcgtgccgggcgtgggtgagaaaaccgctcaggcgttgctgcagggtatcggcgggctggatgcgctgtatggcaatctggagaatatcgccacgctgagcttccgcggcgccaaaaccatggcggccaagctggagcagaacaaagaggtcgcgtacctctcctataagctggcgacgatcaaaaccgacgttgagctggatctgacctgcgcggatctgacggtctctgcaccggatgtcgatacgctgcagcagctgttcaaacagtacgaattcaaacgctggctggcggacgtggaagccggcgtatggctggaaaacaagaaaggcgcgggagcgaaagctgccggcggcgccaaaccggccgccgccgccgcggaagcgccgaaggcgctggcggaggccaagctgtcccaggacggttatgtcaccattctggatgaagcgacctttaccgactggctggcgcggctgaaaaaggccgacgtgtttgccttcgataccgaaaccgacggtctggataccctgaccgccaacctgatcggcctgtccttcgcgatcgcgccgggcgaggcggcttatttgccggtggcgcacgattatctggacgcaccgccacagctggaccgcgcctacgtgctggaagcgctcaagccgctgctggaggacgataaggcgctgaaggtcgggcaaaacctgaagttcgacatgagcctgctggcgcgctacggcattgagatgcgcggcatcgcctacgacaccatgctggagtcctatgtgctggacagcgtcggcggccgtcacgatatggacagcctagccgatcgttatctgagccataaaaccatcaccttcgaagagatcgccggcaagggcaaaaaccagctgacgttcaatcagatcgcgctggagcaggcggcgccttacgccgccgaagacgccgatgtcacgctgcagttgcacctggcgatgtggccgcagttgaaacagagcgcagagctgctgacggtgttcaacgagattgaaatgccgctgctgccggtgctgtcgcatatcgaacgcaccggggtgctgatcgatccggccattttgtcggcccactcccaggagctggccaagcgtctggctgagctggaggcgcaggcccacgagctggcggaagagccgttcaacctggcgtcgaccaagcagctgcaggctatcttgtacgagaaacaaaagttgccggtgctgaagaaaaccccgggcggtgcgccttctaccaacgaagaagtgctggccgagctggcgctggattacccgctgccgaaggtgatcctggaataccgcggcctagcgaagctgaagaccacctataccgacaagctgccgctgatgattaacccggccagcggccgggtacacacctcgtaccatcaggcggtgactgcgaccggccgtctctcctcgagcgatccgaacctgcagaacatcccggtgcgcaacgaagaagggcggcgcatccgccaggctttcatcgcgccggaaggctaccgcatcgtcgcggccgactactcgcagatcgagctgcgcatcatggcgcatctgtcacaggatgaagggctgctgaaggccttcgccgaagggaaagacattcaccgcgccacggcgtcggaagtcttcggcgtgccgttggataaagtgaccggcgaacagcgccgcagcgccaaggcgattaactttggcctgatttacggcatgagcgccttcggcctggcgcgccagttggggatcccgcgtggggaagcccagcgctatatggatctgtacttcgagcgttacccgggcgtgctggactacatggagcgcacccgtcaacaggcttccgaacagggctatgtcagcacgctggacgggcgccgcctgtacctgccggacgtccgctccagcaacgccatgcgccgcaaggcggccgagcgcgccgccatcaacgccccgatgcagggcaccgcggccgatatcatcaagcgtgcgatgatcgaggtcgacgcctggctgcaagggcaggagaagccgttggtgcgcgcgatcatgcaggtgcacgatgaattggtatttgaggtgcatgagtcggtgatcgaagaagccagccaacgcatccgtcaattgatggaaggcagcatgaccctggcggtgccgctgaaggtcgacgtgggcgtcggcatgaactgggatgaggcgcactga

SEQ ID NO: 426173 - DNA, 897 bp, Serratia marcescens
atgccaagattgttaacgcctgttatttttatcatttccgtcatactcaccattctggtgacggtgttgtgttctatccccatcacgctggccggcatcgtgaaactcctggtgcccattcccgccgtctggcgatatatctctgctttcgccgatttcatgatgtggtgttggtgtcaggggctggcgctgttattgcgcattaacgggcaattgcgttgggatattgaagggctggaagggctggatcgcaaaaactggtatctgctgatcagcaaccacgaaagctggtcagacattgtcgtgttgtgcgtgctgttcagaaatcatattccaatgaataagtatttcctcaagcaacagctcgcctgggtgccttttgtcggcctggcctgctgggcgctggatatgccattcatgaagcgttactcccgcgcctatttgctcaagcatccggagaagcgcggcaaggatatcgaaaccacgcgccgttcctgcgaaaaattccgtcaacgtccaaccaccatcgtcaatttcgtcgaaggttcgcgcttcaccgaagccaagaaaattaaaagcaattcgccgtatcgcaatttgctggcgcccaaagccgccggcatcgcgtttacccttagcgcgctgggcaatcagttcgacaaagtgttgaacgtcaccctgctctatccggaaaataaccaacggccttttctggatatgctgtgcggtcgtttggcgcgcatcgtggtaagaatagagacgctgccgatcgatgaaaccctgcacggggactatttcaacgacaagcagttcaagcggcgtttccaactgtggctgaatacgctgtggcaggaaaaagaccggctgctggataaattgaagcggcaatacggataa

SEQ ID NO: 426174 - DNA, 624 bp, Serratia marcescens
atgaaaaaaatatggttggcgctcgttggcatggtgatggccttcagtgcctcggcggcacagtttagcgatggcgctcagtacgtgaccctggacaagccggtgaccggtgagcctcaggtgctggagttcttctccttctactgcccgcactgctaccagttcgagcaggtctatcacgtgtccgagaacgtgaagaaggcgctgcctgccggcaccaaaatgaccaagtaccacgttgagttcctggggccgctgggcaaacagctgactcaggcatgggcggtcgcgatggcgctgggtgtggaagacaaagtaagcccgttgatgtttgaagcggtgcagaaaacccagaccgtgcaaacgccggacgatatccgtaacgtcttcgtgaaagcgggcgtgaccgccgctgattatgacgcggcctggaacagtttcgtggtgaaatctctggtggttcaacaggagaaagccgcggaagatctgcagctgcgcggtgtgccggcggtattcgtgaacggcaaatacatggttaaaaacgatggcctggacaccagctcgatggacgcttacgtgaagcagttcgccgacgtggttaaattcctcagccagcagaaataa

SEQ ID NO: 426175 - DNA, 987 bp, Serratia marcescens
atgaataactctgcttttaatttcgacaccctgtcgcccgatttgattatggacgcgctagaaggggttggcctgcgcgtcgattccggcctgacggcgctgaacagctatgagaaccgcgtctatcagtttatggacgaagatcgccggcgctacgtagtgaagttttaccgcccggagcgctggagcgccgcacaaatcggtgaggaacatcagttcgctctggatctggccagcgcggaaattcctgcggtggcgccgctggcgctgcaaggcgctacgctgcatacgcacggtggattcttctttaccctgtttcccagcgtgggcgggcgccaatatgagatagacaacctggatcagttggaatgggtgggtcgttttctgggccgtatccatcaggtcggcggcgagcgtttgttcgccgaacggccgacgatgggggttgaagaatatctcaccgccccgcgtcaggtgttggccgattgcgggctgttgccggcagcacagcgtgacgcgttcctgctggcaacggacaacctgattgcggcgatcaaggcgcactggcatctggactggcagccgcgccgtttgcacggtgattgccatccgggcaatattctgtggcgcgacggcccgctgttcgtcgatcttgatgacgcacgtaatggcccggcggtgcaggacttgtggatgctgctgcacggcgaacgccgcgatcaactgatgcagctggacgtcttgctggaggcgtacggtgaatttgccgagttcgatcagcgcgagttggcgttgatcgagccgctgcgggccatgcgcatggtgtattacctggcctgggtcgcccgccgttggcaggatccggccttccctaagagttttccgtggatggcggagtctgatttctggttgtctcagactgcggccttcaccgaacaggttaagctgttgcaggagccccctctgcagctgacgccaatgtattga

SEQ ID NO: 426176 - DNA, 291 bp, Serratia marcescens
atgctattggacgatattgagatgaaaacgcatcgcgtaaacgagttgatcgagctgttgcacccggcctggcaggaagatcccgatctcaatttgatgcagtttttgcaaaagctggcacaggaagcgggcttccagggcgagttgtccgaactgagcgacgacattcttatttaccatctgaaaatgcgcggcagcgccggcacggatcagatcccgggcctgaagaaagattacgaagaagattttaaaacggcgctgttgcgcgctcgcggcgttatcaaggactga

SEQ ID NO: 426177 - DNA, 591 bp, Serratia marcescens
atgcataaagaaatcagcggcgtcattttggccggcggacgggccacgcgtatgggcggtgaagacaaaggcctggtgtcgattgccggtatcgcactctatcaacacgtattggctcggttacggccgcaagtggcttccgtcgccatcagcgccaatcgcaatcaggcacgttaccaggcgagcggtttgccggtaattggcgatctgacgcccgatttcgccgggccgttggccgggatgctcgccgggctcaaacaggcccccagcgagtgggtggccttcgtcccttgtgacgtccccaactttcccgccgacttagtcgcgcagctatggcggcaaaaaggcgcggcgccagcagcctttgccagcgatggtgaacgagatcaccctacgctggcattattgcatagccaaatagcgccgcagctggccgactatctggcgcgcggtgaacgcaagctgatgctgttcttgcatcagattaacgcacaacgcgtggtgttcagcgggcagcaaacggcatttcataacctgaatacgccggaagactgcctgcactggcagcaagcacgagagctaaaaacatga

SEQ ID NO: 426178 - DNA, 519 bp, Serratia marcescens
atgaatcgttcattgccccctttgctggccataggcgcctacagcgggacggggaaaaccaccctgctcaagcaattgatcccaatgctgaaacagcgccaggtgcgggttgggttgataaagcatacgcatcatgacatggatgtggatacgccgggcaaagacagctatgagctgcgcaaagcgggtgccgaccaaacgctggtcgccagcgatcgccgttgggcattgatgaccgaaacgccggagcaacaacctttggatctacgctacctggcagggcgttttgacgccgataaggtcgatttgattctagtggaagggttcaaacatgagccggtcagcaagatcctgctttatcgggccgagatcggcagaccgctggaagacatgctggatcagtttgtcgtggcggtagtcagcgaccggccgctatccatcgcggctaagcagttggatctcaatcaaccggaaagcatcgccgactttattgtcgagtggttgaaaggcgcagcgtag

SEQ ID NO: 426179 - DNA, 1509 bp, Serratia marcescens
gtggaaaccaaagacttgatcgttatcggtggcggcatcaacggtgccggcatcgcggcggatgctgccgggcgcgggctgtcggtactgctactggaagcgcaagacttggcctgtgctacgtcttccgccagttccaaactgatccacggtggcctgcgctacctggaacactacgaattccgtttggtgagcgaagcgctggccgaacgtgaagtgctgctgaagctggcgccgcacatcgcgttcccaatgcgtttccgcctgccgcaccagccgcacctgcgcccggcctggatgatccgtatcggcctgttcctgtacgatcacctgggcaaacgcaccagcctgccgggcagcaagggcttgcgctttggaccagagtcggtgctgaagcctgaattgaagcgcggtttcgaatattccgactgctgggtcgacgatgctcgcctggtggtgctgaacgcgcaggaagtggaaaaacgcggcggcgaagtgcgcacccgcaccaaagtgacccgcgcatggcgtgaaaacggcatgtggatggtggaagcggtcgatatcgacagcggcaaaaccttcacctggcgcgccaaaggcctggtgaacgccaccggcccgtgggtgaaaaacttcttcgacgacggcctgaagctgaaatcgccttacggcatccgcctgatcaaaggcagccacatcgtggtgccgcgcgtgcacgatcagccgcagtcttacattctacagaacgaagaccaccgcatcgtgttcgtgatcccgtggaatgacgagttctccatcatcggcaccaccgacgtggagtacaaaggcgatccgaaggacgtgaagatcgacgagaacgaaatcgcttatctgctgaaggtgtacaacgatcacttcaagaaacagctgggccgcgacgacatcgtctggacttactccggcgtgcgtccgctgtgcgacgacgaatccgattcgccgcaggcgatcacccgcgattacacgctggacgtgcacgacgaacaaggcaaggcgccgctgctgtcggtcttcggcggcaagctgaccacctaccgcaagctggccgagcacgcgatggaaaaattggcccactactacccaggctgcggcccggcgtggaccaagaacgccacgctgccgggcggtgacatcggcggcgatcgcgacggctacgcggccaaactgcgccgcgcccacggctggttgccggaagcgctggcgcgccgctatgcccgcacctacggtagccagagcgagctgatcctggccggcgccaacggcctcgccgatctgggcgaagatttcggccacggtctgtatgaagccgaactgcgctacctgaccgagaaagagtgggtcgtagagctggccgacgccatctggcgccgcaccaagctgggcatgtggctggacgaagcgcagcaggcgcgagtgaaagcctggctggcggaacacgcgaaaacgaaaacgctgtctctggcttcctga

SEQ ID NO: 426180 - DNA, 2448 bp, Serratia marcescens
atgacttcaccgtttagttacacctcacctacggtcagtgtggaagcgctgaaacactccatcgcctataagctgatgtttatcgtcggcaaggatccggccatcgccaaccggcacgactggctgaacgccgtgctgttcgcggtgcgcgatcgcatggttgaacgctggctgcgttccaaccgcgcccagctgtcgcaggacgtgcggcaggtgtattacctgtcgatggagtttctgatcggccgcaccctgtcgaacgcgctgctgtcgatgggcatctatcaggatatcgacaacgcgctgaacgaaatggggttgagcctgggtgaactgctggaagaagagaacgaccctggcctcggcaacggcggtctgggccgcctggcggcctgcttcctcgattcgctggcgacgctggcgctgccggggcgcggctacggcattcgctacgagtacggcatgttcaagcagaacatcgtcaacggccaacagatggagtcgccggactactggctggagtacggcaatccgtgggagtttccgcgccacaacacccgctacaaggtgcgcttcggcggccgcgtgcagcaggagggcgccaaggcgcgctggctggagaccgaagaggtcgtggccatcgcctacgatcaggtgatccccggtttcgacaccgatgccaccaacaccctgcggctgtggggcgcgcaggccagtaacgagatcaacctcggcaagttcaaccagggcgattatttcgccgcggtggaggataaaaaccactcggagaacgtgtcgcgcgtgctgtatccggacgactcgacctcctccgggcgcgagctgcggctgcggcaggagtatttcctggtgtcggcgacggtgcaggacatcctcaatcgccattggctgatgcacaaaaccttcgacaacctggcggacaagatcgccattcacctcaacgacactcacccggtcttgtcgattcccgagctgatgcaccggctgatcgacgagcacaaattcaagtggctcgacgcctgggaagtggtggagcaggtattttcttacaccaaccacacgctgatgagcgaggcgctggaaacctggccgctggacatgattggccgcatcttgccgcgccacctgcagctgattttcgaaatcaacgatcacttcctcaagatggtgcaggaagtggcgccgggcgacaacgacctgctggcgcgggtctcgatcatcgacgaaaccaacggccgccgggtgcgcatggcgtggctggcggtggtggccagccacaaggtcaacggcgtttccgccctgcattccgaactgatggtgcagtcgctgttcgccgacttcgcccggctgttccctaatcgtttctgcaacaaaaccaacggggtgacgccgcgccgttggctggcgctggccaacccgccgctggcggcggtgctggacgactgcatcggccaaacctggcgcaccgatctcagccagctgagcgagatcaaagccaacgtcgattacccgagtttcctgcaggcggtgcagcgcgccaagcggcagaacaaggagcggctggcgctgtatatcgccaaaacgctcaacgtggtggtcaacccggatgcgctgttcgacgtgcagatcaagcgcatccacgagtacaaacggcagctgctcaacgtgttgcacgtcatcacgctgtataaccgtctgctggacgatccggagatcgagcgcgtgccgcgggtggtgatcttcgccggcaaggcggcctcggcctactatgccgccaaacagatcatccgcttgatcaacgacgtggccaaagtgatcaacaacgatccgcgcgtgcatacccagctgaaggtggtgttcattccgaactacggcgtcagcctggcgcagatcattatcccggcggcggatctgtccgaacagatctcgctggcgggcaccgaggcctcgggcaccagcaacatgaagttcgcgctgaacggcgcactgaccatcggtacgctggacggcgccaacgtcgagatgcgcgagcacgtgggggaggagaatatctttatcttcggcaataccgccgaacaggtggaggaactgcgccgcaacggttacaacccgcgccagtactatgagcaagacccggagctgcatcaggcgctgacgcagatcgccaccggcgtgttcagcccggaagagccgaaacgctatggcaatttgttcgactcgctggtcaacctcggcgatcactatcagctgctggcggattaccgcagctacgtggatacgcaggacaaggtggacgaggtgtatctcaatcaggacgagtggacgcggcgcgcggtgctgaatatcgccaacatgggctacttctcctccgatcgcaccattcaggaatatgcggatgaaatctggcacattcagccggtgaagctgtaa

SEQ ID NO: 426181 - DNA, 1431 bp, Serratia marcescens
atgcaggtcttacacgtatgttctgaaatgttccccctgctgaaaacgggtggactcgcagacgtggttggcgcgctgccggcggcgcaaatcgccgaaggcgccgatgttcgggtgctattgcccgctttccctgacgtacgcaacggcatccccgacacctcgctggtggcggaaatcgactcgttcgccggccgggtcggcctgcgttacggcacctaccatggcgtgggcatctatctcatcgatgcgccctggctgtatgaccggccgggcagcccgtaccacgatcagtccatgtacgcctatcccgacaaccaccgccgctttgcgctgctgggctggatggcctgcgagctggccaaggggctggatcgctactggcggccgcagctggtgcatgcccacgactggcacgccggcctgagctgcgcctatctggccgccaacggccacccggcgcgctcggtgtttacggtgcacaacctggcctatcaagggctgttctctgcccatcacgtgaccgagctgtggctgccggcgtcgttttacgatgtttatggcctggagttctacggccagatgtcgttcctcaaggccgggctgttttatgccgaccacgtgaccgccgtcagcccgacctatgcgcgcgagatcacccggccggagttcggctacggcatggaggggctgctgcaggagcggcagcggcagggcaggctgagcggcatcctcaacggggtggacgacaacatttgggatccggcccgcgacccgcggctgagcgcccgctacgacgccgacgatctgaaaagcaaggtcaaaaacaagctgcatctgcaaaaggccatggggctgaaggtggatgaatcgctgccggtgttcgcggtggtgagccgattgaccagccaaaaaggcctggatctggtgctgcaggcactgcctgagctgctggcgcagggcgggcagctggcgctgctgggcgccggcgatgcggtgctgcaacaggcgtttctggccgccgccgccgattatcccgagcaggttggggtgcagatcggctatcacgaatccttctcccaccgcatcatcggcggcgccgacgtgattctggtgccgagccgcttcgagccctgcggcctgacgcagctctacggcctgaaatacggcacgctgccgctggtgcgccgcaccggcgggctggcggacacggtggtggactgcgcgctggagaacctggccgacggcaccgccagcggcttcgtgttcgacgattgcgacgccgtcgcgctgggcaacgccatccgccgcgccatggtgttgtggagccggccgaaacactggcgccacgttcagcgccacgccatgagcgtggacttcggctggccggtggcggcgaaagagtatttatcgctttatcaacgtttgtag

SEQ ID NO: 426182 - DNA, 1278 bp, Serratia marcescens
atggttaggtttgaaaataaagaccccctgatgttggcgcgccagctgccgattaaatccgtagcgctgatcctggccggcggccgcggctcgcgcctgaaagatttgacctccacccgcgccaagcccgccgtccactttggcggcaagttccgcatcatcgatttcgccctgtcgaactgcctgaactccggcattcgccgcatcggcgtgatcacccaataccagtcgcacacgctggtgcagcacattcagcgcggctggtcgtttctcaacgaggagatgaacgagttcgtcgatctgctgccggcccagcagcgcctcagcaccgagcattggtacaaaggcaccgccgacgcggtgtatcagaacctggacatcatccgccgctatgaggccgaatacgtggtgatcctggcgggcgaccatatctacaagatggattactcgcgcatgctgatagaccacgtcgagaagggcgcccagtgcaccgtggcctgcctgccggtgccgcgcagcgaagccggcgaattcggcgtgatgaaggtggatgaaagcgaccgcatcatcgagtttctggagaaacccgccaacccgccggcgatgccgggcaacccggatatgtcgctggccagcatgggcatctatatttttaatgccgcctaccttttccaactgctggaagaggatatgtcgacccccggctccagccacgatttcggcaaggatctgatcccgaaaatcaccgcgcagcaggcggcgtgggcgcatccgtttaccttgtcctgcgtgacctccaaccccgatctgccgccgtactggcgcgatgtgggcacgctggacgcctactggcgcgccaacctcgatctggcgtcggtgacgccggagctggacatgtatgaccgcgcctggccgatccgcacccacatggagccgctgccgccggccaagttcgtgcaggatcgctccggcagccacggcatgaccatgaactcgctggtgtccggcggctgtatcgtctcgggctcggtggtggtgcattcggtgctgttcccgcgcgtgcgagtgaactcgttctgcaccatcgactctaccgtattgttgccggacgtgaacgtcggccgttcctgccgcctgcggcgctgcatcatcgaccgcgcctgccacattccggaaggcatggtgatcggggaaaacgccgatgaggacagcaagcgtttttatcgctcggaaggcggcatcgtgctggtgacgcgcgaaatgttgtcaaaattgtga

SEQ ID NO: 426183 - DNA, 1983 bp, Serratia marcescens
atgacggagctgacggccggcctcgccgcgccgctgggcgcgcattacgacggcgaaggcatcaactttaccctgtactcggcgcacgccgagcgggtggagctgtgcctgttcgacggccagcaacgcgaagtgcgcctgccgctgccggcgcgcagcggcgatatctggcatggctatttgccgggcggcaggccggggcaacgttacggttaccgggtctacggcccgttcgacccggcgaacgggcagcgtttcaaccccaacaagctggcgctcgatccggccgcgcgcgcggtggaggggccggtggcggatcacccgcacctgcacggcggttacgaacagcctgatccgcacgacagcgccgagctgatgccgaaatgcgtggtggtggacgaacagtacgactggcaggacgatcgcccgcccgccacgccctgggggcagacggtgatttacgaagcgcacgtgcgtggcctgacgctgctgcacccgaagatcccgccggcgctgcgcggcagtttcgccgcgctggggcacccggtgatgatcgcccacttcaaacgcctcggcatcaccgcgctggaactgctgccggtgcagcaacatacctccgaaccgcggctgcagcggctggggctgatcaactactggggctataacgtgctggcgccctatgcgccggacaaccgctacgccagcctgagcaccgacggcacgccgctgaacgaatttcgcgatgcggtcaaggcgctgcaccaagccggcattgaggtgatcctcgacgtggtgttcaaccacagcgccgagctggacagggacgggccgatgctgtcgctgagcggcatcgataaccagagctactactggctgacgccggaaggggactacgttaacgacaccggctgcggcaataccctgcggctcgatcagccgcagggcgtggcctgggtgatggattgcctgcgtttttgggtgcgggagtgccacgtcgacggcttccgcttcgatctgggcagcgtgctcggccgcacgccggggttcgatcgcgatgcgccgctgttccaggcgatgctggcggacgatgtgctgtcgcgctgcaagctgattgccgaaccctgggacgttggccccggcggctatcaggtgggggcgttccccggccgtttcgccgaatggaacgaccattaccgcgacgacatgcgccgtttctggctgcagagcggcgtgtcgctcggccagttcgcccggcgtttcgccgcctccagcgatctgtacaaccagcgcgggcgggcgccttacgccaccgtcaacatgctgaccgcccatgacggttttaccctgcaggacgtggtcagcttcaacgagaaacacaaccagccgaacggcgaaggcaaccgtgacggcagcgatcgcaatttcagcaacaaccacggcgtggaaggcctggtcgccgacgacgccattgtgcaacgccgcagggccagccagcgggcgatgctcgccacgctgttgctgtcccagggaacgccgatgctgctggccggcgatgaacagggacacagccagcaggggaacaacaacgcctattgtcaggacaacgccaccacctggctcgattgggccacggcggatgacgcgctgaccgattacgtcgcggcgctgatcgcgctgcgccgccagatccccgcgttgcaacaggaccgctggtggcagcaggacgacggcagcgtgcagtggctgaatgcgcaagggcagccgctcgacgcgcagcagtgggagcagggcgatctgctcatgcagatcctgctgtcgcagcgctggctgctgctggtcaacgccacgacgcaaacggtggagatgaggttgccggaaggcgattggcaggttgtcgccccgttcactcaggaagactcacgggcggtgttacccgcctggcaccaggccgcgcgctcgctttgcgttctggtacggaaataa

SEQ ID NO: 426184 - DNA, 2187 bp, Serratia marcescens
atgcctgtacttcccgatcgtgacgtgattgatcagatcatctccggccattacgccgacccctttgctctgcttggcatgcatgcgaccgataacggtctgcaggtgcgcgcgctgctgccggacgctggcgcagtctggctggtggaacagcaaaccggccggcggctggtgcagttgaactgcgacgatccgcgcggcttcttcagcgccgtggtgccgcggcgcaaaaatcctttccgctatcagctgcaggtcagctggcgcgatcatcaacagaccatcgacgatccctatcggttcggcccgctgctgcaggacatcgacagctggctattggccgagggcacgcacctgcgcccctatgaacgcctgggggctcacctcgccacgttggatgacgtcgacggcgtcagctttgccgtttgggcgcccaacgcccagcgcgtctcggtggtgggggagttcaacttctgggacggccgccgccatccgatgcgtctgcggcgtgaaaacggcatctgggagctgttcctgcccggcgtgcgggccggtcagctgtacaaatatgaaatcgtcgattgctacggcaatacccagctgaaagccgatccttacgccttcgaggcgcagatgcgcccggacaccgcctcgctggtggcgccgctgccggaggtggtgccgtcgacgcaggcgcgccgccgcgccaacgattttgaccagccgatcgccatctacgaggtgcatctcggctcatggcgccgccacaccgacaaccatttctggctcagctacggcgagctggcggtgcagcttatcgactatgtgaaggacatgggattcacccatatcgagctgctgccgatcaacgagcacccgttcgacggcagctggggctaccagccgctggggctgtatgcgccgacccggcgcttcggcacgccggccgatttccgggcgttcgtggcggcggcgcatgaggcgggcatcaacgtgatcctcgactgggtgccggggcatttcccgagcgacgcctacggcctggcgaattttgacggcaccgcgctgtatgaatacgccgatccgcgcgaaggctaccaccaggactggaatacgctgatctacaactacggccgccacgaggtgcgcaactacctggcgggcaacgcgctgtattggctggagcgtttcggtatcgatgcgctgcgggtcgatgcggtggcgtcgatgatctatcgcgactacagccgcgccgacggcgagtgggtgccgaattactacggcggcaacgagaacctggaggcgatcgccttcctgcgttataccaaccagactatcggccaggcgcagccgggcgcggtgacattggcggaggagtccaccgactatcccggcgtcaccctgccgccggacgccaacggcctgggattccactacaagtggaacctcggctggatgcacgacacgctcaattacatgaagtgcgatccggtgcaccgcaagtatcaccacaaccagatgaccttcgggatgctgtatgcctataccgagaacttcgtgttgcctatctcgcacgatgaagtggtgcacggcaaaaaatcgatcctcgaccgcatgccgggcgacgcctggcaaaagttcgccaacctgcgcgcctactatgggtttatgtgggcgcatccgggcaaaaagctgctgtttatgggctgcgagttcgcgcaggggcgcgagtggaatttcgataccagcctcgattggcatttgctggaggggctggataactggcacaacggcgtgcagcggctggtacgcgatctgaaccactgctaccggcagcaggcgccgctgtatgagcgcgactaccgcccggacggcttcgagtggctggtggtcgacgatcacgacaactcggtgttcgcgttcgcgcgctacgattcgcagggcaatgagctgatcgccatcagcaactttaccccggtgccgcgctaccgctaccgcatcggcctctcacgcgccggcgactatcgcgagatcctcaataccgattcgcaccactatcacggcagcaacgccggcaatcaggggcgggtctcttccgaagcggtcggcagccacggccgcgacttttccatctgcgtgacgctgccgccgctggcgaccatttatctgctgcgggaggagccatga

SEQ ID NO: 426185 - DNA, 1104 bp, Serratia marcescens
atgaaaaacgttggtttcatcggttggcgcggaatggtcggctcggttctcatgcaacgcatgacggaagagcgcgatttcgacgccattcgcccggtctttttctccacctcgcagcacggttccgccgcgccggccttcggcggccagcagggcacgctgcaggatgcgtatgacatcgacgcgctgagcgcgctcgatatcattattacctgtcagggcggcgattataccaacgaagtttatcctaagctgcgcgccagcggttggcaggggtactggatcgacgcggcctcttcgctgcgcatgcaggacgacgccatcatcatcctggatccggtcaaccacgcggtgattcagcagggcctggacaacggcatcaaaaccttcgtcggcggcaactgcaccgtcagcctgatgctgatgtcgctcggcggcctgttcgccaacgatctggtggagtgggcgtcggtcgccacttatcaggcggcctccggcggcggcgcgcgccacatgcgcgaactgttgacccagatgggcatgctgcatgccgacgtggcgaaagagctgcaggatccggcttccgccattctggatatcgagcgcaaggtgaccgaggccacccgcagcggcaaactgccgaccgataacttcggcgtgccgctggccggcagcctgatcccgtggatcgacaagcagctcgacaacggccagagccgcgaagagtggaaaggccaggcggaaaccaacaagattctgaacaccggcagcgtgatcccggtcgatggcctgtgcgtgcgcgtcggcgcgctgcgctgccacagccaggcgttcaccctgaagctgaaaaaagacgtgtcgctgccggaaatcgagcagatgctggcgacgcacaacgactgggtgcgcgtgatcccgaacgaccgtgagctgaccatgcgcgaactgacgccggcggcggtgaccggcacgctgaatacgccggtcggccgtctgcgcaagctgaatatggggccggagtacctgtcggcgttcaccgtgggcgaccagctgctgtggggcgcggccgagccgctgcgccgcatgctgcgtattctgctgtaa

SEQ ID NO: 426186 - DNA, 594 bp, Serratia marcescens
atgacagagatgatttccgctacggtattgctgtttttaattatggatccgctgggcaacctgccgattttcatgtcggtgctcaagcatctggaaccgcgccgccgccgggtagtgctgatccgcgagctgctgatcgccctgctgctgatgctgatcttcctgttcgccggcgagaaaattctggcgttcctcaacctgcgcaccgaaaccgtctccatttccggcggcatcattctgtttctgatcgccatcaagatgattttccccacgcaggagggcaacagctccgggctgtccgccggcgaagagccgttccttgtgccgctggcgatcccgctggtggccgggccgtcgattctggcggcgctgatgctgctgtcgcaccagtatccgcatcagctgccccatctggtggcggcgctgttgatcgcctggggcctctctgcggccattttgctgatgtcgaacctgttcctgcgcctgctgggcagcaaaggcgtcagcgcgctggaacggttgatggggctgattctggtgatgctgtcgacccagatgttcctggacggcatacgggcttacatgaagctgtag

SEQ ID NO: 426187 - DNA, 528 bp, Serratia marcescens
atgagtaatccacagaatcacgtatttatcctgatgggcgtatccggcagcggcaaatccgccgtggccagcgccgtcgcccgcgaggccgatgccgccatgctggacggcgattacctgcacccgcgcgccaacatcaacaaaatggccgccgggcacgcgctggacgacaacgatcgcgccccgtggctggcggccttgaacgacgccatcttcgccatgcaacgcaccaatccggtgtcgctgctggtgtgttcggcgctgaaaaaaagctatcgcgaccgcctgcgcgaaggcaatcgcaacctgcatttcctctacctgaaaggggacaagacggtgattgaggagcgcctgaaacagcgcaagggccacttcttcaaaccgcagatgctggtttcgcagttcgccacgctggaagagccgggcgagcaggagccggatgtgcaggcgatcgacatcaaccagccgctggacggcgtggtcgccgacacgctcgcctgcatcaaccgcatcaccgcccgctga

SEQ ID NO: 426188 - DNA, 1317 bp, Serratia marcescens
atgccattagtgattgttgcaggcggcgtagcgctgctgctgctgctgatgattcgcttcaagctgaacggctttatctctctggtgctggttgccctggcggtcgggatcgcacagggcatgccggtcgataaagtcatcggctccatcaaggccggcgtgggcggcacgttgggcagcctggcgctgatcatgggcttcggcgccatgctcggcaagctgctggcggactgcggcggcgcgcagcgcatcgccaccacgctgatcgacaagttcggcagaaaacacattcaatgggcggtggtgctgaccggcttcaccgtcggcttcgcgctgttctacgaagtgggcttcgtgctgctgctgccgctggtgttcaccatcgccgcttccgcgcgcatcccgctgctgtacgtcggcgtgccgatggccgccgcgctgtcggtgacccacggcttcctgccgccgcaccctggcccgaccgccatcgccaccatcttccatgccgatatgggtaaaaccctgctgtacggcacgctgctggcgatcccgacggtgatcctggccggcccggtttatgcccgcttcctgaaaggcatcgacaagccggtaccggaaggcctgtacaacccgaaaacctttaccgaagcggagatgccgagctttggcgtcagcgtcgccacgtcgctggtgccggtgatcctgatggcgctgcgcgcggtcgctgaaatggtgttgccgaagggccacagcctgctgcgcttcgccgagttcttcggcgacccggtgatggcgaccctgatcgccgtgctgatcgccatcttcaccttcggcctgaaccgcggccgcaccatggatgaagtgatgggcaccatcaccgattcgattaaaatcatcgccatgatgctgttgatcatcggcggcggcggcgccttcaagcaggtgctggtggacagcggcgtcgagcagtacatcgccggcctgatggaaggcagcaacgtttcgccgattctgatggcctggtcgatcgccgccgcgctgcgtctggcgctgggttccgccaccgtagcggcgatcaccgccggcggcatcgtcgccccgctgatcgccaccaccggcgtcagccctgagctgatggtgattgcggtcggttccggcagcgttatcttctcgcacgttaacgatccgggcttctggctgttcaaggagtacttcaacctgagcatcatggaaaccatcaaatcctggtcggtgctggaaaccatcatctcggtgtgcggcctggtgggctgcttgctgctggcgacggtcgtataa

SEQ ID NO: 426189 - DNA, 996 bp, Serratia marcescens
atgaagaaaaaacggccggtactccaggatgtggcggacaaggtgggcgtgaccaagatgacggtgagccgttatctgcgcaatcccgaccaggtttctgccgccctgcagcaaaaaatcgccgtcgcgctggatgagctgggttacatccccaaccgcgcgccggacatcctctccaacgccaccagccgggcgattggcgtgctgttgccgtcgctgaccaaccaggtgttcgccgaagtgctgcgcggcatcgaaagcgtcaccgacgcgcacaactaccagaccatgctggcgcactatggctacctgccggagcgtgaagaagaacgtctgacctcgctgctttcttacaatatcgacggcctgatcctgtctgagcgccatcacacgccacgcaccctgaaaatgatcgaggtggcgggcattccggtggtggagctgatggactgcgtctcgccgtgcatcgatctggcggtgggcttcaacaactttgaggcggcgcgccagatgacccagcagatcatcgcgcacggccaccgtcacgtggtctatttcggcgcccgacaggatgaacgtaccatcatcaaacagcaggggtatgagcaggcgatgcgcgaatccggcctggagccatacagcatcatgaccgcacgctcttcctcctattccgccggcggcgagctgctgcgccaggcgcagcgcgactatccgcagatcgacagtatcttttgcaccaacgatgacctggcgatcggcgcggccttcgagtgccagcggcaggggctgtcgatcccgcaggacatggcgatcgccggtttccacggccatgatatcggccaggtgatggtgccgaagttggccagcgtgctgacgccgcgcgaacgcatggggcagatcggcgccgagcgcttgctggcccggctgcgcggcgaaacggtgtgcccgcgcatggtggacgtcggtttcaccgtgatccccggcggcagtatctga

SEQ ID NO: 426190 - DNA, 696 bp, Serratia marcescens
atgatttatgtacgtaaagcggaagaccgcggccacgccaatcatggctggctggatagctggcacaccttctcatttgccgactactacgatccgaactttatggggttctcggcgctgcgggtgatcaacgaagatgtgatcgacgccgggcagggtttcggcacccacccgcataaggacatggaaatcctgacctatgtgctgagcggcacggtggagcatcaggacagcatgggcaacaaggagcagatccaggccggcgaattccagatcatgagcgcgggcaccggggtacgtcactctgagtacaacgccaatcaggatcgtccgctgcacctgtaccagatttggatcattccggatcaggtcgggctggagccgcgctacgagcagcgtatgttcgacgcgccgcagggccgtcagctggtgctgtcgccggatgcgcgcgacggttcgctgaaggtgttccaggatatgacgttgtcgcgttgggcgctgaataaaggcgagcagggtgagtatccgatcgccgccggccgtcgcatttggatccaggtggtgcgcggcaaggtctcggtcaacggccaggccgccggcatcagcgacgcgtttgcggtgtgggatgaatcgggtctgacgattcaggccgacgaagagagcgaaatcctgctgttcgatctgccgccggtgtga

SEQ ID NO: 426191 - DNA, 516 bp, Serratia marcescens
atgagcgagatcgtgatacgccacgtggaaacgacggatgcgcaagccctgcatcatctttattctcagacgcccgtctaccgcgatacgctgcagcttcctctaccgtccgtcgagtcctggcagaagcgcctcgccaatcccgaaccgggtacgcataacctggcggccttcatcgacgggcagcttaccggccagctggccgtcatgctgaatcagcgcgtgcgccgccgccacgtggccaccttcggcatcggcgtcgatccgcgctaccacggcaaaggcgtcggcagccgcctgatgcaggcgatgatcgacctgtgcgacaactgggcggccatcgaacgcatcgagctgacggtgttcaccgacaacccggcggccatcgcgctgtaccgcaaattcggtttcgagatagagggcaccagccgcgcctatgccatgcgcgacggtgtgctggtcgatgcctaccatatggcgcgtttgcgctccgggcagccgcacagcgatgcgtaa

SEQ ID NO: 426192 - DNA, 1047 bp, Serratia marcescens
atgccaacttccgccgccgggcgcccaggcgcccgcaacctgattaccgatgtgccgggcctgaaggtcggcgtggcgcaggacagccgggtgcgcaccggcgcgacggttatcctgccggacagcccggcgatcgccgccgtggacgtgcgcggcggcggccccgccacccgggaaaccgacgcgctgggcgaagacaatttggtgcagaccgtcgatgcgctgacgttcagcggcggctcggtttacggcctggcggcggcggacggcgtcgctgcctggctggggcaacagggtaaaggctacgcgctgcgcccggcgcccggcgtgccggtctccccgatcgtgcccaccgcctgcctgtacgatctggccaacggcggcgacaaaaactggcagctcacgccgccgtatcgccagttgggcatcgatgcggtcggcaaggccgggctgaattttccgctcggcaccgtcggtgccggctatggcgccatgaccggcatgggcaagctgaaaggcggcctcggctcggcatctatcattgccgccaacggcgctaccgtcggcgcgctggtggcggtcaacagtttgggtgcagtggtagcgcccggcacccgcgccttctgggcgacgccctatgaaattgacggtgaattcggcaacggcggcacggcggcgctggcgcaactgcgcgcccagggcgaagattggatggaacaagagccgcagggcggcagaaagaacaccaccctggcctgcatcgccaccgatctggcgctgacgcgagtggagttgaaacgggtggccatcatggcgcaagacggcatggcgcgcgctattcgcccgctgcacagcccgtttgacggcgacgtggtgttcgccctgtccaccgggcagcgcgaggttcagggcagccgcgaactggcggtgctgcaaatcggcgcgctggcggcggacaccctggcccgggcgatcgcccgtggcgtgcatgccgccacgccgtggccaggcagccaggtcgcaacctggcaaacgctcggcggctaa

SEQ ID NO: 426193 - DNA, 897 bp, Serratia marcescens
atgaataaagacaacgtgaaattggccattgcgccgatcggctggaccaacgacgacatgcccgatctgggcaaggaaaataccttccagcagtgcgtcagcgaaatggcgctggccggcttcaccggcagcgaagtgggcagcaaatacccgcgcgatccggcggtgctgaaaccgatgctggacattcgcggtatccagatctgcaacgcctggttcagcacttttttcgccgacggccagaaagacaaaaccatcgatgaatttatcaaccacatgaatttcctgcatgccatgggtgccagggtgatcggttgctccgagcagagcaagagcattcagggcaccaccaaaggcgtgttcgaagagaaaccgtacttcagcgatgaagagtggcagcgggtggccgacggttacaacgagctggcgaagatcgccgccggcaaaggcatgcaggtgtgtctgcaccaccacatgggcaccggcattcaaaccacggccgaaatcgatcgctacatgagcatggtcaacgacgacgtctacctgctgttcgataccggccacgcctactattcggaaggcagccagcaggcgatgatggcgatcctggagaagtatctgccgcgcatcaaccacgtccatctgaaggacgtgcgcgatgaggtggtggcggaagtgaaggccaacaagctgagcttcctcgatggcgtgaagaagggcaccttcaccgtgccgggtgatggcgtgatcgacttcaggccggtgttcaagctgctggacgagcgcggttacaaagggtggatggtggtggaggccgagcaggatccggcgctggccaacccgttcgagtatgcggtaaaagcgcgccgttatattcgggaaaccgccggcatttaa

SEQ ID NO: 426194 - DNA, 885 bp, Serratia marcescens
atgaagatcgcttttgatgtcgacgttatccgggatttgggcgtcaccaaaatggttcagcaggtggcggactggggctacaaatacatcgagcagtcgccgcacccgcagatcaacccgttttacaagcatccgaaggccagccgcgaaatcatggcggagtataaaaacgccctgaaagcgaccggcgtggagatctcctcatttatcgtggtgtaccgctggtccgggccgggggaggatcgccgccaggcggcggtcaaaaactggcggcggatgatcgaaatcgcggtggaaatgggcgtgcaggtgatcaacaccgaactggcgggcaaccccaacgaaccggagatctgcgaggagctgtggtatcgctcgatggaggaactgctgccgatcgtcgagcgcgagggtatccgtatggagatccagtcgcacccgtgggacttctgcgaactgagcaacgaaaccgccgatctggtgaaatcgctgcgcagcgatcacgtcaaatacctctacagcgtgccgcacaccttctactacgacaaggggcagggcgacgtggccggcatgctgcagtacgccggggacgatctttcccacgtgctgattgccgacaccatgaaccacaccaagcattgccgctatatcgtcaacccgccgggggtagacgcagcggtgcaccagcacgtcggcatcggcgaaggcgaggtgaatttcgacgccctgttccagacgctgcgcgacatggagtttgccaaccgcagcttcaaggtcggcggcgaatcgatcatctgcacttcgctgttcggctacccggaaaagatgccgagccaggcggtggcgaccagagagcgcatcgaaagagagctgttgggcaaataa

SEQ ID NO: 426195 - DNA, 1014 bp, Serratia marcescens
atgacattgaacattggggttatcggcaccggcgccatcggccgcgatcatatccgtcgctgcagcaaagtgttgcagggcgcacgggtggtggcggtgaatgacatcaaccgcgacaacgccgccaaggtggtgagcgatctgcagctggatgcgcgggtgtatgacaacggccacgatctgattaaggccgccgacgtgcaggcggtgctggtgacttcctgggggccgagccacgaagagttcgtgctggcggccatcgccgccggcaaaccggtgttctgcgagaagccgctggcggtgaccgcgcagggctgcaaaaacatcgtcgatgccgaagcgaagcacggcaaacggctggtgcaggtcggctttatgcgcccctatgaccagggctatcgcgcgctgaaacaggtgctgaccagcggccagatcggcgagccgctgatgctgcactgcgcgcaccgcaacccgacggtcggcgaagcctacaccaccgatatggcgatcactgacaccctgatccacgaaatcgacgtgctgcgctggctgctcgacgacgactatgtgtcggtgcaggtggtgttcccgcgcaagagcccgaaggcgttcccacacctaaaagatccgcagattgtgctgttcgaaaccgccaaaggcacgcgcattgacgtcgaaatcttcgtcaactgccagtacggctacgacattcagtgtgaagtggtaggggaaaccggcatcgccaaactgccggagccgtcttcggtgcagatgcgcagcggcgcccgcctgtcgaccgaaatcctgaccgactggaaggatcgttttatcgacgcctatgacgttgagctacagggcttcatcaacgacgtggccgcgggcaagttgaccgggccttccgcctgggacggctacgccgccgcggtgaccgccgacgcctgcgtggcggcccagctcagcggcgaaatcgtgccggtgaccctgccggcgcgcccggcgttttacaacaaataa

SEQ ID NO: 426196 - DNA, 1941 bp, Serratia marcescens
atgggcaagatcaggctaaccatggcgcaggcgctcgtcagattcctcgataaccagtatctgctggccgacggtgtggaaaccaaattcgtcgcgggcatttttgcgattttcggccacggcaacgtgctggggctggggcaagcgctggagcaggatagcggcgatctgcgggtgcatcagggccgcaacgagcaggggatggcccatgcggcgatcggcttcgccaaacagaagctgcgccggcagatctacgcctgcacctcatcggtcggccccggcgccgccaatatgatcaccgccgcggccaccgccaccgccaaccgcattcctttattactgctgccgggcgacgtttacgcatcccgccagccggatccggtgctgcagcaaatcgagcagtcttacgatctcagcatcagcaccaacgacgcgttccgcgcggtgagcaaatactgggaccgcatcgtgcggccggaacagctgatgagcgcctgcatcaacgcgatgcgcgtgctgaccgatccggcggaaaccggcgcggtgacgctgtgtctgccgcaggacgtgcagggtgaagcctacgactatcccgactatttcttccaaaaacgcgtgcatcggctcgatcgccgcccggcgaccgacggcatgttggcggacgcgttggcgctgctggcggccaaacgcaaaccgctgctggtgtgcggcggcggcgtgaaatactcgcaggccgggcgggcgctgcgcgaattcgccgagcgcttcggcattccgttcgccgaaacccaggccggcaaaggcacggtgccgagcgaccatgaattcaacctcggcggcattggcgaaaccggctgcctggcggccaatacgctggctcgtcaggccgatctggtgatcggcgtcggcacccgttacaccgatttcaccacctcgtccaaatggctgttccaaaatccggacgtcagcttcctcaatatcaacgtcagcgcctttgacgccggcaagctcgacggcgtgcaggtactggcggacgcccgcgaggccctgagcgaactgggcgcgctgctggcgcaggccgagtaccgcgccggctggggcgacgccatcgccgcggcgcgcagcgcccagcgtgaagagaccgagcgcgtttacgcggtggaatacggcggcgcaggctttgtgccggagatagacgatcacctcgatcgcgagcgggtgttcgccgaatttatcgcccagaccgattccgcgctgacccagagccgggtgctgggggtgctgaaccgcgagctgccggcggacagcgtgatcgtcgccgccgccggcagcctgccgggcgatttgcagcgggtgtggcacaaccgcggcgagcacggttatcacgtggagtacggttactcctgcatggggtatgaggtgaacgccgcattgggggtcaagctggccgagccgcagcgcgaggtgtacgcgatggtgggcgacggcgccttcatgatgctgcattccgaactggtcacttcgattcaggaaggttgcaagatcaacgtgatgctgttcgacaacatgaccaacggctgcatcaacaacctgcagatggaacacggcatggacagctacaccaccgaattccgcttccgtaatccacagggcggcaagctcgacggcaaactggtgccggtcgatttcgccatgctggcggcggcttacggttgcaaaacctatcgcgtcaccaccgagcagcagctgctcgatgcgctggccgacgcccgcaggcagaccgtgtccacgctgctggacatcaaggtgctgccgaagaccatggtgcacaagtatctcagctggtggcgcgtgggcggcgctcaggtggccgacagcgagaaaatcgtcgcagtggcgcgcaagctgcaggaaaacatcgataaggcgcgcgattactga

SEQ ID NO: 426197 - DNA, 1932 bp, Serratia marcescens
atggctacacaagaaaaacagcttgatgtcatttgtctcgggcgcatcgccgtcgatttctatgctcagcagatcggcgcgcggctggaagacgccggcacattcgccaagtacctcggcggttcttccggcaacgtggcctacggcaccgccattcaggggttaaaatccggcatgctggcgcgcgtcggcgacgagcacatgggccgctttctgcgcgaagaactgcagcgcgtcggggccgatacccgctgcctgatcaccgacaaacagcgattaaccggcctggtgatcctcggcatcaaggaccaggaaaccttcccgctgatcttctaccgcgaaaactgcgcggacatggcgctgacgccggacgacatcgatgaggcctacatcgcctcctcgcgcgcgctggccatcaccggcacgcacctgtcgcacccgaacacccgcgccgcggtgctgaaggcgctggaatacgcgcgccgccacggcctgcgcaccgcgctggacatcgattaccgcccggtgctgtgggggctgacgtcgctgggcgacggagaaacccgctttgtggaatcggaccaggtcacgcgcgagctgcaggaggtgctgcaccatttcgatctgatcgtcggcaccgaagaagagtttcatatcgccggcggcagcaccgacacgctgacggcgctgaaaaacgtgcgccgggccacggcggccacgctggtgtgcaagcgcggcgcgcagggttgctcggtgttcgagggcgaaatcgccgatggctgggaacaggtgaaactgcacgccggcgtgcgggttgaggtgctgaacgtgctgggggccggcgacgcctttatgtccggcctgctgcgcggctacctgaacgatgagggctgggatcaggcctgccgctacgccaacgcctgcggcgcgttggtggtctcgcgccacggctgcgcgccggcgatgccgaccaaacgggagctggacgactacctgctgcgtgaacggcaggtcacgcgcccggaccgcgatgcgcgcctgaaccacctgcaccgggtcaccacccgcaagcaacagtggccggaactgtgcgtcttcgccttcgatcaccgcaagcagctggcggacatggcacgcgaagccggcgtcggcgaggagcgcattccgcgcctgaaaaccctgctgctgaccgcggcgcaacaggccgccgcgcaggccggcctcaacggcaacagcggcattctggccgacaccacctacgggcaggcggcgctgaacgagatcaccggccagggatggtggatcggccggccggtagagctgcccagttcgcgcccgctgcgcctggagcacggcaatatcggctcgcaattgatcgactggccgcaggagcacgtggtgaagtgcctggtgttttatcacccgcacgacgcggcggaactgcgtcgcgagcaggatgagctgatcgccgacgtctaccgcggctgctgtaagtccggccacgagctgctgctggaagtgatcctgccggacaacaaccccgacaaggacgaacgttattacctggagatgattgagcacttctaccagtcgggcattcagccggactggtggaaactgccgccgctgagcgcggaaaactggcggcgggtcggtgcgctgatcgatacctacgatcccttctgccgcggcgtgctgatcctggggctcgactccccggaagcggtgctgaaggcgggctttgccgccgccgcggatgcgcgctgggtgaagggtttcgccgtcggccgcactatcttcggccaaccttcgcgccgctggctgcagggggaaatcgacgacgccgccctgatcgagcaggtgaaacaaaaatacctgacgctgatcggtttctggcgccagtaccgcccgcaggcgggcggcgcgcactga

SEQ ID NO: 426198 - DNA, 837 bp, Serratia marcescens
atgaacaacccaactcaactttcgctgttacaggacgagatccgccaccgttatgaaacgctgagcaagcgtttgaagcaggtggcgcgctatattttggataacagtaacagcatcgctttcgataccgttgcctccatcgccgcacaggccagcgtgccgccttccaccctgatccgtttcgccaacgccttcggcttcagcggcttcaacgaaatgaagcaggtgttccgtcagcatctgatggaagagacggtgaactataccgagcgcgcgcgcctgttccgccaaacctccaccgacgacaacgtcgcgccggagaaaccggcggaaattctcaacgtattcaccatggtcaacgcgcaggcgctgcagcagctggcgatgcagatcgcccccgagcagctggatcgcgccgtcgaactgctcaacaacgccgaaaacatctacgtgatcggcctgcgccgttcgttcagcgtcgcctcctatctcacctatgcgctgcgccatctggagcgccgcgcgtttcttatcgacggcctgggcggcatgttcaccgaacagctgagcatggtgaaaccgaaagacgtggtgatcgccatcagctattcgccgtacgcccgcgaggcggtggaactggtggaattgggcgccaagcgcggcgcgcagcagatcgccatcaccgacagccaggtcagcccgctggccgccttcagcgacgtctgtttcgtggtgcgcgaagcgcaggtggacgggttccgttcgcaggtggcctcgatgtgcctggcgcagacgctggcggtttcgctggcgctgaataacgcccgggacgagtaa

SEQ ID NO: 426199 - DNA, 822 bp, Serratia marcescens
atgtcttcactgcttgccaaatgtcagacgccgaacgccgaggggcgtattcagcacgtgacgccggaaaatgccgggtggcgctatgtcggtttcgacgtttatcgcctggccgccgggcagtcgctgcagctggagtgcggtgacaaggagctgtgcctggtgctggtggccggtatcgcctccgtcgccacgctgcgcgccgaatacccgcatatcggcaaacgcatgagcccgttcgagcgcacgccgccttacgcggtgtatgtgccgcaccacgatcgcatcgacgtgcgggcagaaaccgatctggagctggcggtgtgcagcgcgcccggcagcggccacctgccttcacggctgatcacgccggcggatatcggcgtggagcggcgcggcaaggggcgtaaccagcggttggtgcacaacattctgccggacagcgagccggccgacagcctgctggtggtggaggtttacaccgacgagggcaacaccagttcctacccgagccacaagcacgatcgggaagactcgccggacgaaacctatctcgaagagacgtattatcaccgtattcagccggagcaggggttctgcatgcagcgtgtctataccgacgatcgcacgctcgacgagtgcatgccggtctacaatcgggacgtagtgaaagtgccacgcggttatcacccggtggcgaccctggcgggctacgacaactattatctcaacgtgatggccgggccggtgcggcaatggaaattcacctgggaaaaagaccacgcctggattaacggcgacggctatcccgccgcgcaatag

SEQ ID NO: 426200 - DNA, 1506 bp, Serratia marcescens
atgaaaaccgtgggtaactttattgacgggcaggtgtgcctgagcagcagcaatcaaaccgtcgacgtgcacaacccggccagcgggcaggttgagcggcgcgtcacgcagagcaccgccgccgaagtcaagcaggccatcgacgtggcccatcgggcgtttgccgattggtcgcgcaccacgccgctgcgccgcgcgcgcatcatgttcaatttcaaggcgctgctggaacagcaccgcgacgagctggccgagcttatcgtcagcgagcacggcaaggtgtactcggatgcgctgggcgaactgacgcgcggcatggaagtggtcgaattcgcctgcggcatcccgcatctgatcaagggcgagtattcgccggacgtcggcagcggcgtcgacagcttctcgctgatgcagccgctgggcgtggtggcgggcattaccccgttcaacttcccggcgatggtgccgatgtggatgttccctatcgcgctggcctgcggcaacaccttcatcctcaagccgccggcgctggtgccttccgcctcggtgcgcctggcggaactgctgaaagaagccggcctgccggacggcgtgttcaacgtggtgcactgcgccaatgaagacgcggcgcagctgtgcaccgatccgcgcattcaagcggtgagcttcgtcggctcctccaccgtggcggaacatatctataccaccgccagcgcgcacggcaagcgggtgcaggccttcggtgcggcgaagaaccaggcgatcgtcatgccggacgccgatctggacgccacggtcaacgcgctgatgggcggcgctttcggctccgccggcgagcgctgcatggcgctgccgatcgccgtggtggtcggtgacgacaccgccgataaactgatcgccaaactgaagccgctgatcgcgcagctgcgcgtcgggccgggcttgcagcagggcggagaagagaatgaaatggggccgctggtgtcgtccgcccaccagaaaaaggtgctgggttacatcgatctgggcgtggaagaaggcgccaccctggtggccgacggccgcaattatcaggtgccgggctatcctgaaggctactacgtcggcggcacgctgttcgaccatgtgaagccgaacatgcgcatctaccgtgaagagatcttcgggccggtgctgggcatcgtgcgggtgccggattaccgcaccgccatcgacacggtgaacggccacgagtttggcaacggcagcgccatctttaccggcagcggccactacgcgcgccagttcgtgcaagaagtgcaggccgggatggtcggcgtcaacgtgccggtgccggtgccgatggcgttccacagcttcggcggctggaagcgctcggtgttcggcgcgcttaacgtgcacggcaccgacggcgtgcgcttctacacgcgcatgaagaccgccaccgcgcgctggccggccgggcagcagacggtgtccgaattcagcatgccgacgctgggttaa

SEQ ID NO: 426201 - DNA, 1443 bp, Serratia marcescens
atgtcatatcagcgtaagcacaataccggctacatattgcgaatttgcggcatcgccgccctgggcggcattctgttcggctacgataccgccgtgatctccggcgcgatcgaagcgctgaaaacctatttcaatctcagcccggccgaaaccggttgggcggtctccaacgtggtgatcggctgcgtggtcggcgccttcgccgccgggccgctggcggcgcgctggggccgtaaaaaggcgctgatgctggcggcgctgctgttcaccgtttccgccgtcggcgcagcattggccccgaccttcacctggttcgtcatctaccgcatcatcggcgggctggcggtcggcatcgccgccaccgtgtcgccgatgtacatgtcggaagtgtcgccaaaggacatgcgcgggcgcgcgctcagtatgcagcagttcgccatcgtgttcggtcagatcgtgattttctacgtcaacttcaaaatcgccagcctcgccagcgaagcctggctggtggaaatgggctggcgctggatgttcgcctcgggcgtcatcccctgcattctgttctgcatcctggtgttcgtcattcctgagtcgccgcgctggaacgtgatgatgggccgcgacgatcaggcgctggcgatgttgaccaaggtttccaacgccgcccacgcgcagaatctgctgaaagaaatcaaagactcgctgcagcaggatcaacagcagcggcatcggaagctgaactacggcgatgtgcgggtgcgtttcatcctgttcgtcggctgcatgatcgccatgctgcagcaggtgaccggcgtcaacgtaatgatgtattacgcgccggtggtgctgaaaaccgtcaccgaaaacgcgcaggaagcactgtttcagaccatctggatcggcgtgctgcagctggtcggttcggtcatcggcgccatgctgatggatcgcatgggccgcattccgctgatgcgttacggcacgctgggcgccatcgccggcctgctgctcacctcgtacgcgctctacacccaggccaccggctatttcgcgctgttcggcatgctgttcttcatggtgttttatgcgctgtcctggggcgtcggcgcctgggtgctggtgtcggaaatcttcccgaaccgcatgcgcgcgcaggggatgagcatcgccgtcggctgcatgtgggtcgccaacttcgcggtgtcgcagtcgttcccgatgatcaacgaccacccttacctgttctcgcatttccacggcgccttcccgatgtggatcttcgccgcctgctgcctgttcagctactggttcatcggccgctatattccggaaaccaaaggcgtctcgctggaaaaaatggagcaggtggtgctggctaaacgccaccgccaccccctgcccgacggcaagccgctgccgctggaaaacggcaaatcctga

SEQ ID NO: 426202 - DNA, 837 bp, Serratia marcescens
atgaccattgcactggaccgcttctgcattaaccgcaagatcgcgccgaatctcgatctggacagttttttccgcctggtgaaacgctgcgggctcagtaaggttgagctgcgcaacgatatgcccagcggcaaggtgaccgacgatctgagcgacgcgcagctcaatgcgctcgctgcgcaatacggcatcgagatcgtcacgatcaacgccctcggcatgttcaatctgatggacaacccggcggcgctgcagcagcgcgccgaagcgttgctggcgcaggcgcaggccatccacagccgggcgctggtgctgtgcccgcactgcagcgccgatgacacgcgcagcgagcagcaaaaacgcgacgacaccctcgccgcgctgcggctgctggcgccgctgtttgcccgctatggcgtgcaggggtacgtcgagccgctgggcttcggcatcagctcgctgcgatcgtcgctgctgacccaggcgctcatccgcgattcgggcgcgccgtaccgcatcgtgctcgatactttccaccactatttaagcggtgtggcgcaggccgacttcgacgcgcagatccaggtggcgcagatcggcctggtgcatctgtccggcgtggaggatgggcgagataaaggcgcgctgagcgacgaagagcgcatcatgttgagcgagggcgatcggctggagagccgccgccaggtgcaaaacctggaacgcctgggctacaccggcgtctatgccttcgagcccttctcttcgcagctggacggctggagcgaggcggatatcgaacgggaaatccgccagagcatcgccctgctgcaagggtaa

SEQ ID NO: 426203 - DNA, 774 bp, Serratia marcescens
atgaatcagcataacatcaccaacgaatccttaggcttgtcgatgatcctggtggtggtcgccattctgatcagccaccgggaaaagctggcgctggaaaaggacattatctggagcatctgccgcgcggtggtgcagctgatcatcgtcggctacgtgctgaagtacattttcgatctggataacgcggtgctcaccgtgttgatggtgctgttcatctgctttaacgcggcctacaacgccaagaaacgcagcaagtacgtcgaacacgcgttcgtgacgtcgtttatcgccatcaccaccggcgcggtgctgacgctggcggtgctggtcttgactggctccatcgaatttacgccgatgcaggtaatccccatctccgggatgatcgccggtaacgccatggtggcggtgggattgtgctacaccaacctcggccaacgtttcaaaagcgaacagcagaagattcaggagatgctcagcctgggggcgacgcccaagttcgcttcggcggcgctgatccgcgacagcatccgcgcttcgctgatcccgaccgtggattcggcgaaaaccgttgggctggtcagcctgccgggcatgatgtccgggctgatcttcgccggcatcgatccggtgaaagcgatcaaataccagattatggtgaccttcatgctgctttccaccgccagcttgtcgaccatcatcgcctgctatctggcctaccgtaagttttacaacgcgcgccaccagctggtggtcggcaacctgaagtaa

SEQ ID NO: 426204 - DNA, 678 bp, Serratia marcescens
atgaaggaaaagaaagacatactgagattggatgatattcattatcaaatagacaaccaggtgatcctggactccgtctctttcacgctgggtgaaggcgagttcaaactgatcaccgggccttccggctgcgggaaaagcaccctgctgaaaatcatctcttccttaatggatccgaccagcggaaacctctatttcgacggacgagcgatcgccgagatgtcgccggaggcgtatcgcaaacaggtttcttactgcttccagacgccggcgctgttcggcaatacggtttacgacaatctggcgctgccctaccagatccgtcaacagtcgccggatgaacgaaaaatgcaggccgatctggcgcgtttcgggctgccggaggcgatgctgaccaaaagcatcaatgagctgtccggcggggagaagcagcgcgtgtccctgatccgcaacctgcagtttatgccccgggtgctgttgctcgatgagatcaccagcgcgctggacgaggaaaataagcgcaacgtcaatgagatagtgcatcagctggtggcggagcaccggctggcggtgctgtgggtgacgcacgataccgaagagatagcgcatgcggacgaggtgatcaccctgcgcgcgcacggcgccgagcaacaggagcaacagcatgaatcagcataa

SEQ ID NO: 426205 - DNA, 288 bp, Serratia marcescens
atggccaaggtgccgaaaacgtttgaaagtagaaaatcgctgatgctggatgtgttgcggggattgtgccgggatcttgtggaaggggccgggggcctgcatcccccgccggagcagtggccgaagacgcgcgagctggcggataaatgcggcgaaaacatttataccacccgcaccctgctgctggcgctggaaaaggagggcaaggtccgctgcacccaccgcagcatcaacaattctctacgctggtacagctgcgacgaacaggcagtgataaaaaaagagtga

SEQ ID NO: 426206 - DNA, 537 bp, Serratia marcescens
atgaaactgaataaattaatgctggcgaccgccattgctttttctaccgcctccgttgcacatgcggcgccgaccccgaaccagggcagcggcaccgtgacctttagcggtgaaattatcgatgcgccttgcagcatcacgccggactccgtcgatcaaaccgtcccgatgggtcagatcagcagccgcatcctggccaaagaaggcaaatccagcgccgaacccttcagcattgagctgaaagactgcgcgctcaacaccatgaaaaacgtcaaggtgaccttcaccggcacgccggatgccgtcaacagcaaattgctggcgctgagcggttccgccagcggcgcgggcatcgtgatttacgaccagctgcacgccaaggaagttgagctgggcaccgcaacggacggccagggcctgaacgaaggcaacaacgccctgaaattcgccgcatacctgcaaggtaacagcgcttccggcgccgtcgtgccgggccagttcaccagcgtggcgaactttaccctggcttatcagtaa

SEQ ID NO: 426207 - DNA, 552 bp, Serratia marcescens
atgaccatccattggcgaggcgcattgctgatcgcgctcagcatcggcagcgctagcgccacggcgaaaactcagggccacggcaaagtcagcctgggcggcgaaatcgtcgaaacgccgtgcaacatcgccggcgacagtttggatcaaaccgttgatttcgggctggtttcaatgagcgacgccgggcgagatgcccagccgagcctcatcggcagccgccgccacttcgccatcaggttggtgaactgcgaactggccagccagataaagcccgattttatttatcgcgcggccaacctcaccttcagcggcatcgcggatagccaagatccgcaatggctcgccgtccatggcgaggcgcgcggcatggctatcgagttgctgaccgacgccggcaccccgatcccgctcggcagcacgacggcggattatctgatcgttgccggcgataacacgctgcgctttggcgcccagctgcgcattcaccccgacagggcacgggcgggcggtttcagctcattggccaaattcaccctgtcttatttgtag

SEQ ID NO: 426208 - DNA, 2502 bp, Serratia marcescens
atgagtgatcattctatgacgtctttactgacaataaaaaaaacgcccatcatcgtcattctctctgttctctgggcaaaaccggtcttttccgccacggaattcaataccgacgtgttggatatcggcgaacgcagcaaagtggacttatcccgcttttccgacgccgattacgtcatgccgggcacctatctgctggatatcaaaatcaaccagaaaacgctgccccagcgcagcattcagtatttcccgtcgccggataacaagagcggcagccaggtgtgcctgccgcctgacctggtggaaaaaatggcgctgaaagaagaagcggccaaaaaagtcaccctgtggcgcgacaaccagtgtgccgacattcgcggcatcaaaggcgcaacggtttccgatcgcatcagcggcggcgtgctggcgatcaccattccgcaggcctggatgaaatactccgatcccgactggacgccgcccgagcagtgggacgatggcatccccggcgtgctgctggattacaatctcagcggccaaatcggtaaacagcaccacgacaacggcaccgccgaaagcctcagcagctacggtacgttgggcgccaacctgggcgcctggcgcctgcgcgccgattatcagaccgatttcaaccaacaatacggccggcgcgacagcaatttcgactggaatcagatctacgcataccgcgcgctgccgatgcaggccgccaggctgacgctgggtgaaacctacctgaattcgccggtgttcgacgcctaccgttttaccggcctcaacctcgccagcgacgagcgcatgctgccgcccaacctgcagggttacgcgcctgaagtacgcggcatcgccaaaagcaacgcgcggatcaccgtctctcaggaaggccgcacgctgtatcaaaccacggtgcccgccgggccgttcgccattcaggatctcagcagctcggtacgcggcaaactggatgtgaaagtggaagaacaagacggcagcgtttccacttttcaggtagataccgccagcattccttatctgacccgccccggctacgtgcgctataacgtggcgctgggcaagccgtctgcctacgatcaccgcacgcaagggccggtgttctccgccggcgatttctcctggggcttgagcaacgcctggtcgctgtacggcggcgcgctgctcggcggcgattacaacgcctgggctctcggcctggggcgcgacctgaacctgttcggcgccctgtcggtggacgccacgcagtcgatcgcgcgcctgcccgatgaacccagcgccaaaggcatgtcattcaaggtcaactacgccaaacgtttcgacgagctcaacggccaaatcacctttgccggctaccgcttttcgcagcgcaaatttatgaccatgtcgcagtacctgcaggcgcgctacggcgacattgacgatcgctacagcggccgacaaaaagagttgtataccgtcaccgccagcaaaacctttatggcggaggacagcgctcaggcgatcaccgcttatctgacctactcacaccagacttactgggacgcaggcgcgcaaaaccgctacggcatgtcgaccagcaagctgttcgacttcggcgggatcagcaacatcaccgcctcgttggcggcctatcgcactcactatcggggccgcaccgacgatagcgcgatgctcaatttcaccgtgcctatcggcgagcacaaccgtctgggctacgcgctgcaggtcaataaccgcgacgtgacccaaacggcgacctacaccgacaacagcgacatcaacaatacctggcaggtcggcagcggcgtcacccagtccggcaaaccgacggcgagcggttactacacccataacgcgtcgttcggcacgctcaacgccaacgcgtcttatcagcagggcagttactcctcgataggcggaactttccgcggcggcctgaccgctacccggcacggcgtcgccgcgcaccagaacgccggcaacggcggcagccgcatgatgctggataccaacggcgtcgccggcgtgccgatcaacaacggccgcgcttacagcaaccgcttcggattggcggtgatctcggacatcaccagctactacaacaccgatacgcgcatcgacgtcaacaagctggcagacgacgttgaagccacgcgcgcggtggtgcaaggcacgctgacggaaggcgccatcggttatcgccacttcgaggtggtgaaaggcagcaagctgttagccaccatcaaactggcggacggtagcgaaccgccgttcggcgccacggtgctgagtgcaaccggacgggagatcgcggtggtgaacgacggcggctcggtgtatctgaccggcgtccaaccggaagagcggttggacgtcgcctgggaaggccgccgtcagtgccgcatcgccatcccaggcgccgccaaaccgctggaccggctgctgttgccgtgtgccaaaccgtaa

SEQ ID NO: 426209 - DNA, 744 bp, Serratia marcescens
atgaacaaacattcgatagcagtaaccgcgggcagcctggcgttgatgacgctggcttcgacggccgacgcggcgatcgcgttggatcgcacgcgcgccatctatgtgagcgacgccaaatcgatcagccttaacataaccaatgagaacaaagagttgcctttccttgctcaggcctggatcgagaatgcgcaacatcaaaagatcgtttcgccgctggtggtattgccgccgttgcaacgggtggaagccggagaacgcagcgtcgtgcgcattaccaaaacgccggaagccgagctattgccgcaagatcgcgaatcggtgttttatttcaatttgcgcgaaattccgcccaaaagcagcaaagccaacgtgatgcagctggcgctgcaaacgcagatcaaactgttcttccgcccgaaggccatcgtcgcaccgcagggtgagatatggcaagaacagctggtgttccacaaaaccgccgacggtttcaccatcgaaaatccgacgccgttccacatcacgctgaccggcatcgcccgtcagacgcagaaacaaggcggtggcgcgatcggcgattttcagccggtgatgctgtcccccaaatccagcgaaaaagtgcgtttgcgcgaccatgggttcgacgccttcgtcgtcacctatatcaatgatttcggcggccaccccgagctgcgcttcacctgcagcgctagcctctgcaccgccgcacccggaaaaaaataa

SEQ ID NO: 426210 - DNA, 612 bp, Serratia marcescens
atggctgacttcaccggccgcctgcggcctctgctgatcggcgccttgctgctcggcaacggcgccgcaatggcctctccgccgggagaggttcagggcaccagcggcaccgtcggttttcagggcgctctgctgagctctccctgcagcctggcgccggacagccgcgatcagtcggtcgatctcggtgagatcggcacgctcgccttccggcgtgtcggcgatcaaagcgcgccggtacgttttcgtctcgcctttacccattgcctgctgggcgccaaggcgctggcagacaatccggccggcatgcgcaacggcgacgccggcaggctttacctgcggggggagcaggccgccacgctggtgttcctcggtgaaagcgatcccgacaatccgcagttgctgaagctgcacggcggcgtacaaggcgttggcctgcggctgaaagatcaacggggccgcgcgctgtccctcaaccaacccggcgccccctatgtcttgcagcccggcggcaatacgttgtggttcagcgctcaattggaatcaacccgtccgttcatcgaagcaaaccaattcaaaggagtggtgcatgtccagctggtctatttataa

SEQ ID NO: 426211 - DNA, 945 bp, Serratia marcescens
atgtccagctggtctatttataaacgcctggcgttgctgggttgcctggcgacgccattcggcgctcaggcgctggaatgccatctgaataccgagaacggcattaccgaagagagcgaggatatcggccggttgaccataccggccaccttaccggtcggcagccggctttggacctccaaaccgatgagccgcgacgttatgtgctgggcgcacgccagcaaacccaagggggaatgggtttacttctatcccaatccggacaaccggcagttcgccgccggcatcgccatgggggtgatttataacggccgggatctcggcttgatcaactcccgagtacaaaccgatatgtttcgtacccccaagcaacgggagctcggtcatgtcaactatcaggtttatttgcaaaaaaccggagaaatcaccgcagggggcgccagtcagatcgccgtttttcagctcgatggcgtaggcggcatcaacgtccacccgggaaaaaattaccgtttcaccctaaccgggctggataaaatcaaggtgatccagtgcgccgcttcggtggagctttcaaccccggaaggcgttgacttcggtgagatcccgacctggaaacccaatgcgggcaccgtagcgagcaaggatttcagcatcttgatccgcaaaaacggctgcagcgacagcttcgcgctggaggccaatttcatggtgaaaaacggcacgctgaccgacgctaccggcttgaatatggacaatggttcaaccttgcgcatccacgataattccaaccccaaatggattaaatacaatcagttcgacagctttgccgacatgagtggccgcgatcaggtgcaaaaatcctacagcgcctcattgcaggccagcggggaaggacaggaaggcaatttccgcaagaccgtaatcttgctgattaattatatttaa

SEQ ID NO: 426212 - DNA, 540 bp, Serratia marcescens
atggtggtgatgatgaagagctatcggacaatcaccgctctgtgcggcatcggttttctattttcctccgcagtcgcggcggaaaataaggaaatagactttttcggctccgtggtaagcagaccctgcaatatcgacccgcagtctcttcaccagaccgtcgagatggatacggtgttgatcaaaaccttgtaccgctacggccataccaaccccgtgtcattttccattcgcttaaccgactgtaaaaccgccgttttcaaatcggtcaccgccacctttaccggcaccgaagatgccgaactgccgggcaagctggcgatcaacaatggcgccaacggcgccgccatcgcgctgttcgacggtgctggcaaagcgattgacctgggcacaccggccgatgcggtgacattgcaagacggccccaacgccctgaggttcagcgcctatgtccaggcccggccgagcgcgatgaaagataaaagccttaccgaaggcgaattcagttccgtcgccaattttgtgctggcgtaccaataa

SEQ ID NO: 426213 - DNA, 624 bp, Serratia marcescens
atgccagatattcgcttcacgctgttcgacagcgataacttctaccagcaggggctgcgtctgctgctgcaggactatctgcactccctgaacgaatgccagcgcctgtacccgcagttctcgccgctggcgctgcaggcgttggataacatcgaaatcgtgttccgcacgccggaagagcgctggggctgcgcctgctgctaccggagcccctacggcatcccgcgccagcggcagctgaccttgctgatcctcgacgacacggcccagcaacaggtgaaaaacctgtctccgctgttcagcatccaccggcgcgactcggtttacgccattcgcctcaagctgcagatggcgctggaaaaattcattcagcagccgtggatggcgctgcacgccgccgacatatggaaatgccaggcctgccgcctcgccgcgctgagccactgtgagaaaaaggtgctgggcctgatgagcagcggcatgtccgcctgtagcatcgccggcctgctgcagcgcagccagaaaaccatcagcgcccacaaacgttcggcgatgcgcaagctgaacgtgcgcaaaaacagcgagttgaatcgggtgctgctgaatcagcgggagctgaattaa

SEQ ID NO: 426214 - DNA, 1008 bp, Serratia marcescens
atgaaacattctaaaaaaataggtttccttctgctcatgttactggttttgtcagggtttctttattggttgctttattggcgctactttcaaaccaccgacaatgcttacgtgcaagcagacattacaaacgtcagcgcccgcatcagtgcggtggtggttaactctatgattcgggacaatcatcgggtgaataaaggcgacttgttggctcagttggacgacagggagtttgttgtcgcgttgcagaaagcagaggcgactctggcgcaaagtcgggcggcgttgacgaatgcccaggcaagttatcaaatgcaaaaaagtgctattgacgagtttcgcagcgatgtgaattctgctgcagccactctgcagtatgcgcatcagcagtatctccgttttcaaattttgcagaaaaagaattatgtttccaagggagacatggataacgccacatccagttatcgcgtcgcagaggcaaaataccaccaaacgcaagcgagcttgaaaacgcaaagcgataaactccaggtcttgcaaagcgaaattgagcaaagccaggctaatgttgaacaggctcaggcaaacctggaacaggcgaaattgacattgagttacacgcggattattgcgcctattgatggggtaatcagcaaccgtagtttgcaagtgggtatgatggttcaggcggggcagtccattgccagtatcgtctccggagcggccccatggataagcgccaattttaaggaaacgcagaaagcacgtatgcgtaaaggattgcctgtggaggtgaaagttgatgcgtatccagggaaaatatttcatgccagggtggatagtatctcaccggctacaggagcaacttttgctttattaccaccagacaatgcgacagggaacttcaccaaaattgtccagcgcgtcccagtaaaaattgtttttgactctccgcaacaaatagacagcggcctttcggcctctgttacggtagatacgcggggatag

SEQ ID NO: 426215 - DNA, 1020 bp, Serratia marcescens
atgagtcaatttgagaatgcatcgatcgtattgaacagccaccctgatggcgccgctacgctggaaaacttcagattggagaccagctcgttgaggccattggatccaggagagtttctggttgagaacaaatggttatcgatcgatctctatctccggccacggctcaataaaagcaccaaatacgtgagcccgataaagctgggggaagtgattcagggagaggctattggggaaatcgtggcttcgcgtaatcctttgtttaacgttggcgatcgcgtattcaccttctccggttggcaaaagtattatatcggtgatgctcaaaacttcactgttcatcgtttgccggagacaacattaccaccttctatttttctcggtgcggtcgggacgccgggccgatcggcctatttcggtttaaacaaaatcgcgaagccaaaaccgggtgaaacattggtcgtttctgccgcctcgggctcggttggctccgtcgttgggcaattgggtaaactggcgggatgccgcgttgtgggattggccggcagcgaggataaatgccggtatgtcgtggaggagctgggttttgacagttgccttaactacaagactgccgaccttaaccgggatttgcgcgccgcgtgcccccagggtatcgatatctattttgagaacgtgggcggccgcgtatcactgtttgtcgccaagttgctgaatgagggggcaagggtgcctatctgcggtaatgcggccaattacaataaaggcactgatgttgatgcatccggcccggcggactttttctctgccctgccggatgcgcctttaaatcgtttctttttggtaaccgaatggttcaaagactacgccgaatcagatgcattcttgttaaatgcggcagagaacggtgtgttgaaataccgagaaacaatagtcgatgggctggaaaatgcgcctcaggcttttattgattcacttaatggaaaacatttcggcaaacaattgatacggatgtgctaa

SEQ ID NO: 426216 - DNA, 624 bp, Serratia marcescens
atgagtcagcgctctatgacgatatggcactacctgatgtcgcgcgatgcttgcattactatcattaccccgatcgtgctttataacatcgccttttggtggggaggcgcgggtttcgcattactgctgacggctatttattcaggcgcagtggaaatatttaacaagcgtagcggttcattgtcggtgatcgcattaattctggtttcaggcgttagtcactatttgtatttacgcggctatgctccgttcgcaatcaagaaagaaaatgtgtttctcgcggtcagcggagcatcttcagtggtggtggtcttcggcttctattctctggtaggcaagccaatgatacgtacgctggcagaacaggcgatgccaaggttgaaagatattcccgtttacggtaccgctcaatacgcaaaagtgtggcacgaagtatcattggcgtggatcttggttttccttctgaaagccgtcggtgtatatggcctgtcaatgcgcgaggatctgcccgttgacacgattatttttatctgtggttggccactgactttgttgatggtgttgttcagtttttattggccgaaatatcgttggacgtcacatttgcgtaaaaaaggccgttaa

SEQ ID NO: 426217 - DNA, 1497 bp, Serratia marcescens
atggcgattttggatatccaaatcgccaattcatccatgaaagtgattcaaggcgcgctttctgcgacgctgaatgacagttcctggctgatgacgtcttattttaccgcagagatagtggcaattccgctttgtggttggctttgtcaggctctggggaccgggcgttatgcgctgtggtgcattgccggctttttgggggcatcgctgctgtgttctgccgcatggaatctgagttccatgatcgtgtttagggcgcttcaagggttcagtggcggggcgctaattcccatttcatttcgcttgattattgagatcctgccattaaaaaaacggccgttgggcatgtcgctgtttagcattatagggactttcgcgccggcggtagggccggcattgggaggctggttgacggataatttctcttggcacgccatattttatatcaacgcgatacccgctttgttgtcctgggggttgattcactatgctttaaaacaccctgttatcgactggaatattattcgtcgcggggactttgtcggcatcatttcggtcatgctgtgtttgggcgcgcttgaggtgattttagaaaagggcggtgaagaaaactggctagaatcgaatatgatatgcgtgttggcggtcatttccgctgttagtttcttaatatttatgtatgcccaattgacgcatgcccagccgcttatcaatattcgcttattccgggactacaatttctcgtgcgccatcttggtttttgccatgttgggcgtcgctatctacggtacgttattcttggtgccgtattacctgacgatggtacatgactacaatgcttctgatatcggtacggtggtgatctggatggggtttcctcagttaatcatcctgccttttatcccgttgcttattcaacgatataaccagaagtatctaatttgcatagggtttgttggtctggccatcagtgcctttatggactgtgcgatggacggcgactttgccggcccacagatggcctggtccatgttgatccgcgcattaggccagccctttatcatggtgccgctttccttgctggctacccgcaatattcagcaaaaagacagtgcctcttcggcggtgttgatcaatatattccgcagtctgggaggttcctgcggcactgccatcttaagcacctttttcatcacgcgcatttatacccatgtcgacgtcgttaagacgtcgttggtctccggcagcaatgcctttgccgggtatctcaatgacgttaaaagtctgatgatcgcgcgcggtttggccgttgacgtcatgagtataaaaagtacggctttcgcgatacttggcaaaagaatcgcccgtcagtcggaaatcatggcgtttaacgatctgtttctgattatgggcggaatgatgttggcaaccgcgttgcttgtgatgttctcttctcgcgattttcgtttgcatgtcaaaaaagagggtaaggaatga

SEQ ID NO: 426218 - DNA, 4074 bp, Serratia marcescens
atgactaaaatcagtagcgccatgctcaaatcgttgagtttggatgagttgaaaaaaattgccagggagaagaaaacgcaagtggtgttggcttccggtaaaatcatcagaaaacaagctgactcggccaggcggtacttccctgtgaccggttcacaacgcagtatttgggtattggatcagtaccttgacgacggtaaggcgtacaacaatccttatgccgtcacttgccgcgtcgagcatgacatcgacatggaggtagtgaaaaaggcgctgacctttctgacgaaaaagcatggcattcttcgcaccacattcaacgtggtggagggcgaactctgccagtgcgtaagtgatgaagtcctgttcaatttccactatgacgatattttgtctcttcctgagtacgagcgtgacgaatgggtagaaaacgttgcgcgtcaggaaggacagcgttctttcgatttgacttgtgggccactttcctattggcgcatgattaaaaccaatcgacatgaatatgtattgttgctgacgtttcaccatattatctcagatggctggacggtcagcttgttctttaaagagttcatggagatgtatttccaaatcctccatggcgagacaccgcgtacaaacgattttctgcaattctccgactatgcattggcagaagaacagtggtatgccacggcagaatatcaaaagggtttggcgtattgggctaaaaagtttgatgacgcgcaaggcctgcttgagataacgaccgatcgcccacggccagctaaaatgagcaccaaaggcagtatggcaagccacacttttgatcgggatttcacccagcgtttgcagatgcaggctgcacagctgggcgcgacgcctttccacatgattctttcggcctatatgctcttgttgcacaaatacagcaaccagcagcaaatcattatcggttgtccttttgccaatcgtaaccagcccgagactcagaatatgctggggttgtttatgaataccttacccctgaaactggatatcgttccagaggcgacgttacgagaaatcattggcgacgttcgctcagagagtgagcaagctcagctgcaccaggctattcccctcaatgatattcttgatgaaattggccatatccgaaatccgcaggttaatccgctttttcaggcggcgctgacgtatcaggtatttcctcattttcataacaacacgttgtttacctataaaccgcttaaaatcgattatggcgtatccaaactggatctaaacctgtgggttgaagaaagccgcggtagtttactgtttaccttaaactacaatcccgatttgtttaaccgcagtacgataacgcgtatgttgagcgatctgcgcacggtgttggaaacgctcatcgaacggcctcaaataaccgtgcgcgatctttcattggtgactcgcgaggaacatagccacttgctgagcgggtgtagacgcttgcttgacgccgttcccatggcggttcatcggcagtttgagcgtcaggccgatgctttggatgccgattcggtggctgtacgttgcgatggccgtcttttgagctatcgacaactgaacgagcaggctaaccgtctcgcgcactgtttgctggaacatggcctgttgccggggcagtcagtggcgctgtttatggccaaaagcgaacgctgtgtcgtggccctgctggcaatattgaaagctgggggatgctatgtgcctgtcgatatcactttgccgatggaacaggtcgactttattctgcgggacgcacaggcacgcttcgttgtggtggatgccggatcgccggcggtttcacagccgacaatctcgattgaccagtgccacggcgccgcgctgagcacgaatccccaattactgacaatgccgacagacgctcccgcttacatcatttatacctcaggcagcaccggtaggccaaaaggcgtcagggtcaatcatgttcagctaagccgatattgccaggtcatcgcctctgtcctggatcaacctgccggggcgcgatatggcatgttttccgccttcactaccgacttggcgcataccatgctgttcccggcgctgatctaccagggacaactggaggtgataagcactcagcagcttaatgatccgcaggcattgttctcctatctggagagtcatcccttggactgcatgaagatcacgccaacgcacctgaccgcattgctcatgtcaccccatgcgggtgcgctattgccacgtcgtcttttagtcttgggcggagaaagagtcccgacggcgttagtcaaacgcatacgtcaactgcaggctgactgccgtgtggtcaatcactacggccctacggagtgtaccgtcggtgtggcgacctataccttgccggacgatttgccggatgagatgggcgactatttgccggtcggcaagcccttggccgacagccacgtgttggtattggatccttatcaacagttagtctctatcggccttcctggtgagatttatcttggcggcgagcatgtggctgcaggctatatcggcttagaggagcagaatcgggcgaatttcatcccgcatccttatttggcgggtgaacgcctttaccgcactggcgacaaagggcgctggctgccggacggaaacctcgagtttttagggcgtttggatcgccaggtgaaagtgcggggctatcgtgtggaactggcggaaatcgagcacgtattgcagcagcaaccggcgatcgctcaagccgcggtaaaacagtggctgaacggtgcgggcgagagctggctggtggcgtattgttgcggcgaaggaaaggctcgcagcgcggaagtgcgtgcgtttttgcaaagcaaggtccctcattacatgcagccggatcagtgggtttggctggacagcttgccgttaacggccggtggcaaggtggactatggtgctttgccgcgcatgaacgatgccatacctcaatcggtgcgagagccggaagggaacgtcgaacaacgcttatatgccatttattgccgcgtgctgcaacgcgagcgattggatacgcgggatgactttttcgcgctggggggaaattcgattaccgcattgaagttggtgatcgaaataaatcagcattttggcacaaccctgtctttagggcagttgtttgagcacggcagtgtcggcgagttggcggcctttctgacgcaggctgaacggcaagtattatcgccgttggtgatgctgaataccggggtcgaggaagataaaccgacgctcttgatgattcatccggcaggcggaaacatcttgtgttattacccattagcgcgtgagttgggggccgactatccgatctatggcctgcaggtggcgaacttcggtgaagatcaggcctacaaccacgatatagaggtgctggccgcatgctatctgcagcaggcgcaggatattgcgcaacggcgaaatctggtgctgggcggatggtccctgggggcgacaatcgcgttcgaaatggcgcgccaactgcagcatgccgacgggcgaacgccaacggtgctgatactcgatcaacctgctcctcagatacagattgatcgcgccgcacagatgaatgaatttgaacggcttgcatatttcgcccgcaaggtggagcgttttaccggtgcgtcatttgcaatcgccgcacctgcgctggcagagatgtccgaagcgcagcgttcattgttgttcctgcaggaattcaagcgcgcaaaattggttcctgacaatattagcgcaacgcagttccagcattttctgacgattctacaggcgcatatcgctgcgacagatagctatcagggcaaagaatatgacggcaggatcgtggttgcggaggcggaggagattctgccggaccgcattgcacaagagatacccggactgggttgggctcgtctggctcgcggggggatgacgataataagcgcgcctggcaatcacatctcgatgatgaatccgcctcagataagccatacggccagccagctgcggaagatattgtcatga

SEQ ID NO: 426219 - DNA, 5496 bp, Serratia marcescens
atgaaatatcaaacaacgtgccatgatagggatatcgctatcgtgggaatgtctgcgcgcttcccgggtgcagaagataaggcaatgttctggaaaaatctgctagatggtgtagaaacgatcagtacgttcactgaagaggagcttagagccagcggcattgaagaggaaatgatcgcctcgtcaaactatattcgtcgcagaggcatcttgggtaatgcgcaatattttgacgccaatttcttcgatatcacacctcgtgatgcggaaattatggatcctcaacatcgggtatttttggaatgcagctggcatgcatttgaagatgcgggttatgtacccagtacctatcccggtaaagtcggcgtctttggcggaaccggtactgcgtggcatttgaataaagtcaatacgcatcctgatgtgcaaaagtacgtgagcggtgcttcagtggtgaccaataacgataaggattatgttaccaccagggtgtcgtacaagctgaatttaaaagggcccagcgttaatgtgcaaacggcgtgttctaccgcgatggtcgccgtggtgatgggtattaatagtctgttgaatggggaaagcgatctgatagtcgccggtggcgtttccctcgatacccctgaacgccgtggctaccaatacatgcaaggcggaatggagtccgcggatgggcgttgttatgcttttgattctcgtgccaatggcaccgtattcagtcgcggagccggcgttgtcatattgaagcgcttgagtgacgcattgcgtgatggcgaccatgtctatgcggtattgaaaggcggggcgattaataatgacggcaatctgaaggcgggctataccgcgccaagtatcgaaggccagatttcggtggcgaaacaggcgttcgacaacgcgcaggttcatccggataccatcagtttcgtcgaggcgcatggcaccgcgactgcgttgggggatcctatcgagttcacttcgctcagccagacgttcagtgaatttaccgacagaaaacaatattgccggctgggttcggtaaaaacgaatatcgggcatacggatgctgcttccggcatggcgagcttaattaaggcgtcattggcattggagaaaggggaccttcctgcttcactgcattatatttcgccaaatcccaatattgcatttgaaaccagcccgtttgtgatgaataccgaattgagcaaactggcgagttctgacgaaccgcatcgtgcattggtgaattcgtttggcgtaggggggacgaacgcctgtgtcattcttgaggctccgccgcgaacggagccaagcactcgccatgatggcttggttatgctgccattctcggcgaagagccgaactgcgttggaagcgatgaaacaacgtatgcacgatttcttggttgaaaacaaggacgtcaatcttggcgatgtcgcctacacgctacaggtgggccgccagccgtttgcgcacagcacggtcgtcgtagggcaggatcgtgaaacgttactggagaaattgaaccagccgtccgccaatatttcaacgttgacgaaaggcgataaggccgtggtgtttatgttccccggccagggcaaccaatacatcaatatggcccgtgagctgtacgccacttacccgaaattccgcgaagtgatggatcgctgctgtcgctatttggacccgatcttgggcgtaaatttattgtcgataattttccaaggcgacgaaggattaagaaaaaaccgtattaatgaaacccagtttacgcagcctgcgctatttattgtcgaatacagtctggcgcaattatggatgtcgtgggggatcaaacccgatgccatgataggccacagcgttggcgaatatgtcgcagcgtgtattgccggcgtgttctccctggaagatgcgctgcgcgcggtggcgttacgcggcaaactggtacaagcgctgccggctggcgcaatgcttgccgtgctgatggatgaagagtcgctgcgtcagcggttacagggcgacaaattggagattgccgccgtcaattacccggggctctgcgtggtcgccggcgatttggatgagattgaggtattccaacggcagcttgaagacaacaatgtgttttgcaagcatctggatacctcccatggcttccattcatacatgatggaaccggcattgccagcttttaaagaggtcatcgacggcattgaattgcacgccccaaaaatcccattcgtctctacggtgagtggcgattggataaccgatgcgctagccactgacagcgattattgggtgagacatgtgcgcaatccagtgctgttctctcacgcattcaaaacgttgatgtctgaagaacatcagcattatatcttcctggaagtggggccaggccgttctcttgaatcggccgcgaagcagcatttcaaggcggatgaaagcgcgttgatttactcttcgctgcctaccgcgaaggatgtggaattgacgggagaatatttacttacctcgctgggatgcctgtgggccagcggtgtaacaatctcctgggctcaattttacggtgatgaacatcgccgccggttgccattgccgggctatcctttcgaacgtaaggaattcaagctgccggcgctgaagcgaggagccgaaggaggacagagcgccagttccgtcagcgccctcaaacgcaaaaaagcggatattggcgaatggtttcacatgccggcctggaaacgcaccattcccgccaggttcatggcaggtagccgcatcgatccagactcggaatgttggctgctgttcgtggacgccatggttatcgccgaacatattcaaagacagctagcggaaagcgcacagcgcgtattgaccgtctggcgcggcactcactatgaggaggatgcggcgaacgggtgttacgttatcgatccctccaaacgcgaagactacgttcgcctgctgaaaagtgtgaagaacctggcgctgcgtcccactcgcatcattaatatgtggaacctttctgccgataacggcgcaccgcagtgccatggtgatggctatgcgctgcaagtcgacgcattttacagccctctttatttgcagcaggcattggtcagtgaaaacctgctggaaaacctgcacctcttgtttgtgaccaacaatattttcaatgtgacggaggaacggctgtattcaccgcaaaaagcgttggtcgttgggcctgcgcgcgtcttttatcacgagtatcccgaagtgcggtgccacgttgtggatgtggatttattcggctacacggcgccccatgatttagcacagcaattgattgacgaaagccatatcgatacgcatggcaatctagtggcttatcgcgggcgcaaccggtgggaggaagattatcaggccgttcatctgaagcaagatgatacgggaattgctgcggagctgaaggatgagggtgtctacctcattaccggtggtttgggcggactgggcatgttggttgcgggccatgtgtcagaggtcagcaatgcgactttgatcctgacttatcggactgagctgccgccgcgcgatcaatggcaagcgtggctgcagcagcattcggtggacgattcggtgagtgagaaaatcgcgggggttttacggctggaagaacgtggaaacaccgtgcatcttgcgcaggttgatgtctgcgattatgccggtatgcgcgatgtgctggccgggtttacccgcatagatggcgttttccataccgcggggattgccggcggcggaattattccgctgaaaaatgacgccgattgtgctggcgtgttgaatcccaaagtgaacggcagtttgattttggacgagctgcttaaagataaacagcctgatttcttcattcttttctcttcgatcacttcgattgtcggcgatgaggcgcgcatcgattattgcgcgggcaatgcgtttatggacgctttcgcccattaccgcaaccagcaacgttctgggcatacggtttctctcaactggggtaagtggggggatatcggtatggcggtgcgttggagcaatcatctgattgagcaaaaaaatagtaaatccgcacagtttgaagaagtagagggcgatttgttgacgttgattggccgtgagggaatgcaagagcgttatcgggtcaacctggcggtgcaaaaagactgggtcattgatgagcatcgcttgacgcatcagccgtcattggtcggcgcgacgatattatcgatgctgtacgaatggatgagccattttaaacctcaagagagattgcaggttaagaatctgctgttgacgcaacccgtcatttatcatcatgcctggccgcgcaacatgcagttgctggtcaccgcagagagtcatggttacaagtttagcctgcgaagcagaggcctgttggatctggcctggcaggagcatgcgctgggtttagtcagctcaaaagtggctgagtcagaggatgaaccggcatcgcttgagtctcttcgccagcgctgtacgaaagcattggcgtacgagccgctggagtgcgagctgggcaacgccaatactggcgatgtcttcctttcgctgagcccgcggtgggacaaccaccaagacattttgcaaggggaaaacgaatggttgatgcataaagttatcggttccgatttccatgacgattttgcgcgctatccattccacccggcgatgatcgacgccacggcgatccgctgcctgacttatatcacccaggaaaacttcctgccgatcagttacggcaaaataacctaccacgcgccgctggaaacggattgctatgcgcacctcaaactgaaggggccgtatcagcatacggacaatgccattacgatggatattgtcttcctgtcacatgccggcgtgccgttattgacgctggaaaattacactctgattaaaatgacccaagtcaatcaggtggtggagtcggacgagaaggcggcgcccgcggcggtgaaagtcaatcttgcggacaaggatattttgttcaatgaagggctcgatgcgctgaaacgccagctggcgcatttggaatttgaacaattggttattgtcaccagcgaccttgggcaactgatcgatgagtctatcccggctcaaaatgaaaccttattggagaatgaggaggaaaaagccgctgatggccatgtgcggcccgcgttgtctgtggaatatatggcgcccgaaaacgacatcgagaaggaaatcgtcaaagtttggcagtccatcctcggtatttctgggattggcgtgaacgataatttcactgaactcggcggtaattcactgttggcggttcaggttgtgtcgacggtatcaggtatttttgaaattgatattcgcgtcgatctgttttaccaggagcagaccgttaaaggattgtcaaaactgatccttgctgagttggaagtattgctgcaaggcgaataa

SEQ ID NO: 426220 - DNA, 1800 bp, Serratia marcescens
atggtatctgaagatattattcatgctagatttaaatggcagagtaatgctacgccggatttggtggcgttgcgatgtgataataacgcgctgacctatcaaaaactggaccaatatacggatgcattggcggagcgattaattagtcatgggataaaaccaggggatatcgtcggcgtttaccttaataagggaatggatctggttatcagtttattaggaatactcaaggcaggcgcctgctatttgccattggacccatattatcctgttaaccgtctggcatacatgattgaccatgctggtacgagactggtcattacgagcggtgttctggatcaggcgttgaaagacgcctcccagcgttgcgaatggttggacatcacgcgcctggacctcactttacctttggcatcggctttgccgaaagtcagtgggtccaatctctgttatgtcatgtatacgtccggatcaaccggtaagccgaagggggtgatggtcagtcatcgcacggttgtacagtatttgaaatggatgcaggctgcgttcaatctgtgccagcatgatgtggtactgaaccaatccagcttcagtttcgatgtttctgtctgggaaatattttggcctttgatgactggcgcaagctgcgcgctgatcgatgaggaaatgaaatatgatcccctgctaatggcaaatttcattcgccgccaccgggttaccgttgcccaatttgtacccactgcgttacgcattatcgttgatgccgatgtggtgggcgattgtcgaactttaacgcatattttcgccggtggcgaagcgctgccgcagagtttggtcgacgatttgagccgtcagttctccgggcagatccacaatctgtatgggccgacggaagcgactatttttgcctgccattggccgtgcttgccagagcagggagagggcatggttcccataggacggccgattccccatgcgcgcgcctatgtgttggacaacgcgcttaaacctgttcagcccggaaactgcggtgagctttatttgggcggcgacattctggccaaggggtacctgcatgctgaaacgttgaccctcgagcgtttcgtcaaagatccttttatcccgggcgaaaatcataaaatgtaccgaaccggcgacttggtcaaatgccttgatgacaatgtcttggaatttatcggcagggttgatgatcaggtaaaagttcgtgggcatcggattgaactggctgaaatcgaaatgcatttgcaggctttgccccagatatcgcatgccgccgttattgtagagttcaaccaaaataataaaataccaacgctatctgcattttatgtttctcgtcatcaacagcctattaatgttcaggaggtaaagagcgctttggcgaagtctctgcccttctttatgctgccttccagatttatttcattggataagatgccgattcatccaaatggcaaagtcgataaatctaaccttagttcgcatgaaaataaaggagagagagagatggttgatataaaaagcaagatgagttctgatatagaagcgcaaatcatttctgtatggagaacgattttaaaaaacaaggagctgtcaacgaaagataatttctttgacgctggaggtaattcgttattgatgtctaaagtacacagggaaataaaagataagttttccacgcccattaccattatggatttattccaatacccaaccgtacagatgctaagtcaacgcattgcagagaaaaatgctgagctattaggaaaaaacaaataa

SEQ ID NO: 426221 - DNA, 3075 bp, Serratia marcescens
atgaatgacagaaagcctatttttgaacccatttcgacgtggtcaacccaacgaccggctaagcgtgcagtcgtttttggcgagcaaacgttgagttatgcccagcttgaataccagtccaatctactagcgcgctatttattatcaaaatatccgatgcatccacgaggaagaattgctgtctatctggagccaggtctaatgatgcctgtggtgctgttggcaattctcaaagcgggctacacctatattcccttatcagattttttgcctaacgagagagtattaaaaattctcgatgacgctgcagcctttttgttgctgaccacggtttccatcatgcgtaaaacggggataggaaaaaatttcccttctacgctggcgttagaggatatcgcctatgcagatatgccggctacgataagcctgcccgtggtacagaaaacggatatcgcttatgtgctgtatacctcaggctctaccgggttaccaaaaggggttgtcattgagcacgggaatttgagttattacctggattggttcaaccaagcactttggcctgaaactcaggcagtattaccgctgacttcaaccttgagttttgctgctgcggttacgcaactttatgcccctttgctgcgtggcgatacgttgcatattttacctgccaatattttgcatgagcctgaaaaattgctgacttggtacgaacaacatccttcaggagcgctttattgtgtgccgacggtatgggatgcgttgctgcgctacgatcgtcaagcaggcggcgcgtcgcgtttaccaacaaccgtatttctttccggtgagccggttccctttgatctaaaagagcgaacctttgcgcaatgtccagacgcaacggtgtataacctatacggccctacggaaacgacggcaaacggctctttcgctcgtttggaaaaagggaaggcggtcactctgggtaaggcattgcgaggcagtaaaatactgattgttgatgatgactgttcacctgtcagcggcgatcggtgtggggaaatctgtattgttgggaaaggcgtggcgcgcggttacctcaatcgcgatacattaactcaccaacgtttctttacgcaggaaatcgatcatgcgtgctatcgtggccatcgaaccggtgatttgggaaaattcaattcgcatggcgagattgtctatctgggtcgcatcgaccgccagatcaagataaatggagtgcgaatcgatccggaagagattgaaatcgccttacgtgaagatcacagaattagacacgccttggtgcggaagacagaggaaagcacggggggcatacgattgatcgcttacctggttccggaatctgaggggactatttcggcaaacgaaatcaggaattttttgcgtttgacgttaccggcagccatgattccttcgcactttatttttgtcgaaaccatgccaaaacttcctaacggaaaactggacctccagcgattgccccaacccgttccatcacgccctgcgctgagttatgcttttcgtcccgccgccaacgaattggaacaagaactcattgatatattccaggaggcattaggtttctgtgacttaggcgcagatgataatttctttgatctgggtggcggttcgttgcaggtgattcagataaggcaattaattaagcgccgattatttagcgatattgattacaccttgtttttcgataatgcaacgcctcatctgctatcgtttatcgtgccttactatgtcaatgatactgacccggttgtgcttgaaaatgattttaggctcccgtctatctctagtgaacagcgctattttttaactttagatcaaatcagcccggcgcctggcgcttatcagattgcgtttaggttggccttcggtgggccgctggatatttccgccatggagtggagtattcagcagatcttgaagaataatccagtattgcgcagtcgctttaatctaaacaacgttagttgcagtgagggagactatcccgcgtcggatttgaagatcgtgcgccaggagtgcgcggcggagatctgcactttcgatgagctgagcgacgaagggctgttggccgccgccggcgtacccgagatggatcttgaactcatgccgctcattcatatccggttcatgtccctaccggcgagctggcacattctcttgctacaggtccaccacaccgtttttgaccatgactctatcggtttattcttcaagcaattcattgcttattttcaggcctaccgcgcgggcgatcgtggctttgagctaggccaaggcaaggggtatcagcactatcgttgctggcaacagcagtgcatccagccgacgcgctacccgcaggaaagagaattttggctggaaacttttgctcattacgtacataccggcgcagatgcttccctgttctccccccgagatacgttggagggaaaaaatgtgtggtttacgatctcgaaagcgttgacgcaatcgctcatggcctttgcgagaagccaccaaaccacagtttttgtttgtatgctgacggcattcaatgtgttgctaaatacttttacgcgttatcgccatgtgccaattggcatccctgtctccaatcgcatgctttatgaagaaacctcgctgttgggttgtttcgtaaatagagtgacttattacgataagtacagtcctgaagatgatatcggatcgcttttagatcgttgtcgaaaaagagtgtatgggttattggaaaatcaaacgataccttatgatattttgaatagtgacattcgcgcgcatggctggatggatctcttgtatgcgccggtctgttttaactatttaagtgcgatgccatcaccggtcaattgtggtggagttgatattgacgtcaaagcggtagaaagcgacttcgcaaaagtcgatatgacattgtctattcatgaaggagaatgtctaaatgtttgctttaactatcatatggcagcgctaaaaaaagatgaagtgatacggctgtcaaaagaatatatcgggataattgaaagaatgactctttga

SEQ ID NO: 426222 - DNA, 1494 bp, Serratia marcescens
atgcccagaacagccaaagccgttgacgtccccgccctcggcgagctcgatcgtcaggcgggtcaacttagccaccagctggcgcaggccctgcgccaggccatccaccggggcgatctgaaagcgggcgacctgctgccctcgacgcgccggctgtcggcggcgttgaatctggcgcgcggcacggtattggaggcgttcgctcagctaacggcggaaggttttctcgaaccgcagcccggctccggcacccgggtcgcccactatcaggcgccgcgccgcacgccgcacgccacggtgcaggccgctccgtccacagccgtgccgctttccgcacaggcgcagcatctggcgcgctttgccgcccaggcgcgggcgttgccgccggtgccgttcaccgtctcggtgccgatcggcgataccgcgcccgacgatatctggcggcggctcggcaaccgcatccgggcgcgcggccccggcgccccgtcaggctacggcgatccgctgggcgcgttgccgctgcgcgaagccatctgcgactatgtgcgccgttcccgctcggtaaactgcacgccgcagcaaatcctcatcacctccggcacgcaacaagggctctatttggcagcacagatcctgctggacgccggcgacagcgcctgggtggaagaccccgcctacgccggcatcaccgccattttcgacagcctgtttcgcgatcggcgcatgattagggtgcccgtcgccgccgacggcatcgacgtcgccgccggtatccgcctggccgccgacgcccgcgccgcctttgtcacgccatcgcatcaatatccgctgggcatgccgatgagcatggcgaaaagaagcgccctgttgggctgggccaaagagcggcaggcctggatcgtggaagacgactacgacagcgagatacgctacgccggccacccgttcccttcgctgcaggggctggcgcccgagcgaacgctctatctcggcaccttcagcaaggtgctgttcccttcgctgcggctgggttacgccatcgtgccgccgccgctggtcgacgccttttgcggcgccaggatcctgatggatcgccatccgcccagcgcggatcaacacgtgctggccgcctttatcgccgaagggtatctcgaccggcatatccgcaaaatgcgcggcgtctacgccgagaaacgccgggtgctgatcgaggcgatcaacacgcatatccccgccgatttggcgatagtgcagccctgcgatcagggcatgcacatggtgctgtggctgaggaaagatctcgacgacgtgcgggtcgcccagcaggccaacgaagccggattggcgctgcgggcggtgtcgccgatgtatgcgcccggccacggtgagccgggcctggtactggggttgggcggttacgccgaccgccaggtgcaacaggcggtggaacggctcggcgaggtgatcctggcctgcgccggcagcggcgcctag

SEQ ID NO: 426223 - DNA, 918 bp, Serratia marcescens
atgacggacagtcagtctgaaaaaactctcgttgttccccctgagcatcccgtcgccgggcattcgccccagggctggatgaacggcttcctcggcatgattattttcagcggctcgctgcccgccacgcgggtggcggtgctggagctcgatccgctgtttctgacggcggtcagggcggcgattgctgccttgctggcgctgtgtgcgctgctgatcacccgccaggcgcggccgacgcgggccgatttgccgccgctgctgtttgtggcgcttggcgtggtcatcggttttccgctgctgacggcgctggcgctgcagcacaccacctcggcgcattcgctggtgtatatcggcctgctgccgttggcgaccgccggttttggcgttttgcgcggcggagagcggcccaagcccgctttttgggctttttcaggcgtcggcgccgtgctggtgggcgctttcgcgctaagccaggggagcggcggagcctggcaaggggatgcgctgatgatcggtgcggtgctgctgtgcggcctgggttatgccgaaggggcggtgctgtcgcgccggatcggcggctggcaggtgatctcctgggcgctggtggcggcgttgccgttgacgctggcggccacttggctggcggcgccggccggttggcctgccgtcagcggcgccgcctggctgtcgctggtttacgtctcggtgttcagcatgtggattgggtttattttctggtatcgcggcctggcgcagggcggcatcgccgccgtcgggcagctgcagctgctgcagccgttcttcggcctggcgctggcgggctggctgctgcaggaaaccgtccagccgatgatgatcgccgtgatggccggcgtggtggtttgcgtgttcggcgccaagcgcttttcccgctag

SEQ ID NO: 426224 - DNA, 1239 bp, Serratia marcescens
gtggtgaaacccttcttacgcagtggcagtttggatgatgtgctggctttaggcgaaaacgggcaaccggtctacgcctgcgcgcagcagctgcgggaaaccctgcgtcttcgccggcagcagcaggccgccgactgtctggcgatcccccagccgaacgaaagcggcacccgcatcgactggtatgcacccttccccggcaaggtcacctcctggctggcagcgagcgacgcccagcgcgcgcaggcggtgcgccacctggaacactgcctgacgaccttccgcagcctgacggaacaggcccaggcgaccgatcaccccagccatcgcctgttcggcgcgctgctggccaaagcgatgcagatgcccgaccccaaccacgtttacctggtggacgatcggccggtgctgaccttctggggctttatcaagccgcaggcgcagagcccagacgatccgctggcctgcctgcgcccgatcgaatcggaagtggaaaaaccggcgccgatcgccgccgcaccgcgcaagccggccgttgtcgaaccggtaaaaccgaccccggccgccgaacctgaaccggcgcccgccccggcagtgcctatcgaatcctctgccgtcgttcgtccgcgccggcgctacgctctctggctgttgcccgtactgttgctgggcagtgcggcgctggccgcctggctgcaccgctcgccgccgccgcaaccggcgaggccggcggaggtccagcatccggcgccgccggaaaaaaccgccgcgccgttgcccaagctgcgcttaccgctggcgcacgcgacgctgatgccgccgcccccggcgccggtcatcccgccgccgctggacaaacatgcgctggtgctgccgcccgaggcggtgaaggccggctccacccgtttccttaatggcaaatggcgcgccacggtggcgctgaaagacccgattaccggcaagcgccccagcctgcaataccgtctgaacggcggcaaaggcatcgccgtcatcgcctacggcgacggcgtcagctgccgggtggcggtcgaagccgggctgatgcagtccggcaatctggtgatcaacagccgcaccaaggcgcgctgcagcgacggcagccgctaccagatcccggagatcgtctgccgccagggcgacaccggcgcggcggagtgcaccggccgctacgatgcggacaccacctatcccatgacgttcaagcgcgagagtaaatga

SEQ ID NO: 426225 - DNA, 2949 bp, Serratia marcescens
atgatgctggcaccccttacggactacaaacacggcattacgctgattcaagacagcggcattcagtttctggactttgccctgacgccgctgctggacgccgagtttcccggcaaattcgtgcgcaagaccgccagcggcccgctgctgcgcctgcaatgggaggccgagagcggcaaataccagctgccggccgtgggcgaccaggccgccgaagtggtgcggccggagttcagctatccgctgcagcagtcgctgcacctgctggataagctctggttgccgctgccctgcttgcgccacaccccggcgggcctgttcttgtcgggcccggacaactgggcgcgcctgcaggtggtgcagttggatgaaccggatcaggacggcaacctgctgcgcgtggtgctggccttcgacacccgcgccgcggcgcccggccaggaggcgctggcgccgggcgaaagcgatctcggcaccgatctccgtttcgcgctggcgcatcgcaaccacgagctgggcgagttcctcgatctgacctgggtggacggctggctgcgcgaggcgttcagccagcgcgccgccgagcgggagcagcgtgccgaagtggagatcaacgccgggctgaaaaccttcgagtatcaggcgcactacctcaatctgttgcacatgcttggccatcagctggcggtgccgcagataaagatggtggcggcgacgctgcagcaaccggcgatcgacgtcgatctggtgctggacgtcggcaactcccacacctgcggcgtgctggtcgaggatcatccggaggagagcaacggcctgaagcaaacctacgagctgcagctgcgttcgctgtccgaaccgcaccgcgtctacaacgaactgttcgagagccgggtggagttttctcgggccggcttcggcaagccgcatctgtctttccagagcgggcgcgacgacgccttccagtggccgtccatcacccgcgtcggccgcgaagccgcgcaactggcgcagcggcgaacgggccatgaaggcactaccggcatttccagcccgcgccgctacctgtgggacgaggagcgctatgcgcccggctggcgcttcaacgagcagcacgagccgatggccgccgccgcgccgttgaccaccctgatcaacgacgaaggcgtgccgctgtccgccctgccgacggcgcaacggctgccggtgttcgccgcccattacagccgcagcgcggtgatgacgctgatgctgagcgagctgctggcgcaggcgctgatgcagatcaacagcatcgcccagcgcagccgcatgccgaacgccgccgcgccgcgccgtttgcgcgccatcattctgacgctgccttcggcgatgccgaaaccggagcgcgagatcttccgccgccgcatgcaggaggcgatcgggctggtgtggaaggccctcgactggcacccgcaggatgcgccgttcgacggcgcgcacgcccgcttcccggcgccgcaggtgcagatggagtgggacgaggccacctgcggccagatggtctatctgtacaatgaaacccaggtgaacttcgccggccgcactgacgcctttttcgccgccatggcccggcccgaccggccgctggcgccggatgagcaggcgggcaaaacgctgcgcatcgcctccatcgacatcggcggcggcaccaccgatctggcgatcacgcactattcgctcgacgacggcgtgggcaacaacatcaaaatcaacccgcgcctgctgttccgcgagggctttaaggtcgccggcgacgatatcctgctggacgccatccagcagtttatcctgcccgccgtgcagcaggcgttcgaagccgccggcgtaagcgccgccccggcgttaatggacaggctattcggcaacgaagggcgtatggacgggctttccaccctgcgtcagcaggccgcgctgcagattttcatgcccgccgggcgcgcgctgctcggcgcctatgaagaatacgacccgctggacagccgggcggaaatcgccgccagcctgggcgatctgctgccgcagccgccgacgccgcaggtgctggcgtttatcaacggcgaggtgcagcgcgaagccgacagcgacgccttcgagattctgcacaccccgctggtgatccgcctggccgatctgcacgccgccttcttgtccgatcgcatcggcatcggccgctgcctgcgcctgctggccgaggtggtggcgctgtatacctgcgacgtgctgctgttgaccggccgcccggcgcgtttccccggcgtgcaggcgctgctgcgccacctgcagccgctgcccgccagccgcattctgccgctcgagggctaccacacccgcagctggtacccgttcaacaaacgcggccgcatcgacaacccgaaatccaccgccgcggtgggcgccatgttgtgcctgctggcgatcgacctgcggctggagagcttttacttcaacgtcggcgatttccagccttactccaccattcgccacctgggcatgctggacggcaacaacatgctggcggacgataacgtctattaccgcgacatcgatctggatcgcgccgacttcgcgctcgaccccgccggcagcttccagctgcgcggcccgctgcgcctgggcttccgccaactggacaacgaacgctggccggcctcgccgctctatacgctgaccatcaatgacgcccagctggcgcgcaaactggccggcgacgcggtgatcaccctgcgactggccattaccgccagtgccgaacagggcgcggaaagcgtcaggatcgcgcaggcgttgctggccgacggcagccccgtcccggcgcaccatctgcaactgaaactcaataccctggctgccagcgcctccggcgcgacccactactggatagacagcgggagcatttacccacgatga

SEQ ID NO: 426226 - DNA, 2181 bp, Serratia marcescens
atgaaagctatcactaccgcccaatcggccccgaaccacgcactcagcgccggcattctgcaggcgatcgcctgggtggacaccgcgcgccggcagtccacccgtttggaacgggaagccgatcgcctgacgctgcgcctgcgccgttgccataaccgcgcactgcaattggcgaaggcacaacctgcgcaggtcgctatcggcctgtacggccacaacgccgccgccaaggcccacctgctggcggcgctggcccccggcgcagaaaggctgcacggcgacgccgcgctggcggtgcgttactgcgccaccgcgccgacgccgtccaccgagtatcctctcgccctcgcgctgctcgatgaagcgcagtggctggccatcacgctcgatgccgccgcgatgggcggcttccggctggactgggacgcccgcgcgatcgccggccatctgcaagcgttggcgcgtcaccgccaagccgtcgccctcgacggcctcagcgacagcgatgtgctggcgctgtgggatagccaacgccgccacggcgacaaggggcaacagacgctggacaggcatttctggccgcaggccgtggcgctggcgccgcagctgagcatcgacgatcgcgcgcgcctgtttgcgccgctgtggggagaggaaacgacgctgacggcgcattatcgccagctggcgcacacgctgcatgccctcggcggcagccgacaggttcatgctccgcaccgcgccttaccgctgctgaccgcgagcgccgcagcggaaaacgccgcgatcgtcgtgatggccgaacacggcggtgaacggaagatcgcgttgagcgatctgacctggctgaccgccgaagtcaccaccgttctgccgcagacggcgcaggcgggcctgcccgccgacgtggcgctgatcgacctgcccggcagccgcgcctgcccgcaggcggaaccgacgcagcggctgcaacaggcgaaacgcgcccatttgctgacccgctgcgcagacggcctgcacgccaacctgctgctggtggccgatgccgccgccacgccgcaggacgccgctcgcgtcggccaggcgctcgccaactgggtcaatcagactcagggagaaaccccggctctgcgccagcgccgcaaacccggcctgatctgggcgatcacgccgttcgatcaacgcggggaaggcaaagcgcgccccgacgacgccgtacagcgccaggtcggcgagcccggcgacagctgggccacgctgctggcgctggatgaacaggattgccgccgcatggtaagttacctggccacccaggcgcgcccggcccagaagcaagcgcgcctgctcgaacagcgcgaagagttgcagcgtgagctgacggaaagcctgctcggcaactggctcaccgccgccgatccgcacgcggcgcagcagcgcggccaacagctgctgcgcgcgctgcaggcgcaggccggccgccacggcgaactgctggaacggctgttgccgcagcgcgatacgttgcgccagctttatcagcaacagcagcacgccgcgccggccccgacgacgacgcctgtaccgttcgggctcgacatcgatctgttcggcgcgccggaaaccccggcatccggcgagccctccgcgtcgccctttgccgcgcgggtattcgcggattggatcaaccatctgcgcagcctgccggacagccgccggttgctggagctgctcggcgtcgaaaagccgcacctggaactgctggtcgatgcgctgatcggcgccgcctgccgcctgcggctcgatgatgagctggaacgcgcgctgtgcgccgggggcctaccggaacagagtgaagatcggcaaatcagccaggcgctggcgatactgggcgacttcgtcgcctggctcggcttccagcggcgcgatgcggcaacgcgccccgagagccgcgtcaaccccggccagccgatctttaccccgccgccgcagccggcggtggactggagcagccagcagcggttaacccggctggcgccgacgccgaccaaaaacaccgcgttttatatctatgactggctgatcggcctgcaaaccctgctggcggagaatgcggcgacggaaagcgcgctcggcgaggcgcagcgcgcggcgttggaagagatcgtggcgactctgcgataa

SEQ ID NO: 426227 - DNA, 414 bp, Serratia marcescens
atgccccctttcagcctgaagactatcgatcatgtggttctgcgcgtgcgcgatgcggaaaaaagcctgcggttctatacccagacgctgggttgcgacatcgccaaacggcggcccgatttggggctggtgcacctgcgcgccggaacggccatgattgatctggtcgacgtgaacggccagcttggaaaaaaaggcggcgacgcgcccgatcctcaccggcaaaatgtcgatcacctctgcctgcgcatcgatcctttcaacgaagacgaactgctggcctatctgcgatcgcaggggatccccgtcgaccctgctgaatcgcgctacggcgcggaaggcgacgggccatcggtttacttcagcgatccggatggcaatcgcatagagcttaaggggccggcggccgattaa

SEQ ID NO: 426228 - DNA, 1200 bp, Serratia marcescens
gtggaacagtttgatgtcgtagtgattggggcgggcgccgccggcatgttttgcgccgcgcaggcggggcaactcggttgccgcgtgttgctgctcgacaacggcaaaaaaccgggccgcaagatcctgatgtccggcggcgggcgctgcaactttaccaacatgtacgccgaaccggcggcctacctgtcgaacaacccgcacttttgcaagtcggcgctggcgcgctacacccagtgggacttcatcgatctgatcaaccgctacggcatcgcctaccatgaaaaaacgctggggcagctgttctgcgacgactcggcgcagcaggtggtggatctgctggtcaaagagtgcgagctgggccaggtgacggtgcgcctgcgcagcgaagtgctgggcgtggagaaaaccgaacatggctacgcgctggcgctgaatggtgaaaaagtgagtgctcgctcacttgtggtggccagcggcggtttgtccatgccggggctgggcgcttcgccgttcggttacaagctggcggagcagttcggtctcagggtgctgccgacgcgtgccgggctggtgccttttaccctgcataagccgctgctggagcatgtgcagacgctgtccggcgtctcggtgccggcggtgatcaccgccgagaacggcgtcagcttccgtgaaagcatcctgtttacccatcgcggcctgtccggcccggcggtgctgcagctgtccagctactggcaaccgggtgagtatgtgagcattaacttacttcctgagctggatttggcggccttcctggatgatcaacgccgccagcacccgaaccaaagcctgaaaaacaccctggcgctgcaattgccgaagcggttggtggagtgcttgcaaaccctgggacaactgccggaggccacgctgaagcagctgaatgcgccgcagcagacggcgctggtggagctgttgcagaactggcgcgtgcagccgaacggcaccgaaggttaccgcacggcggaagtgacgctcggcggcgtcgacaccaacgaactttcctccaagacgatggaagcccacaaggcgccggggctctattttatcggcgaagtggtggacgtgaccgggtggttgggcggctacaacttccagtgggcgtggagctcggcctgggcctgcgcccaggcgttggcggcgcaggagcgttaa

SEQ ID NO: 426229 - DNA, 1503 bp, Serratia marcescens
atgctgcatttgttcgctggcctggatttccataccggcctgatgttaattctcgcattgttgttcgtgttgttttatgaagccatcaacggttttcatgatacggccaatgcggtcgctacagttatttatacccgcgccatgcgctcgcaacttgcggtcgtgatggcaggtttgttcaactttcttggcgtaatgctcggcggtttgagtgttgcttacgccatcgtccacttgctgcctaccgatctgttgttgaacgtcagttcagcacacggattagccatggtcttctccatgctgttggcggcaatcatctggaacctcggcacctggtatttcggtctgccggcctccagttcccatacgctgataggcgcaatcatcggtgtcggtttaaccaacgccctgatgacccacacttcggtggtggatgcgcttaacgtcccgaaaatgattggcattttcctttctctgctgttctcgccgctggtcggcatgatggtggcgggagtgatggtgttcgccttgcgccgctattggagtggcaccaagaaacgccagcgtatccacatgaccccagcggaacgtgaaaaggtcgacggcaaacgcaagccgccgttctggacccgtatcgcgctgatcctgtcggcgattggcgtcagcttctcgcacggcgccaacgacggccagaaaggtatcggccttatcatgctggtgctgatcggcgttgcgccggccggcttcgtggtcaatatgaatgcaaccggttatgacatcacccgtacgcgtgacgccgtgacccacctgcagcaatattaccagcagcacggcgacgcgctgtcgcatgcggtgtcgttgacgccgctggtgccaagcccggatgacgaagctgcgccgaacaagccggccgagttccactgcgacagttcgcgcgccatgccggcgatcgagctggctcagggcatgctgaccaacctgcaaagctacgatcagctgacggttgagcagcgcagccacctgcgccgcctgctgatgtgcgtgaccgacacggcggataaagtcgccaagctgccggaaacctcatccgccgaccagcgcttcctgaagaacctgcgtcaggatctgctgcagaccgtcgagtacgcgccgatgtggatcatcgtcgccgtcgcgctggcgctgtcgctcggcaccatggtgggctggaaacgcgtggccaccaccatcggcgagaagatcggcaagaaaggcatgacctacgcccagggcgtatcggcccagatgaccgcggcgctgtctatcggcgtggcgagttataccggcatgccggtctccaccacccacgtcctctcttcggcggttgccgggacgatgatcgtggacggcggcggcgtgcagagcaaaaccgtgaagaatatcctgttggcctgggtactgaccctgccaatctcgatcctgctttccggtgcgctgtattgggttgcgttgaagctgatctaa

SEQ ID NO: 426230 - DNA, 336 bp, Serratia marcescens
atgatcagtaccgtcgcgctgttttgggccttatgtgtggtgtgtgtggtaaacatggtgcggtattactcttctctgcgcgcattgctggtggtattgcgcggctgcgatccgctgctgtaccaatacgtcgatggcggcggtttcttcaccgcccacgggcaacccagcaagcagctgaggctggtgcgctatatctttgcgcaacgctatgtcgagcaccacgatccggagtttattcgccgctgcgagcgggtgcgcgggcagttcatgctgacctcggccctgtgcggcctggtggtcatcagcctgatagcgctgatgatctggtattaa

SEQ ID NO: 426231 - DNA, 774 bp, Serratia marcescens
atggcaaaccattcaatcaagggaaaaaccgtcctgatcgccggcggcgccaaaaatctcggcgggctgatcgcgcgcgatttggctgaacaaggcgccaaagcggtagtgatccactacaacagcgccgcctccaaagccgaagcggataagaccgtcgccgccatccaggccgccggggcgcaaggcgtcgcgctgcaggccgatttgaccaccgcgggcgcgatcgagaagctgttcgccgatgcggtcgccgccgtcggcaagccggatatcgccatcaataccgtcggcaaagtgctgaaaaagccgatggtcgacatcagcgaggccgagtacgacgagatgacggcggtcaacgccaaaaccgcgttcttcttcctgaaagaggcgggcaaacacctcaacgacaacggtaaaatctgcacgctggtcacctcgctgctcggcgccttcacgccgttctatgccgcttacgccggcaccaaagcgccggtggagcacttcacccgcgccgccgccaaggagttcggcgagcgcggcatctccgtgacggcggtcggccccggcccgatggacaccccgttcttctatccggccgaaggcgccgatgcggtggcgtatcaccaaagcgcggcggcgctgtcgccgttcagcaaaaccggcctcaccgatatcgaagacgtggtgccatttatccgccacctggtcagcgacggctggtgggttaccggccaaaccatcctgatcaacggcggctatactaccaagtaa

SEQ ID NO: 426232 - DNA, 270 bp, Serratia marcescens
atgcacatgctaatggtcattggcggaggcgtggttctcctgggattgtttgtgctgttcggctggctctggggcgccagtgcggcgggcatggcgctggcggcaaaaattttcgtcccggcctggttgctgatcgcggcggtcaatatgtgggtgggcgtcgcccacgcgggctacagcctgcgggcggagttgccgatcctgctgctggtgttcgcgatccccgccgccatcgccgcgttcgtattctggcgcctcgcccatgtctga

SEQ ID NO: 426233 - DNA, 1755 bp, Serratia marcescens
atgtctgaaagcgccggcgacctgctcaacgtggtgacgctactgggcgccgccgtggtggccgtgccgctgttcaagcgcttggggctgggctcggtgttgggttatctggccgccggtttggcgattgggccgttcggctttggtttgttcaacgatgcgcagaccatcctgcacaccgccgagcttggggtggtgatgtttctcttcatcatcggcctggagatgcggccttctcatctgtggaacatgcggcgcgatattttcggcctgggcagcctgcaggtattgagctgcgggctgctgctcaccgccatcggcatggccttcggcttttcattggccatctccttcatctgcggcatgggattcgtgctgacgtctaccgccatcgtcatgcaactgttgggcgagcgcggcgacatcgccagcccgcgcggtcagaaaatcgtcgccgtattgctgtttgaagatctgatgattgtcccgctgctggcgctggtggcgttcatcgcgccggccggttcatcgacgccggtatccggttccgcctggggcggcatcgccatcgccgccggtgcgctggccgcgctggtggcggccggcatctggctgctgaacccgctgtttcgcattctggcgcacgccaaagcgcgcgaagtgatgaccgcagccgcgctgctggtggtgctcggcgccgctttgctgatgcaggtgggtggcctttccatggccatgggcgcctttttggccggtgtgctgctgtcggaatcgacgttccgccatcagctcgaagccgacatcgagccctttcgcggtctgcttttggggctgttcttcctcggcgtcggcatgtctctcgatctggccgtggtggcgcgcaactggccgctgatcgtcagcggcgtgctggcgatgatgttcatcaaaggcctgtgtatttactgcgtggcccggttgacgaaaagctcgcacggtgatgctctcgaccgcgccgtactcatggcgcaagggggagaatttgcgtttgtgctgttcgccgctgcgctggccaatcaggtgctgcctgcggaagccaacgccaacatgaccgccgtcgtggtgctgtcgatggctttgacaccgctggcggtgttgatccaccaacgcctgcgcgcctcgtccgacgcctcgttggacggcacggaacagcccaccggcttgaccaacagcgtgctgatcgtcgggttcggccgttttggtcagatcgtcagccagcacgttttggcgatgggcgccgatatcgccattatcgaccgcgaaccccaggttgcccgcgacgcgcaagacttcggcttcaaagtttactatggcgacggtgcgcgcatggatgtgctgcatgcggcgggcgccggccacgcccgcgccatcttggtctgcattgacgatccgcaagccgccacgcagattgtcgaacacgccaaaacccacttcccgcaggcccgcgtgctggctcgcgctcatgaccgcgaacatgccatcgcgctgatcaaggccaatgtggattaccaaattcgcgtcaccttagagtccgccatgtctttcgggcatgaagctatgttggcgttgggctccgatccggaaaccgcggcggatctgatggccgagctgcggcgcaaggatgccgaacggttggcgatggaggtgtccggcggcatttacgccggtacatcgatgattttgggcaatgcgccgaccaaggcgaagaaggaatga

SEQ ID NO: 426234 - DNA, 582 bp, Serratia marcescens
atgccgacccttttccgccggcgcagcgatgcgctcgcggccgataatcaaacggccgatgaggtggtgcggttttggcgagacgccggcgcagagcaatggttccggcaggatccgcgcttcgaccaacgctttcgcgcgcgctttttgggcctgcatctggcggcggcccggcgtgaacgcgacgactggcttaagacgccggaaagcgcgctggcgctgatgatcctgctcgaccaatttccgcgcaacgcttttcgcaacaccgcccacatgtacgccaccgatccgctggcgcgccgcttcgcccgcatcgccattgcggcgaactacatgcaggccgtcgagccttcgctgcgcctgtttttttgcctgccgttcgcccactcggaaaatctcgccgatcaggatctttccgtggcgctaaacgctcaactggggccggctgaacgcgcgcacgccgagggacaccgcgatatcatccgccgtttcggtcgtttcccacatcgcaatcagctgctgttgcgcgatactaccacgcaggagcaagccttcctggagcaaggagggtttgccggataa

SEQ ID NO: 426235 - DNA, 909 bp, Serratia marcescens
atggacagattcaatcaataccgcgtattcgtgcaggtggcggagatgggcagctttatccgcgcagcccatgtgctggaggtgccgcgcgcctcggtgtccgccgccgtgcaacagctggaaacgcagttgggcgtgcgcctgctgcaccgcaccacccggcaggtgcggctgaccgccgacggcgaacagctgctcgagcggctgcgcccgctgctggccgaggtggaggatatcgatcagtcgtttcaggccagccagcgccaggcctccgggcggctcagcgtcgacgtgccgagccgcatcgcccgccggctgatcgcgccggcgctgcccagcctgctgcggcgccatccccacctgcagctggtgctcggctccgccgatcgcgccatcgatctggtgcaggaaggggtcgactgcgcggtgcgcgtcggcgatctgcacgacagcagcctggtgatgcgcccgctcggccatatcgcgctgatcaactgcgccagccccgcctacctgagcgaatacgggcatcccactcaccccgcagatctcgtcaccggccactggcacatcggttacgcctcacccaaaaccggccgcgaatccccctgggaatacctgaccgccgacggccacacccagcggctcgaactgcccagccgggtggtggtcaacaacgccgagagctatatcgcctgctgccgcgccgggctggggctgatgcaaatcccgcgctacgacgtgcaacacctgctcgacgccggtgaactggtggaagtcctgcccgcttaccgcgccgcctccatgccgatcgccctgatctatccccatcgtcgccagcgctcacgccgcctggcggtgtttcacgaatggtttgaaagcctgctgcagccgcatctggagcgctga

SEQ ID NO: 426236 - DNA, 438 bp, Serratia marcescens
atggcttacaaacacatactgatcgcggtggacctatccccggaaagcaagatcctggtagaaaaagccgtctcgatggcgcggccgtacaacgctaaagtttctctgatccacgtcgatgtcaactattccgacctctataccggcctgatcgacgtcaatctcggcgacatgcaaaaacgcatctccgaggaaacccatcaggcgctgaccgagctgtcgcaaaacgccggctacccgatcaccgagaccctgagcggcagcggcgatctggcgcaggtattggtcgatgccatcaagaaatatgacatggatctggtactgtgcggccaccaccaggatttctggagcaagctgatgtcttccgctcgccagctgatcaataccgtgcacatcgatatgctgatcgtgccgctgcgcgatgaagaagacgaataa

SEQ ID NO: 426237 - DNA, 1344 bp, Serratia marcescens
atggaatatgccgtatcggtagagtctttcctgtcctcgttacagcgccataacccccaccagccggaatatctgcaggcggtgcgcgaagtgttcacctcgctgtggccgtttatcgaacgcaacccgcgctatcacgaacaggccctgctggagcgcctggtggagcctgagcgcgttatccaattccgcgtcagctgggtggacgatcgcggccaggtgcaggtcaaccgcgccttccgcgtgcagttcaactcggccatcggcccctacaagggcggcatgcgcttccatccgtcggtaaacctgtcgatcctgaaattcctcggttttgagcagaccttcaagaacgcgttgaccaccctgccgatgggcggcggcaaaggcggctccgatttcgatcccaagggcaaaagccagggcgagatcatgcgcttctgccaggcgctgatgaccgagctgtatcgccatctggggccggacaccgacgtgccggccggcgacatcggcgtcggcggccgtgaagtcggctttatggccggcatgatgaagaaactgtccaacaacaccgcctgcgtgtttaccggcaagggtctctccttcggcggcagcctgatccgccccgaggcgaccggctacggcctggtgtacttcaccgacgccatgctgcagcgccacggcctgggctttgaaggcatgcgggtggcggtgtccggctccggcaatgtggcgcagtacaccatcgagaaagcgctggagctggatgcgcgcgtgatcactgtgtcggattccggcggcaccctggtggacgaggacggcttcaccaccgagaagctggcgcacctggcggagatcaaaaaccaacgctacggccgggtggcggactatgcccgcgaacgcggcctgacctatctggccggccagcagccgtggaacgtgccggtggatatcgccctgccgtgcgccacccagaacgaactggatctcgaggcggcgcagacgctgatccgcaacggggtgaaggcggtagcggaaggcgccaacatgccgaccaccatccaggccaccgacgccttcctcgacgccggcgtgctgttcgcgccgggcaaggcggctaacgccggcggcgtggccacctcggggctggagatggcgcaaaacgccgcgcgcatcggctggcgggcagagaaagtggatgtacgtttacaacatatcatggccgatattcaccacgcctgcgtggaatacggcggcgaaggcaagcaaacccactacgtgcacggcgcgaatatcgccggtttcgtcaaggtcgccgacgccatgctggcgcagggcgtgctgtaa

SEQ ID NO: 426238 - DNA, 987 bp, Serratia marcescens
atgaaatttaacctcgcattattaaatgcatgtgtggtttctgcgtgcatgttatcgacaacacctgtgttcgccgctgataaatatgagattgccgtagtcgccaaagtgaccggcattccgtggttcaaccgcatggaagtgggcgtcaacgaagcggcgaaaaaactcgacgtcaacgcctaccagaccggcccttctaccccggatccggccgcgcaggtcaaggtgattgaggatctgatcgccaagaacgtcaacgccatcatcgtggtgccgaacgacgccaaggtgctggagccggtgctgaaaaaagcgcgcgacaaaggcatcgtggtgctgacccatgaatccccggaccagcagatcggccagtgggacatcgagaccatcgacagcgagaaatacgcgcaggccaacgtcgatgagctggcgaaagacatgggcggcaaaggcggctacgcgatctacgtcggctcgctgaccgtgccgctgcacaacgcctgggccgattccgccatcaaataccagaaagaaaaatacccggacatgtttgaagtcacctcacgcttgccggtggcggaaagcatcgacaaatcctacgccaccacgctggatctgatgaaaacctatccgcagatgaagggcatcatcggcttcggctcgctcggcccgatcggcgccggccaggcggtggccaagaaacgcgccaaggacaagatcgcggtggtgggcatcgccatgccggcgcaggccgccccttacctgatgcgcggcgacatcaaaaaagcgctgctgtgggatccgaaagacgccggctatgcgctggtgacggtggccgaccagctgctgcagggcaaggaagtgaacaaggatctggcgatcgagggcctcggcaaggccgacgtcgatatggaacacaaagtgattcggtttaacaagattttggaagtcaccaaagacaacgcccaatcgcttggattctga

SEQ ID NO: 426239 - DNA, 1500 bp, Serratia marcescens
atgacagcctcccccgcatttatcaccctggagaatatcagcaagcgattcccaggcgtgctggcattagaccagatcaacctgacgctcaatattggcgaagtgcactgcctggccgggcaaaacggctgcggcaaaagcaccatcattaaaatcatctccggcgtctatcagccggaaaaaggcgccaacatttcgcttgaaggcaaactcttccacgccctgacgccgcagctgtccggttattacggcatacaggtgatctaccaggacctgtcgctgttccccaatctgacggtggcggagaacatcgccatccaccgttacctgcccggcggccgtttctgggtgcgcaagcgggtgatgcgccagacggcgctcgacgccatggcgcggatcggcatacgcatcgatcccgataaaaaggtggaaaaactgtcgatcgccgatcggcaactggtggcgatttgccgcgccatcgccgccgaggcgcggttggttatcatggacgaaccgaccgcctcgctgacccgccaggaggtcgacggcctgctgcgggtggtcaacgagctgaaggcggccggcatctgcgtggtattcgtcagccacagattggatgaagtgatggaagtcgccgatcgcatcagcgtgatgcgcgacggcaagctggtgggcacctggccggccagcgaactggacagccacgaactggcgttcctgatgaccggccaacgcttccactacagcccgctgccgccgctgccgccggctgaacaggcgccgctgctcgaggtacgcaacctcagccgcggcgagaaataccgcaacgtcaatctggcgctgcgcggcggcgagatcgtctcgatcgtcggcctgctcggcgccggccgcaccgaactgtgcctcagcctgttcggcatgacgcggccggacagcggcgagatccgcatcgagggccaggcggtgcagctgcacaacaaccgcgaagcggtgcgccacggcatcggctatgtgtcggaggatcgtctgacgcaggggttgatcatggagcaatcgatctacgacaacaccatcgtcaccgtcttcgatcggctgcatacctcgctcgggctgctggatcacgccaaagcgaccgagctggtcaaccggctgatccgcgatctgaacatcaaggtgtccgacagcgcattgccggtgaaaaccctgtccggcggcaacgcccagcgcatcgccatcgccaagtgggtggcgacccagccgaagatcctgatcctcgactcgcccaccgtcggcgtggacatcgccaacaaagaggggatctaccagatcgcccgcgatctggcgcagctgggcatggcggtgctgatgatctgcgacgagatcccggaagcctattacaacagccatcgggtgatggtgatgcgcaagggcgagctgatcgccgagtttgcgccgcaccagagtaccgagcaacagatcgccgaggtggtgaatggataa

SEQ ID NO: 426240 - DNA, 990 bp, Serratia marcescens
atggataagtcattattggcccgcctggccgggcggcacgagttttatctcggcctgttggtgctgctgctggcgatcggcctgagcgccggcaccgacgagtttctgacgctcggcaacctgaccgacgtcgccaccagctacgccattctcggcatcctggcctgcgggctgttcgtggtgctgatcgccggcggcatcgacatttcgttcccggcggtcaccgccatcgctcagtacgtgatggccagctgggtgatccagcacggcggcagcttcccgctggcgttcgccctggcgattggcgttggcctgctgctcgggctggtgaacggtttcctggtgtactggctgaaagtgccggcaatcatcatcaccatcgccaccctcaacctgttctacggcctgctggtgtacgccaccaacggtacctggctgtacggctttccggactggttcatgaacggcatcaactggttctcgttccagggcgccgacggctacgactacggcctgacgctgccgctgctgtgcctgttggcgaccatcgtcgtcaccggcgtgctgatgaaccgcacccggctggggcgccagatctacgccatgggcggcaaccgcgacgcggcgtcgcgcctggggttgaacctgctgcggctgcatttttgcgtctacggctacatgggcattctggccggcgtcgcggcggtggtgcaggcgcagatcacccagtcggtggcccccaactcgctgctcggcttcgagctgacggtattggcggcggtggtgttgggcggcaccagcatgagcggcggccgcggctcgttgaccggtaccctgctcggcgtggtgctgctggccttcctgcaaaacgggctgacgctgctcagcgtctcggcctattggcaccaggtattcagcggcgcgatcattttgatcagcatcagcaccactgcctggaacgaaaaacgcaagctgctcaaggagatctga

SEQ ID NO: 426241 - DNA, 954 bp, Serratia marcescens
atgacgcagttaactcggttgatcccaaacgatcggatcattcgcctgcagggcgcgatcatcatcgcggtggcgctgctgttcgccgggctgctcggatcgcgcttcttcagcctcggcaacttccagtcgatcgcctcgcagctgccgatcctcggcctgctggcgctcggcatgggcatcaccatgctgaccggcggcatcaacctgtcgattatcgccggcgccaacgcctgttcgctggtgatggcggcaatcatcgtcagccaccctgaccagccgctgttcctggcgctggcgctggtggccggcctgctggtggcggtggcgatcggcgcgctcaacggcgcgctggtggcctggatcggcgtctcgcccatcctcgcctcgctcggcaccatgaccctgatcaccggcctgaacatcctgctgtccaacggcgcggtgatctccggcttcccggcggcgattcaatttctcggcaacggcgccgtgctcggcgtgccggtggcgctgatcctgttcctgctggtggcggccgggctgtggctgctgctggagcacaccacgctgggccgcagcctgtacctgatcggctccaacgagcaggccacccgcttcagcggcgtgaacaccgcgcgggtgcaggtagcggtgtatatcctgtcggcgctgctcggctggggcgccgcgctgctgatgatggccaagttcaactcggccaaggccggctacggcgaatcttatctgctggtgaccattctggcctcggtgctgggcggcattaacccggacggtggcttcggccgtattctggggctggtgctggcgctgatcgtgctgcaaatgttggaaagcggcctcaatttgctgggggttagcagctacctgaccatggccctgtggggcggcgtgctgatcctgtttatcgcgttacagaatcgaaaagcctga

SEQ ID NO: 426242 - DNA, 1638 bp, Serratia marcescens
atggcgagctattttattggcgtagatgtgggcaccggaagcgcgcgcgcgggcgtattcgatctcaatggccgcatggtcggccaggccagccgggccatcgatctgtaccggccgaaggcggatttcgtcgagcagtcgtcggataacatctggcaggcggtgtgcaatgcggtgcgcgacgcggtcaaccaggccgacatcaacccgatccaggtcaaggggttgggcttcgacgccacctgttcgctggtggtgctggataaagagggcaagccgctgaccgtcagcccctccggccgcaccgaacagaacatcatcgtgtggatggatcaccgggcgatcgcccaggccgagcgcatcaacgctaccaaacaccgggtgctggacttcgtcggcggcattatctcgcctgagatgcagacgccgaaactgctgtggctgaaacagcacatgcccaccacctgggccaacgccggctacctgttcgatctgccggacttcctcacctggcgcgctacccaggacgccacccgctcgctgtgttcgacggtgtgcaagtggacctatctcggccacgaacagcgctgggacaagagctacttccagcagatcgggctggaagacgtgctggaacatgacgcggccaagatcggcagcgacgtcaaaatgatgggcgagccgctgggccacggcctgacccagcgcgccgccggcgagatggggctgatcgccggcacggcggtgagcgtgtcgatcatcgacgcccatgctggcaccctcggcacgctgggcgccaccggcgtctccggcgaggtggccgacttcaaccgccgcgtcgcgctgatcggcggcacctccaccggccatatggcgatgtcgcgcaccgcgcgctttatcggcggtgtctgggggccgtattactcggcgatcctgccggaatactggctgaacgaaggcggccagtccgccaccggcgcgctgatcgaccacgtcatccagtcgcacccgtgctacccggagctactgacgcaggcgaaaactcaggggcagaccatctatgaggtgttgaacgccattctgcgccgcatggccggcgagccggagaatatcgccttcctgacgcaggacattcatatgctgccgtacttccacggcaaccgctcgccgcgcgccaacccgacgctgaccggcatcctgaccgggctgaagctgtcgcgcacgccggaggacatggcgctgcactacctggccaccattcaggccatcgcgctcggcacccgccacatcatcgaaaccatgaaccacagcggctacagcatcgacaccattatggccagcggcggcggcaccaagaacccgatcttcgtgcaggagcacgccaacgccaccggctgcgccatgctgctgccggaggagagcgaagcgatgctgctcggcggcgcgatgatgggcaccgtggcggcgggcgtgttcgacaccctgccggaggcgatgagcgccatgagccgcatcggcaagacggtcacgccgcagaccaaccagataaaaagctactacgaccgcaaataccgggtattccacgagctgtacaacgaccacatgaaataccgccggttgatgcaggaggaggcgtga

SEQ ID NO: 426243 - DNA, 600 bp, Serratia marcescens
atgcagcaggaatggcggcaggcggtgcaaggttggcaaacctacagtcaggagctggcgcagctgggcgagcgcctcgacgcgcgcacctggcagcggctgctgacgctgctggccgactgccgcggtaaaatcgccgtcaccggcgtcggcacctcggggattgcggcgcgcaagatagcccacatgctggcctgcgtggaacggccggcggtctacctcgacgccaccggcgcggcgcacggcgatctgggttttctgcgcgccgacgatctgctgatcctgatctcgcgcggcggcaattccgacgagctgacccgcctgctgccgacgctgcaggccaagggcgtgacgatgatcgcggtgacggaaaacccgcattccgccatcgcacaggcggcgcagttgacgatcgccaccggggtgcaaaaggagatagatccgctgaacatgctggccaccacctcaattgtgctggtgctggcgatcttcgacgccgcctgcgcctgcctgatggcgcgcagcggttacgacaaggacgccttgctggcggtgcatccgggcggcggcgtggggaaaagcttgcgggaggaaaactga

SEQ ID NO: 426244 - DNA, 747 bp, Serratia marcescens
gtgagcgtgtgtttattgtgtgaagcaggcgccgatcccggcgccttgtctgttttggcgcagcgctggcggctgacgtccgacgacgacgcgccgatggcgctggtactgaccccgcagcggctggagctgcgcaagcgcgacgagccgaagctcggcggaatctacgtcgatttcgtcaccggcaccatggcgcaccggcgccgcttcggcggcggccgcggcgaggcggtggccaaagcggtcggcatcaagggcagctatctgccggacgtggtggatgctaccgccgggctggggcgcgacgccttcgtgctggcggcgctgggctgtcgggtgcggatgctggagcgcaatccggtggtggcggcgttgctggacgacggcctgcagcgcggttatcaggatgcggaaatcggcccgtggctgcgcgagcgcctgacgctgctgcacgcctccagcctgacggcgctggcggatctcagcccgcgccccgaagtggtgtatctcgatccgatgttcccgcacaagcagaaaagcgcgctggtgaagaaagagatgcgggtgtttcaatcgctggtgggcagcgacgatgacgccgacggcctgctggagccggcgcgccgtttggcgaccaagcgcgtggtggtgaaacgcccggactacgcgccgccgctggccgacgtgccggcgcacgccgccacgctgaccaaaagccaccgtttcgatatctacatgccgctgtaa

SEQ ID NO: 426245 - DNA, 2043 bp, Serratia marcescens
atgacaaatccgttgctgaccccgttttccctgccgccgttctcggcgatccgccctgaagatatcgtgcctgcggtgcaatccgcgctggcggactgccgcgccgcggtagagcgcgtggtcgcgcagccggggccgttcacctgggacaatctgtgtcagccgctggcggagtcggacgatcggctgtcgcgcatctggtcgccgatcgggcacctgaactcggtgaaaaacagcccggagctgcgcgccgcctatgagcaggcgctgccgctgctgtccgagtacggcacctgggtcggccagcacgaagggctgtaccaggcctaccgcagcctgaaagagggcgcggcgtttgaggcgctgagcgtgccgcagcgcaaggcggtggacaacgcgctgcgcgatttcgaactgtcgggcatcggcctgtcggcggataaacagcagcgctacggcgagatcgtcgcgcgcctgtccgaactgggttccacctacagcaacaacgtgctcgacgccaccatgggctggagcaaactgattaccgacgaagccgagctgagcggcctgccggagagcgccctggcgcaggcacaggcgatggcgcaggccaaagagcaggacggttggttgctgacgctggacatgccgagctacctgccggtgctgacctacgccgacaaccgcgcgctgcgcgaagagatgtaccgcgccttcgccacccgcgcctccgatcaggggccgaacgccggcaaatgggacaacagcgaagtgatggcggaaacgctggcgctgcgccacgagctggctcagctgctgggcttcgacacctacgccgacaagtcgctggcgaccaaaatggcggagagcccggagcaggtgatcggcttcctgagcgatctggccaagcgcgcccgcccgcaggccgagcaagagctggcgcagctgcgcgccttcgccaaacagcactatgacgtggacgagctcgaagcctgggacatcacctattacggcgaaaaacagaagcagcacctgttctccatcagcgacgagcagctgcgcccgtacttcccggagcagcgggtggtggaagggctgttcgaagtggtgaaacgcatctacggcatcaccgccaaagagcgtaaagacgtggagacttggcatccggacgtgcgcttcttcgatctgttcgccgccgacggcgagctgcgcggcagcttctacctcgatttgtacgcccgcgaaaacaaacgcggcggcgcctggatggacgactgcgtcggcagcctgcgcaaggccgacggcacgctgcaaaagccggtcgcttacctgacctgcaacttcaaccgcccgctgggcgaccagccggcgctgttcacccataacgaagtgaccacgctgttccacgagttcggccacggtctgcaccacatgctgacgcagatcgataccgccggcgtctccggcatcaacggggtgccgtgggatgcggtcgagctgccgagccagtttatggaaaactggtgctgggagccggaagcgctggcgtttatctccggccattaccagagcggcgagccgctgccgaaggccatgctcgacaagctgctggcggccaagaattaccaggcggcgctgttcatcctgcgccagctggagttcggcctgttcgatttccgcatgcacttcgaatacagcccggaaaaaggggcgcagatcctgccgacgctggcggaagtgaagaaaatggtggcggtggtgccttcgccaagctggggccgcttcccgcacgccttcagccacatcttcgccggcggctatgcggcgggttactacagctacctgtgggcggaagtgctgtcggccgacgcctactcgcgcttcgaagaagaggggatcttcaacgccgaaaccggcaaatccttcctcgacaacatcctgtcgcgcggcggttcagaagagccgatggcgctgttcaaacgcttccgtggccgcgagccgcagctggatgctatgctgcgccattacggcattaaaggataa

SEQ ID NO: 426246 - DNA, 462 bp, Serratia marcescens
atgagctgcattttttgcgacatcgtggcgggcaaggcgccgtgccataaaatctgggaagacgacgaccatctggcgttcctgtccatcttccccaacaccgacggttttagcgtggtgatccccaaggcgcaccacccgagctatgcctttgacctgccggacgaggtgttgagcgcgctgatgctggcgagcaagcgggtggcgaagcagttggatcgcgcgttcgacgacgtcggccgctgcggcatggtgttcgaaggttacggcgtcgaccacgtgcacgccaaactgatcccgctgcacggcaccgcgtcgctggagcagtggcggccgatcgaatcgacctcgccgaagtttttcgcgcgttacgagggctatatctcctcccacgacgccgcgcgcgccgacgacgagcagctggcggcgctggccgcccgcatccgccaaagcgccgtttaa

SEQ ID NO: 426247 - DNA, 1443 bp, Serratia marcescens
atgatgaaattgagcgaatacgtgagctacgatgcgctgggattggccgaattggtgcggcgtggcgaggtcagcgcagcggcgctgcaacaggcggcgcgggccgccgtcgaggcggtgaacccggcgattaacgcggtggtggaacactgggagcagccgccggaacaagacgacgggcctttgtcgggcgtgcctttcctgatcaaggacatcgccatcagcatggcaggcaagcgcgttgagctgggcagccggttggcgcagggcagcgtcgccgccgccgacagccatctgatgagtaatatccgccgggccgggctggtgacctttggccgcaccagcacgccggaaatggcgttcagcaccaccaccgaggccgtgctttacggtgccacgcgcaacccctggaacctggatttcagcgccggtggatccagcggtggcgccggtgcggcggttgccgccggtatggtgcccatcgctcacgccaccgacgccgccggctcgattcgcgtaccggcttcgtcaaacggggtatttggtctcaagcctacgcgcggtcgggtgccgcatggcccggtgatggatgaggtcttcaacggctttggcgtccagctggggctcagccgcacggtgcgtgacagcgccgcgttgctggatgcgatgcagcgtcctcacgttggcgagccgtattacacggcgccgccggcgcacagctggttatcgcaggtgacgcggcaaccgggcaggctgcgcatcggcatgatgaccgaggcgtggaacggcggaaaaaccgagtcgaacatcgccggcgccacggcggaaacggcggtgttattggcggcgttggggcatcaggtcagcgaaacggaaatggcgattggcgtcagttggcaagagttggtgttcgccaatgcgcaaatctggtgcgccaatctggtcggctgggtcgatggtctgagccaagcgagcggacgggccatttcaagcgaaacgctggagccggaaacgctggcctgctatcgctacggccaggcggtcagggcggtggatatggtgcgtgcgctcgaggtacgcaaccgggtgactcgcgcagtcggcgcctatttccagcaatacgacctgctgctgacgccgacgctacccgacctgccctggcggcttggccgttatggcgcgaatgcggcgaatatggacgggctggaatggacggcgcatttgttcgatcattcaccgttcaccccggtatttaacgtcgccggcgtaccggcgatgtcggtgccgctggcccaggatgcgcagcacaacctgccgataggcatgcagtttgtcgccggttttggccgtgaggatcggttgttgcagctggccggacagctggaacgcgccgcgccctggcatgggcggcgtccggcgatttgggcggggaatgctgtttaa

SEQ ID NO: 426248 - DNA, 939 bp, Serratia marcescens
ttgaaattgatagatttaattcggggaatagttatcaacaatttaaagcggctcgatctcaatcttttggtcacattggaagcgttgctcagcgagcgcagcgtgacgcgggcggcggcgcgcctcaatctcagccaaccttcggtcagcattcagcttgccaagctgcgtgagatctaccgtgacccgctgctgctgccgaacccgcgcggcatgctgccgacggcgcgcgcgctcggcctgttggcaccgctgcgccaaacgctggccgatgtgggccgcctggtcgcgccggagcaaccctttgatccgcggcaggcggaagtcacctggcagctggccgccgccgatgccgctgaatacgcaattttgctgccgatgctgccccgtctgcggctggcggcgccgaaatcccgtctggcgatccgcgaagcggcgcccaaacgcatgagccgcgatttggcggacggggtgatcgatctcggttttctgagccgggaagaagcgccggcggagctgcgccatcggccgctgtttcacgagaactacctgctggtcggccgccgggatcacccgctgttgcaacggccgccctcactcgaacagttctgccagcttgagtttgtgatggtttcgcaagatggcggcggttttcgtacccagatcgatacgctgctggccgcacaggggttaacccgacgggtcgtaatgtcggtgccgcacttcctgtttattcccgcgttgctggcgaagtccgatatggtcgccatgctgccttcgcgcatgctgggggaactgttgggggaattgcgcacctgcgcggctccgctggagatgccgggttacgacatggtgatggtatggcatgaacgctcccatctcgacccggcccacagctggctgcgcgagcaggtggtggccgcgctggggccgctataa

SEQ ID NO: 426249 - DNA, 405 bp, Serratia marcescens
atgagcaaacaggcgattttggcgaattaccccgacgcggcgcgctgggcgttcggcgacggccccgagttggccgacgaactgctgcagttggtgctgagcggggaaaagaccgccacctgcagctcctatgcgagctatcgccgggagcaaacgccgatgatcggcgacgataacattattctcgacggccgcggcgaaccggcctgcgtgatcaaaaccctggcgctgcgcctggtgcgctacgaccaggtgaccgccgagatggcggccaaagagggcgaaggcgacaaaagcctggcgttttggcggcgggggcatcgggaatttttcacccgcgaaggcacctttgcggcggatatgtggctggtgttcgaagagtttgcgctggtggagattttatag

SEQ ID NO: 426250 - DNA, 843 bp, Serratia marcescens
atgttaagttatcgccacagtttccacgccggcaaccacgccgacgtgctcaagcacaccgttcagagcctgatcatcgagtcgctgaaggaaaaagagaagccgttcctgtatctggatacccactcgggcgcgggccgttatcagctcagcggcgaacacgccgagcgcaccggcgaatacctggaaggcatcggcctgctgtggcagcgcgacgatctgccggaagagctggcggcctacatgagcgtggtgcacaacttcaaccgttccggcacgctgcgctactaccccggttcgccgctgatcgcccgccagctgctgcgcccgcaggacaaaattcacctgaccgagctgcacccgagcgactacccgctgctgcgcagcgagttccagaaagacgagcgcgccaaagtgcagcgcgccgacggctatcagcagctgaaatcccagctgccgcccctgtcgcgccgcggcctgatcctgatggacccgccgtatgaaatgaagaccgattaccaggacgtggtcaaaggcattcaggaaggctacaagcgtttcgccaccggcacctacgcgctgtggtacccggtggtgatgcgccagcagatcaaacgcatgctgcgcgatctggaagccaccggcattcgccgcattctgcagatcgaactggcggtgaaacccgacagcgatcagcgcggcatgaccgcctccggcatgatcgtcatcaacccgccgtggaaactggaacagcagatgaaaaacgtgctgccgtggctgcacaaggtgctggtgccgtcgggcatcggccaccatctggtgaactgggtggtaccggaataa

SEQ ID NO: 426251 - DNA, 1353 bp, Serratia marcescens
atgacgaaacattacgattatctagcaattggcggcggcagcggcggtatcgcatcgatcaaccgggcagccatgtacggccaaaagtgtgcgctgattgaagccaaagagctgggcggcacctgtgtaaacgtgggttgtgtaccgaaaaaagtcatgtggcacgcggcgcagatcgccgaggccatccatcagtacggcccggactacggcttcgacaccaccgtcaacgccttcgactggaagaagctggtcgccaaccgcaccgcctatatcgaccgcatccacaactcctacgacaacgtgctgggcaagaacaaggtcgacgtgatcaaaggcttcgcgcgcttcgtggatgcgcacaccgtggaagtgaacggcgagctcatcaccgctgaccacatcctgatcgccaccggcggccgcccgagccacccggctattccgggtgcggaatacggcatcgactccgacggcttctttgagctggacgctatgccgaagcgcgtcgccgtagtcggcgccggctatatcgccgtggagatcgccggcgtgctgaacgcgctgggcgcggaaacgcacctgttcgtgcgcaagcacgcgccgctgcgcagcttcgatccgatgatcgtcgaaaccctggtggaagtgatgaacaccgaagggccgagcctgcataccgaatcggtgccgaaagcgatcgtcaagaacgccgacggcagcctgacgctgcagctggaaaacggcaaggcattcaccgtcgactgcctgatttgggccatcggccgcgaaccggcgaccgacaacctgaacctcggcgttaccggggtgaagaccaacgagcaaggctatattgacgtcgataagttccagaacaccaacgtcaaaggcatctacgcggtgggcgacaacaccggcgcggtagagctgaccccggtcgccgtggccgccggccgccgcctgtccgagcgcctgttcaacaacaagccggatgagcacctggattacagcaacatcgccaccgtggtgttcagccacccgccgatcggcaccgtcggcctgaccgaaccggaagctatcgagaagttcggcgcggacaacgtgaaggtgtacaaatcctccttcaccgccatgtacagcgccgtgacgcagcaccgccagccgtgccgcatgaagctggtgtgcgcgggtaaggaagagaagatcgtcggcctgcacggcatcggcttcggcatggatgaaatcctgcagggcttcgcggtagcggtgaagatgggcgctaccaagaaggacttcgacaacaccgtggcgatccacccgaccgcggcggaagagttcgttaccatgcgctaa

SEQ ID NO: 426252 - DNA, 495 bp, Serratia marcescens
atgctgttcaaactatgcaaaaccctcgcgatggcctgcgtggccctgattatcgcccagagcagcgcgctcagctttaccctcgaagtggcgggcaagatcgacaacgtgaccgacccggtcaacaaaagctatctgttcaccgataagcagctgttggcgatgccggtgcgcagcatcactacctccacttcctggacgccgcagagaaaattcgaagggatttcggtggccgatatcctggagcgcgtcggcgccaagggcgaaacgctgaccttctatgcgctgaacgactattacatcgacgtgccgctgtccgacgtcaagaagtacaatatgatcctggcctacaagatggacggggagatgctgaaactcagaaacttcggcccgttgttcctggtttacccgcgcgacgccgccgggcctgaactgaactcgccgttgtacaactcgcgctttatctggcaagtcgacaggatcgtgatcaaatga

SEQ ID NO: 426253 - DNA, 1785 bp, Serratia marcescens
atgaagctgacgacctttaagaacggcagcaggctggcgatcccggccattttcgccgcgctgtttttagtggcttcgaccgtcacgctctattactacagcgccaccctgtcgaagaaagggctgtatgccatcgccggcacgcaggagaactactcctggtcgatcgccaagttctccatcaagctggcggagttcgacacgctggtcgagcagcaaagccacgccgcgcaggtggacaacgacaacctgcggctgcggttcgaaatcctctattcgcgtttttacgtgctggaaaccgtctccgaatcgacccagccgctgtacgccgagccgggctacccggaagtggtcaaacagatgcgcctgcagatggatcgcatcgataagctgctgagcagtcggaaaatcgacttcggccaggtttccgcggccatgagggccatcaagccttacgccatcgaaatggccaacctgaccgaccacgccgaggtgaagcagcgcaccgccgcctatgaggattacatcgagaaacggcacattattttctatgggctggtgatcgtcatgttctcggtgatcacgctgatcgccatcaccctgatcgtgttccgtcagcagcggctgaccattcgccagcaggccaaggccatcgaggcggagaaagcgacgcgcaccaaaaacgccttcctcggcgccatcggccacgagctgcgcacctcattgcagagcgtgatgtcggccatcgacgtgctggtgaatacccgggtgtcagctgagcatgcggacaccttccagcggctggagaccgccgcgcagcaaatcgaaagccagatgaaagatctgaccgactacgcgcacctcgacagcggcatgatggaattgcgcatcgtgccgttcgacgcgcagaagctgatcgcggagaccgccaacgaaatcgccaccctgacccgcaaagagcaggtcaaactgagctgtgaagtggaatgcagccacctgctggtgcactccgatccgctgcgcatccggcagattatcgtcaacctgctgaccaacgcctacaagtacaccgaaagcggcagcattacgctgcacagctgcctgcgccgccagccgggcggcagttcgttgattatcgaagtgaccgacaccggcatcggtatcgaaaaagaccagctcgatcagatcttcaagccctttacccagttggatcagtcgcataccaagcagtatgccggcgtcgggatggggctggcgatcgtgcacggcctggtgacattgctcgacggcaccatcacggtgtacagcgaaatcaagaagggcagcacctttatcgtcagcattccggtgcagatcagtgaagacgaacgcgccgacgcgcccgccgccgccaatgcctctctgcagcagaagccacagcaggtgctggtggtggatgacaacaagtcggtgggtgacgcctttgcggcgctattggacaagctgggctaccagcacgaactgtgcgactcgccggagcgcgcgctgcagaagctgctcagacgcccttacgacgcgctgttgctggatctgcagatgccgggcatcgacggcgccgccctggccaggcagctgcgcaaccgccgcggccccaaccgccatgtgccgatcatcggcatcagcgcctacacgccggagcagctgacggcggatcagcgcgccctgttcgataactacctgatgaagccggttcggctggatgcgctgtcaaacgcactggccgaggtgttccccgctaaagattaa

SEQ ID NO: 426254 - DNA, 852 bp, Serratia marcescens
atggataacaatcaccaaaaattcgattcacagtcgattgccaatcgggtcagggagctgtttttacattacgggattggaaaacgtcagcatgcccgcgagctcagccgcatcttggatctgagtttttcacatgcgcaccgcaaactgaaagggcaaagcccctggacgctggaacagatcaacagcgtcgcggccgcgttgggagaaacgccggcggcgatcgccgatttgagcgccgaacacgagaccaccgagccaaacatggcgcgcgatgccatctttttcgtggcgggggtggcgatgccttgcgtcgggcacattggcgatgagcttcctgccgggcggccggcggaatttgtggcgctgcgcgtggaagggcagtggcgtatctatcgcgccgatgaggcaccggcaggcccgcgttacggcgtcgatctgatcgaaatccggcccggcttcggcgacgacgagcggctgagcatcgcggtattggacgattcgcatcaggcggccgatgagctggccaagtatctcggcggctgcggcttcaacgcggtggcgttttacgacgtcgacagtttttgtcaggcattgcagcaaagtctgttcgacggctacgtggtggactggctgatcggtgaggaaacggcggatcgctgtatcgccaccatccgcgcctccgacaacccggacgcgccggtactggtgctgaccggcgaactgggtaccgaccgacgcgagtcggaaatcgctcaggcgatgcgcgagtacgacgtgctcggcccttatgaaaagccggtgcggctccatgtgatcgaagccgcactgcaacgctgttttaatctttag

SEQ ID NO: 426255 - DNA, 2115 bp, Serratia marcescens
atggctcgtacaacacccattgcacgctaccgcaacatcggtatcagtgctcacatcgacgccggtaaaaccaccactaccgaacgtattctgttctacaccggtgtaaaccacaaaatcggtgaagttcatgacggcgctgccaccatggactggatggaacaggagcaggagcgtggtattaccatcacttctgcagcgactactgctttctggtctggtatggccaagcagttcgaaccgcatcgcgtaaacatcatcgacaccccagggcacgttgacttcaccatcgaagtagaacgttccatgcgtgtgctggatggcgcggtaatggtttactgtgctgttggtggtgttcagccacagtctgaaaccgtatggcgtcaggctaacaaatacaaagtgccacgtatcgcgttcgttaacaaaatggaccgtatgggcgctaacttcctgaaagttgtaggccagatcaaatctcgtctgggcgccaaccctgttcctctgcagctggctatcggcgcagaagacaaattcaccggcgttatcgacctggtgaaaatgaaggcgatcaactggaacgaagaagacgcaggcgtaaccttcgaatacgaagacgtcccggctgacatgatggatctggctgaagaatggcgccagaacctgatcgagtccgctgcggaagcttccgaagagctgatggaaaaatacttgggcggcgaagagctgaccgaggaagaaatcaaaactgctctgcgtcagcgcgtactgaacaacgaaatcatcctggttacctgcggttctgcgttcaagaacaaaggcgtgcaggcgatgctggatgcggtaatcgaatacctgccggcaccaactgacgttcctgcgatcaacggtatcctggacgacggtaaagacactccggctgagcgtcacgcaagtgatgacgagccgttctctgctctggcgttcaaaatcgctaccgacccgttcgtcggtaacttgaccttcttccgcgtgtactccggcgttgttaactccggcgacaccgtgctgaactccgttaagtctgcgcgcgagcgtttcggccgtatcgttcagatgcacgctaacaagcgtgaagagatcaaagaagttcgcgcaggcgacatcgccgctgcgatcggtctgaaagacgtgaccaccggggacaccctgtgtgatccagactctccaatcatcctggagcgtatggaattccctgagccggtaatctctatcgccgttgaaccgaaaaccaaagctgaccaggaaaaaatgggtctggctctgggccgtctggctaaagaagacccgtcattccgcgtatggactgacgaagagtctaaccagaccatcatcgccggtatgggtgaactgcacctcgacatcatcgttgaccgcatgaagcgtgaattcaacgttgaagctaacgtgggcaaacctcaggtagcttaccgcgaagcgattcgcgcgaagattaccgatgttgaaggtaagcacgccaagcagtctggtggtcgcggtcagtacggtcacgttgtgatcgacatgtacccactggagccgggctctaacccgaaaggttacgagttcatcaacgacatcaaaggcggcgtaattcctggcgaatacatccctgccgttgataaaggcatccaggagcagctgaagtctggtccgttggctggttacccggtagtagacatgggtattcgtctgcacttcggttcttaccacgacgttgactcctctgaactggcgtttaaactggccgcgtctatcgcctttaaagaaggctttaagaaagcgaaacccgttctgcttgagcctatcatgaaggttgaagttgagactccagaagagaacaccggtgacgttatcggtgacttgagccgtcgtcgcggcatgctgcgcggtcaggaatctgaagtgactggcgttaagatccacgctgaagtaccgttgtccgaaatgttcggctacgcaactcagctgcgttctctgactaaaggtcgcgcatcatacaccatggaattcctgaagtatgatgatgcaccgaacaacgtcgctcaggccgtaatcgaagcccgtggcaaataa

SEQ ID NO: 426256 - DNA, 471 bp, Serratia marcescens
atgccacgtcgtcgcgtaatcggccaacgtaaaatcctgccagatcctaagttcggatctgagctgctggccaaatttgtaaatatcctgatggtagacggtaaaaaatctactgcagaagcaatcgtctataccgcgctggagaccctggctcagcgttctggtaaagatcacctggaagctttcgaagtcgctctcgacaacgttcgcccgactgtagaagttaagtcgcgtcgcgttggcggttctacttatcaggtaccagttgaagtccgcccggttcgtcgtaatgctctggcaatgcgttggatcgttgatgctgcacgtaaacgcggtgataaatccatggctctgcgcctggcgaacgagctgtctgacgcagcagagaacaaaggttctgctgttaagaagcgtgaagacgttcaccgtatggccgaagccaacaaggcgttcgcccactaccgctggtaa

SEQ ID NO: 426257 - DNA, 375 bp, Serratia marcescens
atggcaacaattaaccagctggttcgcaaaccacgctctgtgaaggctgctaaaagcaacgttccagcgctggaagcctgcccgcagaaacgtggcgtatgcacccgcgtatacaccactaccccgaaaaaaccaaactccgcactgcgtaaagtttgccgtgtgcgtttgaccaacggtttcgaagtgacttcctacatcggtggcgaaggccacaacctgcaggaacactccgtaatcctgatccgtggcggtcgtgtaaaagacctgccaggtgtgcgttaccacaccgtccgtggtgcacttgactgctccggtgttaaagaccgtaagcaagcccgttccaagtacggcgtgaagaagccaaaggcttaa

SEQ ID NO: 426258 - DNA, 288 bp, Serratia marcescens
atgctgtataccctgagccactcgccaaaccaatgtgacttgcctgcgctgctgcgcctgacggcggagggtgacgcgctgctgctgctgcaggacggcgtgcttgccggccttgccggcagcgcccatcttgaatcgctgctcgccgcccccatatccctttatgcgctgcaggacgacctggaagcccggggattgggcggtcatttttcgcacaaaatcactgtcgtcggctataatcacttcgttgaattaaccgaacaacaccgcagccaaatggcctggtaa

SEQ ID NO: 426259 - DNA, 360 bp, Serratia marcescens
atgaaacgagtcgcttttgttttcacccacgggccacacggcggcgccggcggcagggaagggctggatgcgctgctcgccacgtcggcgctcagtgaagatttgggggtgttttttgtcggcgacggcgtattgcagctgttgccaggccagcaaccggaaaagattttggcgcgcaattacatcgccaccttcggcgtgctgccgctgtatgacgtggagcggtgctatctgtgccaggcttcgctgcaggagcgtggcctgagccaggtgaccgattgggtgctggatgccgaggtgctggcaccggacgaactgcgccgcgaactggccggctacgacgccgtgatgacgttttag

SEQ ID NO: 426260 - DNA, 390 bp, Serratia marcescens
atgctcgattattgcctgttggtcaccggcccggcttacggcacgcagcaggccagcagcgcctatcagttcgctcaggctttgttggcgaaagggcaccggctttccagcgtctttttctaccgtgagggcgtgctgaacgccaaccagctgaccgcgcccgccagcgacgagttcgacctggtgcgcggttggacgcaactggcgcagcaacacggcgtagcgctcaacgtctgcgtagccgccgcgttgcgccgtggggtcaccgacgagcaggaggcggcgcaacaggggctggcaagcgccaacctgcagcctggctttaccctgagcgggctgggttccctggccgaagcgtcgctgagttgcgaccgtctggtgcagttctga

SEQ ID NO: 426261 - DNA, 723 bp, Serratia marcescens
atgtcgaattcgcttttatccagcgaagccagcgaacttgatttgctgaatgaacgtccgtttactcaaacggatcatgaaatcctgaaatcctatgaagcggtggtcgacgggctggcgatgttgatcggcggccactgcgagatcgtactgcacgcgctggaagacctgaacagctcagcggtacgcatcgccaacggtgaacataccgggcgtaaaatcggctcgccgatcaccgatctggcgctgcgcatgctgcacgacatggccggcgacgacagcagcgtgtcgaaagcctactttacccgcgccaagagcggcgtgttgatgaagtcggtgactatcgccattcgcaatcgcgagcagcgggtgatcggcttgctgtgcatcaacatgaacctcgacgtaccgttttcgcagatcatgcagacctttatgccgccggccacgcaggacgtgccgtcgtcggtgaattttgcgtcttccgtcgacgatctggtggcgcagacgctggagttcaccatcgaagaggtgaacgccgaccgctcggtgtccaataacgccaagaaccgccaggtggtgctcaacctctatgagaaaggcatcttcgacatcaaggatgcgatcaaccaggtggcggatcgcctgaacatctccaaacacaccgtgtatctgtacatccgccagttcaagagtggcgatctgttgggaagcgaccgttga

SEQ ID NO: 426262 - DNA, 840 bp, Serratia marcescens
atgaaatctttgtttaaagtcacgcttctggcaaccaccatggcttttgctctgaatgcgacccaggtcatggcagccgatgccgccaaaccggcagaagccgctaaaccagcggacgcggcagtagcaccgagcaccggcaagttcaaaaacgacgacgagcaagcggcttacgcactgggcgcctctctcggccgttacatggacaactctctgaaagagcaagagaagctgggcatcaagctggacaaagatcagctgattgccggcgttcaggacgcgttcgccaacaagagcaaactgaacgacgccgacatcgagaagaccctgcagggcttcgaagcgcgcgtgaaggcttccgctcaggcgaagatggagcaggacgccaaggataacgaaaccaaaggcgccaagtaccgcgatagcttcgctaaagaaaaaggcgtgaagaaaaccgaatccggcctgctgtaccaggtagagaagccgggcgcgggtgaagcgccgaaagacagcgacaccgtggtggtgaactacaaaggcaccctgaccgacggtaccgagttcgataactcctacacccgcggcgagccgctgtcgttccgtctggacggcgtgatcccaggctggaccgaaggcctgaagcacatcaagaaaggcggcaaaatcaagctggtgatcccaccggcgctggcctacggcaaaaccggcgttccgggcatcccggctaactccacgctggtcttcgacgttgagctgctggacgtgaaagcggcgccgaaagccgacgctaaagccgaaaaaccggcggacgcgaaagcagacgccaaagcgaaataa

SEQ ID NO: 426263 - DNA, 228 bp, Serratia marcescens
atgcacaacgccgacattcaacgcctgctacagcggcttgaagaactggaaagccgtcaggccttccaagagctcaccatcgaagagctcaaccagaccgtcattcagcatcaaatggaaatgctgaagatgcgcgaacacctgcgcatgttgaccgacaagctgcgctcgacccaaacctcaatgatcgcctcgcaatcggaagaaacccctccgccgcactattga

SEQ ID NO: 426264 - DNA, 1173 bp, Serratia marcescens
atgacgagtcatttcaacgccatcatcgatcgccacaacaccggctccgtgaagtgggacttcatcgaccgctatctgcaactggacggcagcgaactgttgccgatgtgggtgtccgatttcgactttccgtgcccgccagaggtgcagcaggcgctgcatcagcgggtggaccacggcgtctttggctacagcgaacgcgacgacgcctactaccaagcggcaatcgactggtttgccaagcggcacggcttgccgctgcggcgcgagtggttcacgtcgattgaaggggtggtgccggggctggcgatgctgatccaactgctcagcaagccgggggacggggtggtggtgcaggggccgtattatggctcgttcgccaagatagtcaccatgaacggcagagaggtgattgaaaacccgctgcgggaaaccccgcagggataccggatcgatttcgaccagctggccgcctgtctggcgcagcgtaaaccgccgctgttgttgctgtgcaacccgcacaatccaaccggccgttgctggcgccgcgatgaactggagcggctcatggcgctctgccacgcccacgacgtcacggtgatctccgatgaaatttgggctgacctgctgctgcccggcgagacgtttacgtcggtgttgcatctgggcgaggaatatcgcgagcgggtaattgtggcgacgtccgccagcaaaacgttcggcctttcctcgctgcgcatttcgaatttcctgatccccaacgcccggcttcggcaggcgtttgtcgatcgactgaacgcccacggtctggatgtattcaacgcgctgtcgatgacggcggcgaccgcggcctatcaacggggcgctgcctggcttgatgagctgctcgactacctggcggagaatcggcgttggtttgagcaggcgctggcggccgccgcgccctggtgcgcgatgacccaggctgaagggacctatctcgcctggctggattgccgctcgctgggtttgaacgatgctgacttgcagcaggcgctggtggcggtggcgaagctggcgccgtcgatgggcagcggtttcggcccgcaggggcgcggttttatccgcataaacctggggtgcccgcgccggtatctcgagcgtgccgtcgaagggttggcacgcctgaaataa

SEQ ID NO: 426265 - DNA, 1440 bp, Serratia marcescens
atggataataagaaaacgctcaaccttgggttggcgacgctgccgattgtggccatgctgttgctgctcatcatcggctatggccagtttggcctgcgcattgaaccgctgctgctggtttccgccgccatcgccgccgcgttggcctggtggcaaggctaccgctgggacgacatcatcgaggccatcgtggccaaactggcgaaggcgatgccggttatcctgatcctgatctgcgtgggcggcctgatcggcacctggatgatcagcggcacaatcccttacatggtgtactgggggctgaagctgatcagcccgcaatacattctgatcgccgcattcttcatcaccagcgtgatctcggtgtgcaccggcacttcctggggagcggccggcaccgtgggcgtggcgctgatgggcgtggccgccggtctggacgtgccgctggccgccgcggccggggcggtggtgtccggcgcttacttcggcgacaaaatttcgccgttgtccgattcgaccaacttcgcggccatcgtcgcggataccgatctctacagccatatccagcatctgatgtacacgacgctgccgagcttcatcctggccgccgtggtgtacctgatcgccggccacaccggtgcggtgggcagcgtggcaacgccggaaaaagtgaccgaaatcgtcggcgcgctcgaggggctgtaccacttcaatctgctgctgatcctgccgccggtgctggtgctgtggggcgcggtgaccaaacggccggtgatccccgtcatgctggccgcctgcgcgctggcgatcgccatcggcgtcgcgctgcagggctttagcctgcagcaggggctgaatgcgttgatggacggtttcaatctgtcgatgtttgccgctcagggccacaacgttgagggtatcgtcgccgatgtgccgcgcctgctgaaccgcggcggcatgttctcgatgatgagtacgatcctgctggtgttctgcgccttttccttcgccggcgctctgacgctgaccggcgcgctgacggtgatcatcagccggctgctgaacgtggtgcacaccaccggccagctgatcgccgccaccgttgccaccactatcctggtgaccggcgcgaccagcgacggcaagctggcgctgctgatcccggcggagctgttcaaaggggcctatcggcgcatggggctggacaacaaaaatctgtcgcgcaccgtcgaagatgcgggcaccgtcatcgaaccgctgatcccgtggacggccgccggcatttacatggccaccacgctgggggtcagcaccctcgatctgctgccgtgggcgatccaatgttatgccgcggtggtgttcgccctgatttatgggttcaccggcttcggtatcgccaaactccaacctcagaacgacttgcagcgtaaggaagcctga

SEQ ID NO: 426266 - DNA, 1029 bp, Serratia marcescens
atggccaccatgaaagacgtggcgcggcgcgccggcgtttccacggccaccgtcagccgggtgatcaataataccgcctacgttgaaccggtgacccgcgaacgcgtcgagaaagcgatgcgcgagtttaactaccaccgcaacgccgcagcgctggcgctggcgaaaagaagcggcaatatgctgggattgctgaccggcaatctcgacgatccgtttttttcacgcctggcgcggggcgtggaagacatcacgcggcaggccggcgtgcgtttgatgttgtgcagcggcgggcatcaggccgagctggaaaaaagcggcctcgattttctcatcaatcagggatgtgaagccatcgtggcgcacgtcacgcgcatgggggaggaggcgctgctgcgctacgccgcccatacgcccgcgctggtgctgatcaatcgttatctgcccgccatcgccaaccgttgcatctggctcgacaacgccaatgcggcgcagacggcgaccgagctgctcatacgccaggggcatcgaagaattgcctgcgtgacggcggatctgccgatcgacgatcgcgcgcagcggctagcgggttaccgccaggccatggccgccgccggcattgaggtgcccggcagctggatcatcagcgtgcccttcaacgagcgaggaggcgaactggcggccgagcgcgttctggccagcgaccaacgcttcaccgccgcagtgacgttcaacgacgtgatggccgccggcatgatgcgcacctgccatcaacggcaagttcagctgcccgaggcgctgtcgatcgtcggctttgacgacattgccctggcgaaatatctccatccttcgttgaccaccgtgcattacccgatcgagaaaatggcccgacgcgccgcgcgcctggcgctgcagatccacagcggcagcgacgtcgcgccgcagaacaaccgcttttcggccgaacttatcctgcgagactccgtaaccgacggtgaggcgcatgcgcaaagcaagcgcggcgaatga

SEQ ID NO: 426267 - DNA, 588 bp, Serratia marcescens
atgaaagtagcaaaagacttggtggtcagcctggcttaccaagtacgtacagaagacggtgttttggttgatgagtctccggtgagcgcaccgctggactatctgcacgggcatggttctctgatcgcaggtctggaaaaagcactcgaaggccacgacgttggcgatcgttttgacgttcacgtcggcgcgaacgacgcgtacggcaactacgacgaaaacctggtgcaacgcgtaccgaaagacgtcttcatgggcgttgacgaactgcaggtcggcatgcgtttcctggctgacaccgatcagggcccggtaccggttgaaatcaccgaagttgacggcgaccacgtggtggttgacggcaaccacatgctggccggccaaaacctgaacttcaacgtggaagttgtcgcgatccgcgaagcgaccgcagaagaactggcgcacggtcacgtacacggcgagcacgaccatcaccacgaacacggtgacggctgctgcggcggtcacggccacagccacgatcacgaccatggccacgaccacggtaaaggcggttgcggtaacggcggctgcggctgccactaa

SEQ ID NO: 426268 - DNA, 204 bp, Serratia marcescens
atgtctgcaacacgtaagagatttatcgccggggcggtgtgcccgagctgcagcgccatggatacgctggcggtatggcgggaggatcaggtggaggtggtggagtgcgtcaagtgcggccaccatcagcgccagaccgaacaacaggtggaaaaacacgttcgcccgcaagagcaggtgatcggcattttccagccgaagtag

SEQ ID NO: 426269 - DNA, 1809 bp, Serratia marcescens
atggaaggatcgaccttactgaccgccattttgctgttcctgttcgccgcggtggtgacggtgccgatcgcccgtcgcctggggatcggcgcggtgctgggctatctgatcgccggcatcgccatcggcccctggggattgggcttcattcgcgacgtcgacgagatcctgcatttctccgagctgggcgtggtgttcctgatgttcatcatcggcctggagctgaaccccagcaagctgtgggagctgcggcgctcgatcttcggcgccggcgccggccaggtgttgatcaccgctgcggtgctgggcgcgttgctgtatctgacgcacttcgcctggcaggcggcggtgatcggcggtatcggcctggcgatgtcttccaccgccatggcgctgcagctgatgcgcgagaagggcatgaaccgcaacgaaggggggcagctcggcttctcggtgctgctgttccaggatatggcggtgatcccggcgttggcgttgatccccattctggccggcgccggcggaaccagcgacgactgggcgaagatcgcgctcaaggtggcggcgttcggcggcatgctgatcggcggccgcttcctgctgcggccgctgttccgctatatcgccgcttccggcgtgcgcgagatcttcaccgccgcggcgctgttgctggtgctcggctcggcgctgtttatggagacgcttggcctgtcgatggcgctcggcaccttcatcgccggggtgctgctggcggagagcgaataccgccacgaactggagatttccatcgagccgtttaaagggctgctgctggggctgttctttatctcggtaggcatggtgttgaatatcggcgtgctctacaccaatctggccgaggtgttgatcggcgtgctggtgctggtgacggtcaaatccggcgtgctctacggggtgtcgcgtctgtttggcctgcgcagttcggtgcgcctgcagttcgccggggtgctcagccagggcggcgagttcgccttcgtgctgttttctgcagcgggcgcgcaaaaggtgctgcagccggatcaactctccttgctgctggtggtggtgacgctgtcgatgatgaccacgccgctgctgatgcaggccatcgaccgcattttggcgcgtcgctataacgccaagggcgaagaagaggaaacgccgtacgtagaggacgacgatccgcaggtaatcatcgtcggcttcgggcgtttcggccaggtgatcggccgcctgttgatggccaacaaaatgcgcattaccgtactggagcgcgacgtcagcgccgtcggcgtgctgcggcgttacggttaccaggtttattacggcgacgccaccgagctggagctgctgcgcgcggcgggcgccgagaaggccaagtcgatcgtgatcacctgcaatgagccggaagacaccatggagatcgtgcggctgtgccagcagcacttcccgaacctgagcattctggcgcgggcgcgcggccgcgtggaggcgcatgagttgctgcaggcgggcgtgaagcagttcagccgcgagaccttctccagcgcgctggaactggggcgcaaagcgctgatggagttgggcatgcacccgcaccaggccttccgcgcccagcagcatttccgccgcctggatatgcgcatgctgcgtgaactgatgccgccgcatcagggcgacgtggcgcaaatttcccgcgtgaaagaggcgcggcgcgagctggaagagctgttccatcgcgaaatgcaaaaagaaagtcgccagttcgacggctgggacgaatacgaataa

SEQ ID NO: 426270 - DNA, 552 bp, Serratia marcescens
atgtcgcagccgcccaaggtcttgctgctgtatgcccatccggaatctcatgactcggtggcgaaccgggttttgcttcgaccggcgcagcagttggaacatgtcaccgtgcacgatctctacgcgcactaccctgatttttttatcgatatccatcacgaacaacagctgctgcgtgagcatcaggtcatcgtgtttcagcacccgctgtatacctacagctgcccggcgctgctgaaggagtggctggatcgcgtgctgtcgcgcggcttcgccagcggggtgggcggcaatgcgctggcgggcaaatactggcgctcggtgatcaccaccggtgagccggaaggcgcctaccgcaccggcggttataaccactatccgatggaagatatcctgcggccgttcgagttgaccgccgggatgtgccatatgcattggctgacgccgttcgtggtctattgggcgcggcggcagaagccggaagtgctgcgcagccatgcggacgcctacggcgagtggctgagccacccgctgccgcacggagggcggtga

SEQ ID NO: 426271 - DNA, 1914 bp, Serratia marcescens
atgattgtattctcctcgctacaaatccgacgcggcatccgcgtcctgctggacaacgccacggcgacggttaatccaggtcagaaggtcggcctggtgggcaaaaacggctgcggcaaatccacgctgctgtcgctgctgaagggcgagatcgcggcggacggcggcagctttaccttccccggcaactgggcgctggcctgggtcaaccaggagacgccggcgctggacgtgccggccattgagtatgttatcgacggcgaccgcgagtttcgccagctcgaagccgaattgcaggcggccaacgaccgcaacgacggccacgccatcgctaccctgcacggcaagctggacgccatcgacgcctggaccatccgttcccgcgccgccagcctgctgcacggcctcggcttctccaacgaacagctgcaaagcccggtgcgcgacttctccggcggctggcgcatgcgcctcaacctggcgcaggcgctggtgtgccgttccgatctgctgctgctcgacgaaccgaccaaccacctggatctcgatgcggtgatctggctggagcgctggctgaaaagctatcccggcacgctggtgctgatctcgcacgaccgcgacttcctcgatccgatcgtcgacaagatcctgcatatcgaacagcagacgatcaatgaatacaccggtaactattcgtcgttcgaacgccagcgcgccaccaaactggcgcagcagcagtcgctgtatcagcaccagcaagagaaagtggcgcacctgcaaagctatatcgaccgtttccgcgcgcaggccaccaaggccaagcaggcgcagagccgcatcaagatgctggagcgcatggagctgatcgccccggcacacgtcgacaacccgttcaccttcagcttccgtccgccggaaagcctgccgaacccgctgctgcgcatggacaaagtcagcgccgggtatggcgataaagtgatcctgaagtcaatcaagctgaacctggtgcccggctcgcgcattggcctgctcggccgcaacggcgccggtaaatccacgctgatcaaactgctggccggcaccctggaaccgctgagcggcgagattggcctggcgaaaggcatcaagctgggttacttcgcccagcaccagctggaattcctgcgcgccgacgaatcgccgctgcagcacctgagccgcatcgcaccacgggtgctggaacagcagctgcgcgactatctgggcggcttcggtttccagggcgacaaggtcagcgaagtgaccgaacgcttctccggcggcgagaaggcgcggctggtgctggcgctgatcgtctggcagcgccctaacctgctgctgctcgatgaaccgaccaaccacctggatctcgacatgcgtcaggcgctgaccgaagcgctgatcgatttcgaaggcgcgttggtggtggtctcgcacgaccgtcacctgctgcgttccaccaccgacgatctgtacctggtgcacgacggccaggtcgagcctttcgagggcgatctcgacgactaccagcagtggcttgtcgacctgcagcgccaggaaagccagcaggacgcgccggaaaaagagagcggcggcaacagcgcgcaggcgcgcaaggatcaaaaacgccgcgaggcggagttccgtacgcagacccaaccgctgcgcaagcagatcgccaagctggaacagcagatggaaaaactgggcgccgaactggcggcggtggaggaacagctggcggatcccgcgctgtacgacatcagccgcaaggccgagttgaccgactgcctgcaaaagcaaagccaggccaaatccgcgctggaagagacggaaatgacctggctggatgcgcaggaacagctggaacagttaacgcaggcgttcgaagcctaa

SEQ ID NO: 426272 - DNA, 849 bp, Serratia marcescens
atgaacgaacgtctgaatatcaccccgctggggccttacatcggggcgctggtggaaaacgtcgagttggcccggccgctgggcgacggccagtttgaacagctttatcacgccttgctgaagcatcaggtgctgttcttccgcaatcagccgatcacgccgctgcagcagcgcgatctggccggccgcttcggcgatctgcatatccatccggtctatccgcacgccaccgatgtggaagagatcatcgtgctcgatacccacgacgacaacccgccggacaacgataactggcacaccgacgtgacctttatcgacaacccgccgctgggggcgatcctggcggccaagaccttgccttccaccggcggcgatacgctgtgggccagcggcatcgcggcctacgaggcgctgtcggcgccgttcagaacgctgttggcggggctgcgtgcggagcatgacttcaccaagtcgttcccggaacacaaacatcgcggcagtgtagaggagcatcagcgctggcaacaggcggtgcagaaaaatccgccgctgctgcatccggtggtgcgcacccacccggtcagcggccggcaggcgctgttcgtcaatgaagggtttaccacgcggatcgtcgatctggcgccgaaagagagcgacgctttgctgaacttcctgtttgctcacatcaccaaaccggagtttcaggtgcgctggcgctggcaggaaaatgacgtggcgatctgggataaccgcgtgacgcagcactacgccaacgcggattatctgccgcagcggcgcatcatgcaccgcgcgaccattctgggggataggcctttttacaaggcctga

SEQ ID NO: 426273 - DNA, 837 bp, Serratia marcescens
atgagcctgcattccactctgaaggccgcggcgcagccgcagggcaaagcggcgcgccgtttcagcgtgccgcgcaacgtttggctgagcggcgccacgctgttgacggtgttgatcgtctggtggggcgtgacggcgctgcagctgatcagcccgctgtttttgccggcgccgcagcaggtactgcaccagctgatcaccatcgccagcccgcaaggctttatggacgccacgctgtggcaacacctggcggccagcctggggcgcattctggtagcgctgttggcggcggtgatcgtcggcattccggtgggcatcgccatggggctgaacgacacggtgcgcggcattctcgatccgctgattgaaatctatcgcccggtgccgccgctggcctatctgccgctgatggtgatttggttcggcatcggcgaaacctcgaagatcttgctgatttatctggcgatcttcgcgccggtgacgctgtctgccgtggccggcgtgcgcagcgtagcgcagttacgggtgcgtgccgcccgcgcgttgggcgccacgcgttggcaggtgctgcgtttcgtggtgctgccgagcgcgctgccggagatcctgaccggcatccgcatcgggctgggcgtcggctggtcgacgctggtggccgccgaactgatcgccgccacgcgcggcctgggatttatggtgcaatccgccggtgagtttctggcgaccgacgtggtgttggccggcatcggcgtgattgcggtgattgcatttgggctggagctggggctgcgtgccctgcagcgccgattgaccccgtggcatggagtacagcaatga

SEQ ID NO: 426274 - DNA, 768 bp, Serratia marcescens
atgctaaacgtcaatcatctttcagcagagtatcaggggcggcccgcgctgcgtgacgtgtcgttccagatcgccgccgggcaactggtggtggtgctcggcccgtcgggctgcggcaagaccacgctgctgaatttgatcgccggatttatcgagccttcagctggcagcatcacgctggatggaacgcccgttcacggcccgggcgccgaacggggcgtggtgttccagcatgagggtttactgccgtggcgcaacgtggtggacaacgtcgagttcggcctgcagctggccggcgtcggcaaggcgcagcgccgccaggtggcggagcagatgctgcagcgcgtggggctggcgggctatgaacagcactttatctggcagctttccggcggcatgcgccaacgcgtcggcatcgcccgcgctctggccgccgatccgcggctgttgttgctggacgaaccgttcggtgccctggacgcgttcacccgcgagcagatgcaggagctgttgctgaccatttggcgcgataccggcaaacaggtgctgctgatcacccacgatatcgaagaggcggtgttcctcgccagcgaactgctgctgctgtcgccggggccggggcaggtggtggagcggctgtcgctgaacttcggccaacgctatgccgacggcgaagcctgccgcgccatcaagtccgatcctgaatttatcgcgcagcgcgaatacgtgctgggcaaagttttccaacagcgcgaggccttgctatga

SEQ ID NO: 426275 - DNA, 996 bp, Serratia marcescens
atggcgggcaaactcttttccttacgcaacgcggcgctgttggcgctggcgctcagcgcagccagcgcctacgcggtggacgtgaccgtggcgtaccagacgtcggcagaaccggccaaggtggcgcaggcggaaaacagcttcgccaaacggtccggcgcgaccgtcgactggcgtaagttcgacagcggctccagcgtgctgcgtgcgctggcctccggcgacgtgcagatcggcaatatcggctccagcccactggcggtggccgccagccagaaactccccatcgaagtgttcctcatcgcctcgcagctcggcagctccgaagcgctggtggtgaaaaatgacatcaaaagcccgcaggatctgatcggcaagcgcattgcggtgccgtttatctccaccacccattacagcctgctggcttcgctcaagcattggggcatcaagcctgagcaggtgaagatcctcaatctgcagccgccggccatcgccgccgcctggcagcgcggcgacatcgacggcgcttacgtctgggcgccggtggtcaacgaactggccaaacagggcaaggtgttgaccgactccgcgcaggtgggcgaatggggctcgccgacgctggacgtgtgggtggtgcgcaaagactttgccgagaaacatcccgacgtggtgaccgcctttgccgccagcgccctacaggcgcaaaaggcctacctggcggcgccggagcagtggctgaaagatccgagccatctcagcacgctggcgcgcctgagcggggtgccggaagcgcaggtgccggagctggtgaagggaaaccgttatctgccggtggcggatcaggttgcccagctcggccagccggtggacaaggcgatccgcgataccgccgaattcctcaagcagcagggcaagatcccgcaggtcgacagcgactacagcgcttacgtgaccgaccgttttgtgaaacaggtgcaggctgcgccgcagtcgtaa

SEQ ID NO: 426276 - DNA, 783 bp, Serratia marcescens
atggcggaaaattattatcacgtggttgcctttaccggcgaagggctgcgcggcaacccggccggggtttgcctgctgacacagccgctgccggcggcgcggctgcaggcgatcgccaacgagatcggcctgccggaaaccagctttgtctgggatgacggcgacatgaccgccatccgctggtttaccccgcagcgcgaggtcgatctctgcggccacggcaccctggcggcggcgcatgtgatgttcagcgtggttaacccggcgctgcaggatattcgcttccgctcggccggcggcgagctgttcgtcaagcgtgatgcgcaggacggggaacggctggtgctcgacttccccgcccggccgccgcagaaggtggctgagtcggcgggcctcgcggcgctgctgggcgtgcagccgcaggaggtgtggcaggcgaaagcgctgatggtggtgctggaaaacgaggcgcaggtgcgcgcgctgcggccggacatcccggcgctgatcgcgctggccgggtgtgcggtgatcgtcactgcgcccggtgacaccgtggacttcgtgtcgcgctatttcacgctcgacggcggtgaagatccggtcaccggctccgcgcactgcacgctgatgccttactggacggcgcgtctcggccgccatcggctgcaggcgcagcaggtctcggcacgcggcggcgaactgttctgcgaactgcaaggggatcgtacgctgctcggcggctatgctcacgtgttcctgcacgggacgatcgcgctgtaa

SEQ ID NO: 426277 - DNA, 603 bp, Serratia marcescens
atggaaccgagtttattcctttcgatgctgggcttcctgtgggtcgccgccatcacgcccggccccaataacctgctgctgaccacttccggcgccaacttcggctttatgcgttcgctgtggctgatgatcggcatcatgctcggcatgcaaagcattttgctgctggtggccttcggcgtcggcagcctgatcctggtttacccgtcgctgcacctgatcctgaaaatcctcggcagcctgtacctgctgtggctggcgtggaaagtcgccaccgccgcctatgaaaaactggaaaccgacgtggcgccgccgcagccggtgcggctgtatcagggttggctgctgcagttcctcaacccgaaagcctggctgatggcgctgggggcggtggccagcttcagcctggcgggcgataagtacaacggttccattgcggcgatcgcgctgggcattttggcggtcaacatcgtcgccggcattatctggctggcgttcggcaccctgatcggccgcctgctgcgcagcaaaaaagcctgggttatcttcaacgtttccatggggttgttgaccgcagcctgtgtgttactgatctggcattaa

SEQ ID NO: 426278 - DNA, 981 bp, Serratia marcescens
atgcctaacacctttcgccctctgaccggggccagtaacccgcacctgcaaacgctgttgccgcggctggtgcgccgccgcgtattattgaaaccgcattggcagcggctggaattgcccgacggcgatttcgtcgatctcgcctggagcgaggatccggcgcaggcgcgcgacaaaccgcgcgcggtgctgttccacggcctggagggcagcttctacagcccctacgcgcatggcctgctcaacgcctggcgcgagcgcggctggctcggcgtggtgatgcactttcgcggctgcagcggcgtgcccaatcgcaagcagcgcatctaccactccggtgaaaccgaagacgcgcgcttcttcctgcgctggctgcgcgaccgctacggcgaggtgccgaccgcggcggtcggcgtttcgctcggcggcaacatgctggcctgctacctggcgcagcaaggcgccgacagcctgctgcaggcggcggtggtggtctcggcgccgctgatgctggagccctgcgcctaccgcatggagcaaggcttttcccgcgtttatcagcgctacctgctggggcagctgaaacaaaacgccacccgcaagctgttgcactacccggacaccctgccgctcaagctgtcccaactgaacggtctgcggcgcatccgcgaattcgacgacgccatcacctcgcgtattcacggcttcagtgacgccaccgactattatcgccgctgcagcgccctgccgctgttgccggcggtccaaacgccgctgctgatcatccatgcgaaggacgatcccttcatgacccctgaggtgatccccgacgtcgccggcctgccgcgcaatatcgaatatcagctgaccgagttcggcggccacgtcggcttcgtcggcggcacgctgaaaaaaccatacatgtggctggagcatcgcattccggcctggctttccccttatctggacatcccgacgtga

SEQ ID NO: 426279 - DNA, 234 bp, Serratia marcescens
gtgatcattccctggcaagaactggcaaccgacaccctcaacagcctgatcgaatcttttgtactgcgcgaaggcaccgattacggcgagcacgaacgctcgctggaacagaaggtggaggacgtgcgccgccagctgaaaaacggcgaagtggtgctggtgtggtcggaactgcacgagagcgtcaacatcatgccgcgcggccagttccgcgccgggcaggaagaaatttag

SEQ ID NO: 426280 - DNA, 870 bp, Serratia marcescens
atgtctgccaaacatcccgttatcgcggtgaccggttccagcggcgccggcaccaccaccaccagcgtggcgttccgcaaaatattccaacaactcaacatccgcgccgccgagctggagggcgacagcttccaccgctacacccggccggaaatggacgcggcgatccgcaaggcgcgcgatctgggcagacacatcagctatttcggccccgaggccaacgacttcggcctgctgcagcagagcttcatcgactacggcaagaacggcaccgggcgctcgcgcaagtatctgcacacctacgacgaagcggtgccctacaatcaggtgccgggcaccttcaccccgtgggaaccgctgccggcgccgaccgacgtgctgttttacgaggggctgcacggcggtgtggtcaccgagcaccatgacgtggccaagcacgtcgacctgctggtcggcgtggtgccgatcgtcaacctggagtggatccagaaactgatccgcgataccggcgagcgcggccactcccgcgaagcggtaatggattcggtggtgcgttcgatggaagactacatcaactacatcacgccgcagttctcgcgcacccacatcaacttccagcgcgtgccgacggtggacacctccaacccgttcgccgccaaggcgattccctcactggacgaaagcttcgtggtgatccacttccgcgggctggatcaaattgacttcccctatttgctggcgatgctgcagggctcgtttatctcgcacatcaatacgttagtggtgccgggcggcaagatggggctggcgatggaactgatcatggcgccgctggtgcagcggttgctggaaggcaagaagatcgaataa

SEQ ID NO: 426281 - DNA, 408 bp, Serratia marcescens
atgcaggcaagagttaaatgggtggaagggttaacgtttttgggtgaatcggcctccggccaccaggtgctgatggacggcaacgccggcgataaagcacccagcccgatggagatggtgctgatgtcggtgggcggctgcagcgcgatcgacgtggtgtccatcctgcaaaaagggcgcaacgacgtgcgcgactgcgaggtgaagctgacctccgagcgccgcgaagaagctccgcggttgttcacccatatcaacctgcatttcatcgttaccggccaggacctgaccgacaagatcgtcgagcgtgcggtgaacctgtcggcggagaaatattgctcggtggcgctgatgctcaacaaggccgccacggtgacccacagcttcgagatccgccaaccggcgtaa

SEQ ID NO: 426282 - DNA, 633 bp, Serratia marcescens
atggttctcggcaaaccgcaaacagaccctactctcgaatggttcctgtctcattgccatatccacaaatatccatcgaagagtacgctgattcaccaaggtgaaaaggccgaaacgctttactacatcgtgaaaggctccgtcgcggtgctgatcaaggatgaagaaggtaaagagatgatcctgtcctacctcaaccagggggatttcatcggcgagctcggattgttcgaagaaggccaggagcgcagcgcctgggttcgcgcgaaaaccgcctgtgaagtggccgaaatttcctacaagaaattccgtcagctgatccaggtgaacccggacatcctgatgcgtctgtccgcccaaatggcgagccgcctgcaggtcacctccgaaaaagtgggcaacctcgccttcctggacgttaccggccgcatcgcgcaaaccctgctgaatctggcgaagcaacccgacgccatgactcacccggacggcatgcagatcaagatcacccgccaggagatcggccagatcgtcggctgctcgcgcgaaaccgttggccgtattctgaaaatgctggaagatcaaaacctgatttccgcccacggcaaaaccattgtcgtctacggcacccgttaa

SEQ ID NO: 426283 - DNA, 2079 bp, Serratia marcescens
atgtggcgccgcctgatctaccacccggaaatcaactacgcactgcgacaaacgctggtgttgtgcctgccggtgctgttcggcctgctgataggccagctgcagctcggcctgatgttctctctggtgcccgcctgctgcaatatcgccggtctggacacgccacataagcgcttctttaaacggctggtggttggcggctcgctgttcgccttcagcagcgtgctgctgcaacaggcactgctgtggcacgtgccgctgccggcgctgatgctgggcctggcgctgctgctcggcgtcaccggtgaaatcagcccgctgcacgcccggctgttgccggcggcgctggtggccgccatcttcgccctcagcacggccggcacggcgcctctctggcaggcgccgctgctgtacgccatcggcaccgtctggtacggcttattcacctggttctggttcaagctgtggaaagagcagccgatgcgcgagaccctgagccagctctacctggaactggcggactatttcgaagccaaatactcgctgctgacccagcacaccgatccgcaaaccgcgctgccgccgctgctggtgcgccagcaaaaggtgatggatctgatcagcctgttgtaccaacagcttaatttcctgccgcacgccaacaacctcgagcaaaagcgcctgcagcgcgcctttcaggtggcgatggacctgcaggagcacatcaccgtcagcctgcatctgccggaggaggtgcaaaaactggtggagcagagccaggccgaagcgatcattcgccgcaacgctcaggtgatcgccagccggctgcgcgtagtggcgcacgatattctctatcatcaacattcgaagcgcttctccatggcccacgagctggcggcgctggaaaaaatggcggcgcagcatcccgataacccggtcggccagttttgttattaccacttcagccgcatcgcccgcctgctgcgcacccagcatccgctataccgccgcgacctgatgcccggccagcaccgcctgccgttttggccggcgctagccagctatctgtcgttcaagtccaccgccctgcgcaacgccgcgcggctgggcgtgacgctggcagtcggcagcagcctgggtgcggtgttcaatctgccgaagccttactggatcctgctcaccatcatgctggtgagccaaaacgggtataacgccacccgggtgcgtattcagcaccgtgcgctgggcacgattgccgggcttttgctggcggccgggctgctgcagctgcagttgccggaaggcgaaacgctgagcatcatgttggtgatcacgctgctggcctacctggtttcgcgcaagaactacgggctgtcggtgattggctttacggtcacggcggtttacaccctgcagctgctggcgctgaacggctcgcattttctggtgccgcgcctgatcgatacgctgatcggctgcgtgttggcgttcggcggcaccatttggctgtggccgcagtggcaaagcgggctgctgcgcaagaatgcccatcaggcgctggagcaagatcaaaccgcgctgcggttgatgctggaacagccggaaccggacgccaccgcgttggcctatacccgcatgcaggtcaaccaggcgcacaatgcgctattcacctcgctcaatcaggcgatgcaggagccggggttcgcgtcggactatctggcggacatgcggctgtgggtcacgcatagccagttcatcgtcgagcacctgaacgccatgaccattctggcgcgcgaacactacatgctgacgccaaaactggcggaagcgtatctgcaggcctgtgaaatcgcgctgcaaagctgccaacagcggttggaatacgacggcccgagcagcggcaacagcggcatcatgcagccgccggatctgcatccggagatgcccgttaccgagatggagcgccatctgcggcgcattctgtcgcacctgagcgtgatgcacaccatttcttcgctggcctggcgccagcgcccgcaccacggcatttggctcaagcgcaaactgcgcgatcaataa

SEQ ID NO: 426284 - DNA, 1218 bp, Serratia marcescens
atgactgaaaaatccgcagtgagccgcagcacctttgaccaggtgatcctgcctgtttatgcacctgcccagtttgtgccggtgcgcggccaaggcagccgggtctgggatcaacagggaaaagagtacatcgatttttccggcggcatcgcggtgacggcgctggggcattgccatccggcgctggtcgaggcgctcaaacgccagggcgaaaccctgtggcataccagcaacgtcttcaccaatgaaccggcgctgcgcctggcgagcaagctgatcgacgccaccttcgccgatcgggtgttcttcgccaactccggcgcagaggccaacgaggcggcgttcaaactggcgcgtcattacgccatcacccgccacagcccttacaaaaccaaaatcatcgccttctataacgcgttccacggccgcacgctgttcaccgtgtcggtgggcgggcaggccaaatattccgacgggttcgggccgaagccggccgacatcgtgcacgtgccgttcaacgatttggcggcggtgaaggcggtgatggacgaccacacctgcgcggtggtgatggagccgattcagggcgagggcggcattacgccggtcgacgccggcttcctcaaaggcgtgcgcgagctgtgcgaccaacatcaggcgctgctggtgttcgacgaagtgcaaagcggcatggggcgcagcggcaaactgttcgcctatatgcattatggcgtgacgccggacattctcaccaccgccaaggcgctgggcggcggtttcccggtcagcgccatgctgactaccgaagacattgcgtcggtgatgcaggtgggcacccacggcaccacctacggcggcaacccgctggcctgcgcggtggcggaggcggcgctggacgtgatcaatacgccggaggtgctgagcggcattgagcagcgtcatgcgctgtatgcgcaggctttgcagcatatcggcgataaatacggtattttcaccgcgattcgcggcatggggttgctgattggcgccgagctgacgccgcattatcacggcagagcgcgcgacttcctcaccgccgccgccgcgcgcgggttgatgatcctcaacgccgggccgaacgtgatccgcttcgcgccgtcgctggtggtggagctgcaggatatcgaggccggcatggcgctgttcgagctggcggtgcaggatgtgatcaacgcctga

SEQ ID NO: 426285 - DNA, 576 bp, Serratia marcescens
atgctgctgctgatcgataactacgactcctttacctataacctttaccagtacttctgcgaattgggcgccgaggtgctggtgaagcgcaacgatgagctgcagctggccgatatcgagcggctggcgccgcagcatctggtaatttcccctggcccctgtaccccgaacgaagcgggtatctcgctggccgccattcgtcatttcgccggcaagctgccgatcctcggcgtgtgcctggggcaccaggcgctggggcaggcgttcggcgccgaggtggtgcgcgcccgcgcggtgatgcacggcaaaacctcggcgattcgtcatctgggcgtcggcgtgtttcgcggcctgagcgatccgctgaccgtgacccgctatcactcgctggtgctgaaggccgatacgctgccggactgttttgaagtgaccgcctggagcgaacgcgacggcgtgcgcgacgagatcatgggcatccgccaccgcactttggcgctggaaggcgtgcagttccatccggaaagcgtgctcagcgagcagggccatcagctgctggataatttcctccagcgttaa

SEQ ID NO: 426286 - DNA, 1527 bp, Serratia marcescens
atgagtgaaccacggattatcgccaaagcgatgaaagacggaaaaccggagcaggatctggtgattttgccggcgttggccaaccgccacgggctgatcaccggggcaaccggcaccggcaagacggtgacgctgcagaaaatggccgaacagttctcgcgcatcggcgtgccggtgttcctggcggacgtgaagggcgatctgtccggcatcggcgccgagggcgtgccttccgagaaactgcaggcgcgcctggcggcgatcggcgtcagcgactggcagccgcaggcctgcaccattatcccgtgggatatttacggtgaaaaggggcacccgatccgcgccacgatttccgatctcgggccgctgctgctggggcgcctgttggatctgaacgaggtgcaaagcggcgtgctgcagctggtgttcaagatcgccgatgacaacgcgctgctgttgctggacatgaaggatttgcgcaccatgctgcagttcgtcggcgacaacgccaaacaattccagactcagtacggcaatatctctgccgcgtcgatcggcgctattcagcgcgggttgctgacgctggaagagcagggcgctgaccagttcttcggcgagccgatgctcgacatcaacgatctgatgaaaaccgacgccaacggccacggcgtgatcaacctgctggcggcggacaagctgatcaatcagccgaagctgtattcggtgttcctgctgtggctgctggctgagctgttcgagcacctgccggaagtgggcgaccctgaacagccgaagctggtgttcttcttcgatgaggcgcacctgctgttcaacgacgcgccggcggcgctgctgaccaagatcgaacaggtggtgcgcctgatccgctccaaaggcgtcggcatttactttgtcacccagaacccgctggacatcccggacagcgtgctgggccagctgggtaaccgcgtgcagcatgcgctgcgcgccttcacgccgcgcgatcagaaggcggtgaagacggcggcgcaaaccctgcgcgccaatccggccttcgatgccgaaacggcgatcaccgagctgggcgtgggtgaagcgctggtgtcattcctcgacgagaagggccggccgaacgtggtggagcgggcgatggtgatcgcgccggaatccaaaatgggcatgctcggcgcggaagggctgaacagtgcgatcaacaagtcgccgctgtatggccgctatgaggatatgatcgaccgcgagtccgcctacgagaagctgtcgtcgggcggttttgccaccgtcggcactccgcagcaggggcagcaaccgcaggcgcaacagcaacaacagcaggcgggcggcggcctgatggacggcttgagcgagctgttgttcggttccaccggcccgcgcggcggcaagcgcgacggcattgtccagaccgccgccaagagcatggcgcgcgatctcggccgccagatcctgcgcggcgtgctgggctcgatcaccggcggccgtaaaaagtaa

SEQ ID NO: 426287 - DNA, 270 bp, Serratia marcescens
atgtctgaatctaccgtggtaatccgcgtggatgaagagttaaaaaccgctttcgccagcgcggcaaaggccgccgatcgcacggcttcgcaactgctgcgtgatttcatgcgcgagtttgtccgccgccaggcgcaacaggaagagtacaaccagtggttaaaggaaaaggtcgaggtaagccgcaaggcgttgcgtgaaggcaaattcgccgacgatgaagaggtggccgcttatttcgccgaacgcagagccaaatcaacgcgataa

SEQ ID NO: 426288 - DNA, 726 bp, Serratia marcescens
atgttaaacgcactgattgttgacgatgaaccttccgcgcgcgacaacctgcgccacctgctggaagctgaagcggggatcgcgattatcggcgagtgcgccaacgccatcgaagccatcagccagatccaccggctgcagccggacgtggtgtttctcgatatccagatgccgcgcatcagcgggctggaaatggtcggcatgctggatcccaaccgcatgccgcacatcgtgtttctgactgcctacgacgaatacgcggtgcaggcattcgaggagcacgccttcgactatctgctgaagccggcggagccgaagcggctgagcaagacgctgcaacgtctgcggcagcgcactgcgccgcaggacgtgacggcgctggaagagagcgccggttacctgaaatacattccctgcaccggccacagccgcatctatctgctgcgcttcgacgaagtgttggcgatccgctccaaactgagcggggtcttcgtggtgcgcagcgacggcatggagtgtttcaccgagctgacgctgcgcacgctggaaagccgtacgccgctggtgcgctgccatcggcagtatctggtcaatctggagcaggtgcgcgagatccgcttcgaagagggcggcgcggcggagatgatcatgtcggcaggcgatccggtgccggtcagccggcgctatttgaaagcgctgaaggagcagttggggctgcgggggtga

SEQ ID NO: 426289 - DNA, 1686 bp, Serratia marcescens
atgtatgaatttaaccaggtgctgttgctgttgcagcagatgtgcgtctatctcgttatcgcctatctgctgagcaaaaccccgctgttcatcccgctgatgcaggtgaccatccgcctgccgcacaagctgctgtgctacgtgatcttctcggtgttctgcatcatgggcacctatttcgggctgcacattcaggattcgatcgccaacacccgcgcgataggcgcggtcctgggcggtctgctgggcgggccgtcggtgggctttctggtcgggctgaccggcggcctgcaccggtatacgctcggcggcatgaccgacgtggcctgcgcgatttccacggtgtcggaaggcctggtcggcggcatcgtacacagcatcgccatgcgccgcgggcgcatcgagctgctgttcaatccgctgttcgtcggcggcgtggcgctggtggcggaagtgctgcagatggcgatcatcctggcggtggcgcgcccctacgacgaagcgttgcagctggtggagcacatcgcgctgccgatgatgatcgccaataccgtcggcgcggcgatgttcatgcaaatcctgctggataggcgcgcgatgttcgaaaaatacaccagcgccttctcttccaaggcgctgaagatcgccgagcgcaccgagggcatcctgcggcagggcttcgatcaggaaaacagcatgaaggtcgcccgggtgatctatcaggagctgggcatcggcgcggtggcgatcaccgatcgcgacaagctgctggcgtttatcggcatcggcgacgaccaccacctgccgggcacgccgatcgcctcggtgcattcgcatcgcgccatcgacaacaacgaggtggtgtacgccgacggtaatcagctctcttactgctgctcgatcaatcctgcctgcaagctgggatcgacgctggtgatcccgctgcgcggcgaaaatcagcgggtgatcggcaccatcaagctgtatgagccgaaaagccagctgttcagcaccatcaaccgtacgctgggcgaaggcatcgccagcctgctgtcggcgcagatcatggccggacagtacgagcgccacaagcagctgctggcgcagtcggagatcaagctgctgcatgcgcaggtcaatccgcatttcctgttcaatgccttgaatactctggtggcggtgatccgccgcgatggcgagcgcgcctgcgatctggtgcagtctctctcgaccttctttcgtaaaaacctcaaacgttccgatgacgaagtcagcctggcggacgagattgaacacgtgaacgcctacctgcagatcgagaaagcgcgcttcgccgatcggctggagatcgcggtatcgctgccggaggcgctgttggcggtgcggctgccggcgttctcgctgcagccgatcgtcgagaacgccatcaagcatggcacctcgcatctgctgggcgtgggccgcatcgaaatcggcgcctgctgcgaaggggagcatctgctgctgcaggtgacggacaacgccgggctgttccagccgaagccgaactgcagcgggctggggatgaacctggtggataaacgcattcgcgtgcgctacggcgaaggctatggcgtgcaggtggattgccgaccggacgcctacacccgcattacgctcaatgttcccatggagagggccgcctga

SEQ ID NO: 426290 - DNA, 570 bp, Serratia marcescens
atgttcaaacgtactttagtgaccttcgtcgcgctgtgttccctcacagcgatggcgccagccgcactcgccgccggtgagacccacgtcatgctgacgacctcggcggggaatatcgagttggcgctcgacagccagaaggcaccggtttccacccagaacttcgtcgattacgtgaacagcgggtactacaacaacaccattttccatcgcgtgatcccgggctttatgatccagggcggcggtttcaccgctgacatgcagcaaaaatccaccaaggcgccgatcaagaacgaagccgacaacggcttgcgcaacctgcgcggcaccatctcgatggcgcgcaccgccgacaaggacagcgccaccagccagttcttcctgaacgtggcggataacgccttcctggatcacggccagcgtgacttcggctacgcggtgttcggcaaagtggtgaaaggcatggacgtggtggacaaaattgcccaggtgccaaccggcaacgtcggcccttaccagaatgtgccgaccaaaccggtggtgattctgtcggccaaggtgctgccgtaa

SEQ ID NO: 426291 - DNA, 339 bp, Serratia marcescens
atgactgaagtcagccccgagtttgaaagcaccatcatggaactgctggtgttctccggcagcgcgcgcagcaatgcgctgatggcgctgcggcaagcgcgcgccggcgatttcgccgccgcggccaggcacatggccgagtccaaagagtgggtgaagaaagcacacctgatccagaccgagctgatcggcctggacgaaggctgcggcaaactggcgatcaacctgatcaccgtgcatgcgcaggatcatctgatgaacgccatggtgatccaggatctggccgacgacatgatcgagctctatcgccgtcagtcgcagacggagggccgcccatga

SEQ ID NO: 426292 - DNA, 1308 bp, Serratia marcescens
atgagcgcactcaaaatcgccgtgatcggcggcggcagcagctacacccccgaactggtcgatgggctgatccagcgcatcgaggagctgccggtcaccgagctggcgctggtggacgtcgaaccgggccggcaaaaagtggaaaccatcgccgccctgacccgccgcatgctggcgcgccacgggctggagcaggtgaaggtcagtgtgcactttgcgctggacgacgccattcgcggcgccgccttcgtgctgacccagttccgcgtcgggcaactgccggcgcgcgccgccgacgaacggctgggcctgaaataccagctgctcggccaggagaccaccggcgtcggcggcttcgccaaggcgctgcgcaccatcccggtgatgctggacatcgctcgccgggtggaaaaactggcgccggacgcctggatcatcaacttcaccaacccggccggcatcgtcaccgaggcggtgtcccgctttaccaaagcgaagatcatcggcctgtgcaacgtgccgatcagcatgcatcacatgatcgccaacatgctgcaggcgccttacgccgacgtgcagctgcgcttcgccggcctgaaccacatggtctgggtgcatcaggtcacgcagcaggggcgcgacgtcaccgccaaggtgatcgacatgctgtgcgacggcgcggcgctgaccatgaacaacatcaaggaagagccctggcagccggacttcctgcgcgcgctcggcgctatcccctgcccctaccaccgctatttttaccagacccgcgagatgctggcggaagagatggccgccgccggcgagcgcggcacccgcgccgagcaggtgatgcaggtggagaaagagctgttcgagctgtatgccgatccgcagctgaacacgaaaccggagcagctcagcttccgcggcggttctttctattccgaagttgcgctggagctgattcgtgctatccataataatctcggcacgcaattagtggtcaacaccgcaaaccgcggcgctatccatggcctgccggacgatgctgtgatagaaatcaactgtatcgttgatgctcagggcgcgcacccgctgaccttcggcccgctgccagagccgatgcaggccctgacgcagcaggtgaaagcctacgaacgcctgaccatcgaggcggcggtgcacggcgatcgccgcagcgggttgctggcgctgatcgccaacccgttggtgggcaacgccaacctggcgcagccgctgctggaagaggtgttgacgataaacgcgccgtatttgccgcagttcaggtaa

SEQ ID NO: 426293 - DNA, 981 bp, Serratia marcescens
atggtgacactggaagatgtcgcggcgctggcgggcgtttcgcgcgccaccgtatcgcgcgtggtgaacggcgacagcaacgtcaaggcgccgacccgcgagaaagttgaacgcgccgtcgcccagcttggttacacccccaacccggcggcccgcgcgctcgcctccagccacagcaatacccttgggctggtcaccacctcgtaccgcggcggctttttcggcgcgctgatggacttcgtgcagaccgaggccgaatcccacggcaagcagctgctggtgacccagggccgcaacagcgccgaaaacgaatggcaggcggtacagaggctatttagcctgcgctgcgacggcgtgatcctgcacgtgcgttttctcagcgacgatcggctgcgccaattggcggcggagcaacgtgatttcgtgttgctcgatcgtctggtgccggggctggaagaccgctgcgtcaccttcgatcacccgctcgccagccgcatggcgacgcagcagctgctcgatgccgggcaccggcgcatcgcctgcatcagcggcccgcgtgaacgcccgtcgagcctcctgcggctgcagggatttgaagaggcgatgcaggcggcgaatatcgaaccggtggcctgcctggagggcgtttacgatctggaaagcggttaccgctgcgccgatcggctgctgcagcaagccgcgcggcccagcgccatctactgctgcaacgaagagatggcgatcggcgcgctgctggcgatcaacgaacaccgcctgcgggtgccgcaggatatctccttgatctgctacgacagcggcgaacgcgcgcctttcgtgcgcccggcgttgagcagcgtacattttcccatcagcgagatggcccaatacgcggcgcgcaggttgatcgaccccgccaccccggcgcaccggtttgagccgacgatcgtcaaccgtgattccgttgtgacggtacgcaaatag

SEQ ID NO: 426294 - DNA, 1185 bp, Serratia marcescens
atgaatgacagtaaccgcatacggcttacctggatcagcttcttttcgtacgcgctgaccggtgctttagtgatcgtcacagggatggtgatgggaaacattgcagagtactttaatctgccggtttccagcatgagcaacacctttactttcctcaacgccggtattttgatttcgatcttcctcaatgcctggctgatggaaatcatcccgctgaagcgtcagctgatcttcggctttgtcctgatggtgctggcggtcgccgggctgatgctcggcaagagcctgaccatgttctcgctgtgcatgtttatcctcggcgtggttagcggtatcaccatgtcgatcggcaccttcctgatcacccacatgtatgccggccgccagcgcggttcgcgcctgttgttcaccgactccttcttcagcatggccgggatgatcttcccgatcgtcgccgcgatgctgctggcccgccacatcggctggtactgggtttatgcctgcatcggcctgctgtacgtggggatcttcgtgctgaccctgtgctccgaattcccggtgctgggcaagaaaggcgccgacgccggccagccggtcgagaaagaaaaatggggcatcggcgtgctgttcctgtcgatcgccgcgctgtgctacatcctcggccagctgggcttcattcagtgggtgcctgagtacgccaccaagtcgttcaacatggacatcggccaggccggtaagctggtgagcgacttctggacctcttacatggtcggcatgtgggtgttcagcttcatcctgcgcttcttcgatctgcagcgcatcgtgaccgtgctggccgcactggctaccggcgcgatgtacctgttcgtcagcaccgacaacccggagcacctgggctactacatcatggccctgggcttcgtttccagcgccatctacaccacgctgatcaccctcggctcgctgcagaccaaggtctcctcgccgaagctggtcaactttatcctgacctgcggcaccatcggcaccatgttgaccttcgtggttaccggcccgatcgtggcgaaaggcggcgcgcacgcggcgctgaccaccgccaacggcctgtatttggcggtgttcgtgatgtgcctgctgctgggcttcgtgaccaagcaccgcagccacggccacgtgacgcactga

SEQ ID NO: 426295 - DNA, 1284 bp, Serratia marcescens
gtggcgaaacgtccattgaagtttatcgataacctgcgtttaagcgggcatgaaggattgtggcaactggcgattgagcaggggcgcatcgcgcatctggtgccgcagccggaagggcaggagtggcgcagcgacgtgttggatgcgcagggcgggctggcgctgccggcgttcgtcgaaccgcatattcacctggataccacgcaaaccgccggtcagccggcttggaaccagtccggcacgctgttcgagggcattgagcgctgggccgaacgcaaagcgttgctgacccatgaagacgtcaaacagcgcgcctggcaaacgctcaagtggcagatcgccaacggcgtgcagtatgtgcgcacccacgtcgacgtttccgatcccacgctgaccgcgctgcgcgccatgctggaggtgaaacaggaggtggcaccctgggtgacgctgcagattgtcgccttcccgcaggaggggatcctttcctaccccaacggcgaagcgctgcttgaagaggcgctgcggctgggggccgacgtggtgggcgccattccgcatttcgaattcacccgcgagtacggcgtggaatcgctgcataaggcgtttgcgctggcgcaaaaatacgatcggctggtggatgtgcactgcgatgagatcgacgacgaacaatcgcgcttcgtcgagaccgtggcggcgctggcgctgaagctggagatgggggcgaaagtcaccgccagccacaccacggcgatgcactcttacaacggcgcttacgcctcgcggctgttccgcctgctgaaaatgtccggcatcaacttcgtcgccaatccgctggtgaacattcacctgcagggccgtttcgacagctacccgaaacggcgcggcgtaacgcgggtgaaggagatgctggaggcgcagatcaacgtctgcttcggccatgacgacgtgttcgatccctggtatccgctcggcaccgccaacatgctgcaggtgctgcatatggggctgcacgtgtgccagctgatgggctatggccagatcgacgacgggctaaagctgatcaccagccacagcgcgcgcacccttaacctgagcgactacggcctggcggccggcaacagcgccaacctggtgatcctgccggcggaaagcggcttcgacgcggtgcgccgccagacgccggtgcgctactcgattcgccagggggcggtgatcgccgaaacgcggccggcggaaaccacgctgcatctgcagcaggatgaaacggtggattttcggcgttaa

SEQ ID NO: 426296 - DNA, 2550 bp, Serratia marcescens
atgagcagagtcaaacttgccgtcgtcggcaatggcatggtcggccaccggttcatcgaagatctgttggataaagcagacaaagaccagttcgaaatcaccgtattttgcgaagagccgcgcatcgcttacgatcgcgtgcacctctcttcctacttctcgcaccacaccgccgaagagctgtcgctggtgcgcgaaggcttttacgaaaaacacggcgtgaaggtgctggtcggcgagcgcgccatcaccatcaatcgcgacgagaaggtcatccactccaacaccggccgcaccgtctattacgacaagctgatcatggccaccggttcctatccgtggatcccgccgattaaaggttcggatagccaagactgcttcgtttaccgcaccatcgaagacctgaacgccatcgaagcctgcgcgcgccgcagcaaacgcggtgcggtggtcggcggcgggctgttggggctggaagccgcaggcgcgctgaaaagcctgggggtggaaacgcacgtgatcgagttcgccccgatgctgatggccgaacagctcgacccgatgggcggtgaccagctgcgccgcaagatcgagcgcatgggcgtcaaagtacacaccggcaaaaatacccaggagatcgtcaacggcggcggcaccgcgcgcaaaaccatgcatttcgccgacggaagcctactggaagtggatttcatcgtgttctccaccggcatccgcgcccaggacaagctggcgcgccagtgcgggctggagattggccgccgcggcggcatcgccatcaacgacagctgccagacgtcggatccggacgtctacgccatcggtgagtgcgccgcctggcgcgatcgcaccttcggcctggtggcgccgggttacaaaatggcgcaggtggccgtcgatcacctgctgggccgcgaaaacggcttccagggcgccgacatgagcgccaagctgaagctgctgggcgtggacgtcggcggcatcggcgatgctcacggccgcaccgagggcgcccgcagctacgtttatctggatgaaagcaaagaagtctacaaacgcatcgtggtcagcgccgacaacaaaaccctgctcggcgcggtgctggtgggcgacaccagcgattacggcaatctgctgcagctggcgttgaacggcatcgagctgccggaaaacccggacggcctgatcctaccggctcatgcgggcagcaaaccggccatcggcgtggattcgctgccggaaagcgcgcagatctgctcctgcttcgacgtcagcaaaggcgacatcatccaggcggtcaacaaaggctgccacaccgtggcggcgctgaaggccgaaaccaaggccggcaccggctgcggcggctgcatcccgctgctcacccaggtgttgaacgccgagctgagcaagcaaggcatcgaggtcaaccatcacctgtgcgaacacttcgcctactcgcgccaggagctgttccacctgatccgcgtcgaaggcatcaagtcgttcgaggcgctgctggccaaatacggcaaaggctacggctgcgaagtctgtaagccgaccgtcggctcgctgctggcttcttgctggaacgaatacatcctcaagccgcagcatacgccgctgcaggataccaacgacaacttcctcggcaatatccagaaagacggcacctactcggtgatcccgcgctccgccggcggcgaaatcaccccggacggcctgctggccatcggccagatcgccaaggagtacaacctctacaccaaaatgaccggctcgcagcgcatcggcatgttcggcgcgcagaaagacgacctgccggccatctggcgcaagctgctcgccgccggctttgaaaccggccacgcttacgccaaggcgctgcgcatggcgaaaacctgcgtcggcagcacctggtgccgctacggcgtcggcgacagcgtcggcttcggcgtcacgctggagcatcgctacaaaggcatccgcaccccgcacaaaatgaagttcggcgtctcgggctgcacccgtgaatgcgccgaagcgcagggcaaggacgtcggcatcatcgccaccgagaacggctggaacctgtatgtctgcggcaacggcggcatgaaaccgcgccacgccgatctgctggccgccgacctcgatcgcgagaccctggtgcgctacctcgaccgcttcatgatgttctatatccgcaccgccgataagctgcagcgcacctcggtgtggctggagagcctggaaggcggcatcgattacctgcgcaaggtgatcatcgacgacaagctcggcatcaacgaccagctggaagcggagatcgcccgcctgcgcgatgcggtgatctgcgagtggaaagagaccgtcgagcacccggaaacgcagctgcgcttcgcccacttcgtcaacagcccgctgcgcgatccgaacgtgcaggtggtggccgaacgcgaccagcaccgcccggcgcgccctgacgagcgcattcccgtcaccctgatcgataccgaggagagccacgcatga

SEQ ID NO: 426297 - DNA, 327 bp, Serratia marcescens
atgagccagtggattaccgtttgtcccgtcgccgacattctgcccggcaccggcgtgtgcgccctgatcggcgatcggcaggtggcggtgttccgcccctatgccgacgagcaggtgttcgccatcagcaatatcgacccgttcgcccaggccagcgtgctgtcgcgcggcctgatcgccgagcatcagggcgaactatgggtcgccagcccgctgaagaaacagcatttccgcctgtacgacggccactgtctggaagacgacagccgttccgtcgccagcttcgccagccgggtggtcgacggcatcgtgcaagtcgcggcataa

SEQ ID NO: 426298 - DNA, 801 bp, Serratia marcescens
atgtttaccgacacgatcaacaaatgcgccgccaacgcggcgcgcatcgtccgcctggcgaaggagagcccgctcggcttttggatcagctcggcgatggcgggcgcctacgtcggcctcggcatcatcctgatcttcaccctcggaaacctggtcgacccaagcgtgcggccgctggtgatgggcgccaccttcggcatcgcgctgacgctggtgatcatcgccggttccgagctgttcaccggccatacgatgttcctgacgctcggcgtcaaggccggcaccatccgccagagccagatgtgggcggtgctgccgcaaacctggctcggcaatctgctcggctcggtgctggtggcgctgatgtattactacggcggcggcagcctgctgccggtggataccagtctggtgcacagcgccgcgctggcgaaaaccaccgcgccggccgaggtgctgttcttcaagggcgtattgtgcaactggctggtctgcctggcgatttggatggcgatccgcgtcgaaggcgccgccaaattcatcgccatctggtggtgcctgctggcctttatcgcctcgggttacgaacactccgtcgccaacatgacgctgttcgccctctcctggttcggcaaccacagcgaggcctacaccctcgccggcattggccacaacctgctgtgggtgacgctgggcaacatcctgtccggctcggtgctgatgggcctggggtattggtacgctacgccgcgcaccgaacgcccgcaggcggctaaagccgccgcacgtcagaccgcctga

SEQ ID NO: 426299 - DNA, 1404 bp, Serratia marcescens
atggactacctgccgattttctgccaactgcaacacaaagcctgcctgctggtgggtggcggcgagatcgccgaacgcaaggcgcgcctgctgctggacgccggcgcggcgctgaccgtcaacgccctggcattcagcccacagttccaccactgggctgaagaaggcctgctgacgctggccgagggcgaattcagcccggccctgctggcggaaaaatggctggtgatcgccgctaccgaccggctggaagtcaacgcactggtgtatcagtgcgccaaccagcagcgggtgttctgcaacgtggtggacgatccaaaacgcgccagctttatcatgccgtcgatcatcgaccgttcgccgatcatggtggcggtgtcctccggcggcaaagcgccggtgctggcgcggctgctgcgcgagaagctggaagcgatgctgccgcagcacctcggcaagctggcccagctgggcggctcgctgcggcagcgggtaaaacaacgcttcagcagcctcggcgcgcgccgtcgcttctgggaacggttattcgcccacgatcggctggcgcagtcgctggccaacgacgacgccgcgctggccgaacgccagctcgagcagctgttcagcgaacggccggaagatcgcggtgaagtggtgctggtgggcgccgggccgggcgatgccggcttgctgacgctgaaagggctgcagcagatccagcaggccgacgtggtggtttacgaccggctggtctccgaagagatcatgacgctggtgcgccgcgacgccgaacgcatcttcgtcggcaaacgcgccggccaccactgcgtgccgcaagagcaaatcaaccaaatcctgctgcagcaggcgctgcaaggcaaacgcgtggtgcgcctgaagggcggcgatccctttatcttcggccgcggcggcgaagagctggagacgctggcggatgccaacgtgccgttctcggtggtgccgggcattaccgccgcctccggctgttccgcctacagcggcatcccgctcacccaccgcgaccatgcgcagagcgtgcgcctggtgaccggccacgccaaggccgacggcggattggactgggcgacgctggccgccgggcagcagacgctggtgttctatatggggctaacgcaggcagcggagatccagcgccagctgatcgcacacggcttgccggccgccacaccggtagcgctggtggaaaacggcacgtcctgccgccagcgggtgatcgaaggcgagctcggccaactgggcgccttgtccctgcaggccgccagccccagcctgatcatcgtcggcagcgtggtcagcctgcgcagcaagctcaattggttcgccagcgaggaaccgcccgccggcctggcgcaaatggcgtga

SEQ ID NO: 426300 - DNA, 1008 bp, Serratia marcescens
atgagtaagcccatcgtatttagcggcgcgcagccgtccggcgaactgaccatcggcaactacatgggtgcgctgcgtcagtgggtgcagatgcaggacgactacgactgcatctactgcatcgtcgatctgcatgccatcaccgtgcgccaggacgccgagaagctgcgcaaggccacgctggatacgctggcgctgtacctggcctgcggtatcgatccggaaaaaagcaccatcttcgtgcagtcgcacgtgcctgagcacacgcagctgagctgggtgctgaactgttacacctatttcggcgaactgagccgcatgacgcagttcaaggacaaatccgcgcgctacgcggagaacatcaacgccgggctgttcagctatccggtgctgatggcggccgatatcctgctgtatcaaactaaccaggtgccggtgggcgaagaccagaaacagcacctggaactgagccgcgacgtaggccagcgttttaacgcgctgtacggcgacgtgttcaaagtgcctgagccgttcattcctaaatccggcgcgcgcgtcatgtcgctgcaggagccgaccaagaagatgtccaagtcggacgacaaccgcaacaacgtgatcggcctgctggaagatccgaaagcggtgaccaagaagatcaaacgcgcaatgaccgactcggaagagccgcctgtcgtgcgttacgacgtggtcaacaaggcgggcgtctccaacctgctggatatcctcgccggtgtgaccggcaagagcatcgcgcagctggaagccgagttcgaaggccagatgtacggccacctgaaaggcgcggtggcggaagccgtctccggcatgctgggtgagctgcaggagcgctaccaccgcttccgcaacgacgaagcttatctgcagcaggtgatgcgcgacggcgccgccaaggcccgcgcgcgcgcgcaggaaaccctggcgaaggtctatcaggccgtcggtttcgtaccgccgcaggcgtaa

SEQ ID NO: 426301 - DNA, 699 bp, Serratia marcescens
atggctgatttcggcgcgatccgcgcattggccttcgatctggacggcacgctggtcgacagcgcgccgggtctggcagccgccatcgatatggcgctggaagagacgggcctgccgaaagcgggtgaagaacgggtcggcacctggatcggcaacggcgccgacgtgctggtgcagcgcgcgctgcgctgggcggaagcggaaggcacgccggagcagtgcagccggctgcgtgaacgcttcgaccatttctacgcgcagaccgtcgacagcggcagccgcctgttcccgcaggtgcaagagacgctggcccggctggccgcgcacggttacccgatggcattggtgaccaacaagccgacgccgttcgtggcaccgctgctggcggcgctgggcattggcgactatttctcgctggtgatcggcggcgacgacgtgacggaaaagaaaccgcatccggcgccgctgtacctggtgctcggcaagcttgggctgcgggcgcatgaactgctgttcgtcggcgactcccgcaacgatattcaagccgcgcagggcgccggttgcccgagcgtcggctttacctacggttataactacggcgaatcgatcgccctgagccaccccgatcgggtgttggagcgcttcgccgatttgttgcccgctcttgggctgtcatctttagagaatcaggaaatttaa

SEQ ID NO: 426302 - DNA, 678 bp, Serratia marcescens
atgaaaaagtttttgattgccccgtccattctgtcggcagattttgcccggttaggtgaagataccgccaacgtgctggccgcaggcggcgacgtggtgcacttcgacgtgatggacaaccactacgtgcccaatctgaccatcggcccgatggtgtgcgaagcgctgcgcaactacggcattaccgcaccgattgacgtgcacctgatggtcaagccggtggatcgcatcgtgcctgatttcgccaaggccggcgcgtcttatatctctttccaccccgaagcttccgagcatgtcgatcgcaccattcagctgatcaaagagcacggctgtaaagccggcctggtgttcaacccggccacgccgctgagctacctcgattacgtgatggataaaatcgacgtgatcctgctgatgtcggttaacccgggcttcggtggccagtcgttcattcacggcactctggacaagctgcgccaggtgcgcaagctgattgacgacagcggccgcgatatccgcctggaagtcgacggcggggtgaaggtggacaacattgccgaaatcgccgccgcgggcgccgatatgttcgtcgccggttccgccatctttggccagccggactaccgcaaggtgatcgacgagatgcgcagcgagctggcgaaggttacccatggctga

SEQ ID NO: 426303 - DNA, 813 bp, Serratia marcescens
atgaagaaaaaccgcgcttttttaaaatgggctggtggaaaatacccgctggtagatgagattcgtcgccatctgccggcgggagactgcttaatcgagcccttcgtgggtgcgggatccgtctttctgaatacggattacgacgcctacattctcgccgacatcaatagcgatcttatcaacctgtataacatcgttaagctgcgcacggatgacttcgtgcgcgatgcccgcacgcttttcgccgatgaattcaataactcggatcagttttacctgctgcgagaagagttcaatactagcaccgagccttaccgccgggcgctgctgttcctgtacctgaaccgccactgctataacggcctgtgccgctataacctgcgcggcgagttcaacgtgccgtttggccggtacaagaaaccgtacttcccggaagaagagctctactggtttgccgaaaaatcgcgtaatgccacttttgtctgcgagcattaccgcgataccatggcgaaggccgtggccggcgccgtggtgtattgcgatccgccttatgcgccgctgtcggcgacggcgaatttcaccgcctaccacaccaacagcttcagcatcgccgatcagcagagcctggcgcatctggcgcaccagctctcggtagagagccaggtaccggtattgatctccaatcacgataccgagctgacgcgcgactggtaccagcatgccgcgctgtatgtggtgaaagcgcgccgcacgatcagccgcaacattctcggccgcagcaaagtgaacgagcttttggcgctgtatcgctaa

SEQ ID NO: 426304 - DNA, 1011 bp, Serratia marcescens
atggacgagtttaaaccggaagacgatctcagacctgatagcagcgatcgtcgtcctacgcgttcgcgcaagccggccgccgcgccgcgcttcgccgtttcgcgccagcatttgatgatcggcatcggcattttggtgctgttgctgctgattatcggcatcggttccgccttgaaggcgccgaccaagcatgaagcggctcaggatagcggcgcgcaaaacggcgcggcccgcgatatcaacctgtccggttcttcgtcgctgaccaccgccaataacggcgtgccgggcggcaccacggatacccatgacaacaacggcgtgagcgcgactcagccgcagcaaccgcagaacgtcagcgttccgccgatctccggcacgccgaccgaagcgcaaactcagcctcagcagggcggtgcgcagcagcgcgtcgatctgcctggcaacatggcggatgcgctgtcgcagcagcaagggcaggtggatgccgcgacccagggcatgaccggcgcagcctcgacgctgccgaccgcaccggcgacggtgatgagcggcgccgcggcgcgcgaaacgactcgccctgtgcagggcaccgcgcagcaacagcataaaacgccggcgaaaaccgccgccaagccgagcgcgacgcagcataaatcaccgaccacggtgtatacgccgcctgccaagccgtcttccaccgcgaaagcgggagcggtcgccagcagcggcagttcgctgcagtctgcgccaggcagccactataccttgcagctgagcagcgcttcgcgttccgatacgctgaacgcctacgccaaacagcagaagctgcagaactacctggtgtacgccaccaagcgtgacggcaaaccgtggtacgtgctggtaagcggcaactatgcgtcttccgcagaagcgaagcgcgccattgcttcgttgccggcggatgtgcaggcgaaaaaaccgtgggtccgacctgtacaccaagtgcagcaagatcttaaaaaataa

SEQ ID NO: 426305 - DNA, 1101 bp, Serratia marcescens
atggagagaattactgtaacgcttggggagcgcagctacccgattaccatcgccgccggattgtttaacgatccggcttcttttatgccgttgaaggcgggtgagcaagcgatgttggtcaccaaccagaccctggcgccgctttatctggagcgtgtccggcaggtgctggagcaggggggcgtcgtggtggatcaggtgatccttcccgatggtgagcagtacaaatctctggcggtgttggagcaggtgttttcggcgctgcttgaaaaaccgcacgggcgcgataccacgctgatcgccctcggcgggggcgtggtcggcgatctgaccggcttcgccgccgcgtgctaccaacgcggcgtgcgctttattcaggttcccaccacgctgttgtcgcaggtggactcctccgtaggcggcaaaaccgccgtcaaccacccgctcggcaaaaatatgatcggcgctttctatcaacccgcttcggtggtggttgatctggattgcctgaaaacgttgccgacgcgtgaactctcttccggcctggctgaagtcatcaaatacgggatcatcctcgatcgcgagttcttcgtctggttggaaaacaacatcgatgtgctgatggcgctggatatgcaggcgttggcgtactgtatccgccgctgctgcgagctgaaggccgaggtcgtggccgccgacgaacgcgaaagcggcctgcgcgccttgctgaatctgggtcatacttacggccacgccatcgaagccgaaatgggctacggcgtatggctgcacggcgaagcggtggctgcgggcatggtgatggcggcggaaaccgcgcgccgtctcggccagttctcggttgaagatatcgaacgcatcaaagcgctgctgctgcgggccggcttgccggtctgcgggccgcaggaaatgacgccggaatcctatctgccgcacatgctgcgcgacaagaaagtactggcgggtgaactgcgtctggtgctgccgactgcgataggtgcggcggaagtgcgcggcggcgtagggcatgagctggtgttggcgtcgatcgccgcctgcctgcctgagcagcagcgtaattaa

SEQ ID NO: 426306 - DNA, 522 bp, Serratia marcescens
atggcagagaaacgcaatatctttctggttgggcctatgggtgccggcaaaagcactattggccgtcagttagctcagcaactcaatatggagttcttcgactccgatcaagaaattgagcgacgtaccggagctgacgtgggctgggtattcgacgtggaaggggaagaaggtttccgcgatcgtgaagaaaaagtcattaatgaactgacggaaaaacaagggattgtgttggcgaccggcggcggttcggtgaagtcgcgcgaaacgcgcaaccgtctgtccgcgcgcggcgtggtggtctatctggaaaccacgatcgagaagcagctggctcgtacccagcgtgataaaaaacgcccgctgctgcaggttgattctccgccgcgtgaagtgctggaagccttggcgaaagagcgcaatccgttgtatgaagagattgccgatgtcaccatccgcaccgacgatcagagcgctaaagtggttgccaaccagatcatcaacatgctggaaagcaactga

SEQ ID NO: 426307 - DNA, 1245 bp, Serratia marcescens
atgaaaggacgcgctggattgggcgtggcgctgtggtgcctggcgctcggcgccgcgcaggcgcaggataaacagcaggtttccctggagtttcaggatgcgccggtgacggtcatcctgcaggcgctggcggattatcggcagatgaacctgatcgccgcgcccggcgtgagcggcaacctgacgctgcggctggagaatgtgccctggcctcaggcgctcgcgctgactctgcgtatgggcaagctgacgatgacgcgggaggggagcgtgatgctgatcgccccggagccggacgcgcaggaaaaaaaacagcagcgagaagcgctggcgcagcggcaaccgctgcacagcctcaccctgacgttacaaaacggcgatgcggcggagattgccgaaagcctcaatgcccaacgcggcaccttgctcagcgagcgtggcagcgtgctggcggataagcgcaccaatacgctgctgctgcgcgacaccgcgccaatcctggcgcagttgaaaaaacgggtgacggaaatggacgcgccgctggcacaggtgcagctggcggcgcatatcgtgaccatcaacagcgaaagcctgcgtgaactcggcgtgcgttggggattggcgcccgacgacaggccgacgcggccgctgcggccgggcaatctcggcgtcaacctgccgctggagcgcagcgcggtgaacgccggtttccacctggcgcgcatcagcgggcgtttgctgagcctcgagctgacggcgctggagcaggaaaatcaggtggagatcatcgccagcccgcgcctgctgacggcgcatctgcaaaccgccagtatcaaacagggaaccgagatcccttacgaagtgtcgagcggcgccagcggtgcgaccgcgatcgagttcaaagaggcggtgctgggcatggaggtgacgcccaaggtgttgccggacggacgcatcacgctgacgctgcacatcagccaaaatatgccggggcgcgccatcagccggggcgcgggggaagccctgaccatcgataaacaggagattaagacgcagatcacggtgaaaaacggcgaaaccctggtgctcggtggtatttttcaacggcatagcggcaagacggcggacaaggtgccgggattgggcgatgcaccactgctggggggcttgttccggcaaagcggcgcgcaacagaaaaaacgcgagctggtgatcttcattacgccgaccctgattaagggataa

SEQ ID NO: 426308 - DNA, 363 bp, Serratia marcescens
atgagtaaaagacctggccgttggtggtggctgctatggccgtgggccttatgcgctgagccgcgcgatccgtttgcgccgcctccgctgcctgcttgtgcccaaacggaggcatcgccggcgggctggcgactgaaaggcgtcatcgggcacccggcgctgcgctatggctgggtggtgacgccggcggggcaatggctacgcctgcggccgcagcagcgggtgctggccgagcgctggcaggtgacgcaggtgcaggcgcgcagcctgacgttaacggcgctggcggccgaaccggattgcccggcgagccagggcgacatctcgctgatgatggacaacaacaaggatggcaaaccatga

SEQ ID NO: 426309 - DNA, 495 bp, Serratia marcescens
atggatagccgtttgtcatccgggctgcgcttctggctgagcttgccgggttggctattgctggtggcgcaagggctgggcatcggcgcgttggcgctgttgggcggcggctggatgctgcaagacgaatggcgtcagcgggaaagcgcggcggagcggcaacagcgcctgttgcaacagatcgccatggtgcaacgccaactggatgaggtgccgcaaaccgctatcccggcggcgccgcttgcgccgatcgccaccggcgatctggcgagcgtgctgcaacgagcggggggcgccctgttgcgctggcagcggcaggaaaaaccgccgcggcaaacgctgagcttgcgcattgactacgccggtttgctggtgctgctggaggcgctgcccgccgatttgcgcctccagcagctgagcgtggagacaccgccgcagggcatgacggcgcggttggttttacaggataccgccgaggagcaggccgatgagtaa

SEQ ID NO: 426310 - DNA, 540 bp, Serratia marcescens
atgtatcaggtcaactttctgccctggcgccagcgccgcgagcggcggcgcggctatttctggctgggcgtgctgctgttgcaggtagcggcgctgctgctggcactgttcctgatcgccggccagctgcggcatcaacaggcgcagcggcaggcgcggctggcgatgctgggtgaagagctggcggcattgacgttgctcgtccgccagcagcagcaagagcgggcgcagcgagcgttgcacagcgtccgcgccgaacggcaggcgagcaacgcccaacataaccggtgttatttgcagctgctgcagcaattgtcctctagcgttcctcccccgctgtggctcacggcgctggacagcgatgcggcgaacggcctgcggctgcgtggattgagccgctctcctgcggccatcacgcagttcgaacgacggctggcggggatgcctgcgttgccacggctgcgtttggctgaggtggcgcaacgcgaagacggcctgtactcctttcacctggcggcgcgctgggggcgtgatggatag

SEQ ID NO: 426311 - DNA, 834 bp, Serratia marcescens
atgttccctcaagcatggcaggtagggctggatatacaaatcgactgcgtgcgggcggtggcggctcaacgccgccgcaacggctggcagttgcgccactggtggcagcaggcgctgccgcaggcggttttgcgcgatggctgcctgcaaccttccgaattcctgatccgggcgctgcggcaatggcgcgtccagctgccgcgacatatttccttacgcattgctctaccggcgcaacgcgtgttacagcagcgcatgacgcagccggacgcgcggctgcgcgagccggaacgcagcgactatatcggtggccacggtttgaagcagttcccgctcgacggccagacgttggtgctcgactatcgcgccgcgccggcggatgaggtggcgctgctgttgaccgctgcgaggcggcaggagctgcagcagtggctgcattgtctgcgtcaggctggcctgcatccgcaagcggtcgatatcaccccctgtgcgctgcgcatgatggcgacggcggcaggcgtgccgcccgctgcggggctgatgcaccgtctcgaacgagaatggctgtgggtggcgccggccgacggcgcgttcgcttttggtctggcgccgggcgacgatgacgcgcaggcgctgcgggcgctgcaagcccagatgccggtgggcgacgatcggccggtctatgccggcggcgtgctggcgggagccttgcccgccggttgccttggttggtcgccgctcagcgccttcacgcagctgcgtccgccgttgcctgcgcatccttcggcgttcgcgttggccggtggtctggcgctgcgcgaggaggatcgctga

SEQ ID NO: 426312 - DNA, 2559 bp, Serratia marcescens
gtgaagttcgtaaagtattttctaatccttgcagtatgttgcatcgtgctgggagcagcctcgatttttggcttgtacaaatatgtcgagccacagctgcccgacgtcgcaacgctgaaagatgtgcggctgcagataccgatgcaggtctacagcgccgatggcgaactgatcgcccaatacggcgagaagcgccgcattccgctgaaactggatcaaattccgccggtgatggtgcacgcattcatcgccaccgaagacagccgcttctatgatcaccacggcgtcgatccggtcggcatcttccgcgccgcctccatcgcgctggtctccggccacgcttcacagggggccagtaccattacccaacagctggcgcgtaacttcttcttaagcccggaacgcaccctgatgcgtaaaatcaaggaagctttcctggcggtgcgcatcgagcagatgctcaccaaagatgaaatccttgagctgtatctgaacaagatctatctgggttaccgcgcctacggcgtgggcgccgccgcgcaggtctatttcggcaaagacgtcagccagctgaccctgagcgaaatggcgaccatcgccggcctgccgaaagcgccgtccaccttcaacccgctctattcgcacgatcgcgccgttgcccgtcgcaacgtggtgctatcgcgcatgctggacgaacactacatcacgcaggcgcagtacgatcaggcgcgttccgaagatctggtcgccaattaccatgcgccggaaatcagcttctccgcgccgtatctctccgagatggtgcgtcaggagatgatcaagcgctacggtgaaaacgcctataccgacggttacaaggtttacaccaccgtcaccaaacggctgcagctggcggcgcaggaatcggtgcgcaacaacgtgctggcctatgacatgcgccacggctatcgcggcccgtccaacgtgttgtggaaagtcggcgaagcggcctgggatcgcaaacagattgtcgattcgctgaaaaacctgccgaactacggcccgctggcgccggcggtgattaccgccgccaacccgcaggaagcgacggcgatgctggccgacggcagcagcattgccctgccgatggcgaccatgcgctgggcgcggccatatcgctcagacactcagcaaggcccaacgccgaaacgcgtcaccgacgtggtgcaggccggccagcaggtgtgggtgcgcaaagtgaacaacgcctggtggctgtcgcaggtgccggacgtcaactcggcgctggtctcgatcaacccgaacgacggcgcggtgaaagcgctggtcggcggcttcgatttcaaccagagcaaattcaaccgcgtcacgcaggcgctgcgccaggtaggttcgaacatcaaaccgttcctgtacaccgccgcgatggataaaggcctgacgctggccaccatcctgaacgacttgccgatcacccgttgggatgccggcgccggcaccgactggcggccgaagaactcgccgccgacctacgacggcccgattcgtctgcggcaggggctggggcaatcgaagaacgtagtgatggtgcgcgcgatgcgcgcgatgggcgtcgactacgcggcggaatatctgcagcgcttcggcttcccggcgcagaatatcgtgcataccgaatcgctggcgctgggttccgcctccttcaccccgatgcagctggtgcgcggctacgcggtgctggcgaacggcggttacctggtcgatccgtacttcatcaccaaaattgaagacgacaacggcaatacggtgttcgaagccaaaccgaaagtggtgtgcagcagctgcaacctgccggtgatctacggcgacacccaccgctcggcggtgctgtccgacgacaacatcgaaaacgtcgccacctcgcaggaaggcaacaacagcacggtgccgatgccgcagctggagcaggtcaccccggctcaggttcagcaggacggcgaccaacagtatgcgccgcacgtcatcagcacacagctggccttcctgatccacgacgcgctgaacagcaacatcttcggcgaaccgggttggatgggtactgcctggcgtgccgggcgcgatctgaaacgtcatgatatcggcggcaaaaccggtaccaccaacagttccaaggacgcctggttctccggctatggcccggataccgtgacctcggtgtggatcggtttcgacgatcaccgccgcgatctgggccgatcgacggtatccggcgccatcccggatcagatttccggcggtgaaggcggtgccaagagcgcccagccggcgtgggacgacttcatgaagaccgcgctggaaggcatcccggagcaaaaagtcacgccgccgccgggcatcatcagcgtcaccatcgacaagagcagcggcaagctctctggcggcggcggcggcagccgttccgagtacttcatcgaaggaacgcagccgacggactacccatcgcgcgataccggcaccacgttgaccgatccgggcggtgaaagccacgagctgttctga

SEQ ID NO: 426313 - DNA, 555 bp, Serratia marcescens
atggataaacacctgcaaaaacctaaaattctgaaagtggaaacggtcgcgcgttcgcgtttgttcaacgtcgagtcggtcgatttggaattcagcaacggggttcggcgggtgtatgagcgcatgcggccttcggatcgcgaagcggtgatgatcgtgccggtgattggcgatgatctgctgctgatccgcgaatatgcggtgggcaccgaatcctatgagctggggttcccgaaagggctgatcgatcccggtgagggcgtgctggaggcggccaaccgcgagctgatggaagaggtgggattcggcgcgaagcgctttgattttctcagcaagctgacgatggcgccatcctacttttcaagcaaaatgaatatcgtgctggcgcacgatctctatccgcagagcctggaaggggatgaaccagagcccctgccgcaggtgcgctggccgatcgccaacatgatggcgctgctggcggaaccggatttccgtgaggcgcgcaacgtcagcgcgctgttcctctccgaggcgtttttgcgcgcatcgcgctga

SEQ ID NO: 426314 - DNA, 2136 bp, Serratia marcescens
atgagcacaatagtgttgatattggccttagtgcttgtctgtctgattgccgccggtctgtacctgtggttcaaggcccgcaacccgtcggcgctggcgcacgcgctgccgtttatcaaaccagcccaccgcaagctgaccgacgaagagcgtgctgcggtcgagttctatctcaatcagcaaaacaagctgagcaacaagctgttgcccggcggtggcgctaccttgcccgcagccaaactggcgctcaccccgcaaagcgataacgtttatcccgtcacgcacgccatcactcgctacgggctggccagcgacgatcccaataaatggcgctattacctcgacgctgaagaggtgcatctgccgccgttctgggagccgtatatcaccgccgacaaccatgtggaagtgatcagaacccagacgctgccgctggtgatttcgctcaacgggcattcactgaaagatcatattcacgaccggccgcagccgccggtggtgaccgccgcgccgaccaaaaacgcgtccatccgcaaggaggagagtgagcatgtcgagctggtcaatattcgcaaggaaacgccggaagagcatgcgctgaaccggccgaacggcatccgtgaagccgtcatcatctccgttgcgctgctgctgctgttcttcagcctgataagcccggtgctggtgatcccctggatgattttcgtggcggtgctgatgatcgcctggggatgctggaatctgttccgtcgcccggcctcacgcgagctgaaggagatccactgtctgcgcggcacgccgaagcgctggggcctgttcggcgaatccggccaggggcagatcagcaacatttcgctcggcatcatcgatcttatctacccgccgcattggcagccttacctgacgcaggacctgggcaagaccaccgacgtggacgtctacctcaatcggcaggtggtgcgccaggggcgcttcctctcgctgcatgacgaagtgaagaacttcccgctgcagcaatggggccgcaacgcggtgctggccgccagctcggcgctggtgctgctgttgctgctgatctatatcccgctcaacctgccgctgaccctcagcatggcctggctgcagggcgcgcaaaaagtggaagtgaccagcgtacaggcgctggaggccacgccgctgcgcatcggcgacacgctgaaagtgcgcggcagcggcatgtgctatgtgccgccgccggccaacggtggcggcgccgccaatttcgcgccgttcgactgctccggcatctattggaacaacgccgccccgctgccgcagccggaatcggaagtcatagacaaagcgacggccctgctggcgacggtcaacagccagctgcatccgagcggcgccgatcagaaggtcaacccgcagctggccagcgccatcgagaaatccggcatgattctgttggatgacttctctgatatcgttctgaaaacacaggatttgtgtcaggcagaaaacgactgcgtgcggttgaaaaacgccctggtcaacctgggtaacgccaaaaactggagcggtttggtgaaacgcgccagatccggcgcgctgcaaggcgtcaacgtgctgctgcgcccggtgagtgccgaatcgctggacagcctgaccaaagtggccacgtcgtcgttcatcttcaatgaaacgcgtctggccgccgcggcgctcaacagcccgccgccgggcggtttcctgatccgcagcgacgaaggccgccagctggtcagccatccgcaatcctcggcaccgcagagcgaatacaacgccctcgaccagtggaatgagctacagcgcctttccaccctgctgctgcataccccgttccaggcgcagggggtgatcaccagcctcagcgtcgacgccaacggcacccgccacgtggcgctgcacagcgaaccggacatgatcaccctgtggcgctacctcggcaccagcctgctgttgctggcggtggtcatcagcctgggctataacgcctggcggctggtgcagcgtcggcgcatcaatcagcaccgcgtcgccgatatccagcgttactacgacagctgcttcaatccgcagctcaatccgatgtcgatgcggccgatggcctga

SEQ ID NO: 426315 - DNA, 681 bp, Serratia marcescens
atggttcccgagtttgattggccgcagatcgataccgtgctgctggatatggacggcaccttgttggatctggagttcgacagccacttttggctcagcctggtgccgcaggcgctgagcgaaaggcgcgccattgcgttcgacgaagcccgcaatatcattgagcgggaatatcaggcggtgcagcacaccatgaactggtattgcttcgattactggagcgagcggttggatctggatatctaccgcatgaccagcgaagtgggtagccgcgcccggctgcgcgaagacaccgagccgtttttacaggcgctgcgcgacgccggcctgcaaaccattttgctgaccaatgcgcatccgcacagcctggcggtgaaaatcgagcataccggcctcgatcggcaccttgatttattgttttccacccacacatttggttatccgaaagaagatcagcgtctgtggcaggcggtgcagcagcacaccggattcaatccgcagcgcacgctgttcgtcgacgacggcgagccgatcctcgacgcggcgcgcgctttcggcattcgttactgcctgggcgtgcaaaacccggactccagcacggcggaaaaaagcttccagcgccatccgtcgatgcgcgactatcgcctgctgataccggcgctggccaagggggaagcatga

SEQ ID NO: 426316 - DNA, 408 bp, Serratia marcescens
atgaaggaaaaagcgacgcgcgacgacgcggtccggctggacaagtggctgtgggccgcacgcttctacaagacccgcgcgctggcgcgcgaaatgatcgacggcggcaaggtgcattacaacggccagcgcggcaagccgagcaagattgtcgaactcaacgccgagctcaagctgcggcagggcaacgaagaacgaaccgtgatcgtgctggcgctgagcagccaacgccgcggcgccggcgaggcgcagcaaatgtatcaggaaaccgaagccagcatcgccaaccgcgaaaaaatggcgctggcgcgcaagatgaacgcgttgaccatgccgcatccggaccgccgtccggacaaaaaggagcggcgcgacctgatgaaatttaaatttggtgagccggaataa

SEQ ID NO: 426317 - DNA, 879 bp, Serratia marcescens
atgtccaaccatgaccaattgcaccgttacctgtttgaaaactacgcggtgcgcggcgagctggttaccgtcagcgaaacctatcagcagatcctgaataatcacgactacccggcgccggtgcaaaagctgctgggcgagctgctggtcgccaccagtctgctgaccgcgaccctgaagttcgacggcgacatcaccgtgcagctgcagggcgacggcccgctgaagctggcggtgatcaacggcaacaaccgccaggagatgcgcggcgttgcgcgcacccaggcgcctatcgccgacgacagcaccctgcatcagatgatcggcaacggcgtcatagtcatcaccatttccccgacggaaggcgagcgctatcagggcgtggtcggcctggaaggtgaaaccctggccgagtgcctggaagcctacttccgccagtccgaacagctgccaacccgcctgttcatccgcaccggcgaagcggaaggccacgccgcggcggccggtatgctgctgcaggttctgccggcgcaggacggcaacctcgatgatttcgatcatctggtgcaactgaccaacacggtaaaaagcgaagagctgttcggcctgccggccaacgaagtgctgtaccgcctgtatcaccaggaagaagtcaccctgtacgaaccgcaggacgtgcagttccgttgcacctgttcacgccagcgttgcgccgacgcactgctgaccctgccgaccgacgaagtggcggacatgctggagcaggacggcaatatcgacatgcactgcgactactgtggcagtcactatgtctttgacccggttgatgttgccgccttgtatgcgggtaataccggcgaaagcgacaggttgcactaa

SEQ ID NO: 426318 - DNA, 1620 bp, Serratia marcescens
atgcgcgttaaaggtataacccctcaggatctggccgcttacggcattcacgacgttagcgaaatcgttcacaacccgagctatgaactgctgtttaaggaagaaacagacccatctctggaaggttttgagcgtggggtagtcaccaagctgggtgccgtctccgtcgataccggcatcttcaccggccgctcgccgaaagacaaatacatcgtccgcgacgacatcacccgcgataccgtgtggtgggccgatcagggcaaaggcaaaaacgacaacaaacccctcagcccggaagtgtgggccgatctgaaacacctggtcaccgaacagctttccggcaagcgcctgttcgtggtggataccttctgcggcgccaacgccgactcgcgcctgaaagtgcgcttcatcaccgaggtggcctggcaggcgcacttcgtgaaaaacatgttcatccgcccgagcgacgaagagctggctgacttcgagccggacttcgtggtgatgaacggcgccaaatgcaccaacccgaactggcagcagcaaggcttgaactcggagaacttcgtcgccttcaacctgaccgagcgcatgcagctgatcggcggcacctggtacggcggcgaaatgaagaaaggcatgttctcgatgatgaactacctgctgccgctgaaaggcatcgcctcgatgcactgctcggccaacgtgggcgagaaaggcgacgtggcggtgttcttcggcctgtccggcaccggcaaaaccaccctctccaccgatcctaagcgtcagctgatcggcgatgacgagcacggctgggacgacgacggcgtgttcaacttcgaaggcggctgctacgccaagaccatcaagctgtctgaagaagccgagccggacatctaccacgccatcaaacgcgacgcgctgctggaaaacgtcaccgtgctggccgacggcagcatcgacttcaacgacggttcgaaaaccgagaacacccgcgtttcttacccgatctaccatatccagaacatcgtcaagccggtgtccaaggcgggtcatgccaccaaggtgatcttcctgaccgccgacgctttcggcgtgctgccgccggtatcgcgtctgaccgccaaccagactcagtaccacttcctgtccggcttcaccgccaaactggccggcaccgagcgcggcgtcaccgaaccgacgccaaccttctccgcctgcttcggcgccgcgttcctgtcgctgcacccgacgcagtacgccgaagtgctggtgaaacgcatgcaggccgccggcgcccaggcttacctggtcaacaccggctggaacggtaccggcaagcgcatctcgatcaaagatacgcgcggcatcatcgacgccatcctgagcggtgaaatcgacaaggcggaaaccgtcaccctgccgatcttcgatctggcgatgccgaccgcgctgccgggcgtgaacccggagatcctcgatccgcgcaatacctacgccagcctcgagcagtggcaggaaaaagcgcaggatctggccgagcgcttcatcaccaacttcgacaaatacaccgacacgcctgcgggcgccgcgctggtcagcgccggccctaagctgtaa

SEQ ID NO: 426319 - DNA, 264 bp, Serratia marcescens
atggctactatcaccgtcagaaatctggacgacgaaatcaaagagctgctgcgtatttcagcggcgaaaaacggccattccatggaagaggaagcgcgcatgatcctgaaacaggcgctggtgaaaaagccgccgcgctatggattgggtacctggatgcatcagcacttcgccgaatttggcggcgtcgagctggagatcccaccgcgtgacgccgtgccaccacgcatcgtcacctttgatgatgaagatgacaacgcatga

SEQ ID NO: 426320 - DNA, 480 bp, Serratia marcescens
atgatcattctcgacaccaacgtcatttcagaaacgctgcgccccagcccgtactacaacgtcattaactggctaaatgaaaaggacaatgacgatctctatctgagcgccattgtcctggccgaactgttcagcggcgtcgcctgcatgcctgacggcaagcgccagcgggatctcaagctcaaattggcggacgctcttgaattgaagttcgaggggcagatattgccgtttgatgggctgtgcgcgatgcaatacgcggaattgacggcaaggaatcggcttctgggtaaagcgatgagcgtgccggatgcccaaatcgccgccacctgcctgcattacggcgccgccctggccacccgcaacaccaaagacttcctccactgcggcatcgagttaatcgatccgtggcaggcgccgaccggccgtcggttgcatgaggatgcggcggaatactacgtgatgagcaggaagtcctga

SEQ ID NO: 426321 - DNA, 1371 bp, Serratia marcescens
atgaggcgattgcgcttttcaccgcgtagctcgtttgcccgaaccctgttgttgatcgtcaccctgctgttcgtcagcctggtgacgacctatctggtggtgctgaacttcgccatcctgcccagcctgcagcagttcaacaaggtattggcctacgaagtgcgtatgctgatgaccgatcggctgcagctggaggacggcacgctgctggaagtgccgccggcgttccgccgcgagatttaccgcgaactgggcatctctctctacaccaactcggcggcggaggagagcggcctgcgctgggcgcagcactaccagttcctcagccagcagatggcgcagcagctcggcgggccgaccgatgtgcgggtggaggtgaacaagaactccccggtggtgtggctgaaaacctggctgcagcccgatatctgggtgcgcgtgccgctgacggaaatccaccagggcgacttctctccgctgttccgctatacgctggcgatcatgctgctggcgatcggcggcgcctggctgtttatccgcattcaaaaccgcccgctggtggagctggaacatgcggcgctgcaggtgggcaaggggattattccgccgccgctgcgcgagtatggcgcttccgaagtgcggtcggtgactcgcgcattcaatcagatggcgtcgggcgtcaagcagctggcggatgaccgcaccttgctgatggccggggttagccacgatctgcgcacgccgttgacgcgtatccggctggcgacggagatgatgagcgccgaagacggctatctggccgagtcgatcaataaagacatcgaagagtgcaacgccatcatcgagcagttcatcgattatctgcgcaccgggcaggagatgccgaccgaaagcagcgatctgaacgccattttgggcgaggtggtcgcggcggaaagcggctatgagcgggtgattgaaaccgcgctgtcgccgggtgagctgatgatgaacgtgcacccgctgtcgattaagagggctgcggtgaacatggtggtgaacgcggcgcgttacggcaacggctggatcaaggtcagcagcggccgcgagctgcagcgcggctggttccaggtggaagacgacggcccgggcatcaagccggaagagttgaagcacctgctgcagccgttcgtccgcggtgacagcgcgcgcagcaccagcggcaccggtctggggctggcgatcgtgcagcgtattatcgatgcgcacgacggtgagttggaaatcggcaccagcgaacgcggcgggctcttgatccgcgcgtatattccgttgccgatggagaaaaaagagtcggccaacggccatcaaaccgccagggaaaacgcctga

SEQ ID NO: 426322 - DNA, 720 bp, Serratia marcescens
atgcaagagaatcataagatcctggttgtcgatgatgacatgcgcctgcgcgcacttttggaacgttatttaaccgagcagggcttccaggttcgcagcgttgccaacgctgagcaaatggatcgcttgctgacccgtgaatccttccatttgatggtgctcgatctgatgttgccgggcgaagacggcctgtccatctgccgccgcctgcgcagccagagcaacccgatgccgatcattatggtcaccgccaaaggtgaagaggtcgatcgcatcgtcgggctggaaatcggcgccgacgactacattcctaaaccgtttaacccgcgtgagctgttggctcgcattcgtgcagtgctgcgccgccaggctaacgagctgccgggcgcgccttcgcaggaagaagcggtgatcgcgttcggcaaattcaaactgaacctcggcacccgcgagatgttccgcgaagacgaaccgatgccgttgaccagcggcgagttcgcggtactgaaggcgctggtcagccacccgcgtgaaccgctgtcgcgcgataagctgatgaacctggcgcgtggccgcgaatacagcgccatggagcgctccatcgacgtgcagatctctcgcctgcgccgcatggtggaagaagatccggcgcatccgcgttatatccagaccgtttggggtctcggctacgtgttcgtcccggacggcagcaaggcatga

SEQ ID NO: 426323 - DNA, 306 bp, Serratia marcescens
atgatgaagaaagagatcactttcaccgtggtggaactgtgccaacgggtggagatttcagaagatgagctggtcgagatcgttggcctgggcgtgatcgtgccgctggagccggcgcagccgagctgggagttcgactacccggcgctgagccatctgcagcgtgcgcgcaggctgcgggccgagctggatctggattggccggggatcgccatggcgctgacgttgctcgatcgggttgaggcgctgcagcaagagaaccggcagctgcgccggcagttggcgcgtttcctgcagacttcctga

SEQ ID NO: 426324 - DNA, 963 bp, Serratia marcescens
atggaatttaaagattactacgcaacgatgggcgttgagcccaacgccgatctgaaaaccatcaaaacggcctaccgccggctggcgcgtaaatatcaccctgacgtgagcaccgaagaagacgccgagagcaaattcaaggagctggccgaagcctatgaggtgctgaaggacgaagagcgccgcgccgagtacgatcagatccggctgcaccgcaacgatccgaactttggccgccaggcgcgcggcgatcgcggcggctatcagcagagcgcttcatggcacggcggcggtgccgacgcgcaagacttctccgatttcttcgaaagcatgttcggcgggcgtgcggcgggcgggcatcgctccgcttcgcactcgcacggcgggcatggcttccgcggccaggatctggagatggaggtgccgctgttcctcgaggaaacgctgcatggccaaagccgcgagatctcctacaagctgccggtgtacgacgagctggggcggcaggtgagcgaagccagcaaaacgctgaacgtgaaaatcccggccggggtgggcgacggcgagcgcattcgcctcaaggggcagggcgtggccggcgtgggcggcggccagaacggcgatctgtatctggtcatccgcctcgcgccgcacccgctgtttgagatcgacggccacaacctgagcatcgtggcacctctcgccccttgggaggcggcgctcggcgccagcattgaggtgccgacgctgaccggaaaaatcgcgttgaccgtgccggccggcagccagagcggcaaacggctgcgggtcaagggcaaggggctggcgggcaagaaagagcccggtgacctgtatgtcattctcaaggtggtgatgccgccgaagccgaacgagaaggccagcgccctgtggcgagaactggctgaacaggcggcgttcaacccgcgcgcggaatgggagtaa

SEQ ID NO: 426325 - DNA, 474 bp, Serratia marcescens
atgagaactcaactgataacccgtgaagggtatgacaagctcaaacaagagctggattacctctggcgcgaagaacgccccgaggtgaccaagaaagtgacctgggccgccagcctgggcgacagaagcgaaaacgccgactaccagtacaacaagaagcggctgcgcgagatcgaccgccgcgtccgctatctgaccaaatgcctggagcaattgaagatcgtcgattactccccgcagcaggaaggcaaggtgttcttcggcgcctgggtggaggtggagaacgacgacggcgagaccaaacgctttcgcatcgtcggttacgacgagatcttcggccgcaaggattacatctccatcgacgcgccgatggcgcgcgccctgctgaaaaaagaggtcggcgacgtcgccaccgtcaatacgccgctgggcgaggcgcagtggtacgttaacgagatagactacccgaagtaa

SEQ ID NO: 426326 - DNA, 2334 bp, Serratia marcescens
atgaatgacccactgagccgcattattgcaacagaactgcaggcccggccggagcaagtcgactccgccatccgtctgctggatgaaggtaataccgtgccctttattgcacgctatcgtaaggaagtcaccgggggcctggacgacacccaactgcgccagctggaaacccgcctgggttatctgcgtgaactggaagatcgtcgtcagaccatcctgaagtcgatcgatgaacagggcaaactgaccgaacaactggcgggggcgatcaacgccacgctgagcaagaccgaactcgaagacctctatctgccgtacaaaccgaagcgccgcacccgcggccagatcgccatcgaggccggtctggaaccgctggcggacgcactgtggcaggatccgcaacagcagccggaacagttggctgaacgctacgtcgacgccgacaagggcgtggcggacgtcaaagccgccctcgacggcgcgcgctatatcctgatggagcgcttcgccgaagatgcctcgctgctggccaaggtgcgcgactacctgtggaaaaacgcccatctggtgtccaaagtggtcgagggcaaggaagaagaaggcgccaagttccgcgactatttcgatcaccacgaaccgatttcccaggtgccttcgcaccgcgcgctggcgatgttccgcggccgcaacgaaggtgtgctgcagctggcgctgaacgccgatccgcagtttgaggaagcgccgcgcgaaagccaggcggagctgatcatcatcaatcacctcaacctgcgcctgaacaacgccccggccgacgcctggcgcaaggcggtggtcaactggacctggcgcatcaaggtgttgctgcacctggaaaccgagctgatgggcacggtgcgcgagcgcgcggaagatgaagcgatcaacgttttcgcccgcaacatgcacgatctgctgatggccgcgccggccggcatgcgcgccaccatgggcctcgatccgggcctgcgcaccggggtgaaagtcgccgtggtcgacgcgactggcaagctggtcgccaccgacaccgtctacccgcacaccgggcaagcggccaaagccgccgccatcgtcgcggcgctgtgcatcaaacataacgtggagctggtggccatcggcaacggcaccgcttcgcgtgaaaccgagcgtttctatctcgacctgcaaaagcaattcggcgaggtccgggcgcagaaagtgatcgtcagcgaagcgggcgcgtcggtgtattccgcgtcagaactggcggcgcaggagttcccggatctcgacgtgtcgctgcgcggcgcggtgtccatcgcccgtcgtctgcaggatccgctggcggagctggtgaaaatcgacccgaaatccatcggcgtcggccagtatcagcacgacgtcagccagagccagctggcgaagaagctggactcggtggtggaagactgcgtgaacgccgtcggcgtcgatctgaacaccgcgtcggtgccgttgctgacccgcgtggccggcctgacgcgcatgatggcgcagaacatcgtcaactggcgcgacgagaacggccgcttcagcaaccgtgaacagctgctgaaagtcagccgcctggggccgaaggccttcgaacagtgcgccggcttcctgcgcatcaaccacggcgacaacccgctggatgcttccaccgttcacccggaagcctacccggtggtgcagcgcattctggccgccaccgagcaggcgctgcaggacctgatgggcaacgcctcggcggtgcgcagcctgaaagcggtcgacttcaccgacgacaagttcggcgtgccgacggtcaccgacatcctgaaagagctggagaagccgggccgcgatccacgtccggagttcaaaaccgccaccttcgccgaaggcgtggaaaccctcaacgatctgcaggtgggcatgatcctggaaggctcggtgaccaacgtcaccaacttcggcgccttcgtggatatcggcgtgcatcaggatggcctggtgcacatctcctcgctggcggacaagttcgttgaagatccgcacaccgtggtgaaggccggcgacatcgtcaaagtgaaggtgatggaagtcgatctgcagcgtaaacgcatcgcgctgagcatgcgcctggatgagcagccgggcgaaggttcaccgcgccgcggcggcaacgcgcctgcacagacgcgcgaccacgccaaccgttcggcgggcggcaacaaggccaaaccgcgcaacgcggcgccggccggcaacagcgccatgggcgacgcgctggcggcggcattcggcaagaaacgctaa

SEQ ID NO: 426327 - DNA, 225 bp, Serratia marcescens
atgcagctccaacctaaacgcacgtataagattgtcggcttttccggtgaaattgcgccggcctaccgccagaaactgttatcgctcggcatgctgcccggctcttcgttcgacgtggtgcgcgtcgcaccgctgggcgatccgatagaaattaaaactcgccgcgtcagcctggtgctgcgcaggaaggatctggcgctgctgcagctcgacggccagccctga

SEQ ID NO: 426328 - DNA, 2316 bp, Serratia marcescens
atgaaaaaactcaccatcggcttaatcggtaacccgaactccggcaaaaccacgctgttcaaccagctgaccggcgcacgccaacgggtcggcaactgggcgggcgtgacggtcgaacgcaaagaaggccatttcaccaccccgcagtccgacgtacggctggtcgatttgcccggcacctactccctgaccaccatttcagagcaaacctcgctcgacgagcagatcgcctgccactacattttgagcggcgacgccgatctgctgatcaacgtggtcgacgcctccaacctggagcgcaacctctacctgacgctgcagctgctggagctgggcattccctgcatcgtggcgctgaacatgctcgacatcgccaaaagtcagcatatcgatatcgacgtcgccgcgctgtcggcgcgcctcggctgcccggtagtgccgatgatctccacccgcgccgacggcatcggcgtgctgaaacagatgatcgacaatcatcacatcaacgaacagcaggcgctggtgaactacccaccgctgttgctgaaagcggtcgccacgctgagcgacgccatgccgcaaacgctgccggcggtgcagcgccgctggctggcattgcaaatgctggaaggcgacatctacagtcaccggctggccggccccgccgtcgcgctgttgcctgcggctgcccaggcgttgcaacagcagcagcaggaagacccggcgctggtgatcgccgacgcgcgctaccagtccatcgccgccctgtgcgatgaggtcagcaactcgcagcaggcgatgcccaaccgcctgaccgaactgctggataaagtgatcctcaaccgctggctgggcgtgccgatcttcctgctggtgatgtacctgatgttcctgctggcgatcaacatcggcggcgcgctgcagccgatcttcgatatcggctcggcggcgatcttcattcagggcattcagtggctcggctacaccctgcacttccccgactggctgaccgttttcctggcgcagggcgtcggcggcggcatcaataccgtgctgccgctggtgccgcagatcggcatgatgtacctgtttctgtcgttcctggaggattccggctacatggcgcgcgcggcgttcgtgatggatcgcctgatgcaggcgctcgggctgccgggcaaatccttcgtgccgctgatcgtcggcttcggctgcaatgtgccgtccatcatgggcgcccggacgctggatgcccagcgcgagcgcctgatcaccatcatgatggcgccgttcatgtcctgcggcgcccgtctggcgatcttcgcggtgttcgccgccgccttcttcggccaggacggcgccggggtggtgttctcgctgtacatgctcggcattgcggtggcgatcctcaccggcctggtgctcaaatacaccctcatgcgcggcgaagcctcgccgttcgtgatggagctgccggtctaccatgtgccgcacctgaaaagcctgctgctgcaaacctggcagcggctgaaaggcttcgtgctgcgcgccggcaaggtgatcgtggtggccagcatattcatcggcggcctgaacagcttctcgttcagcggcaagacggtcgacaacatcaacgactccgcgctggcctcggtctccagggtgctgacgccgctgctgcagccgatgggcgtccacagcgataactggcaggccaccgtcgggctggtgaccggcgcgatggcgaaggaagtggtggtcggcacgctgaatacgctgtacaccgccgagcgcatcaacaaagaggcgttcgacgccgccaacttcaacctgctcgatgaactgggcggcgcgctgcacgaaacctgggacggcctgaaaaataccttcagcctgagcgtgctctccaacccgatcgaagccagcaagggcgacggcgagatgggcgtcggctcaatgggcgtgatgagcagcaaattcggctccggcatctccgcctacagctacctgatcttcgtgctgctgtatgtgccttgcgtctcggtgatgggcgccatcgcccgtgaatcgagccgcggctggatgaccttctctattctgtgggggctgaacgtggcctactcgctggcgacgctgttctatcaggcggccaccttcaaccaacacccgcagtacagcctgacggcgatcctggcagtggtgctggtgaatctgctggtgctgttcggcctgcgccgggcgcgcagccgcgtcacggtgcgcctgggcaacgccacgccggcggcctgttgccagagcgccaaagggagctgtcactga

SEQ ID NO: 426329 - DNA, 240 bp, Serratia marcescens
atggccgggctgctgcaggtgcgcgatgcgctggcgctgcgcggcagcgcccaggcgcagcagctcagccactcgctggcgacgccgctgccgctggtgcaggcgatgctggatcgattgacggcaatgggaaaagtggaacgcatcgaacaggatgacggcgcctgtctgagcggcagttgcaaaagctgcccgcaggggcaggggtgcagcacggtgttctaccggctgaaggcctga

SEQ ID NO: 426330 - DNA, 285 bp, Serratia marcescens
atgaaatcattgaagatgattattgcagcggcagtgctgggttcggtgtctttcggctccatggcggcaaccctgctgaccaaggaagatctggataagaacccgggtaaatacgagaagatcggcaccgtcaccacgacggcggaaaccacgtcaccgatggatgccaaggaagagctgtccaaactggctgacgaaaagggcggtcaatactacgtgatcctggcaggccgcgaacacggtaaattcagcgccatcgccgaagtttacaaagacaagcaataa

SEQ ID NO: 426331 - DNA, 771 bp, Serratia marcescens
atgacagcgctgtactggcaaacaataggtgagggcgaacgcgatcttgtgctgctgcacggctggggcttgaacgccgaagtgtggagttgcattcaggcgcgactggcgccgcattttcgcctgcacctggtcgatctgccgggttatggccgcagccaggggttcggcgcgttgtcgctggcgcagatgacggaaatcgtgctggcggccgccccgccgcaggcctggtggctaggctggtcgctcggcggactggtggccagccaggcggcgctgatgcagcccgagcgggtcaaggggctgatcaccgtggcctcctcgccgtgctttgccgcccgcgatgagtggccggggatccgcccggacgtgctgagcggtttccagcatcagctgagtctggatttccagcgcaccgtcgagcgttttctggcgctgcagacgctgggcaccgagagcgcgcgtcaggatgcgcgccagctgaaagcggtggtgctcagccaaccgaccccgagcgtcgaggtgttgaacggcgggctggagatcctgcgcaccgccgatctgcgcgtaccgctggcggcgttgaatctgccgctgctgcggatctacggctatctggacgggctggtgccgcgcaaggtcgccgagctgctcgatgtcgcctggccgcattctgcgtcgcagatcgtggccaaagccgcccatgcgccgtttatctctcatcccgatgaatttgtgacgatgatcgaagcgtttattgcagcacattga

SEQ ID NO: 426332 - DNA, 684 bp, Serratia marcescens
atgctatcaatccgcagccgctgttggctatgccgacagccgttgagcctgatgtgtcatggcatctgcagctgctgcctgcgccatctgccggcccacccgccgtgttgcccgcgctgcggattgcccgccggggagacgcaaaccccctgcggtcgctgcctgcaacggccgccgccctggcagcggctggtgttcgtcggcgactacgttgcgcccctcagccaactggtaaagaggttcaagtttcaccgcgcgcccgagctggcgccgacgctggcgcgcctgatgctgttgcggtggcagcaggcgcgcagagagcagaatctgaacagacccgacctgattttagcggtacccttgcatgcaacgcgctgctggcgccgtggttataaccagagcgatctgctggcccggccgctggcgcgctggctgggctgcgcctatcggcccgccgctttgcgccgggtgcgcaagacagccctgcaacagcggctgagcgccggagcgcgcaggcgcaatttgcagcgcgctttcacctgcacggtgccggtcgccggccggcatatcgccctggtggatgacgtggtgaccaccggcagcaccgtcgcggaaatcgcggcgctgttgcggcggcaaggcgccgcctcggtgcagatatggtgcgtttgccgcacgttgtag

SEQ ID NO: 426333 - DNA, 576 bp, Serratia marcescens
atgatccgtataacagatgctgcacaggaacactttgccaaactgctggcaaatcaagaagaaggcacccaaatccgcgtattcgtgatcaacccgggcacgccgacggccgaatgcggtgtctcttattgcccgccggacgcggtagaagcgacggataccgaactgaagttcgacaaactgtccgcctatgtcgatgagctgagcgcgccgtatctggaagacgccgaaatcgacttcgtgaccgaccagctgggttctcagctgacgctgaaagcgccaaacgccaagatgcgcaaggtcgatgacgacgcgccgctgatggagcgcgtggaatacgtgctgcagtcgcagatcaacccacagctggcgggccacggcggccgcgtgacgctgatggagatcaccgacgacaacatggcgatcctgcagttcggcggcggctgtaacggctgttcgatggtcgacgtcacgctgaaagaaggcatcgagaaagagctgctgcagaaattcccggagctgaaaggcgtgcgcgatttgaccgagcaccagcgcggcgagcactcctattactga

SEQ ID NO: 426334 - DNA, 2091 bp, Serratia marcescens
atggatcgcaagcgtatcgatcaggcggcggcacaggcggggatcgccgccgatttcatcaatgcccacggcaagcggcaggcgattgaaccggagaccaagcgcaagctgctggcggccatgaaccgggccgatgccgtgcaggaaggggcggcctcgccgttaccggcggtcaaggtgttctaccagggcgcgccgctggcgctgaccccggcgggcgaaggcgagtacctgtgggcgctgcagcgtgaagacggcgaatgcctgcaggggcgcgtcggcgcgcgcaagaccctgacgctgccgggcgatctgccggcgggctatcaccaattgacgctgagccagggcgcgcggcagtggtcatgccgagtgatcgtcgcgccgaggcgctgcttcgagccgaacgccttgctgaccggcaagaaactgtggggcgcctgcgttcagctgtatacgctgcgttccgatcgcaactggggcatcggcgatttcggcgatctgcgcctgatggtggagcaggtgggggaacgcggcggcgctttcgtcggcctcaatccgatccatgcgctgtatccggccaacccggagagcgccagcccctacagcccctcgtcgcgccgctggctgaatctggcgtatatcgacgtcaacgcggtggaggatttccaacgcagcgacgcggctcagcgctggtggcagaagccggcgacgcagaagcagctggccaaggcgcgcgccgcggaatgggtggattacaccgccgtgatgcagctgaagctggcggggctgaagctggcgttcccgctgtttcaggcgcgcaagccgaacgacgcgcagcgtcaggcgttcgaatggttcgtgactgagggcggcgaaagcctgtatcagcaggcggcgttcgacgcgctgcatgcccacctggcggccaaagacgccagccagtgggggtggccggcctggcccgagcgttatcggcgtgggcagagcgaagcggtgcggcagttctgcgatgagcatcaggacgcggtccgcttttacctgtggctgcagtggctggcggccacgcagttcgcgcagtgtttcgaacagagccggcagcagcagatgccgattggcctgtatcgcgatctggcggtcggggtggcggaaggcggggcggaaacctggtgtgaccgcgaactgtactgcctgaaagcgtcggtcggcgcgccgccggacatcctggggccgctggggcaaaactgggggttgccgccgatggatccgcacgtgatggcggcgcgcggttatcagccgttcatcgatcttttgcgcgccaacatgaccagctgcggcgcgctgcgcatcgatcacgtcatggcgctgctgcggctgtggtggatcccgtatggcgaaaccgccgatcgcggcgcctacgtcaaatacccggtggacgatctgctggcggtgctggcgctggaaagccagcgccaccgctgcatggtgatcggcgaggatctcggcacggtgccggtggagatcgtcggcaagctgcgcgacagcggcgtctattcctacaaagtgctgtatttcgaaagcgacggcgaacaccatttccgcgcgccgcaggcctatccggtgcaggcgatggcgaccatcaccacccacgatctgccgacgctgcgcggctactggcaaagcgacgatctcacgctcggcaaccggctgggcctttacccggatgcggagatcctgcgggcgctgttcgccgatcgggaacgcgccaagcaggggctgctggacgggttgcatcgctatggctgcgtgccgcagaaggtgggcaagaaggcggcgctgctcggcatgagcccgctgcttaaccgcggcctgcagcgctatgtcgccgacagcgccagcgccctgctcggcctgcagccggaagactggctggacatggccgatccggtcaatattcccggcaccagcgatcaataccctaactggcggcgcaagctgaccgaaacgctggaggagatgttcgccgatccgcggataaatcggttgctgaaggatttggacaaacggcggcgcaaggtgtcggtgggctga

SEQ ID NO: 426335 - DNA, 2406 bp, Serratia marcescens
atgtcacagcctacgctcaagaaggatgcttttctggcggcgcttgcccgtcagtggcaacggttcggcctcagttccgcacagcagatgacgcaacatcaatggtgggaagccgtcagtgcggcgctggccgagcagttggccgcacagccggcgccgcgcaaaagcgccaaaccgctgcgccacgtgaactacatctcgatggagtttctgatcggccggctgacggcgaacaacctgatcaacctgggctggtacgacaccgtcgagcaggcgctggcggagcagaacgtcaagctggcggatctgctggagcaggaaaccgatccggcgctgggcaatggcgggctggggcggctggcggcctgtttccttgactcgatggcgacggtggagcaaccggccaccgggtatgggctgaactaccagtacgggctgttccgccagtcgttccagggtgggcagcagcaagaggcgccggataactggcagcgcgagagctacccgtggttccgccacaacgccgcgctggcggtggacgtaggcatcggcggcaagctggaaaagcaggccgacggccgcgaactgtggcgcccggccttcaccctgcgcggcgaagcctgggatctgccggtgctggggtatcgcaacggcgtggcgcagccgctgcgcctgtggcaggcgacccatcagcatccgttcaacctgagcgatttcaacgacggcaaattcctgcaggcggagaagcagggcgtagaagccgacaagctgaccaaggtgctctacccgaacgacaaccatcaggccggcaagcgcctgcgcctgatgcagcagtatttccagtgcgcctgctcggtggcggacattttgcgcaagcaccatcaggccggccgcaagattgaagagctgccgaagtacgaagtgatccaactgaacgacacccacccgaccatcgccattccggaaatgctgcgcattctgctggacgagcaccagctggagtgggaggcggcctgggcgatcaccagcaacactttcgcctataccaaccacaccctgatgccggaagcgctggagtgctgggatgaaaaactggtgcgcagcctgctgccgcgccatttctccatcatcaaacagatcaacgccaggttcaaaaagcgggtggataagcactggccgggcgacgaggcggtgtgggccaaactggcggtgcaccacaacaagcaggtgcgcatggccaacctgtgcgtggtcagcggctttgcggtcaacggcgtggcgcagctgcactcggatctggtggtgaaggatctgttcccggaatatcaccagctgtggccgaacaaattccataacgtcaccaacggcatcacgccgcgccgctggctgaaacagtgcaacccggcgctgtcgggcctgatcgacgagacgctgaaggtggaatgggcgaacgatctcgacgcgttgcgcgggctggaaaaattcgccgacgacgcggcgttccgccagcgttatcagcagatcaaacgcgacaacaaggtggcgctggcccattacgtgcacggcgtgatggggttgacgctcgacccggacgcgattttcgatgtgcagatcaagcgtctgcacgagtacaaacgccagcacctgaacctgctgcacatcctgtcgctgtatcgccagctgcgcgacaacccgaatctggacatcgtgccgcgcgtcttcctgttcggcgccaaggcggcgccgggctactacctggcgaagaacatcatctacgcgatcaaccaggcggccgagaagatcaataacgatccgctggtgaaagatcgcctgaaagtggcgttcattcccgactaccgcgtgtcggtggccgaactgatgatcccggcggcggatatctccgagcagatctccaccgctggcaaagaggcctccggcaccggcaatatgaagctggcgctgaacggcgcgctgacggtcggcacgctggacggcgccaatgtcgaaatcgccgagcaggtgggcgaagacaatatctttatcttcggcaataccgtggagcaggtgaaggcgatactggcgaagggctacgatccgctcagctaccgcaagaaagacaagcacctgaaggcgattttggacgagctggcgagcggcgcgttcagccacggcgacaagcacgcgttcgacatgatgctgcacagcctgctggagggcggcgatccctatctggtgttggcggacttcgcctcgtattgccaggcgcaaagccgggtcgatgaactgtaccgcgatcgggacgaatggacgcggcggactatccttaacaccgcgcgcgtcggcatgttcagctcggatcgttcgatccgcgattaccagcagcgcatctggcaagccaaacgttaa

SEQ ID NO: 426336 - DNA, 2715 bp, Serratia marcescens
atgctgatcccatcaaaactgagccgcccggtacggctgcaaaataccgtgatccgcgatcgcctgctggccaaactggccagcgcgggcaactatcgcctgacactggtcaattgcccggcgggatacggaaaaaccacgctgatcgcccaatgggcggccggcaaggccgatctgggctggtattcgctggacgagagcgacaaccaaccggagcgcttcgccagctacctgatcgccgcgctgcagcaggccagcggcggccgctgcgtcaagagcgaggcgctgagccagaaacaccagtacgccagcctgtcggcgctgttcgcccagctgtttatcgagctggccgactggcaccagccgctgtacctggtgatcgacgactaccacctgatcaccaacgacgccattcacgaagccatgcgcttcttcctgcgccatcagccggaaaacctgacgctgatcctgctctcgcgcaccctgccgccgctcggcatcgccaatctgcgggtgcgcgatcagctgctggaaatgggcacgcagcagctggcgtttacccatcaggaagccaaacaattcttcgactgccgcctggcggcgccgatggaacagcaggacagcagccgcctgtgcgacgaagtcgaaggctgggccaccgcgctgcagctgatcgcgctgtcggcccgccagtccgcctcgtcagctcagctgtcggccaagcggctggcggggctgaacgccagccacctgtccgactatctggtggacgaagtgctggatcacgtcgatgccgaggcgcgcgccttcctgctgcgctgttcggtgctgcgctcgatgaacgacgcgctgatcgtgcggctgaccggcgaagacaacggccagcagcggctggaggagctggagcgccaagggctgtttatccatcgcatggacgacaccggcgaatggttcaacttccatccgctgttcgcttctttcctgcgccagcgttgccagtgggagctggcgctggagctgccggggttgcaccgcgccgccgccgagggctggctggcgctggggtatccggcggaggccattcaccatgcgctggcggccagcgacgtcagcatgctgcgcgatatcctgctgcaacacgcctggtcgctgttccaccacagcgaactggccttgctggaggagtgcctcaacgcgctgccttatgagcgcctgatccaaaatcccaagctggcgctgctgcaggcctggctggcgcagagccagcaccgctacggcgaggtcaacaccctgctggagcgcgccgagcgcaccatgcgcgagcagaaaatcgagatagaccaaacgctgcacgccgagttcgacgccttgcgcgcccaggtggcgatcaacgccggcaaaccggaagaagccgagcggctggcgaccgaagcgttgaaattcctgccgctgtccagctattacagccgcatcgtcgccacctcggtgaccggcgaagtgcaccactgcaagggcgaactggcgcgcgcgctgccgatgatgcagcaaaccgagcagatggcgcgtcgtcatcaggccaaccattacgcgctctgggcgctgctgcagcagagcgaaatcctcatcgcccagggcttcctgcaggccgcttacgaaacccaggacaaggcgttcgaactgatccgcgagcaacacctggaacagctgccgatgcacgagttcctgctgcgcattcgcgcgcagatcctgtggtcgtggtcgcggctggacgaggcggaagacgcggcgcgcaccgggctgaaaatcctggcgaactaccagccgcaacagcagctgcagtgcatcgccatgctggccaaatgctcgctggcgcgcggcgatctggacaacgccaatacccatctgcagcgctgcgaaaccctgctgcacggcgcccactaccatcgcgactggctgaccaacaccgacaagtcgcgggtgatccactggcagatgaccggcgacaccgccgccgccgcccaatggctgcgccacaccgaaaagcccggcatggcggacaaccacttcacgcagggccagtggcgcaacatcgcgcgggtgcagatcctgctcggccagtatgaagaggccggcgtggtgctggatgagctgaacgaaaacgcccgccgcctgcggctggtgagcgatctcaaccgcaacctgctgctcagcaaccagctctactggctgcaagagcgcaagggcgaagcgcagcaggcgctgatcgaagcgctgtcgctggccaaccgcaccggctttatcagccacttcgtcatcgagggcgaagcgatggcgcagcagctgcgtcagctgatccagctcaacacgctgccggagctggaacagcatcgcgcccagcgcatcctgcgcgacatcaaccagcatcatcggcacaagttcgcgcattttgacgagcatttcgtcgataagctgctgacccatccgcaggtgccggagctgatccgcaccagcccgctcacccagcgcgaatggcaggtgctggggctgatctattccggctacagcaacgaccagatcgccggcgagttggacgtggcggccaccaccatcaagacgcacatccgcaacctgtatcagaaactgggcgtggcccatcgccaggaagcggtgcagcaagcgcagcagctgttgaagatgatggggtacggcgcctga

SEQ ID NO: 426337 - DNA, 690 bp, Serratia marcescens
atgctggagcaactgaaaagtcaggtgtaccgagccaatatggcgttgcctgagcacgggctggtgacctatacctggggcaatgtcagcggcatcgatcgggccagtggactggtggtgatcaaacccagcggcgtaccttatgaaacgatgcgggctgaggatatggtggtggtgaatacgcgaggtgaggttgtcgaggggcaactgcggccttcgtccgatacgccgacgcatttggcgctgtatcgggcgttcccccaactcggcggtgtggtgcatacgcactctacccatgccaccgcctgggcgcaggcgggtgaagcgataccggcgctcggcaccacccacgccgactatttttccggcgacattccttgtacccgcgggctgacggcggaagaggtggcgcgggaatatgagctgaacaccggtcgggtgattatcgaaaccctgaaagggcgtgaaccgctgcacattcccggcatcctggcgtatcagcatggcccgttcagttggggaaggacgccggatgaggcggtgcataacgccgtggtgttggaggaggtggcgaaaatggcgtggatcagccgggatattaaccccggcctgaaacggatcgatgactatctgctggaaaagcatttcagccgcaaacatggcgccggcgcctattacggccagcgctga

SEQ ID NO: 426338 - DNA, 909 bp, Serratia marcescens
atgttgcacaaatccgtgccgttgggcatctatgagaaagcgttgccgccgggcgaggactggctgacgcgcctgcaactggcgggtgagttgggattcgatttcgttgaaatgtcgatcgatgaaagcgacggccgcctggcgcgattggactggagcactgaacagcggctcgccttggttagcgccgttgcggcgagcggtgtgcgcgtcccttctttatgcctcagcgcccaccggcgttttccgttgggcagtgcagacgacaccacgcgcgaccggggactggagatcgtgcgaaaagctattcggctggcgcaggataccggtatccgggtgatccaactggccgggtatgacgtttattaccagcagtcaactgcacagacccgcgcccggttccgtgccggattggcgcaggcggtggagatggccagccgtgcgcaggtcatgctggcgatggaaatcatggactatccgctgatgaactcgatcagcaaggcgctgggctatgcccactacctgaataacccgtggtttcagctgtacccggacatcggcaacttgtctgcctgggacaacgatgtgccgatggagctcatggccgggcgcggacatatcgtggcggtacacgttaaggatacgcggccgggggagtttaagaatgtgccgttcggcgagggcgtggtcgatttcgtgcgctgtttcgaaacgctgttgcagagcggctatcgcggcccctatctgctcgagatgtggagcgagaaagcggacgatccgctgcgggcggtgcgggaggcacgagcctgggtggttgaacgcatggtcgaggccgggttggaaataaggggggagcatgctggagcaactgaaaagtcaggtgtaccgagccaatatggcgttgcctga

SEQ ID NO: 426339 - DNA, 657 bp, Serratia marcescens
atgaacacgcagttaccgatgttgcaggtggcgctggataacctgtccatggccgcggcttacgatacgactcgcctgatcgcggccgaagtcgacatcatcgaagtcggcactattttgtgcgtggcggaaggcgtgcgcgccgtacgcgatctgaaagcgctgtatccggatcgcatcgtgttggcggacgcaaaaatcgccgatgcgggtcagattttggcgcgaatgtgcttcgaggcgcatgccgattggatcacggtgatctgctgtgccgacatcaatacggtcaagggcgccctgcaggtagcgcatgagttcggtggcgacgtgcagatcgaactgacggggttctggacctgggaacaggcgcaggcgtggcgtgaagcgggaatgggtcaggtggtgtaccaccgcagccgcgatgcgcaggccgcaggggtcgcatggagcgaagacgatatccgcgcggtgcgtcgcctgagcgagatgggttttaaggtgacggtcaccggcggactggcgctggaggatttgcctctgttccagggcattcccatccatgtctttatcgccggacgcagcattcgcgatgccgccgatccggtcgcggcggcgcgggaatttaaatccgtcattgcccagctgtggggctga

SEQ ID NO: 426340 - DNA, 468 bp, Serratia marcescens
atgaagctgagcgattcgttggcgcaaaacaacgccatccagctgcaggcggaggctgctgactggcggcaggcggtgcggttgggcgtcgatttgctggtggctgccggggtggtggaaccgcgctatttcgacgccattttggccggcgtcgaccggcacggcccttacttcgtgctggcgccgggcctggcgatgccgcacggccggccggaggaaggggtgctgaaaaccggcttcgccttggtcaccttgaaaacgccggtgtgtttcggcgatgaggacaacgatccgatagacatcttgatcaccctggcggcggtggacgccaaaacgcatcaggaggtggggatcatgcaagtggtgaatctgtttgaagatgaggcgaacttcgatcgcttgcgggcctgtcgccacgcgagcgaggtattggcgttgatcgacaaaacgtctacggcggcgaattga

SEQ ID NO: 426341 - DNA, 309 bp, Serratia marcescens
atgacggtacgaatcctggcggtatgcggttgcgggcaaggcagttccatgatcatgaaaatgaaagtcgaccaatttttaacgcagcaaggtgtgaatcattcggtcaacagctgtgcggtgggggaatacaaatccgagttgaacggggccgacatcatcattgcttccacccatgtcgccgacgaaatcgtcgtgagcggcaacaaatatgtggttggggtgcgcaatatgctctcggcggcggacttcggcccgaagctgatggaagttatcggcacgcattttccgcaagatttgaagcagtaa

SEQ ID NO: 426342 - DNA, 1398 bp, Serratia marcescens
atggaaaccctttacaccatcttcaccgtcttttttaaccaggtgatgaccaatgcgccgctgctgctggggctggttacactgctgggttacacgttgctgcgcaaaagcgcggcggtcatcatcaaaggcaccatcaagactattatcggtttcatgttattgcaggccggctccggcatcctgaccggcacgttcaaaccggttgtggcgaagttgtccgaggtatacggcatcaacggggcgatttcggacacctatgcttcgatgatggccaccatcgaacgtatgggggatgcctacagctgggtcggctacgcggtattgctggcattggcgctgaacattctctacgtactgctgcggcgtattaccgggattcgtaccatcatgctcaccggccacatcatgtttcagcaggtcgggctgatcgcggtatttttctatattctgggttacggcatgtggacgacggtattgtgcagcgcgctattggcttcactgtactggggcatcacctccaacatgatgttcaaaccgacgcaggcggtaacggaaaacagcggtttctcgatcgggcatcaacagcagttcgcttcgtggctggcatacaaggccgcaccgtatctcggtaaaaaagaggacagcgtggaagatctgaagctgcccgggtggctgaacattttccatgacaacatcgtgtccaccgccatcgtgatgacgctgtttttcggcatcattctgtgctcgttcggcttggacactctgcaggcgatggccggtaaaacccactggagcatttatatcctgcaaaccgggctgatgttcgcggtggcgattttcatcatcgtgcagggcgtgcgcatgttcgtcgccgaattgaccgaggcctttaacggcatatcccaacgtctgatccccggcgcggtactggccatcgactgtgccgccatttatagcttcgcgcccaacgccgtggtgtggggttttatgtggggcaccatcggccaactgatcgccgtcggcatactgttagcgctcggctcttccatcatgattattcccggtttcattcccatgttcttttctaacgccaccatcggcgtattcgctaaccacttcggcggctggcgcgcggcgatgaagatctgtctggtgatgggaatgatagagatcttcggctgcgtgtgggccatcaaactgactgggctaagtgcctggatgggcatggcggactggtcgattctggcgccgccgctgatgcaggggctgagtctgggcctgtggtttatgggtgtggtgatcgttatcgccctgctgtacatgttcttcgccggacgcaccctgcgtgcggaagaagatgctgaaaaacaatcggttgaaccagcgtcacgttaa

SEQ ID NO: 426343 - DNA, 1065 bp, Serratia marcescens
atgagtaaagtcaacgacatcacccgcgagtcctggatattgaacacctttcccgaatggggcacttggctgaacgaagagatagagcaggagaaagtcgcgcccggcaccttcgccatgtggtggctgggctgcaccggcatctggctcaagtctgaagaaggcgccaacctgtgcgtcgatttttggtgcggcaccggcaagcagagccacgccaacccgctgatgaaaaccggccaccaaatgcagcgcatggccggggtgcggaaactgcagccgaacctgcgcaccaccccattcgtactcgacccgttcgccatcacccagctcgacgccgtgctggccacgcacgatcacaacgaccatatcgatgtgaacgtcgcggcggccgtgttgcagaactgtcccgaatccgtcccgtttatcgggccgaaaagctgcgtggatatctggatcggctggggcgtgccgccggcgcgctgcatcaccgtcaaacctggcgacgtgataaaaatcaaagacgtcgaaattcatgcgctggatgctttcgatcgcacggcgctgatcacattaccggtggaacaaaaggccgcgggcgtactgccggacggcatggatctgcgtgcggtcaactacctgttcaaaacgccgggcggcaacctttatcacagcggcgattctcactactccaactattacgccaagcacggcaacgatcaccacattgatgtcgccctcggctcctacggcgagaacccacgcggcattaccgacaagatgaccagcgccgacatcttgcgcatggcggaatcgttgaacgccaaggtcgtgatccccttccaccacgatatttggtcgaatttccaggcagacccgcaggagatccgcgtgttgtgggacatgaaaaaggatcggctcaagtacggtttcaaaccctttatctggcaggttggcggcaagttcatctggccgcaggacaaagacaatctggaatatcactatccgcgcgggttcgatgattgtttcacccaggaacccgacctgcccttcaagtctttcttgtaa

SEQ ID NO: 426344 - DNA, 756 bp, Serratia marcescens
atgacagagtcccaacgccacaatgccattctcgatctcttgcatcgcaaggggcaaatctccgtggcggacgtgatcgcggcgtttgacatctctccggccaccgcgcgccgggacatcaacaaactgaatgaaattggcaaattgcgcaaagtgcgcaacggcgccgaagccacgcaaaccccgcgcccggcctggacgccgctcaacatccatcaaacccagcatctcgatgaaaaaatgcgcatcgcggcagcggcggcgcaactctgtcagccgggcgaaagcgtggtgatcaactgcggttccaccgcatttctgctggggcgtgaaatttgcggcaagccggttcaggtgatcaccaactacctgccgctggccaactacctgatcgaacaggaccatgacagcgtggtgatcatgggtggccagtacaacaagactcagtcgattaccctggcgcctcaggacggcgacgcgacgctgtacgccgggcactggatgttcaccagcggtatcggccttaccgccgagggtttgtataaaacggatatgctgaccgccatggcggagcaaaagatgctcaactacgtcggtaaactggtggtgctggtcgacagcagcaaagtcggccaacgcgccggcatgctgttcagccgcaccgagcaaatcgccatggtgatcaccggccgcgctgccaatccggcgatcgttgagcaactgcgtcaacagggcgttgaagtgctgctggtgtga

SEQ ID NO: 426345 - DNA, 327 bp, Serratia marcescens
atggaacagttcgaagcgatcaacgttgagcaagcgtacgcccgctggaaagagggcagcgccgccctggtcgacatccgcgatccgcaaagttttgaagccgggcatacgccgggcgcctttcacctcaccaacgccaccctgtcggcctttatgcagcaaaacgacttcgagcggccggtaatggtgatgtgctaccacggcaacagcagccgcagcgcggcgcagtatctgctgcaccaggggttcgacgcggtctacagcatcgacggcggcttcgaggcctgggcccgccagtatccgcaagacgtggaaacctctgcctga

SEQ ID NO: 426346 - DNA, 837 bp, Serratia marcescens
atggttagagtaatcgccgtatccaacccgcgcctggcgctggcctttgtcgactatatggcgacccagggcatccggcttgagctgcgcaacagcggcgaggcggcggaaatctggctggccgacgacgttcacctcgagcaggtgcaacacgagctgcagcagtttctgaccgatccgctcaaccgccgttatcaggccgccagttggcagaccggccataccgacgccggcctgcactatcagagcgaatcctatctgcacaccctgcgcagcaaggccgggccgctgacgctcggcgtgatggtgctgtgcatcgcggtctatattctgatgcaggcgctgggcgacgacaccgtgatgtactggctctcctggccgcaaaacagcagccaatacacgcagctgtggcgctgggtcagccatgcgttcctgcacttctccctgctgcatattctgtttaacctgatgtggtggtggtatctcggcggccagatggaaaaacgcctcggcgccggcaagctgttcgtgctggcggtggtgtcggccttcttcagcggctgggcgcaatcgctgttcagcggcgcgctgttcggcgggctgtcgggcgtggtttatgcgctgatgggctatgtctggctaacgggtgaacgggcgccggagcgcggcctgatgctgccgcgcggcctgatggtattctcggtgctgtggctggtggccggatatttcgatattttaggaatgtcgatcgccaacgcggcacacgtagccggtttagtgttagggttattgatggcattttgggatacgcgtcatcgcgcacacaacgaacaataa

SEQ ID NO: 426347 - DNA, 759 bp, Serratia marcescens
gtgaagcaaacacagcgtcatgacgcaattatcgagctggtgcgcctgcagggttacgtcagcacggaagagctggtcgaacattttgacgtcagcccgcaaacgattcgccgcgatttgaatgacctggccgaccagaacaagatccagcgtcaccacggcggcgcggcgctgccttccagctcggtcaacgctgcctataacgatcgcaaggtgatgtggtcggaagagaaggcccgcatcgcgcagcgcgtcgccagccagatcccggacggcgccacgctgttcatcgatatcggcaccacgccggaagcggtggcccatgcgctgatgaaccacaagaacctgcgcgtggtcaccaacaacctcaacgtcgccaccctgctgaccgccaaggaagacttccgtctgatcctggccggcggcgaagtgcgcacccgcgacggcggcatcatgggcgaagccaccctggacttcatctcccaattccgcctcgattacggcattctcggcatcagcggcatcgatatggacggttcgctgctcgaattcgactatcacgaagtgcgcaccaaacgcgcgattatcgaaaattcccgctgcgtgatgctggtcaccgaccactccaaattcggccgcaacgccatggtcaacctgggcaacatgaatctgatcgactacctgtttaccgaccagctgccgccgccgagcgtgatgaaaatcatcgagcagtacgacgtgcagctggagctgtgctga

SEQ ID NO: 426348 - DNA, 2169 bp, Serratia marcescens
atgatgaaagaattgaaaatcgcgaccagcgccagcctggtcgctaccattgagacgctgcgtcagatcgtgcgcgtagagcagacggactacaccgacgtggcggcggtggtggtgtcggtcgccgacgtgaacgccggcattctggcgcgcttgcaggcgacggggttcaacatcccgaccttcgtggcggtggaaggggacgagcatctctcgccggactatctgccgttcgtcagtggggttttcgcgctgctggccggcgccagcaagccgttctacatggcacagctggaggccgccgccgacgcctatgagcaggcgctgctgccgccgttcttcaaaacgctgaagacctacgtcgagatggaaaactcgaccttcgcctgcccggggcatcagggcggcgagttcttccgcaagcacccggccggccggcagttcttcgatttctacggtgaaaccctgttccgttccgatatgtgcaacgccgacgtcaagctgggcgatctgctgatccacgaggggtcggctaaggatgcgcaaaagcacgcggcgcgggtgttcaacgccgataaaacctacttcgtgctcaacggcacctcggcggccaacaaggtggtgaccaacgcgctgctaacccgtggcgatctggtgctgttcgatcgcaacaaccacaaatccaaccaccacggcgcgctgatccaggccggcgccacgccggtctatctggaaaccgcccgcaacccgttcggctttatcggcggcatcgacgcgcgctgcttcgacgaacgctacctgcgtgagcagatccgcgaagtggcgccggagaaggcggcggcggcgcggccgttccggctggcgatcattcagctcggcacctacgacggcacgatttacaacgctcgccaggtgatcgacaccatcggccatctgtgcgactacatcctgttcgactccgcctgggtgggttacgaaggctttattccgatgctgaaagagtgctcgccgctgctgctggagctggacgaacacgacccgggcattttcgtcacccagtcggtgcataaacagcaggcggggttctcgcagacctcgcagatccacaagaaagacgatcatatcaaagggcaaaagcgccactgcaaccacaagcacctgaacaacgcgttcatgctgcatgcgtcgaccagcccgttctatccgctgttcgccgcgctggacgtcaacgccaagatgcacgccggccccgccgggcgccgcatgtggatggactgcgtcaagctgggcatcgagacgcgcaaacagctgctcaagcgctgctcgcagctgaagccgtttattccgcagcaggtggcgggcaaagactggcaggatcacgatactgaccttatcgccaacgacgcgcgcttcttcaccttcgtgccgggggagacgtggcacggcttcgaaggctatgcccaggatcagtatttggtcgatccgtgcaagctgctgctgaccacgccgggcatcgacgccgcgaccggccaatacaccgagttcggcgtgccggccaccattctggccaacttcctgcgcgagaacggcatcgtgccggagaagtgcgatctcaactcgatcctgttcctgctgaccccggcggagaacccggccaagatggaacagctggtggagatgctggcacagttcgaacgctatgttgcagaggacgcgccgctgagcgtggtgctgccgacggtgtaccgcaagaacgagcagcgctaccgcggttacagcattcgccggctgtgccaggagatgcacgatctgtacgtcagcttcgacgtcaaacagctgcaaaaggagatgttccgccaggatcatttcccgccggtggtgatgaacccgcaggacgccaacgtggagtttatccgcgataacgtcgagctggtgccgatcggccaggcggaagggcgcatcgcggcggaaggcgccttgccgtacccgccgggcgtgctgtgcgtggtgccgggcgaagtgtggggcggcgcggtgcagcgctacttcctggcgctggaagagggcatcaaccgcctgccgggcttctcgccggagctgcagggggtctacatcgagaaaaaagatcacggctggaagcgcatcttcggctatatgatcaagccatag

SEQ ID NO: 426349 - DNA, 1077 bp, Serratia marcescens
atgaagaaaattttagctttgctcgtaatagcgcctttgctgatctcctgttccggcaaaaaaagtgaagaaatcaacgaagcctggattaaagataccaacggtttcgacattctgatgggccaattcgcccacaacatcgagaacatctggggtctgaacgaagttctgatcgccgggccgaaagactacgtcaaatataccgaccaataccaaacccgcagccacatcaacttcgacaccggcgccattaccatcgagaccatcgccaccaccgatccggccgcgcacctgcgccaggcgataatcagcacgctgctgatgggtgacgatccggggtccatcgatctctattccgacgccaacgatatccagatcagcaaagaaccgttcctgtacggccaggtgctggataacaagggcgcgccgatccgctgggaatggcgcgcggcgcacttcgccgattacctgctgcagaccaagctgcaaaaacgcacctccggcctgcacgtgatctactcggtcaccatccagttggtgccgaaccacctggacaagcgtgcgcacaaatacctgccgatggtgcgcaaggcgtcggaaaaatacggcgtggacgagtcgctgatcctggctatcatgcagaccgaatcgagcttcaacccgtatgcggtgagcggttcggacgcgctgggcctgatgcaggtgatgcagcataccgccggcaaggatgtgttccagatgcgcggcaagtggggcaccccgagccgcagctacctgttcgatccggagaacaacatcgacaccggcaccgcctacctggcgatcctgcagaacaactacctgggcggcattcagaacccgacctcgcgccgctatgcggtgatcaccgcctacaacggcggcgccggcagcgtgctgcgggtgttctccagcgacagaacgcgcgcggtgggcatcatcaacgccatgcagccgggcgacgtgtatcagacgctgaccaccaagcacccggccgccgagtcgcgccgctatctggtgaaagtgaataccgcgcagaagagctaccgcaggaagtaa

SEQ ID NO: 426350 - DNA, 273 bp, Serratia marcescens
atgagccgcaccattttttgtactttcctgcagcgcgacgccgaaggccaggacttccagctttatcccggtgacgtcggcaagcgcatctacaacgagatctccaaggaagcctggggcgagtggatgaaaaagcagaccatgctgatcaacgagaagaagctgaacatgatgaacgtggacgaccgcaagctgctggaagaggaaatgatcaagttcctgttcgaagggcacgacgtgcacatcgaaggctatacgccgccgagcgaataa

SEQ ID NO: 426351 - DNA, 1101 bp, Serratia marcescens
atgatgcaagcacaacaattcgcacaggtggtgcttgactggtatcagcgctacggccgcaagaccctgccgtggcagctggagaaaaccgcctatcaagtatggctctccgaggtgatgttgcaacagacccaggttgccaccgtcattccttattttcagcgctttatggcccgttttcccaacgtgcgcgcgctggcggaggccccgctggacgaagtgctgcatctgtggaccggcctcggctattacgcccgcgcccgcaacctgcacaaggcggcgcagaccattgtcgcacagcacggcggcgagttcccgacaaccttcgcagaaatcgccgatttaccgggcgtcggccgctctaccgccggcgcggtgctgtcgttggcgctgggccaacactatccgatcctcgacggcaacgtgaagcgcgtgctggcccgctgctacgcggtggagggctggccgggcaagaaagaggtcgaaaaccggctgtggaaaatcagcgaagaggtcaccccggcgcagggcgtcggccagttcaaccaggcgatgatggatctgggcgccatggtctgcacccgctccaagcccaagtgtgaactctgcccgctcaacgtcggctgcctgtcttacgccaatcacagctgggccaactaccccggcaagaaacccaaacagaccctgccggaaaaaaccgcctacttcttattgctgcagcacggcgaccgggtgtggctggaacagcgcccggcggtaggcctgtggggcggcctgttctgcttcccgcagttcagcgcgcgcgttgatttggaactctggctgcagcagcgcggtctgaaaggcaagcgcctggaacagctgaccgcgtttcgccacacgttcagccatttccacctcgatatcgtgccgatgtggctgtcgctcgacgcggtgggcagcggcatggatgagggcgcaggtctctggtataacttagcgcagccgccgtcggtcgggctggcagcgccggtggatcgcctgttgcaacagctggcgaagcagcccccgatccaacaaaacttatatggcgatagcgccatcgatgaggaattagcatga

SEQ ID NO: 426352 - DNA, 720 bp, Serratia marcescens
atgattaatgacgtcatctccccggaatttgatgagaacggccgcgcgatgcgccgtatccgcagttttgtccgccgccaggggcggctgaccaaaggccagcagcacgcgctggagaactattggccggtgatgggcgtggagtatcaggctgacgctgtcgatctcgccgcgctgttcggccgcgaagcgccgacggtgctggagatcggttttggcatgggcgcctcgctggtgaccatggcgggcaacaacccgcagcagaactttttagggattgaggtgcactcgccgggcgtgggcgcctgcctggccgacgcccacgaggcgaagctgagcaacctgcgcgtgatgtgccacgacgcggttgaggtgctggaaaacatgatcccggacggctcgctggacatggtgcagctgttcttccccgatccgtggcacaaggcgcgccacaacaagcgccgcatcgtgcaaacgccgtttgtcgaactggtgctgcgcaagctgaagaccggcggcgtcttccacatggccaccgattggcaaccttatgcggaacatatgttagaggttatgaacggggtcgcaggctaccgtaatctttccagcgataatgattacgtgccgcgtccggattcgcgcccactgacgaaatttgaattacgcggccagcgcctgggacatggcgtttgggacttgatgtttgagaggaaagaataa

SEQ ID NO: 426353 - DNA, 327 bp, Serratia marcescens
atggctaagaaccgcagtcgtcgtttacgtaaaaagttgcacattgaagaatttcaggagttgggtttttccgtagcttggcgcttcgccgaaggcacgtcggtggaagacatcgacagcacgctggataccttcatcgatgaagtgatcgagccgaacggcctggcgtttgacggcagcggctacctgcagtgggaaggtctgatctgcctgcagaagatcggccactgcaccgacgagcatcgcgagctggtgaaaaactggctggaagcgcgcaaactgagcgacgttaaggtcagcgatctgttcgatatctggtgggattga

SEQ ID NO: 426354 - DNA, 924 bp, Serratia marcescens
gtggtaacaacattggataacgcgttgctggaggagatcctgcaacaggtgcgcccgttgattggccaggggaaagtggccgactacatcccggcgttggcggaagtgcccgccgatcggctggcgatcgccgtatgcacggtggacggcgaactgttccaggccggcgacgccgcggagcgcttctccattcagtcgatctccaaggtgctgagcctgacgctggctctgacgcgctatcaggagcctgagatctggcggcgcgtcggcaaagaaccttccggcctgccgttcaattcgctgctgcagctggagatggaacagggcaaaccgcgcaatccgtttatcaaccccggcgcgctggtggtgtgcgacatgctgcaaacccggctcagcgcccccaaacagcggatgctggaggtggtgcgccagctggccggcgaagacgacctggcctatgacctgcgggtggcgcgctccgagttcgaacactccgatcgcaatgcggccatcgcctacctgatgaagtcgttcggcaacttcgagaacgacgtgatcaccgtcctgcaaacctatttccactactgcgcgctgcgcatgagctgcgtggagctggcgcgcagcttcgtctatctggccaatcacggccgcgatctcaacggcgagacggtgatcagcccgctgcaggcccggcagatcaacgccctgatgatgaccagcggcatgtacgacggcgccggcgaattcgcctatcgggtggggatgccgggcaagtccggcgtgggcggcggcatcgtggctatcgtgccgggcgagctgtcgatcgtcgtctggtcgccggagctggatgcttccggcaactcgctggcgggaactgcggcgctggaactgttgtctcaacgtatcggtcgttcgattttttaa

SEQ ID NO: 426355 - DNA, 723 bp, Serratia marcescens
atgttgaagaaaaccgggttagccttactgctgctggcggcgactgccgcgcaggcccacgccgagtaccaatgcagcgttaaaccccaggatgatgtgatcatcagccctcagagcgtgcaggtgaaaggcgccagcggcgacctgcaaatttcgccggatggcgacgtgatccgcaacggccaggcgctgagcctgaacgacagccagcggcagaaagccttcagctaccagagcgcgctgcgcaagcagctgccgtggatcgacgacggcgcgcagcagcacctggagaaagcccgttcggcgctggataaggtgatcgtcaaagagctgggcagcaacagcaacgtgcgcaaccggctgaccaccctgaacggccagctgaaacagcagatgaaccgcatcattgagcaccgcagcgacggcctgaccttccaccacaaggcgattgaccaggtggaacaggacggccgcaacatcgtgcagcaaagcatgggcggggtgctgcaggacagcctgaacgagatgggcgtcaaacaggccgccaacagcggcggcaatccgctacaggcgatcatgggcaacctgggcggcttgcagaaggcgatccagaacgaatggaacaaccaggagcaggacttccagaacttcggccgcgacgtttgcaaccgcgtcaccgcactggaaacccagcgcaaggatctgctgaaggcgttgaagtaa

SEQ ID NO: 426356 - DNA, 1143 bp, Serratia marcescens
atgcttaagctgcccccgctgagtctctacatccacatcccgtggtgcgtgcagaaatgcccgtactgcgacttcaactcccatgcgctgaagggtgacgtgccgcatcaggagtatgtcgatcatctgttggcggatctggatgccgacctgccgctggccggcggccgggagataagcaccatcttcatcggcggcggcacccccagcctgctgagcgccgaggcgatgcaagccttgctggacggcgtgcgggcgcgcattcacgtcgccgacgacgccgaaatcaccatggaggccaaccccggcaccgtggaggccgatcgcttcagtggctaccagcgcgccggcgtcaaccgcatctccatcggggtgcaaagcttcagcgccgagaagctgacccgcctggggcgcatccacggcccggaagaggccaagcgcgcggcgacgctggcgaccggcctcggcctacgcagcttcaacctcgatctgatgcacggcctgccggatcagtcgctggaagaggcgctggacgatctgcgccaggctatcgccctcaatccgccgcacctgtcgtggtatcagctgaccatcgaaccgaacaccctgttcagctcgcgcccgccggtcttgccggacgacgacgcgctgtgggacatcttcgaacgcggccaccagctgctgagcgccgccggctatcagcagtatgaaacctcggcctacgccaagccgggctaccaatgccagcacaacctcaactactggcgcttcggcgactatctggggatcggctgcggcgcgcacggcaaggtgaccttcagcgacgggcgcatcctgcgcaccgccaagaccaagcacccgcgcggctttatgcgcggcgactacatggacaagcagcatgaggtggcgacggcggatcggccgttcgaattcttcatgaaccgcttccgcctgctggaagccgcgccgcgcgccgacttcgtcaactacaccgggctggcggaaagcgtcattcgcccgcagctggacgaagcgctggccaaaggctatctggaagaaaccgcggagcactggcagatcaccgagaagggcaaactgttcctcaactcgctgctggaactgttcctggcggacgacgagtaa

SEQ ID NO: 426357 - DNA, 594 bp, Serratia marcescens
atgcaaaaagtcgttcttgccaccggtaacccgggcaaagtgcgcgaactcgccgacctgttggccgatttcggcctggacgtggtcgcgcaaaccgatctgggcgtggaatccgccgaagaaaccgggctgacgtttatcgaaaacgccattctgaaagcgcgccatgcggcacaggtcaccggcctgccggcgatcgccgacgactccggcctggcggtagacgcgctgggaggcgcaccgggcatctactccgcgcgctacgccggtgaagacgccgacgatcggcagaacctcgacaagctgctggcggcgctgaaagacgtggcgccaggccggcgcggcgcgcaattccactgcgtgctggtctatctgcgccatgcgcaagatccgacgccgctggtgttccacggcagctgggccggcgaaatcaccgagcaagccgccggcgaaggcggtttcggttacgatcctgtcttctatgtgccggagctgggccgcaccgccgccgagctgagccgcgacgagaagcgagcgatttcgcaccgtggcaaggcgctgaagctgatgttggaaggcatgcgcaatgcttaa

SEQ ID NO: 426358 - DNA, 291 bp, Serratia marcescens
gtgagtgcagtcactccggtgctggacgggctggcgatcaggctatatattcagccgaaagccagccgcgaccaaattatcggcttgcatggcgacgaactgaaagtcgccatcaccgccccgccggtcgacggccaagccaacgcccatctgatcaagtttatcgccaagcagttcaaagtggcgaaaagcaacgtcaccatcgagaaaggcgaactggggcggcataaacagttacgcatcgtgaatccgcaacagatccccgccgtggtcgcggcgctcatcgaataa

SEQ ID NO: 426359 - DNA, 555 bp, Serratia marcescens
atgctaacgctgactttcctggtcaagaccgttattgatctgtacgtgatggtgctgttgctgcgcatttggatgcaatggacacgcaccgatttttacaacccgttctcgcagtttgtggtgaagatcacccagccggtggtcggcccgctgcgccgcatcatcccgtcgctggggcccatcgacagcgcttcgctgctgctggcgttcctgctgatgaccatcaagtacccgctgctgctgctgatccagggcggcgcgatgtcgctcagcccctataacctgctgttcggcctgatctcgctggtgaagtctgccggctacctgatcttctgggtgatgatcattcgtgcgctgatgagctggatcagtcagggccgcagccccatcgactatgtaatgtaccagctcaccgaacccttgatggcgccgatccgtcgcatcatcccggcgatgggcggcatcgacttttccgccatggtggtgatcctgatcctctatctgatcaattacctgggcatggatctgttcggcgagatctggttcctgctgtga

SEQ ID NO: 426360 - DNA, 822 bp, Serratia marcescens
atgcaacatcgcaagattacctttatcggcgccggcaacatggcgcgtgcaatcatcgccggcctggtggcgggcggctatccggccaaatccatcagcgtctgcgccccttcggcgaaaaaccgcgatgcgctggcggcggactatggcatcgtcagcagcggcgacaacgtcgcctgcgcgcgcgcggccgaagtagtggtgctggcggtcaaaccgcagatgatggccgacgtttgccaaccgctgcgcgagcaggtcgatttcagcggcaaactggtgctgtcgatcgccgccggtattcaggtcaaccgtttctatcagctgctcggcgacaagctggacatcgtgcgcatcatgcccaacaccccgtcgttggtcggcaagggcatgagcgggttgtacgcgccggcgcaggtcagccagcaggatcgcgactacaccggcgatttaatggcgtcggtcggtaaagtttgctgggtcgatgacgaaaatggcatcaacggcgtgatcgccgccgcgggcagcgccccggcctatttcttcctgtttatggaggcgatgcaacaagaggccgaacgtatgggcttcgacagccagaccgcgcgcgatctggtgcagcaggccgcttccggcgccgccgcgctggtggaagccaacccggatacgccgctgggcacgctgcgcgagcaggtgacctccaaaggcggcaccaccgctgaagcgctgcgggtgttcaatgaacgccagctgccagaaaccgtggcgcaagcgatgcaggccgccgtttcccgcgcgcaagagatggaaaaattattttaa

SEQ ID NO: 426361 - DNA, 708 bp, Serratia marcescens
atgagcactatccaacagaacctgcaggatgtcagaaaccgcatcgcggccgccgcgcaaaactgcgcgcgggcgccagaagaagttgccctgcttgcagtcagcaaaaccaaacctgtggcggcgatcgaagaagccatcgccgccggccagcgcgccttcggcgagaactacgtgcaggaaggggtagacaagatccggcatttcgccgagtcgccgcaggacggcgagctggtgtggcactttatcggcccgctgcaatccaataagagtcggctggtggcggaacacttcgcctggtgccacaccgtagatcggctgcgcatcgcccagcgcctgagcgatcagcgcccggccggcatgccgccgctcaacgtgctgattcaaatcaacatcagcgacgagcaaagcaaatccggcatcgcgttaagcgaactgccagcgctggccgaagcgatcgccgcgctgccgaacctgacgctgcgcggcctgatggccatcccggcgccagaagcggattatcagcggcagctggcggtattcaaccagatgaacgacgcctttctcgccctgcgtcagcgttatccgcaggccgatacgctatctatgggcatgacggacgatatggcggcagcgattgccgcaggcagcaccctggtgcgcatcggcaccgcaatttttggcgcccgcgactactcgcaggcctga

SEQ ID NO: 426362 - DNA, 1023 bp, Serratia marcescens
atggatatcgatgaattcgtggcccttagtgtaaagcataatgcttccgatctgcacctttgtgccggtcatccgccgatgttgcgcatcgacggtgaactgcagccgctggcggcggcgccaacgctgacggcgcaaggcgtgcaggccctctgcgacggattgctgaatgcgcagcagcgcgagagcctgcggcggctggggcaggtcgatctggcgctgcaccggccgggcggggagcggctgcgggccaacgtttttcagcaaagcgcggggatgtctctcgcattgcggcgcatcgccgggcaggcgccctcgcttgccgagctggcggcgccggccatcgtcccggcgttgctgcggcgcgacgatgggcttctcctggtcaccggcgccaccggcagcggcaagtccaccacgctggcggcgatgatcgacgagatcaaccggcaccagccgcggcacattttgacgctggaggatccgatcgaattcctgcaccgcagccggcgttcgctgatccagcagcgggagatcggccgcgacagccacagcttcgatgcggcgttgcgcgccgcgctgcgcgaagatccggatgtgatcctgctgggtgagctgcgcgatatcgccaccatccggctggcgctcaccgcggcggagaccgggcatctggtgctggcgacgttgcacacccgcagcgcgccgcaggcggtggaacggctggtggacgtgtttccggcggaagagaaaccctatgtgcgcgcccagctggccggcagcctgcaggcggtgatcgcgcaaaagctgatgaggcggcccggtggcgggcgagtggcgatctttgaggtgctgacggcgacggcggcggtcagcaacctgatccgcgaagggaaaacccatcagttggcgagcgtgttgcaaaccggcgcgcagtccggcatgcaaacctttgagcaaggtttgcagcagcggatcgacgccggcgtgttgggggagagtgcgggggagggaacggagggttaa

SEQ ID NO: 426363 - DNA, 423 bp, Serratia marcescens
atgagcaaccgcaccattatcgccttcgacttcggcaccaaaagcatcggcgcggccgtcggccaggagttgaccggcagcgcccgcgccctgccggccttcaaagcgcaggacggctcgccggactggctgaaaatcgaaaagctgctgaaggagtggcagccggatctggtggtggtcggcctgccgctgaacatggacggcaccgaacaacccgtgaccgcccaggcgcgcaagttcgccaaccgcctgcacggccgcttcggcatccaaatcgatctgcatgacgagcgcctgagcaccgtggaagcgcgcgccaacctgttcgatcgcggcggcttccgcgcgctcgacaaaggcagcgtggattccgcctctgcggtggtgatcctcgaaagctggttcgaacggcagctgggttaa

SEQ ID NO: 426364 - DNA, 564 bp, Serratia marcescens
atgaatttacagcaccattttctgatcgccatgcccaccctgcaggatcctcgcttcaagcgctcggtgatttacgtctgcgagcacaacgaagaaggcgccatgggtttggtgatcaataaaccggtggagcagttcacggtagccacggtattgagcaagctgaagatcatgccgcctgcgcgcgatccggccatcagcctggacaagccggtgttcgccggcggcccactggcggacgatcgcggatttatcctgcatacgccgcgccacggcttcggcgccagtattcaaatctcccccaacaccatgatcaccacctcgaaagacgtgctggaaacgctcggcaccccggaacaaccggacgacgtgctggtggcgctgggttatgcgggttgggaaaagggccagctggagcaggaggtgttggagaacgcctggctgaccatcgaggccaacaccgacattctgttccgcacgccgatcgccagccgttggcgcgaggcggggaaccttctgggtatcgacattcgcagcatcgccaaccacgcaggacacgcctga

SEQ ID NO: 426365 - DNA, 951 bp, Serratia marcescens
atgattaagctcggcatcgtgatggatcctatcgattccatcaacatcaagaaagacaccagcttcgccatgctgctcgaagcgcagcgccgcggttacgaattgcactacatggagatgaacgatctctatctgcacgccggtgacgggcgcgcccgcactcgcctgctgagcgtgaaggaagacaaggagaactggttcagcttcggcagcgagcaggatctggcgctgcacgatctggacgtgatcctgatgcgcaaggatccgccgttcgataccgaatacatctacgcgacctacattctggagcgcgccgaggtcaaaggcacgctggtggtcaacaagccgcaaagcctgcgcgactgcaacgagaagctgttcaccgcctggttccctgagctgacgccggacacgctggtcagccgcggcgccgcgcacatccgcaaattccaccagcagcacggcgacatcatcctgaagccgctggacggcatgggcggcgcgtctatcttccgcgtgaagcaggacgatcccaacctgtcggtgatcatcgaaaccctgaccgaacacggcagccgtttctgcatggcgcagaacttcctgccggcgatcaaggacggcgacaaacgcatcttggtcgtcgacggcgagccggtgccttactgcctggcgcgcattccggcgcagggtgagacccgcggcaacctggcggccggcggccgtggcgaagcgcgcccgctgagcgagagcgactggaaaatcgcccgcaccgtcgccccgacgctgaaagagaaagggctgatcttcgtcggcctggacgtgatcggcgatcgcctgaccgaaatcaacgtgaccagcccaacctgcgcgcgcgaaattgaggcggcattcccgatctcgattaccggcatgctgatggacgcgattgaaaagcgcctggcggcgaagtaa

SEQ ID NO: 426366 - DNA, 732 bp, Serratia marcescens
atgcgcataccccgcatttaccatccgcagccgttgaccgatcgggcggagatcgccctcagcgaggacgccgccaaccacgtcggccgcgtgctgcgcatgagcgccggccaggcgctgcagctgttcgacggcagcaaccaggtgttcgacgccgagatagtccgggtggacaaaaagagcgtgctggtgcgcctcagcgacggccgcgtggacgacatcgaatcgccgctcaacctgcatctgggccaggtgatctcgcgcggcgagaagatggagttcaccatccagaaatccatcgagctgggcgtcaacgtcattaccccactgttttccgagcgctgcggcgtcaaactggacggcgagcgtctggcgaagaaaatccagcaatggcaaaagatcgccatcgccgcctgcgaacagtgcggccgcaaccgcattcccgaaatccgcgaggcgatgtcgctggaagcctggtgcgccgaacaagacggcagcctgaagctcaacctgcatccgcgcgccagccacagcatcaacaccctgccacagccggtagaccgcgtccgcctgctgatcggcccggaaggcggtttgtccgccgacgaaatcgccatgaccaccggccacggatttactgatattctgttggggccacgcgtgctgcgtaccgaaaccacagcgctcaccgccattaccgctctgcaggtccgcttcggcgacctgggttaa

SEQ ID NO: 426367 - DNA, 696 bp, Serratia marcescens
atgcttcgcagaattttgtttatcgcggttttcgccgcaggcgccgtacaggcgcacggcatcaataatttttctcaggccaaggcggcggcggccaagattaaccaggatgcgccgggcagcttttactgcggctgccgcattgattggcaaggcaagaagggcatcccggatctcgccggctgcggctatcaggtgcgtaaaaacgcccagcgcgcgcagcgcatcgagtgggaacacgtggtgccggcctggcagttcggccaccagctgcagtgctggcaggacggcgggcgcaaaaactgcaacaaggacgccacctatcgccagatagaaaccgatctgcacaacctgcagccggcgatcggcgaagtgaacggcgaccgcaataatttcatgtacagccaatggaacggcggcgccggccagtacgggcaatgcccgatgaaggtggacttcaagaataaacaggcggagccgcccgcccgcgcccgcggcgccatcgcccgcacctacttctacatgcgcgatcgctaccagctgcggctgtcacgccagcaaacccagctgttcgaggtgtggaaccggcaatatccggtgagccaatgggaatgtcagcgtgaagcacgtatcgccaaggtgcagggcaaccacaacccctatattcaacaggcttgtcagcagcggaaaagctaa

SEQ ID NO: 426368 - DNA, 513 bp, Serratia marcescens
atgaacaaaccaagaatccccatcgcactgcaacaagcggtgatgcgctgcctgcgagaaaagctgcagctggcccgccggcattttgccgtcgagttccccgaacccagtatcgcctatcagcaacgcggcaccagcgcgggcaccgcctggctgcaaagctgggaaatccgcctgaatccggtgctgctgctggaaaaccaacagccgtttatcgatgaagtggtgccgcacgagttggcgcacctgctggtgtttcgccaattcggccgggtggcgccgcacggccgcgaatggcgctggatgatggaaagcgtgctgctgacccccgccagccgcacccaccgcttcgaaaccgcctcggtgcaaagcaaaaccttcccctatcgctgcggctgcgggcagcaccagctcaccatccgccgccataatcgcgtgctgcgcggcgaaagcgaataccgctgccgccggtgcggcgaaaaactgaaatttctcgctagcgagaacctttag

SEQ ID NO: 426369 - DNA, 1647 bp, Serratia marcescens
atgtcgaataaaccgttccactatcaagatccgttcccgctgaagaaagacgataccgaatactacctgctgagccgcgaccacgtttccgtgagcgaatttgaaggccaggaaattctgaaagttgcccctgaagcgttaaccctgcttgcccagcatgcgttccacgacgcctcgttcatgctgcgcccggcgcaccagcagcaggtggccgatatcctcaaagatccggacgccagcgaaaacgacaagtacgttgcgctgcaatttctgcgtaactcagaaatcgccgccaagggtattttaccgacctgccaggacaccggcacggcgatcatcgtcggcaaaaagggccagcgcgtctggaccggcggcggcgatgaagccgcgttgtcgcgcggggtgtacaacacctacatcgaagagaacctgcgctattcgcagaacgccgcgctggatatgtataaagaggtcaataccggcagcaacctgccggcgcagatcgatctctacagcgtggacggcgaagagtacaagttcctgtgcatcgccaagggcggcggttccgccaacaaaacctatctgtatcaggaaaccaaggcgctgctgtcgccgggcaaactgaaaaattacctggtcgacaagatgcgcacgctgggcaccgcggcttgcccgccgtaccacgtggcgttcgtcatcggcggcacctcggcggaagcgacgctgaaaaccgtcaagctggcttcgaccaagtattacgatggtctgccgaccgaaggcaatgagcatggccaggcgttccgcgatctggaactcgaagcggaattgctgcaagaagcgcagaacctgggtctgggcgcgcagttcggcggcaaatacttcgcgcacgatatccgcgtggtgcgcctgccgcgccacggcgcgtcgtgcccggtcggcatgggcgtctcctgctccgcggatcgcaacatcaaaggcaaaatcaaccgcgacggcatctggctggaaaaactggagcacaatccggggaaattcattcctcaggagctgcgccaggccggggagggcgaggcgatcaaggtcgatctcaaccgtccgatggccgagatcctcaaacagctgtcgcagtacccggtttccacccgcctgtcgctgagcggcaccatcatcgtcggccgtgatatcgcgcacgccaagctgaaagagcgcctggatcgcggtgaaggcctgccgcagtacgtcaaggatcacccgatctactacgccggcccggccaaaacgccggagggctacgcgtccggttcgctggggccaaccaccgccgggcgtatggactcctacgtcgatctgctgcaatcccacggcggcagcatgatcatgctggcgaaaggcaaccgcagccagcaggtaacggatgcctgccacaagcacggcggtttctatctcggcagcatcggcggcccggcggcggtgctggcgcagcagagcatcaagagcctggagtgcgtggagtaccctgagctgggcatggaagcgatctggaaaatcgaggtggaagatttcccggcgtttatcctggtggatgacaaaggcaatgacttcttccagaagatccaggccggtcagtgctccagctgcctgaaataa

SEQ ID NO: 426370 - DNA, 867 bp, Serratia marcescens
atgagtacgcaggaaagtcatatcaaggaattgctggtctggattgaggataatctgaccaatccgctgtcgttggatatcgtttccgccaagtcaggctatacgaaatggtatctgcagcgcatgttcaagaagcagaccggattatcgttagcttcgtatatccgcgctcgccgcctctatctcgccgccttcgccttgcgttttacgcagaagagcatcctcgatatctcggtcgaataccaattcgataaccagcagacgttctcgcgctgtttcaagaaacacttcgccgaatcgcccagcgtctatcgccatgcccgcaagcaggacttcagcaatctggtgcgttcgctggcggccagccagccgggcgatattcaggtcgaacgcgtcagcatcgccagcgggcaatacgcctttcacggcaagcagtacgcttatcacctggatatcgagaagctggacaagtcgcacctgccgcagcgcagcgcgctgcgggcgcagttctataccttattgggcgagcgcccgatgcaaacctattcgtttacccaactggtgccggacggcgagcgggtcagggtcgattataccctgggcgtgacgacggaatacccgctgcgcgaaggcgtggtgctggagccgctgccggagatccacggcgagttttgccgttttcgctattccggcaagccggtggcgctcaatgaccacatcattcaaatctacacgcaggtgctgcccgaaatggggctggcccgcggtgacgggccggacattacggtgttcagctattcgctgagcgggaaagaggagctgcatctggagctgcagcatctggtgccggtggtgccgctgcattga

SEQ ID NO: 426371 - DNA, 1053 bp, Serratia marcescens
atgcaacatcttgacgtcaccgtagtcagccaggcgataagctggctgcagcaacagccggtctggttatgtaccgtgctcagcacctacggctcttcgccgcgctcgccgggcgcgctgatggcggcgacccgcgatggccgctacagcggctcgctgtcgggcggctgcgtggaggaggattttttgcgccgcgtggccgccggggagtatcaggcggccagccaggtgatccggtacggcgaaggcggcatgacgcccaacgtggcgctgccctgcggcggcgtgctggacgtgctgatcgaatacctgccggcgagtggagccagcatcgcttacctgcggcgcatcgccggcgcgctggaagggcatcacgcgttgatcaaacgcctgacgctgcccaacgcctgccacagcctcgagcagagccacttcaccagcgccacccaggtcgaacgccggcttgagcagatcaccctgcacatcgcggccgcgccacgcctgctgatcgccgggctgtccagcgtggcgctgtactgcgccgatttcgccgtggcgttggggtttgaggtgctggtgtgcgagaaccgcccggaggcgctggataactttgccgccgagctgaaaccgggcgtgacgttgctgcgtcagtttccggccaaattcattgaggaagggggttgccacgccaataccgccgtcgtggcgctgacccacgatccgcgcatggacgacctgacgctgatggaagcgatccacaccccggcgttttacatcggcgccatgggctcgctcagaaacagcgcgcggcggcgccagcgtttgcagcagattgccgaattcaccccgcaggagctggaacgcatccatgcgccgatcggcctgccgctgggcagcaaaaccccggcggagatcgccctggcggtgatggcggcgatcgtgcagcaaaaaaaccggctgccggccgccgacgggctcaatgcagcggcaccaccggcaccagatgctgcagctccagatgcagctcctctttcccgctcagcgaatagctga

SEQ ID NO: 426372 - DNA, 585 bp, Serratia marcescens
atgaccacgggcattgtcattaccgccgccggacgcggggagcgctttattcaggccggcggccggggcaacaaattgaacgccggatttgccgatgcggcgggcgagcggcgatcgctgttcgaacacaccctgcgccaggcgctggcctccggcctgccggtacaggtggtgacccggccggataatctgccggtgctggccgcctgcgccgccaaccaggtgccggtcaccctgctcgccagcgcgggcctcggcgactcgatcgccgcgggcgttgcggccacgccgcactggcagggctggctgattcacctggccgatatgccgttcgtcggcgccgatgttttccggcaggtggcggatgccttacggcagcacgcgatcgtgcgcccctgctatgcgcaacagcccggtcatccggtcggcttttccgctctattgcgcaaaccactttgccaactgcgcggcgataatggcgcgcgtgaactgctgcaaggcgcggcagtgcacctgctgccgcttgagcaacccggcgtcgtgcaggatattgatcttccatcgcaactcccggccagcgagtaa

SEQ ID NO: 426373 - DNA, 2790 bp, Serratia marcescens
atgagcaatttcaacccgtcgcggcgccgctttatcaaaggcgccgtgattgcgggggtgtccgtgtacctcgcgcccctgtacagccgcgcctacgccgcgctgttcgagcaaaaaatcctccagtcacccaactgggatccgcagaccaaacgcgtccgtttccgtatcgacggccgcgccaaggtcatggggcagaaggtgttcgcgcgcgatatccgcgcggtggacatgccgcactggccgcagaaacaggcgcacgccttcattcttcgcgtcactaaagccgaccggctgttcgagggcgtcgatctgtcgctgctgggggacgacctgcagccggatcgcctggtgacggcggaagatctggcgcgcgacggcctggccttcccggcgttctacggcgacgacatgctgctgccgagcggcaaaaccccggcctatctcggccaggcggtggcgatactgatctatcacgacttcgcccgtttccgcttcgccaaggacaagctgaaattccgtgaggaaaccatcaaatacggcgcggtcaccggcccgctggagcgcgatccctggggcagcttccgctatgtgcgggtggggggcgatcaaccgttcgacgacgatcgcttctccagcctgaaggacacgccgatcttcccggtgtcgatgaaaaaacacctgccggtgtggccggaagggcgcgagggcggcaagctggatcaggaaggcatgcgctatgcgggcctgatcgccgacgagatggccaatccgccggccgattggctggtgatgtcgcgccgctacaccacgcagtcgatcgacacctcggcgctggagccggacaacgccaacggctggttcgacgccgagacgcaaacgctgcatctggtggtgccgacccagtcgccgcaggaagtggccgacgagatgccgcgcatgctggccaagcgcaatccaccggtgaaacagctgatcctgcacccgtgctacaccgtgggctacggctcgaaagatcactacaacttcccgtattacggcgcggtggcggcgatgtacggcgacggctacccggtgcgcctggccaatgaccgcttcgagcagttccagacggcgctgaagcgccacgcgttcgacatgaattaccgcatcgcggtgaataagcagaccggcgtcatgcagtcgttcctcggcgacatgaccgcggacggcggcggccgcagcaactttaccccttcggtggtgatggtcggcgcgaccgccgcccagtcgatttactacttcccgaaaagcgatctgtcgtcggtcggactggcctcacgcgccatcgacgccggctcggcgcgcggttacggcacgctgcagagcatggccgccaccgagatgatggtggatgagctggccgccgagctgaagatcgacccgatcgagttccgcctgcgcaacgtgctgaaatccggcatgaaaaacacccagggggcgatcccggccggtgcgatccgcgccgatgaagtgctggagaaggcggcgaagcatgagatgtggctcaagcgcgccgaacgcaaggccgagtttgagagccgccatcccggcaagcgctatggcgttggcttcggctgcgtgcagaaagacttcggcaccggggcggaaacctcgttcgcccgggtggagctgagcgaagacggccgcatcacgctgcatcacagcggcgcggagatgggcaccggcatgtcgacctcgcagtcggtgctgtgcgcgcagtggctgggcaaaccggccgacgaagcgcatttctcggtcactgactggtcggtgctgccgatggtcaccagcggcgatccatacctgatgtcgcaggaggagcaggacaagctgcaaaccaaccctaactggacgccgagctactgttcgccgtccagcgccagcaactcggcctattacttctcgcacagcacccgcgaagcggcgcgcctgatcttcgatcacggcctgtggccggcggcgatggcgctgtggcaggccggcatcggcggcggccaggcggcgccgctggtagtgcggcgtgaagatgcgcgttgggtcgagggcggcctgacggcggcgggcatgtcggtgctgagcctcgagctgctggccaagacggcctatcagatgggcggcgtcaccggcgcggcggtgcacgtcttcaaccgctggcagtgggcggaggccgatttcacgctgaacggcaaaagcgaacgcctgccgatcgacggcatggcgctgcgcaacgccggcggcgaattcaaaccgctggcgcgtgggcaggtctactacccgccaacccagcgtaacaatgcggcggtcacctactacagcgccgtcggcacgctggcggaagtggcggtggatatcgccaccggccaggtggaattgctgaatcaccattcgatcatggagtgcggcaacctgatcgtgccggaactggtttccggccagctgcagggcgggctggcgatggggatcggccatgcgctgcacgaatatttaccgctgtacgaagacgggccgggcaacggcacctggaacttcaaccgttaccacctgccgcgcgccagcgacgtggcggtgtggaagcagagcggcgacatcctgccggcgctgtcggaaaccgatccgccgaaaggcatggcggaggtggtgatgatcccgattgtggccgcgctggtcaacgccatcgccgacgccaccggccaccgtttccgtgatttgcccgttcgtgcagaaaatattcgtgaggtattacaatga

SEQ ID NO: 426374 - DNA, 555 bp, Serratia marcescens
atgagcattaaaacccagccgatctccctgaccatcaaccagaagcaatacggcccaatcgaggtgccggaaggcctgatgatgatcgatttcctgcacgaataccttgacctgaccggctcgcgcctcggctgcgggcagggcatttgccacgcctgcgtggcaatcgtcgatcacccgagcggcaccagtgaagaggtgcgcacctgcatcaccggcgcgcatttcttcaacggcaagaaagtgcgtaccgtcgaaggccacgccagggtggacgagcagggcgaggtggttgaactgtcgccgatccagcaggcgtttctggagcactacagcttccagtgcggctattgcacgccgggcttcgtcaatgccgccaccattttcgtggaaaagctcaagcgtgaacctatcgctcgcgagcagctggaaagcgccatcgagcaggcgctggacagccacatctgccgctgcaccggctatgtgcgctactacgaagcggtgcgcgacgtggtgctgaaaacgccgggcctgctcaaggagacggcgcaatga

SEQ ID NO: 426375 - DNA, 1236 bp, Serratia marcescens
atgaaaaaacgtctcgcagtattgattttgctggtggcgatcgtggtgattgcgctgctgtggtggcgggaaaaccgccgttacgacggcccggtgcagcaggtgaccgccggcgccgaacagatcgcccgcggccgctatctggcgcaggccgccgactgcgccgcctgtcataccgccagcggcggggcgccgctggccggcggctatccgctggaaacgccgttcggcacgatttacggcagcaatctgacgccgtcggccgaccacggcatcgggcgctggaccagggacgacttcttcctggcgctgacgcagggcgtggcgccgggcgggcggcacctgtacccggcgatgccttacacctcgtacaagggcatgtcacgtcaggacgccgacgacatctacgcttacctgatgacgcgcccggcggtggacgtggccatcccggccaacgagatgccgttcccgttcaaccagcgcatggcgctgatcggctggaacctgctgttccgcagccaggatccgctgccggccagttcgcagggcagctcgccgcaatggcagcgcggccgctatctggccgacgtgctgggccactgtggcgaatgccacacgccgcgcggcgcgctggggcagatggatcttgccaagccgatgcagggcggcgatctcggccgcttcatggcgccggacattacgccgcacggcctggcgcagcgcggctggacgccgcaggacgtcagccgcttcctcagcaccggcctcgcgccgcagggttccgccttcagcgagatgcacatggtggtggatctcagcacccggcatttaacgccggaagaccatcaggcgctggcgctgtatctgatgggcgagcagccgccggcggcggtgccggtgaaaatgggccagggcagcgatgccgggcgcatggcctatctggatcagtgcgccggctgtcacgcgcgtgaaggcgagggcaaaccgcacgtcgcaccggcgatgcgcgacaacgccacgctgcgccaggcggacggcaagaacctgatcgtgtcggtgctggacggcctgccggctcagcagttcccgaacggcgaaagcatgcagagcatgtcgggcttcggcgaacggctgagcgatgccgacgtggcggagctggtgaattatctgcgcgtgacctggggcggcttgccggcggacatcaccgccgaacaggtgaaagcgctgcgcaagtaa

SEQ ID NO: 426376 - DNA, 1377 bp, Serratia marcescens
atggatggtcaacagcatggtgaccagctgaaacgcggcctgaaaaaccgccatattcagctcatcgccttaggtggcgcaatcggcaccgggttatttctcggtatcgctcaaacaataaaaatggccggcccgtcagtgcttctcggctacgccattggcggcttcatcgcgtttctgatcatgcgccagctgggggagatggtggtggaagagccggttgccggttccttcagccacttcgcctacaaatactggggcaacttcgccggcttcgcctccggctggaactactgggtgctgtatgtcctggtggcgatggcggaactgaccgcggtcggcatctacgtgcagtactggtggccggagatccccacctgggtttccgccgcggtattcttcctggcgatcaacgccatcaacctggccaacgtgaaagtttacggcgagatggagttctggtttgccatcatcaaggtggtggcaattatcggcatgatcgtgttcggcgcctacctgctgttcagcggcatgggcggcccggaagccaccgtcaccaacctgtgggcgcagggcgggttcttcccgaacggcgtcatgggcctggtgatggcgatggcggtgatcatgttctccttcggcggcctcgagctggtcggcatcaccgccgccgaagccgacgacccgcaaaagagcattccgaaagccaccaatcaggtgatctaccgcattctgatcttctatatcggttcgctggccattctgctgtcgctgtacccttggggcaaagtggtcgaaggcggcagcccgttcgtgctgatcttccacgcgctgaacagcaacctggtggcgaccgtgctgaacatcgtggtgcttaccgccgcgctgtcggtgtacaacagctgcgtctactgtaacagccgcatgctgtacggcctggcgcagcagggcaacggcccgaaaagcctgttgaaggtcgacggccgcggcgtgccggtggtggccatcggcatttccgccctcgccaccgcgctgtgcgtgctgattaactacctgatcccgggccgcgccttcgaactgttgatggcgttggtggtatcggcgctggtgatcaactgggcaatgatcagcctggcgcacctgaagttccgcgccgccaaaaaccgcgaaggcgtggtgccgaagttcaaagcgttctggtacccgttcagcaactacctgtgcctgctgttcatggccggcatcctggtgatcatgtacctgacgccgggcattcaaatctcggtgctgctgatcccggtgtgggtggcgatcctggccgtcggttacgccatcaaacagcgcagccaacgcgtcgacggcgtcaccagccgttga

SEQ ID NO: 426377 - DNA, 765 bp, Serratia marcescens
atggcctacagcaaaatccgccaacccaagttgtcagatgttatcgagcaacagctcgaatatctgatcctcgaggggacactgcgcccaggcgaaaaactgcctccggagcgcgagctggcgaaacaatttgatgtctcccgtccttctctgagagaggccattcagcgcctggaagcgaaagggctgctcctgcgtcgtcagggcggcggcaccttcgtgcaaactaatctgtggcagagcttcagcgatccgctggccgagctgctggccgaccatcccgaatcacagttcgatctgttggaaacccgtcacgcgctggaaggcattgccgcctattacgcggcgctgcgcggcaccgatgaagatctggcgcgcatccgtgactgccacatcgtgattcaacaggctcaagacagcggcgatctcgacgccgaagccgatgcggtcatgcagtatcaaatcgccgtgaccgaagctgcccacaacgttgtgttacttcacctgctacgctgcatggggccgatgctggaacagaacgtgcgtcagaactttgaattgctctactcgcgccgtgagatgttggcaaaagtgagcagccaccgcgccggaatttttgaggcgattgtggcacgcgagccggaaaaggcccgtgaagcctcgcatcgccacttggcgtttatcgaggaaatcttgctggatctcagccgggagcatactcggcgcgagagatcgctacggcgtctccagcaacgcaaggattaa

SEQ ID NO: 426378 - DNA, 2664 bp, Serratia marcescens
atgtcagaacgtttaaacaatgacgtggatccgatcgaaacccgcgactggctgcaggcgatcgaatcggtcatccgtgaagagggtgttgagcgagctcagtttctgattgatcaggtattgggagaagcccgcaaaggcggcgttaacgttgcggccggtgctgcagcacacaactacgtcaacaccatcgcggtagaagacgaaccggcctacccaggcaatctggatctggaacgccgcattcgctcagcgatccgttggaacgcgatcatgaccgttcttcgcgcatccaaaaaagacctggagctgggcggccacatggcttccttccagtcttccgcgaccttctatgaagtctgctttaaccacttcttccgcgcacgcaacgagaaagacggcggcgacctggtgtacttccagggccacatctctccgggcgtttacgcgcgtgccttccttgaaggccgcctgaccgaagaacaaatgaacaacttccgtcaggaagtgcacggcaaaggcctgtcctcttacccgcatcctaagctgatgccggaattctggcagttcccgaccgtatccatgggcctgggcccaatcagcgccatctatcaggcgaagttcctgaaatacctggaacaccgcggcctgaaagacacctctgagcagaccgtttacgccttcctgggcgacggcgagatggatgagccggaatccaaaggcgccatcaccatcgcgacccgcgagaagctggacaacctggtgtttgtcatcaactgcaacctgcagcgcttggacggcccggtcaccggcaacggcaagatcatcaacgaactggaaggcatcttctccggcgcaggctggcaggtgctgaaagtgatctggggcggccgttgggacgaactgctgcgtaaagacaccagcggtaaactggttcagctgatgaacgagaccctggacggcgactaccagaccttcaaatccaaagacggcgcttacgtgcgcgagcacttcttcggccgttacccggaaactgcggcgctggtcaaagacatgaccgacgacgaaatctgggcgctgaaccgtggtggtcacgatccgaagaaaatcttcgctgcactgaaaaaagcgcaggacaccaaaggcaaaccgaccgttatcctggcccacaccatcaaaggttacggcatgggtgaaaccgcggaaggtaaaaacatcgctcaccaggtgaagaaaatgaacatggaaggggttcaccacttccgcgatcgtttcaacgtgccggttgccgatgctgacatcgaaaaactgccgtacatcaccttcgagaaagattccgaagagtacaaatacctgcacgaacgtcgccaggcgctgaaaggctacgtgccgacgcgtctgccggagttcacccagaagctggaaatgccggcgctggaagatttcagctcgctgctggaagagcagaacaaagagatctccaccactatcgccttcgtgcgtgccctgaacgtgatgctgaagaacaagtcgatcaaagatcgcctggtgccaatcatcgccgacgaagcgcgtaccttcggtatggaaggtctgttccgtcagatcggtatctacagcccgaacggccagcagtacaccccgcaggaccgtgagcaggtggcttactacaaagaagacgagaaaggccaaatcctgcaggaaggcatcaacgaactgggcgcagcctcttcctggctggccgcagcgacttcctacagcaccaacgatctgccgatgattccgttctacatctactactcgatgttcggtttccaacgtatcggcgacctgtgctgggcagcgggcgaccaacaggcgcgcggcttcctgatcggcgggacctcgggccgtactaccctgaacggcgaaggtctgcagcacgaagatggccacagccacattcagtctctgaccatccctaactgcatctcttacgatccggcttacgcgtacgaagtggcggtgatcatgcacgacggtctggtgcgcatgtatggcgacaacccggaaaacgtgtactactacttgaccacgctgaacgaaaactaccacatgcctgcgatgccgcagggtgcggaagaaggtatccgcaagggtatctacaagctggaaacgctggaaggcagcaaaggcaaggtacagctgctgggctccggcgccatcctgcgccacgtgcgcgaagctgcgcagatcctggcgaaggactacggcgtgggttccgacacctacagcgtgacctcgttcaccgaactggcgcgcgacggccaggattgcgagcgctggaacatgctgcacccaaccgaaacgccacgcgtgccttacatcgctcaggtgatgagcgacgcgccggcggtagcttctaccgactacatgaaactgttcgccgaacaggttcgtacttatgtgccggccagcgactatcgcgtactgggcaccgacggcttcggtcgttcggacagccgcgaaaacctgcgtcaccacttcgaagtcgatgcatcctacgtggtggttgctgctctgggtgaactggctaaacgcggtgagatcgaagcttctgtggttgccgatgcaatcaagaaattcgacatcaacccggaaaaagttaacccgcgtctggcctaa

SEQ ID NO: 426379 - DNA, 1884 bp, Serratia marcescens
atgtctatcgaaatcaacgtaccggacatcggtgcagatgaagtcgaaatcaccgagattctggtgaaggtcggcgataaagttgaagcggaacaatcgctgatcaccgtggaaggcgacaaggcttccatggaagtgccatccccgcaggcgggcgtggtgaaagagatcaaagtggcggtcggcgataaaaccgaaaccggcaaactgatcatgatcttcgaagcggcaggcgcagcggaagctgcaccggcggcgaaagcggaagaaaaaccggcggcagcagcagctgccccggccgccgctgcggccaaagacgttgccgtgccggacatcggcgccgacgaagtcgaagtgaccgagatcctggtgaaagtgggcgacaaggtggaagccgagcagtccctgatcaccgtggaaggcgacaaggcttccatggaagtccctgcgccgttcgcgggcaccgtgaaagagatcaagatcgcgaccggcgacaaagtgaaaaccggctccctgatcatggtgttcgaagtggccggcgccgcttccgctgcggccccggctgcggttgaagctcctgccgccgctgcagcgcctgcggcctctgcggccaaagacgtcgccgtgccggatatcggcggcgacgaagtcgaagtgaccgaagtgatggttaaggtgggcgacaaggttgccgccgagcagtctctgatcaccgtggaaggcgacaaggcctccatggaagtgccggcaccgttcgcggggaccgttaaagagatcaagatcgcgaccggcgacaaagtgaaaaccggctccctgatcatggtgtttgaagtggaaggcgctgcgcctgccgctgccgccgcgcctgctgctaaagcggaagctgcgccggcgccggccgccgcgaaagccgccgctccggctgcgaaagctgacgacaaaggcgagttcgccgagaacgcggcatacgtgcacgcgaccccggtcattcgtcgtctggcgcgtgaattcggcgttaacctggcgaaagtgaaaggcaccggtcgtaaaggccgcatcctgcgcgaagacgttcaggcttacgtgaaagacgcggtgaaacgcgctgaagcggccccggccgctgccggcggcggtctgccaggcatgctgccatggccgaaagtggacttcagcaagttcggcgagatcgaagaagtcgaaatgggccgcatccagaagatctctggtgcgaacctgagccgcaactgggtgatgatcccgcacgtgactcacttcgacaaaaccgacatcaccgatctggaagcgttccgcaaacagcagaacgaagaagcggccaagcgcaagctggacgtgaagttcacgcctgtcgtgttcatcatgaaagccgttgctgccgctctggagcagatgccgcgcttcaacagctcgctgtccgaagacggtcagaagctgacgctgaagaaatacatcaacatcggcgtggcggtagataccccgaacggcctggtggttccggtgttcaaggacgtgaacaagaagagcatcaccgagctgtctcgcgaactgatgaccatctccaagaaagcgcgcgacggcaagctgaccgcgggcgagatgcagggcggctgcttcaccatctccagcctgggcggcatcgggacgacccacttcgcgccgatcgtcaacgcgccggaagtggctatcctgggcgtctccaagtctgcgatggagccggtctggaacggtaaagagttcatgccgcgcctgatgatgccgatgtcgctgtccttcgaccaccgcgttatcgacggtgccgatggtgcgcgcttcatcaccatcatcaacaacatgttgtccgacattcgccgtctggtgatgtaa

SEQ ID NO: 426380 - DNA, 1425 bp, Serratia marcescens
atgagtactgaaattaaaactcaggtcgtggtacttggggcgggcccggcaggttactctgcagcctttcgttgcgctgacttaggtcttgaaaccgttctggttgaacgttattccactctgggcggggtttgcctgaacgtgggatgtatcccttccaaagcactgctgcacgttgccaaagtgatcgaagaagccaaagcgctggccgaacacggcatcgttttcggcgagccgaaaaccgacatcgacaaagtgcgcgtctggaaagaaaaagtcatcactcagctgaccggcggtctggctggcatggcgaaaggccgtaaagtgaaagtggtcaacggcctgggcaagttcaccggcgctaacaccctggttgttgaaggcgaaaacggcccaaccaccatcaacttcgacaacgccatcatcgctgcaggttctcgtccgatccaactgccattcattcctcatgaagatccacgcgtgtgggattccaccgatgcgctggagctgaaaaccgtcccagagcgtctgctggttatgggcggcggcatcatcggcctggaaatgggcaccgtataccatgcgctgggttcacagatcgacgtcgttgagatgttcgatcaggttatcccggcggcagataaagacgtggtgaaagtcttcaccaaacgtatcagcaagcagttcaacctgatgctggaaaccaaagtgaccgcggtagaagccaaagaagacggcatctacgtcacgatggaaggtaaaaaagcgccggcagaaccacagcgttacgacgcggtgctggtggcgatcggccgcgtgccgaacggcaaactgctggatgccggcaaagccggtgttgaagttgacgagcgtggcttcatcaacgtcgacaaacagctgcgcaccaacgtgccgcacatcttcgctatcggcgacatcgtcggtcagccgatgctggcgcacaaaggcgtgcacgaaggccacgttgccgcagaagttatcgccggcatgaagcactacttcgatccgaaagtgatcccatccatcgcttacaccgagccggaagtggcatgggtgggtctgaccgagaaagaagcgaaagagaaaggcatcagctacgaaacctccaccttcccgtgggcggcttccggccgtgcgatcgcttccgactgtgcagacggcatgaccaaactgatcttcgacaaagaaactcaccgcatcatcggtggcgcgattgtcggcaccaacggcggcgagctgctgggtgaaatcggtctggctatcgagatgggctgcgacgcggaagacatcgcgctgaccatccacgctcacccgaccctgcacgaatccgtgggcctggcggcggagatctacgaaggcagcatcaccgacctgcctaacccgaaagccaagaagaagtaa

SEQ ID NO: 426381 - DNA, 2598 bp, Serratia marcescens
gtgctagaagaataccgtaagcacgtagccgagcgtgctgctgagggcatcgcccctaagccgctagacgccacccaaatggccgcgctggtcgaactactgaagaatccgccaaaaggcgaagaagaattcctgttagacctgctgattaaccgtgttccaccgggcgtcgacgaagccgcctacgtcaaagcaggtttcctggcggccatcgccaaaggtgaagcgacatcccccctggttacccccgagaaagccattgaactgttaggcaccatgcagggcggctataacattcacccgctgatcgaagcgctggataacgaaacgctggcgcctatcgccgcgaaagcgctgtcccacacgctgctgatgttcgacaacttctacgacgtggaagagaaggccaaggccggtaacccgcacgccaagcagatcatgcagtcctgggccgacgccgaatggtatctgtcgcgccctgagctggcggaaaagatcaccgtcaccgtgttcaaagtcaccggcgaaaccaacaccgatgacctttctccggcaccggacgcctggtcgcgcccggacatcccgctgcacgcgctggcgatgctgaaaaacgaacgcgaaggcatcgtgccggatcagccgggcagcgtcggcccgatcaaacagatcgagctgctgaacaaaaaaggcttcccgctggcctacgtcggcgacgtggtcggcaccggttcttcccgtaaatccgccaccaactccgtgctgtggtttatgggcgacgacatcccgcacgtgccgaacaagcgcggcggcggcgtggtgctgggcggcaagattgcgcctatcttcttcaacaccatggaagatgccggcgccttgccgatcgaagtggacgtgtccgagctgaacatgggcgacgtgatcgacgtttacccatacaaaggtgaagtgcgcaaccacgaaaccggcgcgctgatcgccaacttcgaactgaaaaccgacgtgctgctggatgaagttcgcgccggcggccgtatcccgctgatcatcggccgcggcctgaccaccaaggcgcgcgaagcgctgggtctgccgcacagcgatgtgttccgtatcgccaaaccggtcgccgccagcagcaaaggcttctcgctggcgcagaaaatggtcggccgcgcctgcggcgtcgccggcattcgccctggcgaatactgcgaaccgaagatgacctccgtcggttctcaggacaccaccggcccgatgacccgcgatgagctgaaagacctggcctgcctcggcttctccgccgatctggtcatgcagtcattctgccacaccgccgcgtacccgaaaccggtcgacgtgaccacgcaccacacgctgcctgacttcatcatgaaccgcggcggcgtctcgctgcgtccgggcgacggcgtgatccactcctggctgaaccgcatgctgctgcctgacaccgtcggcaccggcggcgattcccacacccgcttcccgatcggcatctccttcccggccggttccggcctggtggcgtttgccgccgcgaccggcgtaatgccgctggatatgcctgagtcggtgctggtgcgcttcaaaggcaaaatgcagccgggcatcaccctgcgcgatctggtgcacgccatcccttactacgcgatccagcaaggcttgttgaccgtcgagaagaagggcaagaaaaacatcttctccggccgcatcctggagatcgaaggcctgccggatctgaaggtcgagcaggcgtttgagctgaccgatgcgtccgccgaacgttccgccgccggttgtaccatcaagctggacaaggcgccgatcgaagagtacctgaactccaacatcgtgctgctgaagtggatgatctccgaaggctacggcgaccgccgtacgctggagcgccgtattcagggcatggaaaaatggctggcggatccgcagctgctggaaggcgatgcggatgcggaatacgcggcggtgatcgacatcgatctgaacgagatcaaggagccgatcctgtgcgcgccgaacgatcctgacgatgcgcgcctgctgtccgacgtggccaacagcaaaatcgatgaagtgttcatcggttcttgcatgaccaacatcggccacttccgcgcggccggcaagctgctggatcagcacaagggccagctgccaacccgtctgtgggtggcgccgccaaccaagatggacgcggctcagctgaccgaagaaggctactacagcgtgttcggcaagagcggcgcgcgtatcgagatcccgggctgctcgctgtgcatgggcaaccaggcgcgcgtggcggacggtgcgacggtggtctccacctcgacccgtaacttcccgaaccgtctgggcaccggcgccaacgtctatctggcgtcagccgaactggctgcggttgcgtccctgctgggccgcctgccgacgccggacgagtaccagacctatatggcgcaggtcgataagacggcggcggatacctaccgctacctgaactttgaccagctggggcagtacaccgaaaaagccgacggcgtgatcttccaaaccgccgtgtaa

SEQ ID NO: 426382 - DNA, 363 bp, Serratia marcescens
atggattacgaatttctgcgtgacgtcaccggtcaggtgatcgtcagattttcgatggggcatgaagcgattggccactggatcaacgaagaagtcaaaggcgatttcaacctgctggaccggattgaagccggtgcggccgaggtcaaaggcagtgaacgtcaatggcagctggaaggccatgaatatacgctgctgatggatggtgaagaagtgatgatccgcgccaatcagctggagttcgagggcgatgaaatggaagaggggatgaattactacgacgaagaaagcctctcattctgcggcgttgaggacttcctgctggtgttgaaggcctatcgttctttcatgctgaaatactaa

SEQ ID NO: 426383 - DNA, 795 bp, Serratia marcescens
ttgcataagctaaaactgcacggcttcaacaacctgaccaagagcctgagtttttgtatttacgatatttgttacgccaagaccgcggacgaccgcgacggctatatcgcctacattgacgaacagtataacgccaaccggctgaccgagatcctgagcgaaacctgctcgatcatcggcgccaatattctgaacatcgcgcgtcaggactacgagccgcagggcgccagcgtcaccatcctggtcagcgaagagccgatcgatccgaaagacgtcgatacgtcggagcatcccggcccgctgccgaacacggtcgttgcgcacctggacaagagccatatctgcgtacacacctacccggaaagccatccggaaggcgggctatgcaccttccgcgccgatatcgaggtttcgacctgcggcgtcatttcgcccctcaaggcgctgaactacttaattcaccagctggaatccgacatcgtcaccatggactatcgcgtgcgcggttttacccgcgacgtgaacggcgtgaaacattacatcgatcatgagatcaattcgatccagaactttatgtcggaagacatcaaggcgctgtatcacatgatggacgtgaacgtttaccaggaaaatatcttccataccaagatgttgctgaaagatttcgatctgaagcactacctgttcaacgcggaaccagaggcgctgagcgccgccgaacgcaagcagatcaccgatctgttatggaaagagatgcaggaaatctattacggccgcaatattccgcatctgtga

SEQ ID NO: 426384 - DNA, 864 bp, Serratia marcescens
atgacccagaaagaaatttggtacgaaacgctgcataccggcttcggccagtatttctcggtagagaaggtgctgtaccgcgagaagaccgatcaccaggatctggtgatcttcgagaacccggtgctggggcgcgtgatggcgctcgacggcgtggtgcaaaccaccgagcgtgacgagttcatctatcacgaaatgctgacccacgtgccgctgctggcgcacggcgcggcgaagaaagtgctgatcatcggcggcggcgacggcggcatgctgcgcgaagtcagccggcaccctggcgtggagcagatcaccatggtagagatcgacgccggtgtcgtcgagttctgccgccagtacctgcccaaccacagcgccggcgcctatgacgatccgcgcttcaagctggtgattgacgacggcgtcaacttcgtgaaccaaaccgacgaaaccttcgatgtgatcatctccgactgcaccgatccgatcggccccggcgaaagcctgttcacttcggcgttttatgaaggctgcgcccgctgcctgaatgagggcggcattttcgtcgcgcagaacggcgtctgcttcctgcaacaggacgaggcggtcaacagccacgccaaactgagccgctactttaccgacgtcagcttctatcaggcggcgatcccgacctattacggcggcatcatgacctttgcctgggcgagccagaacccggcgctgcgccagcgcgatctgcctactctgcaacagcgctttaaccaaagcggcctacactgtcgttattacaacccggcaattcacgtcggcagttttgccctgccgcaatatttgctcaatgccctgaacgtaacacgttaa

SEQ ID NO: 426385 - DNA, 351 bp, Serratia marcescens
atgatgaaaaaaacaacgttatcgatgctgttgctggcgatgctgggcttctccaacgccagtctggcgctgaatgaatccgaggcggaagatctggccgatctgacggcggtatttatttatttgaaaaatgattgcggctacaacgatttgccaaacgcgcaaatcaaacgcgccatcgtctatttcgcgcaacaaaaccgctgggatttgagcaactacaacagcttcaatatgaaggcgctgggcgaagacagctatcgcgatctcagcggcatcgccattccaacgcccaagaagtgcaaatcgctcgcgcgcgactctttgagcctgctggcctacgccaactaa

SEQ ID NO: 426386 - DNA, 1668 bp, Serratia marcescens
atgttacgccgtgattttattaaattaaccgccgcactgggcgctgcgagcacattgccgttatggagccgggccgcttgggcggccgatcggccggccctgccggtgccgccgttgttgacgccggacgcgcagggaaaaattgcgctggcgctgcaggcgggggaaacccgctggttgcccggcgccgccaccaaaacctggggattcaacggcgcgctgctcgggccggcggtgaagctgcagcgtggccagccggtgacggtcgatatcaaaaacggcctggcggaggccagcaccgtccactggcacggcctggaaattcccggcgacgtcgatggcggcccgcaggcattgatccatcccggcgcgacgcgcacggtgaatttcactgtcgatcaaccggcggccacctgctggttccacccgcatacccacggtaaaaccggcagtcaggtgatgatggggctggcggggctggtgctgctggaagatgaggagagcgccaaactgccgctgccgaaaacctgggggcaggatgatattccggtgatcctgcaagataagcggttgggcaaagacgcgcaaatcgaataccgcctggacgtgatgagtgcggcggtgggctggtttggcgatcgcatgttcaccaacggcgcgcagtatccgcaacatttggcgccgcgcggctggctgcgtctgcgcttcctcaacggctgcaacgcccgttcgctgaatctggcggccagtgacaaccgtccgctgtatgtcatcgccagcgacggcggtttcctggcggagccggtgaaactgaccgagctgccgatgctgatgggcgaacgttttgaagtgctggtggatgcctccgacgggaaagcgttcgacatcgtgacgctgccggtgaagcagatgggtatgacgctggcgccgttcgatcaaccgctgccggtgttgcgcattcagccgtcgctggcgcagggcatcaaaaccatgccggacagcctggtgaagctgccgacattacccgctgccactggtatccaggagcgttggctgcagctgatgatggatccgcagctggatatgctcggcatgcaggagctgatggatcgttatggtcaccaggcgatggccggcatgagcatgaatcatggcgcgatgggcggtggagacatgaaaggcatgaaccacggcaacatgaaaggcatggaaaagggcggcatgcagggcatggatcatggcaacatgaagggcatggatcatggcaagatggccgggatggatcacggtggcgcgcagggtaaagccaaaccgttcgatttcagccacggcaacatgatcaacggcaaggccttcgacatgaccaagccgatgttcgccgccaaacggggccagtatgagaagtggaccatttccggcgagggcgacatgatgttgcacccgttccatattcacggtacccagttccgtatcctgtcggaaaatggcaaaccgccggcggcgcatcgcagcggctggaaggacacggtgcgcgtcgaagggtggcgcagcgaagtgctggtgcgcttcgaccatccggccagcagcgaacatgcgtacatggcccactgccacctgctggagcacgaagataccggcatgatgatgggcttcaccgtcggcgaatga

SEQ ID NO: 426387 - DNA, 516 bp, Serratia marcescens
atgatttccgagcaggaagttaagacccgtatcgccgaacttggccgccagatcaccgaacattaccgcgacagcggcagcgacatggtgctggtcgggctgctgcgcggctccttcatgttcatggccgatttgtgccgcgccatcgacgtgccgcacgaagtcgactttatgaccgcctccagctacggcagcggcatgtccaccacccgcgacgtgaagatcctcaaggatctggacgaagacattcgcggcaaagacgtgctgatcgtggaagacatcatcgattccggtaacacgctgaacaaagtgcgcgagattttggcgctgcgcgggccgaaatcgctggcgatttgcaccttgctggacaagcctgagcgccgtgaagtgcaggtgccggtcgaatatgtcggcttctcgatcccggatgagttcgtggtggggtatggcatcgactacgctcagcgctaccgtcacctgccgtacgtcggcaaagtggtgctgctggacgagtaa

SEQ ID NO: 426388 - DNA, 657 bp, Serratia marcescens
atgaaagaaatcgaagagcttatcgccaacaaccaggcctggtcggccaacatcagccaggaagacccggaattttttgaacgtttagcccaggcgcaaaagccccgcttcttatggattggttgctctgacagccgcgttcccgcagaacgcctgaccggcctcgagccgggtgaactgttcgtccatcgcaacgtggcgaacctcgttatccacaccgatcttaactgcctgtcggtggtgcagtatgcggtagatgtgctggaagtcgaacacatcatcatctgcggccacctgggctgcggtggcgtgcaggcggcggtggaaaacccggagctggggttgatcgacaactggctgctgcacattcgcgatctgtggtacaagcacagctcgctgctgggcgagctgccgccggagcagcgtttcgacatgctgtgcgagatcaacgtcattgagcaggtatacaacctgggccactccaccatcatgcagtccgcgtggaagcgcggccagaaggtgatgatccacggttgggtgtacggcattcaggacggccgcctgcgcgatatggaagtgctggcgaccagccgcgagagcctggagatgggctaccgcaaagcgatagccaaactgaagcaggataagggcatataa

SEQ ID NO: 426389 - DNA, 924 bp, Serratia marcescens
atgaattatgcactggaattagcgcagctgaccaagacttacgccggtggcgtcaaggcgctgcgcggtatcgacctgagcgtcgaagcgggggatttttatgccctgctggggccaaacggcgccggaaaatccaccaccatcggcatcatcagctcgctggtgaacaaaacggccggcagcgtgcgggtgttcggttacgacatcgataaagacatcgtcaacgccaagcgccagctcggcctggtgccgcaagagttcaacttcaacccgttcgagaccgtgttgcagatcgtggtgaaccaggcgggttactacggcgtcacgcggcgtgaagcgatggcgcgcgccgaaaaatacctcaatcagctggatctgtggggcaagcgcaacgagcgcgcccgcatgctgtccggcggcatgaagcgccgcctgatgatcgcccgcgcgttgatgcatcagccgaagctgctgatcctcgatgagccgaccgccggggtggacatcgagctgcgtcgctcgatgtggggcttcctgaaagagctgaacgcccagggcaccaccattatcctcaccacccactatctggaagaggcggagatgctgtgccgcaacatcggcatcatccagaacggggagctggtggaaaacacctcgatgaagggactgctggccaagctgaagtcggaaaccttcatcctcgatttggcggcgaagagcccgttgccgaagctggacggttaccacagccgcctgacggatacctcgacgctggaagtggaagtgatgcgcgagcaggggctgaacggcctgttcacccaactgagcgcgcagggcgtgcaggtgctgagcatgcgcaacaaggcgaaccgcctggaagaactgtttgtcaccctggttaacggcaatggagaaaaagcatga

SEQ ID NO: 426390 - DNA, 771 bp, Serratia marcescens
atgacgcgtttgtattgggtggccttgcagagcatctgggccaaagaggtgaaccggttcgcgcgcatctggatccagaccctggtgccgccggtgatcaccatgacgctgtacttcatcatcttcggcaatctgatcggctcgcgcatcggcgatatgcacggcttcagctacatgcagttcatcgtgcctggccttatcatgatggcggtgatcaccaactcctatgccaacgtcgcctcgtcgttcttcagcgccaaattccagcgcaacattgaggagctgctggtggcgccggtgccgacccacgtggtgatcgccggctatgtcggcggcggcgtggcgcgcggcatctgcgtcggcgtgctggtgaccatcatctcgctgttctttgtgccgctgcaggtgcacgcctggtgggtgattgcgctgacgctgctgctgacggcgatcctgttctcgctggcggggctgatcaatgcggtgttcgccaccaccttcgacgatatcagcctgatcccgaccttcgtgctgacgccgctgacctacctgggcggggtgttctactcgctgtcgctgctgccgccattctggcaggcggtgtccaagctgaaccccatcgtctatatgatcagcggtttccgctacggtttcctcggcatcaacgacgtgccgctggcgttcaccatggcggtgctgctggcgtttatcgcggtgttttacctgctttcctggtacctgatcgagcgcggccgcggcctgcgcagctga

SEQ ID NO: 426391 - DNA, 1281 bp, Serratia marcescens
atgcggcctcaatacacgttagcggctggtttcctcggcattctgatgtcgttggtttcccctgtgagcctggcgaatctgctgtcggaagacggcgcggttaaatctgaatacatggaagcgcagcgcgatagcgaagtctatgcgttggtgggcgagcatgtgatcccggtaggagaagtgaagcgcgggcagctgatccaggtgttcccggcggatgcggaatactacgaattcaaattcgggcacggcaccggctttatcgataaagatgacgtgcgcgaactgaagaagtcgcgcaaggtacaagacgatctgggcgagctgaacaaaccgctgaccaaccagaatctgatcacccaaaaaacgatcgacgtttataccgcggcggacaaggacagcgaggtcttgggcacgctggaaggcaacctgcgctatccgatcatcggcaagctgaaggatcgcctgaacaacacctggtacgaggtcaacatcggcgagcggctggggtttgtcaatgagctggactgcgagatagatagcggcataccggtgctgacctatcatcacctgctaaaaaacgaagagaacaagcgcttccgccacacctcgaccaccacctcagacgtggcgttcagcaaccagatgacctacctgaagcaggcgggctacgacaccatttcgctgtatcagctggaagcctacctgaagaaccagatcaacctgccgggcaaggcgatcgtgctgaccttcgacgacgggctgaaatcggtttatcgctacgcttacccggtgctgaaggattacggtttccgcgccacggcgttcatcatctcttcgcgcatcaaacgccacccgcagaaatggaacccggattcgctgcagtttatgagcgtctcggagctgaagcagattcaggacgtgttcgacgtgcagtcgcacactcacttcctgcaccgcaccgacggcaatcgccagccgattttgctgagccgttcgctgcacaatatcgagttcgattttgagcgctcgcgccgcgcgctgtcgcagttcaacccgcacgtgctgtatctgtcctacccgttcggcggctataaccagcgggcgatccaggcggcgcaggacgccggtttccatctggcggtgaccacggtgcagggcaaggtgaagccgggggataacccctatacgctgaagcggctgtatattctgcgcaccgactcgatccagaccatggcggatcggatagccaacaagccgggcacggtggtggtgcagtaa

SEQ ID NO: 426392 - DNA, 381 bp, Serratia marcescens
atgatacgtactatgctgcaaggcaagctgcatcgcgtcaaagtcactcaggctgacttgcactatgaagggtcctgcgccatcgaccaggatttcctggaggccgccggcattctggaatatgaagcgatcgatatttacaacgtggataacggccagcgcttctccacctacgccatcgccgccgagcgcggttcgcgcatcatttcggttaacggcgccgccgcgcgctgcgcctgcgtgggcgacaaactgatcatctgctcctatgtgcaaatgaccgacgccgacgcccgccaacaccacccgaaagtcgcctatttcgaaggtgacaacaacctgcagcgcaaggcgaaagccgtgccggttcaggtcgcctga

SEQ ID NO: 426393 - DNA, 855 bp, Serratia marcescens
atgattattatcgaaaccctgccgatgctgcgtcagcagatccgtcgctggcgccaggaaggcaaacgcatcgcgctggtgccgaccatgggcaacctgcacgacggccatatgacgctggtcgatgaagcgcgcgcccgcgccgacgtggtggtggtgagcatcttcgtcaacccgatgcagttcgatcggccggacgatctggcgcgctacccgcgcacgctgcaggaagacagcgagaagctgacccgccgcggcgtcgatctggtgttcgcgccagccccggccgcggtctatccgcaggggctggagcagcagacctacgtcgacgtgccgggcatctccagcatcctggaaggcgcaagccggccgggccacttccgcggcgtttccaccatcgtcagcaagctgtttaacctggtgcaacctgatttagcctgcttcggcgagaaggattaccaacagctggcgctgatccgcaaaatggtggcggacatgggttacgacatcgacatcgtcggtgtgccgaccgtgcgcgccaaagacggcctggccctcagctcgcgcaacggctacctgaccgccgaagagcgcaaggtcgcgccgcagctgagcaaaatcatgaatgggctggcgcagcagttggccaatggcgagcgccatatcgaaacgctgctggaacagaccgccgagcagctgcgcgccgccggctttacgccggatgaactgtttattcgcgacgccgacagcctgcagccgctgacggtggacagccagcgggcggtggtgctgatggccgcctggctgggcaaggcgcgtcttatcgacaaccagcaggtcgacctgacgctgtaa

SEQ ID NO: 426394 - DNA, 795 bp, Serratia marcescens
atgaaacccaccaccgtgacccacttgcgccagtggaaacaggagcaacgcaagtttgctacccttaccgcctacgatgccagctttgccaaactgtttgaagagcaaggcatcaaagtcctgttggtgggcgattcgctgggcatgacgctgcagggccacgactccacgctgccggtcaccgtcgccgacatagcctaccacacgcgcgccgtgcgccgcggcgcgccggcctgcctgctgctggccgatctgccgttcatgagttacgccaccccggaacagaccttcgccaacgccgccgagctgatgcgcgccggcgccaacatggtgaaactggaaggcggcagctggctgtgcgacacggtgaaaatgcttgccgagcgcgcggtgccggtgtgcggccatctgggcctgacgccgcagtcggtcaacgtgttcggcggctataaggtgcaagggcgcgacgaactggccgccaaacagctgctgcaggacgcgcagaacctggagctggccggcattcagctgctggtgctggaatgtgtgccgaccgagctggcgcgccagatcaccgaagcgctgtccattccggtcatcggcatcggcgccggcaacggcaccgacggccagatcctggtgatgcacgacgccttcggcatcaccggcggccacacgccgaagttcgccaagaacttcctggcgcagagcggcgatatccgcacggcggtgcagcactacattcaggaagtggaacaaggcctctacccggcggctgaacactcttttaactaa

SEQ ID NO: 426395 - DNA, 663 bp, Serratia marcescens
atgcgaattctgctgatcgaagatgacaaactgatcggggacggcatcaaggccgggctgaccaaactcggcttcaatctggactggttcaccgacggcgccgttggcaaaaatgcgctggacagcgcgccgtacgacgcggtgatcctcgatctcagcctgccgggcctcgatggcctggatctgctgcgccagtggcgccaggccgggcaggacgtgccggtgctgatcctcaccgcccgcgatgcgttggagcagcgggtcagcgggctgcaaagcggcgccgacgattatctgtgcaagccgttcgcgctggccgaagtggcggcgcgtctgcaggcgctgatccgccgtcgccacggccaactgatgccgcagctgacgcacggcaatgtggtgtttgacagtgccacccgcagcgtgagctgcaacggcgagccggtgacgctgacgccgcgcgagttggcggtgctggagctgtttctgcacaacaaggggcgggtgctggcgcggccgttgattcaggagaagctgtacaactgggacgacgaggtgagcagcaacgcggtggaggtgcatattcaccacctgcggcgcaagctgggtaacggcttcatccgcaccattcacggcgtgggttacacgctgggggatgcgccgtga

SEQ ID NO: 426396 - DNA, 1359 bp, Serratia marcescens
gtgaagcgtctcagcctgcggctgcgtctgatcctgatcttcagtctgttggcgctgatgacctggtgcaccgccagcgtggtggcctgggtgatgtcgcgcaacaccatcaatgaagtgttcgacacccagcagatgctgtttgccaaacggctggcgaccgccaacctcggcgatctgctggccgatgaaagcgcgcgcagcctgccgaaaaccaagaagctggtgcatcatggcaagcgtggcgatcaggacgacgacgcgctggcgttcgccatcttcgatcgccaaggcaagatgctgctcaacgacggcgagaacggcgccgatttcctgtttgacggggagcgtgaaggttttaccgacggcgagcgcaaaggcgatgacgacagctggcgcctgctgtggctgaccagcccggatgggcgctatcgcatcgtggtcggccaggagtgggattaccggcgcgatatggcgctgggcatggtgaccggccagctggtgccctggctggcgacgctgccggtgctgatgctgctgatcgcgctgatggtcgggcgcgagctgcggccgctgcgcgcggtggcggccggtttgcgccggcgcgcgcccgatgacgcgacgccgttggacgcgcgccaggtgccgaccgaggtgcgtccgctggtggatgcgctcaatgcgctgttcgctcgcatcaacgcgttgctggtgcgggagcggcgtttcacctccgatgccgcgcacgagttgcgcagcccgctggcggcgctgcgggtgcagaccgaagtggttcaactggcgggggacgatgcgccgatgcgcgagcacgcgctggacaatcttacggtcggcatcgatcgcgccacccggctggtggatcagctgctgacgctgtcgcggctggattcgctgttggatctggccgaactggcgccgatcgactggaacgaactggtgacgatgaccctggcggagcaggatcggcaggcccatgcggcgggcgtgacgctgcgctatgaacatcagggaacgccgccgccgcgtcagggggaaaccttgctgctgtcgctgctattgcgcaacttgctggataacgcggtgcgctataccccgcagggcggcgtcgtcaccgtgacgctgagcgaacgctcgctgacggtggaggacgacggtccgggggtcaccacggagcatctggcgcggctgggagaacgtttctatcgcccgccggggcaggagcaaaccggcagcgggctgggcctctcgatcgtgcagcgtatcgccggattgcatggtttacagatcggctttgccaatcgcccgccgggcgggttcgttgcgcggctgacgctgtaa

SEQ ID NO: 426397 - DNA, 378 bp, Serratia marcescens
atgaaccagccatcgccaaatcgcccgttaaaatggtgggccaagggtaaaacgcccgactaccgcttttctttagccaatgagcgcacttttctggcttggatccgcactgcattggcgtttatggcgggagcggtcggcatcaatcagtttgcctccgaatttggcacggctgccatccgtcaggggctgtcggtggctttgacgctgggggctgtagtgctggggctgatggcctatcgtcgctggaaggccaatgagaaagccatgcggcatgacggcgatatgccttatacccgcctgctgtggctattgaccctgttcgtggtcgtcatcgctctggcgctggtggcggtcattctgagttttggcgtgtga

SEQ ID NO: 426398 - DNA, 330 bp, Serratia marcescens
atgcacccaacggtggaagcgccgccgcgcgatcctggtttgcaacctgaacgtactcgtctggcctgggggcgtaccgcgttgacgatggcggtggtcgggctgctgtcgctgcgtgccggcatggtgtcgggcagtttgctgttggcagcgagcagctttttgatgctggcgtttgcgttggtgatgtttgtctggtcacgcgggagggaggctacggggccggaagcgcaggaacgaaggctgcagtgggtgaggcggatattcggctgtatgatggtggtgatgctgctggccgccgtggcgcaactcaagctttatctgctctag

SEQ ID NO: 426399 - DNA, 495 bp, Serratia marcescens
atgatccgcgtttatatcgcgctgggcagcaacctggcgcagccgctgcaacaggttaaagccgcactggaggcgctggagcatctcccgcgcacccggctggtcacctgttcttcgttttaccgcaccaagccgctggggccgcaaaaccagccggactttctcaacgcggtggtggcgctggatacactgttgccgcccgaacagctgctcgaccatacccaggcgatagaacgcaatcaggggcgggtgcgcaaggatgaacgctgggggccgcgcacgctcgatctggacatcatgctgtacggcgacaaggtgatccataccgagcgcctgactgtgccgcattacggcctgaaagagcgcgaattcatgctctacccgctggcggaaatcgctcccgatctgattttccccgatggcgagccgctcgccagctgcctcaagcgcgtgccggaaaacggcatggcgctgtggcatcaaagtaaaaagtga

SEQ ID NO: 426400 - DNA, 1317 bp, Serratia marcescens
atgaccgtgatcccgcgcgaacagcactcgatttcccgcaaagacattagcgaaaatgcgctgaaagtgctttaccgcctgaacaagtccggctacgaagcctatctggtcggcggcggcgtgcgcgatctgttgctcggcaaaaagccgaaagactttgacatcaccaccaacgccacgccggagcaagtgcgcaagctgttccgcaactgccgcctggtcggccggcgcttccgcctggcgcacgtgatgttcgggccggaaatcatcgaagtggccactttccgcggccaccacgaacagaacccggaatccgacaagaactcgtctcagcaggcgcaaaacggcatgctgctgcgcgacaacatcttcggttcgatcgaggaagacgcccagcgccgtgacttcaccatcaacagcctgtactacggcgtggcggatttcaccctgcgcgattacgtcggcggcctgaacgatctgaaacagggcgtgattcgcctgatcggcgatccggaaacccgctaccgcgaagatccggtgcgcatgctgcgcgcggtgcgcttcgccgccaagctggatatgcgcatcagcgaagagaccgccgagccgatcccgcgcctggcctcgctgctgcatgagataccgccggcgcgcctgttcgaagaatccctcaagctgctgcaggccggttacggtttccagacctacctgaagctgtgcgaataccagctgttccaaccactgttcccgctgatcgcccgcaacttcacgccgaaccacgatacgccgatggagcgcattctggtgcaggtgttgaagaacaccgatcaccgcctgcagaacgacatgcgcgtcaacccggcgttcctgtttgccgccatgctgtggtacccgctgctggagcacgcgcagaagctggcgcaggaaagcggcctggcctactacgacgccttcgcgctggcgatgaacgacgtactcgacgagcagtgccgctcgctggccatcccgaaacgcattaccacgctggtacgcgatatctggcaactgcagctgcgcctgtcccgccgccagggcaaacgcgcgcacaagctgatggaacacccgaaattccgcgccgcctatgatctgctggcgctgcgtgcagaagtggaagacaatcaggaaatgctgcgtctggccgagtggtggggcgagttccaggacgccacgccggcgcggcagaaagccatgctgagcaccctgggggacgatccggcgccgcgccgcgcgcgtcaacgccgccctcgccgccgggcaccgcgtaaagaaggggcataa

SEQ ID NO: 426401 - DNA, 912 bp, Serratia marcescens
atgcaagaaagtcattatgtggggcgctttgccccatcgccttccggggatctgcatttcggttcgctgattgccgctctgggaagctaccttcaggctcgcgcccaacgcgggcagtggctggttcgcatcgaagatatcgacccgccgcgcgaagtccccggcgccgccgctcgcatcctgtccgcgctggaacattatggtctccactgggacggccaggtcatctatcaatcccaacgtcacgacgcctatcgcgccgcgctggatctgttgcagcgtcaggggctcagctattactgcacctgcacccgcagccgcatccagcagatcggcggattgtacgacggccactgccgcgacttgcagctcggcccgcagggcgccgccatccgcttgcgccagaccgcgcccgtttacgggttccacgatcgcctgcagggagagttgcacgccgatccggcgctggcgggggaagactttatcattcgccgccgcgacgggctgttcgcctacaacctggcggtggtgatcgacgaccattttcagggcgtgaccgagattgtgcgcggcgccgacctgatcgaaccgacggtgcgtcaaattgccctctaccgccagctgcaggcgccggtgcccgcctatgtgcatctgccgctggcgctgggcgccaacggcatcaagctgtcgaagcaaaaccatgcgccggcgttgcccgccggcgatccgcgcccggtgctgatcgccgtgctgaaatttctgcgccaaccgctgccggaaagctggcaagatcttgacctgccattattattgagctgggcggtcgcacattggcggttggaaaacgtgccgcgtcaggaggctatccctctggatgaaaacacgccggcattctcaaaggagccatggtga

SEQ ID NO: 426402 - DNA, 456 bp, Serratia marcescens
atgcaagaagggcaaaaccgtaaaacctcgtccttgagcattctcgccatcgctggggtggagccgtaccaagagaagccgggcgaagagtacatgaacgacgcccagttgtcgcatttcaagcgcattcttgaagcgtggcgcaaccagctcagggacgaagtggaccgtactgtatcgcatatgcaagaagaggcagccaacttccctgatccggccgaccgtgctacccaggaagaagagttcagccttgaactgcgtaaccgtgaccgtgaacgcaaactgatcaaaaagatcgagaaaacgctgaagaaagtggaagacgatgatttcggctactgcgaatcttgcggcgtggagatcggcattcgtcgcctcgaagcgcgtccgaccgccgatctgtgcatcgactgcaagacgctggctgagatccgcgaaaagcagatggccggctaa

SEQ ID NO: 426403 - DNA, 708 bp, Serratia marcescens
atgattttctctccaccgctgcgttccgccacgctgataaaacgttacaaacgctttctggcggacgtgatcaccccggaaggggaaacctttacgctgcactgcgccaataccggcgccatgaccggctgcgccacgcccggcgacaccgtttggtactccacctcggataaccccaagcgcaaatacgcccacagctgggaactgacccatacccaacaggggcactggatctgcgtcaataccctgcgcgccaacgcgctggtgcgcgaggcgatcgaacacaatttaatcaatgaattatccggttacagtaaaatcagcggcgaagtgaaatacggcggtgaaaacagccgtatcgatttgttattacaggcagaaaatcgggttaactgctatattgaagttaagtcagtcacattactgcaacaacaacgtggttactttcctgatgcggtaacgctcagagggcaaaagcacctgcgtgagttgctcagcgtggttgaaagcgggcaacgggcggtgttgttctttgccgtgttacacagcggtattgagcaggtcgcaccggcacatcatatagatgagcgctatgcggcgctgttggcacaggtccggcagttgggagtggaagtggtttgctacggggcaaagttatcacctgacggtatttatctctgcgataagctgccgttttttatcgattag

SEQ ID NO: 426404 - DNA, 543 bp, Serratia marcescens
atgtccaattcgcgccgcctgtttttcgccctgtccttgcctgatgccctgcaacagcaggtgatccgctggcgcgccgaggcgtttgcgccggaggccggccggccggtggcggcggctaatttgcacctgacgctggcgtttctcggcgaagtcaccgcgcagaaagagctggcgctgcgcaaactggccggccgcatcgtgcaacccggcttcagcatgcggctcgacgatctcggccattggccgcgccccggcgtggtctggctcggcacccgccgcgcgccgcgcgggctattgcagctggccgaactgctgcgttcgcaggccgcccgcagcggctgccatcaaagcgcgttgccgttccatccgcacatcacgctgctgcgcgccgccacccagccggtggcgatcccgccggcgacgccgggctgggcgttcagcgccgacgccttttccttgtatgagtcggtgttcgaaaacgggcgcacccgttaccaacacctcgaacagtggccgctggccacgcaggcatccgcatga

SEQ ID NO: 426405 - DNA, 2439 bp, Serratia marcescens
gtgtcttcattgcccgtcagcgcggtgcttgatgagttgctggctgcgttgcagtccgctcctcaggtactgttgcacgccccgaccggcgccggtaaatccacctggttgccgctgcagatcctggctaaggccgggttgccggggcgcattatcatgctggagccgcggcggctggcggcgaaaaacgtcgcttatcgcctggcgcagcaactgggggaggagcccggccagaccgtgggctaccgcatgcgcgccgagagtaaaagcgggccgcagacccggctggaagtggtgacggaaggcattctcacccgcatgctgcagcaggacgccgaactgcagggcgtgtcgctggtgatcctcgatgagttccacgaacgcagcctgcaggccgatttggcgctggcgctgctgctcgacgtgcagcaagggctgcgcgacgatctgaaactgctgatcatgtcggccaccctggacaacgcgcgcctgtcgcagctgctgccggcagcgccggtggtggtgtccgaggggcgcagcttcccggttgaacgtttatatcagccgttggccagccatcagcggctggaagatggcgtagcggcggcggtgaagcggttgctggccgaacagccggggtctttgctgctgttcctgccgggcgtggcggagatcaatcgggtgctggagcgattgaccggcgaggtggcgagcgataccgatctttgcccgctgtatggcgcgctgcctctggcgcagcagcaaaaagcgattcagccggcggcggttggccgccgcaaggtggtgctggcgaccaacatcgctgaaaccagcctgacgatcgagggcattcggctggtggtggacagcggcctggaacgcgtggcgcgttacgacgtacgcaacggtttgacgcggctggcgacgcagcgcatcagtcaggcctcgatggtgcagcgcgccgggcgcgccgggcgtcttgagccgggcatttgctggcatctgttcgccaaagaacaggcggagcgcgcggcggaacacgccgaaccggacattttacagagcgatctcaccggcttttggctcgagttgctgcagtggggttgccacgacccggcgcagctgacctggctggatgcgcctcctgccgccgcattggcggcggccagggcgctgttgcaccggctgggggccacggatgacggtggcaaacttaccgcaccggggcgccagatggccgcgctgggatgcgagccgcggctggcgacgatgctgaccgccggcgcggcgctgagtgccgacggcctggcgacggcggcgttgctggcggcattgctggaagaaccgccgcgcggcgggcagatggatatcggctactggctgagccgcccgcaaccgaactggcggcagcgtgccgcgcagttggccaaacgcctgccgcaacgtgcagggcaagtcgacgtcgatctggcgccgcgcctgttggcgccggcgtttaccgatcgcatcgcccagcggcgaggccaggacggccgctacctgctggccaacggcatgggggcggcgatgaatcaggatgaggcgctgtcgcgcgcgccctggctcatcgtccccagcctgttgcagggccacaacagcctcgatgcgcgcatcctgttggcgctgccggtggacatcgacgcgctggcggcgcagctgccggcgatcgtcacgcagcgcacggcggtggagtgggatgacgagaagggcacgctgcgcgcctggaagcgccagcagatcggccgtttgacgctgcgcgcccagccgctggccaaaccggcggacgaagagctgcagcaggcgctgctcgattgggtgcgtgcgcaggggctggcggtgctcaactgggagggcgccgccgaacaattgcgggtgcgcctgcagtgcgcgcaagcctggttgccggaggcggaatggccggcgatggatgaagagccgctgctggcggcgctggagcagtggctgttgccgtcgctgaacggcgtgcgcgatctgcgcggcttgaagcaggtcaacatcgccgaggcgctgtcccgcctgctggactggcagcaaaagcagcggctggataatgcgctacccactcattacactgtgccgaccggcagtcgcctgccgatccgttatgaggccggcaaaccgccggcgctggcggtgcgtttgcaggaggtgttcggcgagcagcgcagcccgatgttggcggagggtcgcatcccggtggtgcttgagttactctcaccggcgcaccggccgttgcaaatcaccggcgatctggcggccttctggcaaggcgcctaccgcgaggtgcaaaaagagatgaagggccgctacccgaaacacgtttggccggacgatccggccacggcggtaccgacgcgccgaacgaagaaatatcagtag

SEQ ID NO: 426406 - DNA, 2493 bp, Serratia marcescens
atggctggggatgaccgcgagcccatcgggcgcaaaggaaaacaaccaaaaaacaccgcgtcgcgcaagccgccgcgccgtcgccgagacgacgattatgacgattacgaagaagacgagtatgacgatgatgagtatgaagaggaggaggaacgcatgccgcgtaaggtaaaagcgactccgccgcgtaaaaaacgccgctggctcggcctgattatcaaactgatcctggtgatcgccgtcctgttggcgatctacggcgtctatctggattcccagatccgcagccgcatcgacggcaaagtctggcagctgccggcggcagtgtacggccgcatggtcaacctggaaccgggcatgccgtacagcaagaaggaaatggtcaacctgctggaaggcatgcagtatcgccaggtcagccgcatgacgcgtccgggcgagtttaccgtgcaggccaacagcatcgagatgctgcgccgcccgttcgatttcccggatggtaaagaagggcagatccgcgcccgtctcgatttccagaacaaccgtctggctaagatcgaaaacctggacagcggccgcagcttcggcttcttccgcctcgatccgcgcctgatcaccatgctgcagtcgccaaacggtgaacagcgtctgttcgtgccgcgcgccggtttcccggatctgttggtggatacgctgatcgccacggaagaccgccacttctatgagcatgacggcatcagcccgtattccatcggccgtgcggtgctggccaacctgaccgccggccgtgcggtgcagggtggcagtaccctgacgcagcagctggtgaagaacctgttcctgaccaacgaacgctcgctgtggcgtaaggccaacgaagcctatatggcgctgctggtcgattaccgttacagcaaggaccgcattttggagctgtatctgaacgaggtgtacctcggccagagcggcagcgaccagatccgcggtttcccgttggccagcctgtactacttcggccggccggtggacgagctgagcctcgatcagcaggcgctgctggtcggcatggtcaagggcgcgtcgctgtataacccgtggcgtaacccgaaactggcgctggagcgccgcaatctggtgctcaagctgctgcaaaaccagggcgtaatcgacggcgagctgtacgacatgctgagcgcgcgtccgctgggcgtgcagccgaaaggcggcgtcattacgccacagccggcctttatgcagatggtgcgtcaggagctgcagaccaggctgggcgataaggtgaatgatctgtccggcgtgaagattttcaccacgctggatccggtgtcgcaagacgcggcggaaaaagcggtcgaagacggcatcccggcgctgcgcgctgcgcgtcacgtgcaggatctggaagcggcgatggtgatcgtcgatcgcttcagcggtgaagtgcgcgccatggtcggcggcgccaatccgcagttcgccggtttcaaccgcgccatgcaggcgcgccgcctggtcggctcgctggccaagccgccgacgtacctgaccgcgctgtccgaaccggataaataccgcctcaacacctggctggcggatgcgccgctgtcgctgaaacagccgaacggcgccgtctggcagccgaacaactatgatcgcaaattccgcggtcaggtgatgctggtggatgcgttggccaactcgctgaacgtgccgacggtgaaccttggcctgtcggtggggctggatcagatcagcgccacgctgcaacgtctgggcatcccgaaagcggagatcaacccggtgccttcgatgctgctgggcgcgatcggcctgacgccgatggaagtcgcgcaggagtaccagaccatcgccagcggcggtaaccgtgcgccgctgtcggcggtgcgttcggtgatcgccgaagacggcacggtgctgtaccagagcttcccgcaggccgaacgcatggtgccggcgcaggccgcttacctgacgctgtacgcgatgcagcaaggcgtggcgcgcgggacttctcgctcgctgtcggtgaagttcccgaactacaacctggcggcgaaaaccggtaccaccaacgatctgcgcgacagctggttcgccggcatcgacggcaaggaagtggcgatcgcctgggtggggcgcgacaacaacggcccggccaagctgaccggcgccaacggcgcgttgaccctgtatcgtcgttatctggaaaaccagacgccgctgccgctgatgctgcagccgccggaaggcattaaccagatgagcatcgactctgccggcaactttatctgcggcggcggcagctggcgcaccatcccggtctggactgacaatccgcagggattgtgccaggccagccagacggcggagcagcaacagcagcaaccggcggcgggtgagcaaaaagatggcgatggcgtcgccggctggatcaaggatatgttcggccagtaa

SEQ ID NO: 426407 - DNA, 2199 bp, Serratia marcescens
atgtcgaccaagcgtctttcgtcatccgcggccaagcagggccgtacccccgtcagcgcgttagcgatcaccgtcgctgcggcgttgggcacgctggcgatgccggctttttccgccgacgccaagccggccaccaaggaagacacgattaccgttgtgggcggcagcaataccgcccagcaggaaagcgcctgggggccggtcggcacctatgtcgccaaacgcagcgccaccggcaccaaaaccgatacgccaatcgagaagaacccgcagtccgtttccgtagtgacgcgtgaagagatggacatgcgccagccggatacggtgaagggcgcactggcctatacgccaggtgtgatgattggaaatcgcggtgcctccaccgcctatgatgcagtgaacatccgtggtttcagctcggtaggtaccaatatgtatctggatggcctgaaactgcaggacgataactattcgatttatcagatagacccttacttccttgagcgagcggaagtactgcgcggaccgtcttcggtattgtacggcaaaagcaaccctggtggggtggtcgcgctggtcagtaagcggccgacaacagagacgctgcgcgaagttcaattcaaaatggggacagataatctgttccagaccggttttgacttcagtgacgctttggatgatgcgggggtttactcatatcgtctgacgggggttgcgcgcgatgaagatcagcagcaggttggcgagaaaagtaaacgttatgctattgctccttccttcagttggcgacctgatgatcgcacttctttgactttcctcagcagcttccaggatgatcctagcgttggcttctatggctggttgccgaaagaaggtacggtgcaaaatggtatcaacggtaagttaccgaccagtttcaacgatggtgagcctggctataacaacatttcccgcaagcagcaaatggtcggatatgcctttgagcatagttttgatgatgtttggaccgtgcgccaaaacctgcgttattcgaaaatggatgtggactaccgttctatttacggcctaggcattgatccagataattcagctgagctgaagcgtggcgtgatgaattccaaagagcatatgtccagctttgcggtcgacacacaggcacaggctaaatttgcgaccgggcaagttgaccatatcttgttgatgggtgtggattatatgcgtatgcgcaatgatgttgtgtatcaatatggcagtgcatccaatctgaatgtcatcgctccacagtacggcaatcggagctataccattaccggtggtgccagtcaggttaaccgtcaggagcagaccggcctgtatgtgcaagatcaggctgaatggaacaactgggttctgacgatgggggggcgctatgattggagcgataccaatagcaccaatcgcctgaaccagaattccgtatctaagcagcaggataaccagtttaccggccgtgctggcttgaactatgttttcgaaaacggcatcgcgccttatgtcagctacagcgaatcgtttgagccaacctcaggcactgatttctcaggcaatacatttgctgcctctaaaggcaagcagtatgaggctggggttaaatacgcacctaaggatcgtccgatcaccgccagtgtggcgttttaccagttgactaaaaccaacaataaagtggctgacttagaacatccgttctttagcgtccagggtggggaggtccgttctcgtgggattgagttggaggcgaaagcggccttgtcggctaacctcaatctgttgggctcttacacctacacggatgctgaatatactaaagatacttcgctacaggggaatacaccttccgctatccctaaacacatggcttctctgtgggcggattacaccttccatgaaactgcgattagcggtttgaccttgggttcaggcgttcgctatgttggctccagctatggtgacgaggccaatacgtttaaagtgaaggattacacggtgtttgatgccgcgataaaatatgatctggcgcgtttcaatttgccgggttcttcgattggcatcaatgtgaacaacctgtttgataaggaatatgtctccagctgctttgctacttatggctgctactggggcgcagaacgccaggtggtcgccaccgcaaccttccgtttctaa

SEQ ID NO: 426408 - DNA, 798 bp, Serratia marcescens
atgcaggacaaacttcttaatcccggcgcgaccttcgcgctggataacgccagcttcgccgtccccggccgggtgctgttgcaaccgctgtcgctcagttttccccagggcaaagtctgcggcctgatcggccataacggttccggtaaatccaccctgttgaaattgctcgggcggcatcatgcgcccagcggcggtcaggttttgctcaatcggcagccgttggcgcagtgggacagcaaatccttcgcccgccaggtggcctacctgccgcagcagttgccggcggcggaaggcatgacggtgcgcgagctggtggccgtcggccgctatccgtggcacggcgcgctggggcgttttggcgccaacgatcgccaattggtggaagaggccatcgcgctggtggggctgaagccgttcgccagccgcctggtggacagcctctccggcggcgagcgccaacgcgcctggctggcgatgatggtggcgcaggacagccgctgcctgctgcttgacgaaccgacctcggcgctggacattgcgcaccaggtcgaggtgctggcgctgatccagcgcctgagccgcgaacgcgatctcacggtgatcgccgtgctgcacgacatcaacatggcggcacgctactgcgaccatctggtggcgctgcgcggcggtgaaatgatcgcccagggcggcccgctggaactgatgcaggggccggtgctggaacaaatttacggtattcctatgggcacgttgccgcacccgagcggcggcgcgccggtgagttttgtctactga

SEQ ID NO: 426409 - DNA, 909 bp, Serratia marcescens
atgtcctctgcattcacttcttctcacgatccgctgcgccgccgtttgttgatggcgctggcgctgtcgccgctgttgggctcgttgcccggccgagcggcggatgcgccgccggatatcgcccgcgttgcggcgctggaatggctgccgatcgaactgctgttggcattgggcgtgacgccgctggcggtggccgatgtgcataactacaacctgtgggtggcggagccgaagctgccggcgacggtggtcgacgtcggccagcgcaccgaacctaacctcgaactgctgcagcagcttcagccttcgctggtgttactgtcgcaaggctatggcccaacgccgcaaaaaatccaacccatcgcgccaaccatgagctttggcttcaacgacggcagcggcaaaccgctgaccgtcgcccgccagtcgctgctggcgctggggcaacgattgggcatagaaagccgcgcggtacagcacctggcgcagtttgaccgctttatgcaggacgcgcgtcagcgcctgcaaagctacacccggcaaccgctgctgctgttttcgctgatcgacacgcgccatgcgttgatcatcggccagaaaagcctgttccaggaggcgatggatcaactgggcatccgcaacgcctggcaggaagaaaccaatttctggggcacggcggtggtgggcattgaacggttggccacggtgcgtaatgcccgggtcatctatctcgatcacggtaatcaggcgatgatggacaaggtcagcgcgacgccgctgtggcagtcgttgcccttcgtgcggcaaaaccagctgcggcaggtgccggcggtgtggttctacggtgccacgctgtcgacgatgcggttttgccgcctgctggcgcaggctcaggagagtgcgtcatga

SEQ ID NO: 426410 - DNA, 291 bp, Serratia marcescens
atgagttcgggcatccggaaattgccgctgacgctgatcctactgttgctggcggcggcaggtggcctgacgatatacaacctggcgcagcagctgccgccggcgcaatgggcgcgggcgctcagcgcgccggacatcgacgacgtgcggcaaatgctgttccattacagcctgttgccgcggttgacggtgtcgctgttggccggcgccggtctggggttggtcggcgtgctgttccagcaggtgttgcgcaatccgttggcgtcgccgccggcgcgcagcttggcctga

SEQ ID NO: 426411 - DNA, 1623 bp, Serratia marcescens
atggtgggcgcgattgtggtgggcgggctggtgttcggcgtcgcctggggcaagcggatgtcgccggtcacgctgattctggccgggctggtgctggggctgtactgcggcgcggtcaacagcctgttggcgctgtttaattacgatcagctgcagggcatgttcctgtggggcaccggcgcgttgaaccaacaggactggagcgccgtgcagttcctcctgccgcgtttgctggtggctggcctgttagcggcgctgttgctgcgcccgctgacgctgctggggctggacgacggtgtggcgcgcaacctggggttagggctgtcgatggcgcgcttctgtgctttgggggtggccatcatcttcagcgccatgttggtgagcgcggtgggcgttatcggctttatcggcctgtttgcaccgctgatggcgaagatgttgggggctcgccgcctggcgcaccgcatgatgctggcgccgctgctgggggcgctgttgctgtggctgaccgatcaggtgatgctcggggtaacgcaggtgtggcacgagatcccgaccggcgcggccaccgcgctgttcggcgcgccgctgctgctgtggctgctgccgcgtttgcgcagcgccgccacgccgccgccgatgaacctcggcgacaaggtgcctgccgaacgcgggaatctgcccggctggatcctggtgggcggcctcgtgttgctgatcggcctggcgctggcgctgatgctgggcaaaaatgccggcggctggcactggagcctgggcgtggaactggacgctctgctgccgtggcgctggccgcgggtgttgtcggcgctggcggcgggcatgatgctggcggtcgccggcacgctgatccagaagttgaccggcaatccgatggccagcccggaagtgttgggcatcagctccggcgccgcttttggcgtcgtgatgatgctgtttatggtgccgggcgacgccttcgtgtggctgctgcccgccggcagtctgggagcggccgccacgttgctgatcatcatgatcgccgcaggccgcggcggtttctcgaccgaacgcatgctgctggccggtatcgcgctcagcaccgcctttaccaccgtcatcttcctgctgttggccagcggcgatccgcgtatggggggcttgctgacctggctctccggttcgacctattcggtggagccggcgcaggcgctgcgcaccgcgctgatcgccgccggattgctggtattggcgccgctgtgccgccgctggctgaccatcctgccgctcggcggcgccaccgcccgttctgtgggcattgcgctgacgccggcgcggttgagcattctgttgctggctgccaccctgaccgcgatggcgaccctgaccgtagggccgctgagctttgtcgggctgatggcgccgcatatggcgcgcatgctgggcttccgccgcgcgctgccgcaaatggtgatcgccgcgctgctgggcggcttgctgatggtgtttgccgactggtgcggacggatgctgctgttcccgtatcagatccccgccgggttattggcgacctttatcggtgcaccgtacttcgtgtatctgttgcgtaagcagacctcgtaa

SEQ ID NO: 426412 - DNA, 156 bp, Serratia marcescens
atgatgccgaacaaacgcagcccgttaaaactggtgattatttgtgtcactgtaatatcactggcatggataacccgcagcacgctgtgtgagctgcggatccgagcgggcactacggaggttgcggccattttggcttacgaatccgaacggtaa

SEQ ID NO: 426413 - DNA, 1155 bp, Serratia marcescens
atggctaaacacctcttcacgtccgaatccgtctccgaaggacatcccgataaaatcgccgatcagatctccgatgccgtcctcgacgccatcctggaacaagatccgaaggcgcgcgtcgcctgcgaaacctacgtgaaaaccggcatggtgctggtcggcggtgaaatcaccaccagcgcctgggtcgatatcgaagagatcacccgcaagaccgtgcgcgagatcggctacgttcattcggacatgggctttgacgccaactcctgcgcagtattgagcgccatcggcaaacaatccccggatatcaatcagggcgttgaccgtaccgatcctctcgagcagggcgccggcgatcagggcttgatgtttggctacgccaccaacgaaaccgacgtgctgatgccggccccggtgacctacgcgcaccgtctggtgcagcgccagtccgaagtgcgtaaaaacggcaccctgccgtggctgcgtccggacgcgaagagccaggtgaccttccagtacgacgacggcaaaatcgtcggcatcgacgccgtggtgctgtccacccagcattccgaagacatcgcgctgaaagatctgcaagaagcggtgatggaagagatcatcaaaccggtcctgccggcggaatggctgacggcgggcaccaaataccacatcaacccgaccggccgtttcgttatcggcggcccgatgggcgactgcggcctgaccggccgtaagatcatcgtcgacacctacggcggcatggcgcgccacggcggcggcgccttctccggtaaggatccgtccaaggttgaccgttccgcggcctacgcggcacgctacgtggcgaaaaacatcgttgccgccggcctggccgatcgttgcgaaatccaggtgtcttacgctatcggcgtagcggaaccgacctccatcatggtggaaaccttcggtaccgagaaagtgccaaccgaacagctgacgctgctggtgcgcgaattcttcgatctgcgcccatatggcctgatccagatgatggatctgctgcagccgatctaccgcgaaaccgctgcctacggccacttcggccgcgagcacttcccgtgggaagcgaccgacaaagccgcgctgctgcgcgatgccgccggcctgaaataa

SEQ ID NO: 426414 - DNA, 1899 bp, Serratia marcescens
atgaatgatcgtaatgccagcaagatgctgcgtacttataacgtcgcctactggggcaacaattactatgacgtcaacgagctgggccatatcagcgtgtgcccggacccggatgtcccgcaggcgcgcgtcgatctggcagaactggtgaaaacgcgccagcaagacggccaacgtttgcctgcgctgttctgcttcccgcagatccttcagcatcgcctgcgttcgatcaacgccgcgttcaaacgcgcgcgtgagtctttcggttaccagggcggctatttcctggtgtatccgatcaaggtgaaccaacatcgccgcgtgattgagtcgctggtgaactccggcgaaccgctggggctggaagccggctccaaggccgaactgatggcggtgctggcgcatgccggcatgacccgctcggtgatcgtctgtaacggctataaagatcgtgaatatattcgcctggcgctgatcggcgaaaaactggggcacaaggtgtacctggtgatcgagaagatgtccgagatcaacctggtgctggaagaggctgagcggctgaacgtggtgccgcgcctgggcgtgcgtgcgcgcctggcgtcgcagggctccggcaaatggcagtcgagcggcggcgaaaaatccaagttcggtctggcggcggtgcaggtgctgaagctggtggagaccctgcgcgaagcgggccgtctcgacagcctgcaactgctgcatttccacttgggctcgcagctggccaacattcgcgatatcgccaccggcgtgcgcgaatcggcgcgcttttacgttgaactgcacaagctgggcgtcaacattcagtgcttcgacgtgggcggcggcttgggcgtcgactacgaaggcacccgctcgcagtccgactgctcggtgaactacggcctgaacgaatacgccaacaacgtgatttggggtatcggcgatgcctgtaacgaacacggcctgccgcacccgacggtgatcaccgagtccggccgcgccgtgaccgcgcaccatacggtgctggtttccaacgtgatcggcgtcgagcgcaacgaattcagcgaaccgttgccgccggaagccgacgcgccgcgcgcgctggaaagcatgtgggaaacctggctggaaatgaacgagccggagaaccgccgctcgctgcgcgaatggctgcacgacagccagatggatctgcacgacgtgcatacccaatacgcgcacggcatgctggatctgaccaagcgcgcttgggccgagcagctgtatctgaacatctgcaacaagatccagcagcagctcgatccgagcaaccgcgcgcaccgtccaatcatcgacgagctgcaagagcgcatggcggacaagttctacgtcaatttctcgctgttccagtcgatgccggatgcctggggtatcgatcagctgttcccggtgctgccgctggaagggctggataagccgccggaaggccgtgcggtgctgctcgacatcacctgcgattccgacggcactatcgaccattacgtcgacggcgacggcgtggcgaccaccatgccgatgccgccgtacgatccggagaacccgccggcgctgggcttcttcatggtcggcgcgtaccaggagatcctcggcaacatgcacaacctgttcggcgacaccgcctcggttgacgtgtacgtgttcccggacggcagcgtcgagaccgagttgtccgacgagggcgacaccgtggcggacatgctggagtacgtgcagctcgatccgggggcgctgctggccaagttccgcgatcaggtcaaagaaaccgatctggacagcgagctgcaggcgcaattcctggaagagtttgaagccggcctgtacggctacacgtatctggaagacgagtaa

SEQ ID NO: 426415 - DNA, 921 bp, Serratia marcescens
atgagcaccttaggccatcagtccgataattcattagtgtccaacgcctttggtttcctgcgctttccgctgaacttcatgccttacgacagcgatgcagagtgggtcatcaccggcattccgtttgacatggcgacctccggtcgcgccggcggccgtcacggcccggcggccatccgtcaggtgtccaccaacctggcctgggaaggcaaccgctggccgtggagcttcgatctgcgcgatcggctgaacgtggttgactgcggcgatatcgtgttcaacttcggcgacgcgcaagacatgagcgacaagctgcaggcgcacgcggagaaactgctgaaggccggtaagcgcatgctctcgttcggcggcgaccacttcgtgaccctgccgctgctgcgcgcgcacgccaagcatttcggcaagctggcgctggtgcacttcgacgcccacaccgatacctacgccaacggcagcaagttcgaccacggcaccatgttctaccatgccccgaacgaaggtctgatcgatccgcaccactcggtgcagatcggcattcgtaccgagttcgatcatgacaacggttttaccgtgctggacgccgcgcaggtgaacgatcgcagtgtggacgacctgctgacccagatcaagggcatcgtcggcgatatgccggtgtatctgaccttcgacatcgactgcctggatccggcgttcgcaccgggcaccggcacgccggtgatcggcggcctgacctccgatcgcgcgctgaagctggtgcgcggcatgcagtcgctgaacatcgtcggcatggacgtggtggaagtggcgccggcttatgaccagtccgagatcaccgcgctggccgcggcgaccctgggcctggagatgctgtacctgcaggcggccaagaaacacgcctga

SEQ ID NO: 426416 - DNA, 156 bp, Serratia marcescens
atgatgccgaacaaacggagcctgttaaaattggtggttatttgtgccacggtaatatcactggcatggataactcgcagcacgctgtgtgagctgcggatccgattgggcaacacggaggttgcggccattttggcttacgaatccgaacggtaa

SEQ ID NO: 426417 - DNA, 1242 bp, Serratia marcescens
gtgcaacaacgtcaacgctggtttggagtgatcgccctgctgtttctgatcgttatcgcctatgcggatcgggtcaatatcgccgtgatgttggtcaatcccgacttcctgcaacacttccaacttggcggtgaccgcgctcaccagggcacgctgatgacggtgtttttgctcggctacgggctgtccgccatgttgctgacgccgtttctggaaacgctgatgggctaccgccgcgcgctgacgctgagcgtggtgctgtgggcgctgctcaccgccgcctcgccgctggcgggctcgctgatgctgctgtgcgtggtgcgcgcgctgcttggcgtcagcgaagggccgctgttctcgctgaagaccatgtacatcggcgagcatttcgccgccgacgagcgtggcaagcccaacgcggtcagcgcattgggcgtttcattggggctggtgctcggctttccgctggtgagttttctgatggcgcacttcggttgggcgatgtcgtttcacctgctggcgctgctcaacctgctgctggggctggcgctggtgcggctgttcgttcacccgcttcccttatcctcatcttcacgccctgccgatccgcaaccggtgctgaaccgcgtctggcgcatctttgcactggcctggcgcacgccgatgctcggctggatcctgctgatcgagatcgccacgctcagctacctgtggggctccagcgcctggctgccggcgtatctgaccgatgaaaaggggttttccatcaaacagatgggctggatggccgcgctgcctttcatcgtcagcatcgcctccaaatacctcggcggcgtgttgctcgatcgtatccgcccttatcaggcgccgctgatcttcgtctgcggcggcgcagcgaccgcgctgtgcatttatggcgtgatgcacagccatcagcttggctggatcgccttcttcctgctggcggccaacgcctgttggggggcgcagggcgcggcgatacccacgctgctgcaacattatgcgcggccggaggcggtcggcagcgcctatgggctgatcaacggcatcggcaatctgttctcggcgtttgtgccgatggcgatgggcatggtgatggccagccagggcaaggtgtcttcaggctttgcggtgctgatcgcctcgcagctgctgacgctgctggcgggcggcgcgctgtttggccgcatgttgctggcacagcagatgaagcgggcataa

SEQ ID NO: 426418 - DNA, 318 bp, Serratia marcescens
atgagctggaagaatgtgtgcgaagtgtctcaggtgaaagaagattttcctttttccggcaaagtggaaggaaaagagatcggggtatacctgctcgacggtaactactacgcgctggaagacgtctgcccgcatgcctatgccttgctcagccaggggtttgtagacgacggcaaggttgagtgcccgctgcacgaagcgctgtttgacgtgcgcaccggccagtgcctgcgcgagccgggcggccgcgatctgcaaacctatcccacccgggtggtcgacaaccaaattcagatcacctttatcgcggaggagtaa

SEQ ID NO: 426419 - DNA, 309 bp, Serratia marcescens
atgcagcacatcaccgatttcaatccctggctgccggacacccaacaggtgacgccggcccgcgaaggcggcaacggtcaaatccatcagccgggccaatttcgcaacgtgatctggcaaaaccgtgctcgtgtgccggacggtttcgaaaccgccctggtggcggcgctggaaacgatcttcgatcagggcgcggaagagctggagcagatcgtcagcgcgttgaatcagcgccgcctgttcgatcgcagcggccaaccgtggaatgaggcgacgttccgcgaattccttcacgttaacggtttctga

SEQ ID NO: 426420 - DNA, 1044 bp, Serratia marcescens
atgacagcaaatacaacatcctccgaacagagcttgcaggactatcttgaccaggggctgcgcggcatgtggtatccggtgctggccagctgggaagtgggcaacaatccggtcggcatcacccgtctggagcagcaaatcgtggtgtggcgcgacggtgaaggccagatccacgcgctggaagaccgctgcccgcaccgcggcgcgcggctttccatgggatggaacctcggcgatcgcatcgcctgctggtatcacggggtggaggtcggcggcgacggcacggtgaaagacgtgccggcggtggatcgttgcccgctggtggggcaaaaatgcctgcggtcttacccggccaaagaagcctacggcgcggtgttcctctatttcggcgtgacggcggatgaagcgccggcggcgctgactttcccgcaagagctggcggacgaagcgtcgtacagcaatttcctgtgcaccgccagctggaactgcaactaccaatacgccttggaaaacgtgatggatccgatgcacggcacctacctgcactcctcctcgcactcgatggcggaaggggaccgcaaggcggatatggggctggagccgaccgacagcgggtttatcttcaagaaaaacggccagattggcgtcaacttcgactgggtggagttcggcagcagcggcgcgtattggatgcgcctgtcgatcccgtacaaaaagcgcttcgggccgggcggtcacttctggatcatcggcatggtggtgccggaagacaaggatcactgccgggtgttcttctggcgcatccgcaaggtcaaagactggcagcgcgacatgtggcgcttcatgtaccgcaaccgcctggaatcgttgcattgggacgtgctcgagcaggatcgcatcgtgcttgaaaatatggcgcctaacgcccgcggtcgcgaatatctgtaccagcacgacgtcggcctttcgcgcctgcgccgcctgatgcaaaaagaggcgcagaaacagctggcgacgctgcgcgagcgggaggcggcgcagtga

SEQ ID NO: 426421 - DNA, 756 bp, Serratia marcescens
gtgaacggcctgctgaacggcaaacgcatcgtggtcaccggggcagcgcgcggcctgggctacagcttcgccgccgccatcgccgccgccggcgcgcaggtggtgatgtgcgacattctggcggatgagctggcggcgagcggcgccgcgctgcgtgagcagggcgctcaggtggaaacgcagaccatcgatctggcgtcaccgggttcgatccgttcggcgttcgagaagatcgccgcaggcggcgggatcgacggcctggtgaacaacgcggcgctggcgaccggcgtcggcggcaaaaccatgatggaatacgatatcgatctgtgggatcgggtgatgcaggtcaacgtgcgcggcacctggctggtgagccaggcggcggtgccgctgctggcgcgcagcccgcacgccaagatcgtcaacgtggcgtcggacaccgcgctgtggggcgcgccgcgtctgatggcctatgtcgccagtaaaggcgcgctgatcgcgatgacccgatcgatggcgcgcgagctgggcccgcaggggatctgcgtcaacgccatcgcgccgggcctgacgcgggtggaagccaccgagtatgtgcccgccgagcgtcatcagctgtacgagcaggggcgcgcgctggccggggcgcagcatccggacgatgtgaacggtacggtgctttatctgctgtcgccgctggcggatttcgtcaccggccaactgctgccggtcaacggcggctttgtattcaactga

SEQ ID NO: 426422 - DNA, 795 bp, Serratia marcescens
atggcggacgagcaagcatgtaagtatctgatcccggggctggatcgcgggttgcagctgctgctggcgtttggcgagcagcataaggaaatgactttcgccgagttgcatcgcctggtcgatatgccgaaggccaccgcctaccgtgtggtgcagacgcttgagcacctgggctttctggagcgcaatccgcgcaccaacacctttgcgctcggcatcaaggtgctgcgcctcggctttgaatacatcgcgtcgctggacgtggcgcaggccggccagccggtgattgagcagctgcgcgatcgcagccagtgcagcagccatctggcgatccgcgacgggcgcgacgtgatctacatcgcccgcgtcagcgccgccggttcgcagatcaatcaggtcagcgtcggcacccgcttgccggtgcaccaaacctcgctcggccgcatgctgttgaccagcgccacccgcagcgagttcgaacaactttatccggacgcgcagctgccgggtaatgcgccgggcaccccggcggatcgcgaaacgctgtggcagatggtgcagcaagacaaagcgcgcggctatgtgatcggcgaatcgttcttccgccacggcatctcctcgatcgtctacccgatcttcaaccgcgagcagcgggtcgaggcggtggtcagcatcatggtgccgtccgatgagatcccgaaagcggatcgcgagcggctgcgcatggaagtacgcgacgcggcggagaaaatttccggcttcctcggcgcgccgccgcaggccaacgtcggctaa

SEQ ID NO: 426423 - DNA, 942 bp, Serratia marcescens
atgagcgtaatcggaatcgaaaaactggaatttggcgtcgaagatctgccaacctgcgaaaaattcatgcaagacttcggcctgcagcccgccacgcaacattggggcgaaccgcagcgcgaattcaccaccctgagcggggcgcgggttgtcctgcatccgttgcaaagcgcggcgctgcctgcggcgtttgaaggcggttctaccctgcgccgcatgacctggggcgtggcctcgcccgccgagctggcgcgcctgcagccgcgtttggcgttgatgcccggcttccggcaggtgggagaagagctggaatgcctcgatcccaacggcatgacgctgcgcttcgtcgtcagccgccagcaggcggtcgaggtgccggtcacgccgatcaaccaatggggcgacgtgcgccgcatcgatcagcccagtccggtctatgcgcaggcgcagccgatcaacattggccacgtggtgttcttcgttgaggatctggcggcgaccgagcgtttctatcgcgagctgttggatttccaggtttccgatcgctatatcgatcgcgccgtcttcctgcgtacccaggcgcgcggcggccaccataacctgttcctgctgaaactgccgaaccgtccacgcggcctgaaccacgtggcgttcaccgtgcgcgatatccacgaagtgatcggcggcggcatcgccatgaacaaggagaagtggagcacctttatcggccccggccgccatccgatctcctcggcttatttctggtacgtcaacagcccgaccggcggggcgttcgagtactacaccaacgacgattatctgacggaaaactggcagccgcgcgagctggagcattcgttggtctccttcaccgaatgggcggtagagggcggcatcgatcacgacacgcgccgccagcataaaaaggcggaggcgttatga

SEQ ID NO: 426424 - DNA, 1212 bp, Serratia marcescens
atgaaccggccggaacacgcgggcatcgtcatcgtcggcggcggccaggccggcggctgggcggccaagacgctgcgcgatcgcggttacagcggccggctgacggttgtcagcgacgaaccctacgatttttacgagcggccgccgctgtcgaaagcggcgctgctggatgccgcggctcccctcagccggctgttcagcgaacagacggtggcggagctgaatatcgactggcgtcgcccgctgcgcgccgagtccatcgatgcagaacagcaaatcgtcacgctcagcgacgggcaaaggctgcagttcgagcagttgctgatcgccaccggcggtcggccgcgtttgccgggcgccgcctgggcgcagcacccgcgcgtgatgacgctgcgttcctgggacgatgcggctcggttgcggcagggcctgcagggttgccgccgcctggcgatcgtcggcggcggttggatcgggctggagatcgccgcttccgcgcgccgtctcggcgccgaggtgacggtgtttgaacgccagcccgcgctgtgcatgcgcagcgtcggcgccgacgtttcacaggcgttgctcgaactgcatcgtcagcagggcgtcacggtgctgtgcggctgcggcgagatctcgttggaagatcgcgatggcgccgcctggatcggcagcgaagtcagcgatccgcaggccttcgatctggtggtggtggggatcggcgtcgagctgaatctcgaactggcgcgcagcgccgggttggcgatcgagtccggcatcgtggtcgacggccaggggcgcaccagccatccggcgatcttcgccgccggtgacgtggcgcgccacccgacgctcggcctgtgcctgcagtcctgggcctacgcgcaaaatcaggccatcagcaccgcctgcgcgatgctcgacgccttcgccgcaccgtatgacgacgtggcctggctttggtcggatcaatacgacgccaatatccagatcctcggcgtgccgagcggcggcgtgcaccatgtggtgcgccgcacgccgcagtcgcaggtgttcttcacgctgaacgccgatcggcagctggtgcagatggtggcgttcaacgatgcgcgcaccatcaagctcggcaagcgttggctggcgagcggccgggtgctggatccgcagcagctggcggatgcggagttttctttgatggcgttgaaataa

SEQ ID NO: 426425 - DNA, 1257 bp, Serratia marcescens
atgactacgcaagacattgacgcccgcgctggacgggcgggggaagccgttgccgaaaatccgcagcagcgggtgcgctggtcggtgccgatcgcgctgttcgcctgcgtgctgctggcgtttttcgacaagatcagcatcgcggcgctgttttccgatagcgagttccagcaggcgttagggatcgggtttgacccggcgcggctgggtttgctgatgagcgcgtttctgttctcctacggcatttcctcgatgctgctcagcggcatcggcgatcggcttaatccggtcaaggtattgattggcatgatggtggtgtggggcgtgctgatggtgttgatggggatgacgcgttcctatcacgccatgatgacgctgcgcattctgctcggcatcgccgaagggccgctgctgccgatggcctacgccattattcgtcaggccttcccgccgcagctgcaggcgcgcgccaccatgctgtggctgctcggcacgccgctgggcgccgcgcttggcttcccggtcaccctgtacatcctcaataccttcgactggcaggccaccttcttctttatggcgtttctgacgctgccggtgatgttgctggtgctgttcggcatgcgccacctgaacgtcgcgcgcccggcggcggcgaccaagccggcggtgtccgaacgtaaacagcatcgccgcgagctgctgcgcagcccgcacttttggatgatctgcctgttcaacatcgccttcctgacctacctgtggggcatgaacggctggttgccgagctacctgatcaaggggaaaggcattcatctggagcatgccggttacctctcttcgctgccgttcatcgccatgctgcttggcgaagtgctgggcgcctggctgtcggacaagctggatcggcgcgcgctggcctgtttcctgtcgctgtgcggcgccggcctcggtctggcggtggtgctgcacctgcagggcacctacagcgtaatcgccgccatggccttcagcacctttatgtggggcgccggcgcgccgaatattttcgcgctgttggcgaaggcgaccagcagcaaggtcagcgccaccgccggcggcatcttcaacgggttgggcaattttgccggcgcgctggcaccggtgctgatgggggcgttgatcgccgccaccggcaatatggataacggcctgctgttcctggtggtgatggctttcgtcggctgcctcattctgctgccgttactgagaaagtactga

SEQ ID NO: 426426 - DNA, 525 bp, Serratia marcescens
atgtctcaggttgagaacaaagccggcgtcaagccgcaggatctgtcgatggaaaattgggtggagtcgcgcatcgcccgtttcgaaggccgtaaatacgactggaacgcgctgaaattccaggccgactttgacccgaaataccgccgcgcgcagatgcgctacatcggcaccggcgccaccggcgtggccagcgacgccaacaccattccggcgggcaatttcaccttctccaccatggtgctgccgtcgaagtgcgagggcccgctgcacctgcacgacgacgtggaggaagtgttcttcatgctgaagggcagcatcacgctgatgattcaggacggcgaagagtattacgagaccaggctgaaagagcgcgatctgatctcggtgccggcgggggtgtatcgcggcctgttcaaccacggtgaggaagaggcgctgatgtgcgtgatgctcggcaccgccaagccggagatcccgacctatccggcggatcatccgctatccaaagtgaagcgcaactga

SEQ ID NO: 426427 - DNA, 819 bp, Serratia marcescens
atgaacggcctggcgcaacgccaacgggcgcgctgcggggcgtataccctgagctggcgcgaggccgggcaggggcggccggtggtgttgctgcacggcatcagctccggatcggcctcgtggatcaagcagctcaacgatagcggcctgacggatggccaccgtctgttggcgtgggacgcgccgggctacggcggcagcctgccgttggcggatccgcaggccgatgccgccggttatgcggcggcgttggcggcgctgatagatgagctgcaactggcgcagccgctgatcgtcggccattcgctgggggcgctgatcggcagcgcctatgccgccggctatccggacgggttatgcggattggcgttggcggatccggcgcagggctatgccacggcgccggaggaaaaacgccggcaggtgtacggccagcgccaacagatgatagagacgctggggccggtgggctacggcgagcagcgggcggcggccttgctgcgtgaaggggcggatccgcaggacatcgcctgggtgcgcaacggcatgcagcagctcgatcccgacggctttctgagagccgcctggatgctggccaacgacgatatcgaccgctatctggcgcgctatcgcggcccgctggaagtctggtgcggtgagcaggatcgcattacgccgccggagaaggcggccgagctggcgcgtgagcaggacgcgacgctgcgtttgatcgccgccgccggccatgccagctacctcgacgcgccggcgtgtttcaaccgctatctgcgggactttacgggagcaatccaacgatga

SEQ ID NO: 426428 - DNA, 795 bp, Serratia marcescens
atgaattttcagcttgagaatcgggtggcggtggtgaccggcggctcgtcgggcatcggtttcgaaaccctgaagctgctgctggccgaaggggctaaggtggcgttctgcggccgcgatccggacaaactggccggcgcggaggccagcctgcgtgcggagtttccgcaggcggagatcctggcgctgcgctgcgacgtgctggacgcgcagcaggtggcgcagttcgccgctcaggtgacggcgcatttcggcggcgtggatctgctgatcaacaatgccggtcagggcttcgtcgcccattttgaccagacgccgcgcgaagcctggctgcatgaggccgagctgaagctgttcggcgtgatcaacccggtgcaggcgttcttaccggcgctggaacggtcggcgatcgcgtctatcacctgcgtgaactcgctgctggcgctgcagccggaagaacacatgatcgccacctcggcggcgcgcgccgcgctgctcaacatgacgctgacgctgtcgaaagagctggtgggcaaaggcattcgcgttaactcgatcttgctggggatggtggagtcaggccagtggcgccgccgtttcgacgagcgcagcgataaagatcaaagctgggaacagtggacggcggcgatcgccgaacggcgcggcatcccgatgaagcgcctgggcaagccgcaggagccggcgcaggcgctgctgttcctcgcttcgccgctggcttcctttaccaccggcgcggcgctggacgtatccggcggctttaaccgccatgtgtag

SEQ ID NO: 426429 - DNA, 795 bp, Serratia marcescens
atgaagaagatcatgatgattggctacggcgcgatggcgaaggaagtgatcgcccgtttgccggaaggcgtggaggttggctggatcctggcgcgcgcggctcatcatgcggcgatcgccgcggcctttggcgggcgggtgcaggcgctgacccatcccgagcagtgtttgcagcggccggatctggtgctggagtgcgccagccagcaggcggtggcggagttcggcgaagcggtgctgcagcgcggttggccgctggcgctgatctcgaccggcgcgctggcggacgccgcattgcaacagcggctgcagcaggtttgccgccgccatcacgggcagctgatcgtgctgtccggtgcggtggcggggatggatgggctggcgtcggcgcgcgaaggcgggctggagagcgtgacttatcaggccagcaaaagcccggccagctggcgaggcagcccggcggagcaactgatcgacctcgatgtggtgagcgaagcgcaggtattttttgaaggctcggcgcgcgaagcggcgcgtttgttcccggccaatgccaacgtggcggccaccattgcgctcaacggcctagggatggacgccacccgggtgcgcctgcaggtcgatcccgccacccggcgcaatacccatcgtctgcaggtatgcggcgactttggcgaatttcacatcgagctgagcggcaccccgctggcgagcaatcccaaaacatcaaccctggcggcgctgagcgcggtacaagcctgccgccgtctggtggacggcggttttattgcctga

SEQ ID NO: 426430 - DNA, 1470 bp, Serratia marcescens
atggaacgattgaatatttttgtcgccgggcgctggcgtgaagggcgtggcgaagagatggcttcggtattcccggccgacggcagcgtcaacgcgcggctgcgcgccgccaacgtcgaggacgtgaacgaggcggtggaagcggcggagcgcgcctggcgcgcgccggaatggcgcgggctggtgccgcatcaacgcgcctcgatcctctaccgcgtcagcaacctgatcctggcgcagcaggagcagttggccgagctgcaaacccgcgacaacggcaagccgctggccgagacccgcgggctggtggccagcgcggcggcgaccgcgcgctactttgccgccgcctgcgaggtgttggaaggcgagttgccgaccccgcgcagcgccgaggtgatgacgctcagccagtaccaaccgatgggggtgatcgccgccattacgccgtggaactcgccgatcgccagcgaaatgcagaaggtggcgccggcgctggcggcgggcaacgcggtggtgcttaaaccggccgaagccacgccgctgatggcgctgaagctggccgagctgttcgaacaggcgggcctgccggccgggctgctcagcgtgttgccgggcaaaggttcggtgatcggcgaggcgttggcgcgccatccgctggtgaaaaagatcgcctttaccggcgggaccagtaccgggcgccatttggcgcacatcgccgccgacaagctgatccccacctcgctggagctggggggcaaatcgccgaccatcgtgctggaggacgccgatctggaacaggcggcgcgcggcatctgctacggcatcttcagctccgccggccaggcgtgcatcgccggttcgcggctgttcgtgcatcgttcgctgtatcagccgctgctggcgcgcttgaccgaactgacggcggggctgcgcatcggcaacccgctggtgccgggcgtgcacctcggcccgctgatcagcgccaaacatcggcaaagcgtggcggactacgtggcgctggcgcggcaggagggcggtcgggtgatcatcggcggtgaagcgccggccgatccgcagctggcgagcggtagctattacctgccgaccattattgaaggcttgaacaacgacgcccgcgtttgccaggaagagatcttcggcccggtgctggtggcgctgccgtttgacgatgagcaacagctgatcgaacaggcaaatgactcggtgtacggcctggcggccggcatctggagccgcgacttccctcgcgcgatggcgctggcggagcggctggaaaccggcaccgtctgggtcaatacctacaaaacgttctcgatttccacgccgttcggcggtttcaaggaaagcgggctgggccgcgaaaaaggcctgaacggcatcaaggcctacatgcagcagaaaagcgtgtatctggcgctgagccatcaggtgaatcgctggagcgactag

SEQ ID NO: 426431 - DNA, 1641 bp, Serratia marcescens
atgagcgataaaatcacggttggcgaggcgatagcccggactctggaacagtacgcggtgtcggcgatgtacggcatcatttcgattcataatctgccgatcgccgatgcggtggggcagcgcgataaaattcgcttcgtgccggcgcgcggcgaagcgggggcggtcaccatggccgacgcgcacgggcgcttctccggcctgggcgtggcgttgaccagcaccggcgccggcgccggcaacgcggtgggggcgatgattgaggcgctcaacgccaacacgccgctgctgcatatcaccggccaggtggaaaaagcctatctggacgccgacgccggttttattcatgaaacccgcgatcagctcggcttcctgcgcgcctgctccaaacgcgcttaccgggtcaattcgccggagcaggcggtggcggtgatccagcgggcgatcctggatgcgcaaaccgtgccctgcggcccggtggcggtcgagatcccgatcgatattcaaagcagcctggtttcccgttcggtgctgaccgagccgttggcgccggcgccgctgccgaaggcggacgatgcggcggtggaacggctgcatcagcggctgaaacaggccaagcgtccgctgctgtggttggggggcggcgccttggcctgcggcgacgcggtgcgcaagctggcggacgccggcgtagcggtgatctccagcacccacgggcgcggcattctgccggacagccatccgcgcagcctgcgggcgttccataactcaccgagcatcgaagcgatcctgacgcagtgcgatctgacgctggtggccggttcgcgcctgcgcagcaatgaaacccgtacctggacgctgccgctgccgcgcccgctggtacagattgacatcgatccggcggcggccaaccgcaactatctggccgatgagcagatcaacggcgactgtgcggcgctgctggcggcgctggcggcgcggctggcccccggcgagaaggtcaacgccgagtgggatgccgagattgcgggggcggtgcagcaggcggagcgcgcgctgcgccagcagtccggcgaatacgccaaactcaacgacgccatcgacgccgcgctgccgcaggacgggttgctggtacgcgatatcaccgtttccggcagcgtctggggcagccggctgttccgggcgatctcgccgctgtgcaacattcactcgctggccggcgccatcggtatggggctgccgatggctatcggcaccgcgatcgccaacccgcagcgcaaggtggtggggctggtgggcgacggtggtctggcgctgggcctgggcgagctggcgaccatggcgcaggaacagatgaacatcaccctgattatcatgaacgacggcggttatggcgtgatgcgcggtattcaggacaagtacttcgccgggcgtcagtattacaacgagctgcatacgccggcctttacccagatcgccgaagcgatggggttgaaagcctggaaggtggacgcggcgtcgcagttcaacggcgtgctggccgaggcgatcaactacccggggccgtcggtggtcgaggtggacatgaagcaggtcgggccgctgaccttcgccgggccgccgcagaagacgctgtattga

SEQ ID NO: 426432 - DNA, 753 bp, Serratia marcescens
atgaagatccgtacctctttgattgcgttgggcattgccaccctggcaaccggctgtcaaaacctgaataccgaaaccttgatgcagtccggcgcgcaggcattccaggcggcgaccctgagcaacaacgacgttaaggccctgagtgataaatcctgcgccgagatggacagcaaggcacaaatcgcgccggccgacagcacctacgccaagcgtctcaacaaaatcgccgcggcgctgggcgacaacatcaacggcaccccggccaactacaaggtctacgtgaccaaagacgtcaacgcctgggcgatggccaacggctgcatccgcgtctacagcggcctgatggacatgatgaacgacaacgaagtcgaaggcgtgctgggccatgaaatgggccacgtggcgctgggccacacccgcaaggcgatgcaggtggcttacggcaccgtggcgctgcgcaccgcggcgtcctccgccgggggcgtcatcggctcgctgtcgcagtcgcagctggcggacatcggcgagaagctggtcagcgcccagttctcgcagaagcaggaaagcgaagcggatgattactcgttcgatctgctgaaaaagcgcggcatcgatccgaatggcctggccaccagcttcgaaaaactggcccagatggaagccggccgtcagagcagcatgttcgacgatcacccgtcttcccaagcgcgcgctcagcacattcgcgatcgcatcgcggcagagaaataa

SEQ ID NO: 426433 - DNA, 534 bp, Serratia marcescens
atgaaggcattgatactttattcgagccgtgacgggcaaacacgtgctatcgcttcttatatagcaagcaaattgcaggatacgctgcgctgtgaggtgatcgatctgctgcaggcggaacaggtcgaccttaatcagtatcagctggtgatgatcggtgcttctatccgttacgggcactttaacccggcgctggataaattcgtcaaacgtcatgccgagcagctgaatcgaatgccgagcgcgttctttgccgtgaacctgacggcgcgcaaaccggaaaagcgctcgccgcaaaccaacgcttatacccgcaagtttctgctggcctcgccgtggcagccaaaacagtgcgcggtgtttgccggcgcattgcgttatccgcgctatcgctggttcgaccgcatcatgattcaatttattatgcgtatgacgggtggtgaaacggataccagtaaggaagtggagtacaccgattggcagcaggtcgatcgtttcgcccaggaatttagccagatcccgtacgaaaagtga

SEQ ID NO: 426434 - DNA, 1452 bp, Serratia marcescens
atgcattttcgcgccataacccgtatcgttggtctgctggtcatcctgttctccgggacgatgtttattcccggcttggtggcattgatttaccgcgatggggcggggcgcgcgttcagccaaaccttcttcgtggcgctgaccatcggtctgatgctgtggtggccgaaccgcaaacagaaacacgaactgaaaccccgcgaaggcttcctgatcgtcgtgctgttctggaccgtgctgggcagcgtgggggcattgccgttcctgttttctgaacggcccaacttgtcgctgaccgacgccttctttgaatccttctcggggctgacgaccaccggtgcgacgacgctggtgggactggattcgctgccgaaggccattctgttctatcgccaaatgctgcaatggatgggcggcatggggatcatcgtgttggcggtggcgatactgccgatactcggcgtcggcggcatgcagctgtatcgggcggaaatgcccgggccgctgaaagataacaagatgcgcccgcgcatcgccgaaacagccaaaaccctgtggctaatctatgtgttgctgaccgtagcctgtgcgctggcgctctggggagcaggaatgtcggtgttcgatgccatcggccacagtttctcgaccatcgccatcggcggcttttctacccacgacgccagtatcggttattacgccagtccgaccatcaacaccatcatcgccgtgttcctgctgatttccggctgtaactacggcctgcacttcgctttgctcagcggccgcagtctgaaggtatacgggcgcgatcctgaattccgcatgttcatcttcgtccagctgacgctggtggtggtgtgcacgttggtgctctggggacatggcgtctataagagcggtatggaaacgctcaatcaggcgttcttccaggtggtatcgatggcgactacggccggttttacgaccgacagcatcgccaagtggccgctgttcctgccgatgctgttgttgtgttcggcattcatcggcggctgcgccggctcgaccggcggcggcctgaaggtgatccgtattctgctgttgtacctgcagggctcgcgcgagttgaaaaggctggtgcaccctaacgcggtctataccatcaaattgggcaaccgcgcgctgccggaacgcattctggaggcggtgtggggatttttctccgcctatgcgctggtgtttatcgtcagcatgctggcgatcattgctaccggcgttgatgatttctccgcgtttgccgcagtgacggcaacgctgaataacctcggccccggcctgggcgtagtggcggataacttcaccacgatgccggcggcggccaagtggatcctggtggtgacgatgctgttcgggcgcctggaagtgtttacattgctggtgctgttcacgccaaccttctggcgtgagtga

SEQ ID NO: 426435 - DNA, 615 bp, Serratia marcescens
atgcggccgtatccgataccggcggaagcaacctgctttaccgaagaaataaagaagagccgttttatcaccctgctggcgccgaccagcggggtagaagcggcaaagacgtttattcagcaggtgcgggatgaacacccggcggcgcggcaccattgttgggccttcgtcgccggcagccccgatgactcgcagcagctgggattctccgacgacggagagccgtcgggtaccgccggcaaaccgatcctcgcgcagctcatgggcagcggcatcggggaagtgaccgccgtggtcgttcgttactacggcggcgtcaagttgggcaccggcggattggtgaaagcctatggcaacggtgttcaacaggcgttgaagcagctggcgttggctcaaaaggtgccggaagccgaatatatcttgcagtgcgactatgcgcagttggcgttggtggagaacttgctgcagcaaaccgcaggtcggatcctgcagggcgaatacggcgccgccgtcgtgctgcatctggcgttgccggccacggaggtcgagctgtttgggaataaattgcgtgatcttagtcgcggtaatttgcaattaacccccatttcgcaataa

SEQ ID NO: 426436 - DNA, 1332 bp, Serratia marcescens
atggaaacgctggcttctttgtataacgaccacctggcagagctgcaaaaacgcgcgcgcgaagtgctggagcgcaacaagttggatgcgctgctgattcactccggtgaactgcaaaaggtatttttggacgaccatagctatccgttcaaagtgaacgcgcatttcaaagcctgggtgccggtgacgtcggtgccgaactgctggttgtggattgatggcgtcaacaagccgaagctgtggttctactccccggttgactactggcacagtgtagagccgctgccggacagtttctggaccaaatcccttgaattgatgccgctggccaacgccgacgctatcgcccagcagcttccgccgcagcgcgagcgcgtgggctatatcggttatgcgcaacagcgcgcccgcgatctcggcatcccttcggaaaacatcaacccgaaagcggtgttgaactacctggatttccaccgttcgatcaaaaccggctatgagctggcctgcatgcgcgaagcgcagaagacggcggtaaccggccatcgtgcggcgcatgaagccttcctctccggcatgagcgagttcgacatcaatctggcctacctcacggcgacaggccaccgcgataccgacgtgccttacgacaacatcgtggcgctgaacgaacacgcttcggtactgcactacaccaagctggatcatcagccgccggccgaatccctgagtttcctgatcgacgccggcgcggaatacaacggctacgccgccgatctgacccgcacctacgcggcgcaaagcggcagcgaattcgcccatctggtgaaagatctcaacggtgaacagctggcgctgatcgacaccatcaaaaccggcgtgcgctataccgactaccatgtgcagatgcaccagcgcatcgccaagctgctcaagaatcacaagctggtgaacggcctcagcgaagaggcgatggttgaaacgggcatcactacgccgttcctgccgcacgggctgggccacccgctgggcctgcaggtgcacgacgccgccggctttatgcaggacgagcaaggcacccatctggcggcgccggccaagtatccgttcctgcgttgcacccgcgtgttgcagccgggcatggtgttgaccatcgagccgggtctgtacttcatcgagtctctgttggcgccgtgccgcagcggtgagttcaagcagcacttcgcctgggatcgcatcgatgcgctgaagccgtatggcggcatccgcatcgaagacaacatcgtaatccacgaaaagcgcatcgagaacatgacgcgcgatctgaacctggcctga

SEQ ID NO: 426437 - DNA, 2190 bp, Serratia marcescens
atgctctaccaaggcgaaacattacaactgcactggctcgataacggcatcgccgagctggtgttcaacgcatcgggctcggtcaacaagctggacacccgcacagtcgccagcctgggcgaagcgctcaccgtgctggaaaaccagcctgagctgaaagggctgctgctgcgttcctccaaagccgcgtttatcgtcggcgccgatatcaccgaattcctttctctgttcgccgcaccggctgaaaagctgcaagagtggctggtgttcgccaacaacgtctttaaccggctggaagatttgccggtgccgactatttcggccattaacggctatgcgctcggcggcggttgcgaatgcattctggcgaccgatttccgcgtcgcctcaccggacgcgcgcattggcctgccggaaaccaaattgggcatcatgccgggcttcggcggttccgtccgtctgccgcgcctgctgggtaacgacagcgcgctggaaatcatcgccgccggcaaagacgtcagcgccaaagaggcgctgaaagtcggcctggtggatgcggtggtggcaccggaaaaactggccgaagcggcgctgaaaatgctgcaacaggcgatcgacggcaagctggactggcgcgccgcgcgtcaacctaagctggagccgctgaagctcagcccgattgaagcggcgatgagcttcaccaccgccaaaggcatggtgctgcagaccgccgggaaacattacccggcgccgatgaccgcagtgaaaaccattgaagccgccgccaaactgggccgcgatgaagcgctgaaactggaaaccgccagcttcgtgccgttggcgcgttccaacgaagcgcgcgcgctggtcggcatcttccttaacgatcagttcgtgaagggccaggcgaaaaagctggccaagaatgtggatgcgccgaaacaggcggcggtgctgggcgccggcatcatgggcggcggcatcgcttaccaatcggcgctgaaaggcgtgccggtgatcatgaaagacatcagcgacaagtcgctgacgctgggcatgagcgaagcggccaagctgctcaataagcaactggaacgcggcaagctggatggcctgaaaatggcgcaggtgctctcgaccattcagccgacgctggactacgcgggtatcgaacgcgcgcaggtgatcgtcgaagcggtcgtcgagaacccgaaagtcaaagccgccgtgctgtcggaagtggaaaccctgatcggtgaggacaccgtgctggcgtcgaacacctcgaccattccgattaatcacctggcaaaatcgctgaagcgcccgcaaaacttctgcggcatgcacttctttaacccggtacaccgcatgccactggttgaaatcattcgcggcgaacagaccagcgatgacaccatcgccaaggtggtggcctacgctagccgcatgggcaaaacgccgatcgtggtgaacgactgcccgggcttcttcgtcaaccgcgtgctgttcccgtatttcgccggcttcagcctgctgctgcgcgacggcgccgacttccgtcagatcgataaagtgatggaaaaacagttcggctggccgatgggcccggcctacctgctcgacgtcgtgggtatcgacaccgcgcaccacgcgcaggcggtaatggccgccggcttcccggatcgcatgagcaaagactaccgcgacgccattgacgtgatgttcgacaaccagcgcttcggtcaaaaaaatcagctgggcttctaccgctatagccaggacagcaaaggcaagccgcgcaaggacaacgacgagcagaccgatgcgctgctggccgaagtgagtcaaccgcgccagaccatcagcgacgaagaaatcatcgcgcgcatgatgatcccgatgatcaacgaagtggttcgctgcctggaagagaagatcgtcgccagcccggcggaagccgatatggcgttggtctacggcattggcttccctccgttccacggcggcgcgttccgctacctggatacgctcggcaccgccaactacgttgagctggcccagcgttacgcacacctcggcgccctgtatcaggtgccggccggtctgcgcgccaaggccgaacgcaatgaaagctactacccggtggcgacaccgctgtccgacgtcgctacccgccaaccggcatga

SEQ ID NO: 426438 - DNA, 1164 bp, Serratia marcescens
atggaaaacgtagttattgttgatgccgtacgcacgccgatgggccgctccaaaggcggcgccttccgccaggtgcgcgccgaagatctctccgctcacctgatgcgtgaagtgctgagccgcaacccggcgctggacgccgccgagatcgatgatatttactggggctgcgtacagcagacgctggaacaaggcttcaacatcgcccgcaacgccgcgctgctggccgagatcccgcaccgcgtgccggcggtgaccgtcaatcgcctgtgcggctcttcgatgcaggcgctgcacgacgcggcgcgcgccatcatggttggcgacgcacacgttagcctgatcggcggcgtggaacacatgggccatgtgccgatgaaccacggcgtggacttccatccggggctgagccgcagcgtggccaaagccgccgggatgatggggctgaccgccgaaatgctggccaagatgcacaacatcagccgccagatgcaggatgagttcgccgcccgctcccaccagcgcgcgcatgcggcgacgctggcgggttacttcaaaaacgagatcataccgaccaacggtcacgacgccgatggcgtgctgacccgttacgatttcgatgaagtcattcgcccggaaaccaccgtcgaaagcctgtcggccctgcgcccggcgttcgatccggtcaacggcaccgtcaccgccggcagttcttccgccctgtcggacggtgcttccgccatgctgctgatgagcgaatcgcgtgccaaagcgctcggtttgaaggcccgcgcccgcatccgctcgatggcggtcgtcggctgcgatccttccatcatgggttacggcccggtgccggccagcaagctggcgctgaaacgcgccggcctgagcgtgcaggacatcgatctgttcgagctgaacgaagcgttcgccgcccagtcgctgccatgcatcaaggatctggggctgatggacagcatcgacgacaagatcaacctgaacggcggcgccatcgcgctcggccacccgctggggtgttcaggctcccgcatctcgaccaccctgttgaacaacatggaacgtcgcgacgcgcagttcggcctggcgaccatgtgcatcggcctgggccagggcatcgccaccgtctttgaacgcgtttag

SEQ ID NO: 426439 - DNA, 702 bp, Serratia marcescens
atgacaatattgagctgtaaagtgacctcggtagaggccattaccgatacggtttatcgggtacgtctggtgcccgagcagccgttttctttcaaggcagggcaatatctgatggtggtgatggacgagcgcgacaagcgcccgttctcgctggcatcaaccccgacgcagcaagattacatcgagctgcacatcggcgcttcggagctgaatctgtacgccatggcggtgatggatcgcatcctgaaagagcaggcgatcaccgtcgacgtgccgcacggcgacgcctggctgcgggaagagggcagccgtccgctggtgctgattgccggcggcaccggtttctcttatgcgcgttcaatcctgttgaccgcgttggagcagcagcccgatcgcgatatttctatctactggggcgggcgtgagctgaagcacctgtacgatctgagcgagctggaagcgctgtcgttgcagcatccgaatctgaaggtgatcccggtggtcgagcagccggaagccgaatggcgcggccgcagcggcaccgtgctcagcgcggtgctgcaggatttcggcacgctggcggagcacgacatctatatcgccgggcgtttcgagatggcgaaaatcgcccgtgagcgtttctgcgccgagcgcggcgcgctggaagcgcatatgttcggcgacgcgttttcgtttatctga

SEQ ID NO: 426440 - DNA, 1521 bp, Serratia marcescens
atgccctccccactggccgttataatgatcagcatgaaataccgtgacttacgcgatttcctctcgttgctggagaagagaggggaactaaaacgcatcagccagccgatcgatccttacctggaaatgacggagattgccgatcgcaccctgcgggcaggcggcccggcattgctgtttgaaaacccgaaaggctacgacatgccggtgctgtgcaacctgttcggcactgccaatcgcgtggcgatgggcatggggcaggaagacatcagcgcgctgcgcgaagtcggcaaactgctggcgttcctcaaagagccggagccgccgaaaggattccgcgatctgttcgacaaaatgccgaagttcaagcaggtgctgaacatgccgaccaaggtgctgggatccgcgccttgtcaggagcaggtatggcagggcgaggacgtcgatctgggccgtattccggtgatgcactgctggccggaagacgccgcgccgctgatcacctgggggctgacggtgacccgcggcccgcataaggaacggcaaaatctcggcatctatcgccagcaggtgctgggcaagaataaagtgatcatgcgctggctgtcgcatcgcggcggcgcgctggattatcaggagtggtgccaggcgcaccccggcgagcgtttcccggttgcggtggcgctgggtgctgatcccgccactatcctcggtgcggtgacgccggtgccggataccctgtccgaatacgcttttgccgggctgctgcgcggcaataaaaccgaagtggtcaagtgcctttccaacgatctggaagtgcccgccagcgctgaaatcgtgctggaaggctatatcgagccgggtgaaatggcgccggaaggcccctacggcgaccacaccggttactacaatgaaatcgaccagttcccggtgttcaccgtcacccacatcacccagcgccgcaacgcgatctaccactcgacttacaccggccgcccgccggatgagccggcgatcctgggcgtggcattgaatgaagtgttcgtgccgatcctgcaaaagcagttcccggaaatcgtcgatttctatctgccgccggaagggtgctcgtaccgcctggcggtagtgaccatgaagaaacagtacgccggccacgctaaacgcgtgatgatgggcgtctggtcgttcctgcggcagtttatgtacaccaaatttgttatcgtctgcgatgacgacgttaatgcgcgcgactggaacgacgtaatttgggcgatcaccacacgaatggatccggcaagggataccgttctggtggagaatacgccgatcgactatctggacttcgcctcaccggtttccggcctgggttcgaagatggggctggacgccaccaataaatggccgggtgaaaccgatcgcgaatggggccgtccgattcagatggatgaaaaggtacgtgcgcgcgtcgacgaaatctgggatgagctcgcaatcttcagtgacagggaaccgacgctgtag

SEQ ID NO: 426441 - DNA, 726 bp, Serratia marcescens
atggagctgtttctgttgagcaacggcaagctgtctggcgaagccgagctgctggggtatgccaaaagccaactgctggcgatgattgcgcgtcgcggcatcaaatccgccgtctttatcccttacgccctgatccgttatgactacgaccagcgtgcgcaggagctggcgcaaacgctgggcatcgaagtcaccagtatccatcacgcggcttcgccggcggcggcgatcgcgcaggcggagtgcattttggtcagcggcggcaatacctggttgctgaaccaaatgctgcacgagcaaggcctgatcgtgcccatccagcgcgcggtgcgcgagcgtgaagtgccttacgtcggctggagcgccggttgcaacgtggccacgccgagcattcgcaccaccaatgatatgccggtgcgctgcagcgtggtgctgccggcgctggggctgttcccggtgcaaatcaacccgcattacatcgacgcgcatatcagcggccacatgggcgaaacccgtgacgagcgcctggcggagttctgcgcgatcaacccaagtgaatcggtggtggcgctgcgtgaaggcagcctgctgcacgttgaaggcaatgcgctgcgttacttcagcgccaacgggcagggcttcaaggtgttccgccacggcgaggagacgcgcgaatatcaggatacgtgtgcgctggctgcgctggtgccgttcaactgcggctga

SEQ ID NO: 426442 - DNA, 489 bp, Serratia marcescens
atggaatcctggtatctactttattgcaaacgcggtcagctgttgcgggcgcaggaacatctggaacggcagcaggtaaactgcctcagcccgatcatcacgctggaaaagatcgtgcgcggcaagcgtatcgcggtcagcgaacccctgtttcccaactatctgtttgtggagttcgacccggagcgcattcacaccaccaccatcagcgccacccgcggcgtcagccacttcgtgcgcttcggcgcgctgccgagcgtcatcccgaacaaggtgatcgatgagctgcgcacgcatgccagcgaaacctatgtcgatccggaaaccccgcagccgggggataccgtcctgatcgtcgacggcgtgttcgaagggctgcaggcgatctacaccgagccggacggcgaggcccgctccatgttgttgctgaacctgatcaacaaacaggtcagccaaagcatcgacaaccgacagttccagaagatgtaa

SEQ ID NO: 426443 - DNA, 1023 bp, Serratia marcescens
atgagctatgcatttccgggcaccttccctggtcgccgtatgcgccgcgtgcgccgtcatgacttcagccgccgcctggtggccgagaaccaactgacggtcaacgacctgatttatccggtgtttgtcatggaaggcagcaaccgtcaggaagaagtggcctcgatgccgggcgtatcgcgcatgacgatcgatctgctggtcaaggaagcggaaaccatcgccaaactcggcgtgccggtgatctccctgttcccggtgattgagccaggtctgaaatcgctgcatgcggaagaagcctataacccggaagggttggtgcagcgcacggtgcgcgcgctgaaagacgcggtgcctgagctgggcattctgactgacgtagcgctcgatccctacaccacgcacgggcaggatggggtaatcgatgagcagggttatgtgattaacgatgtgaccaaagacatcctggtgcgtcaggcgctttcccatgccgaagcgggcgcggaaatcgtggcgccgagcgacatgatggacggccgcatcggggcgatccgcgatcgtctggaattgcagggtctggtgaatacccagattatggcctactccgccaagtatgcttcctgttactacggcccgttccgcgatgcgctgggttccagcggcaatctgaaggggggcaacaagaagacctatcagatggatccggccaacagcgatgaagcgctgcaggagattgcacaggatctgcaggaaggcgcggatatggtgatggtgaaaccgggcatgccgtacctcgacgttgtgcgccgcgtaaaggataccttcggcgtgccaaccttcgcttatcaggtgtccggcgagtacgccatgcatatggcggcgattcagaacggctggctgcaggagcagcctgcggtgatggagtcgttgatgtgcttcaaacgcgccggcgccgacggcgtgctgacctacttcgccaagcgtgtcgcccagtggctgcacgacgacgcgatgcgtcgctaa

SEQ ID NO: 426444 - DNA, 783 bp, Serratia marcescens
atgtttgatatcggcgttaatctcaccagcagccaattcgccaaagatcgccaggcggtggtggaacgcgcccgcgccgcgggcgtgacggggatgttgattaccggcaccgatctggcggagagccgcgaggccgccgaactggcgcggcaacatgcgggctactgttggtctaccgccggcgtgcatccgcactacgccagcggctgggatgaacacaccgccgagcagatttatgcgttggccgcgcgccctgaagtggcggcgatcggcgaatgcggcctggatttcaaccgcaatttctcgacgcccgcgcagcaggaagcggcgttcaccgcgcagctggcgctggcggcggagttggcgctgccggtgtttcttcattgccgcgacgcacacgcacgttttgccgagctactgacgccgtggttggataaactgcccgcggccgtggtgcactgcttcaccggcaccgccgaagaattaacaagctgcctgtcgctgggcctgtcgatcgggattaccggttgggtctgcgacgagcggcgcggcctggaattgcgcgccctgttgccgcagatcccggccgagcgtctgttgctggaaacggacgccccttatctgttgccccgggatttacagcctaaacccgcatctcgccgcaacgaaccctgtttcctgccccatatcgtgcatcaggtcgccgtctggcgacaggaagagccgcaatggctggggcaaaaaaccgatgagaacgcccgccggctattccggctggtttga

SEQ ID NO: 426445 - DNA, 771 bp, Serratia marcescens
atggctgttgaagatacccaaccccttatcagtcatctgatagagctgcgcaagcggctgttgaactcgattatttgcgtgctggcggtgttcgtggtgctggtgtttttcgccaacgacatctaccagctggtttctgcgccgctgctcaagcagttgccggccggggcgagcatgatcgccaccgacgtggcgtcaccgttctttacgccgatcaagctgaccatgatcgtctcggtgtttgtctccgcgccgatgattctgtatcaggtgtgggcattcatcgcgccggcgctgtacaagcatgaacgccgcctgatgatgccgctgctggtgtccagcagcctgctgttctacctcggcatggccttcgcctacttcatcgtgttcccgctggccttcggcttctttgccaagaccgcgccgatgggggtgaccattgcgaccgacattaaaaactacctcgatttcgtcatggcgctgtttatggcgttcggcgtcgccttcgaagtgccggtcgccatcattctgctgtgctggagtggtgtcacctcgccggaagatctgaagaagaaacggccgtatgtattggtcggcgcgtttgtggtcggcatgctgttgacgccgccggacgtgttctcgcaaaccctgttggcaataccgatgtatctgctgtttgaagtgggggtattcttcgctcgcttctataccggcaagcgtcgtccgcaagcggaagaagaagacgagggtgacgaacccccagcctcatga

SEQ ID NO: 426446 - DNA, 570 bp, Serratia marcescens
gtgtttgacattgggtttagtgagctgctgctggtgctggtgatcggcctgattgttctggggccggaacggttgccggtcgcggtcagaacggtgtcgggctggatccgcgcgctgcgctcgctggcggcctcggtgcagcacgaactgtctcaggaactgaagctgcaggagctgcaggacagcctgaaaaaagccgaacaggccggcctgcagaacctgacgccggaactgaaggcatcgatggatgagctgaaagacgcggcggaatcattgaaacgcacctaccggggcgagacagaagagctggcgaacaccattcataacccgcagatcaccgatccggaagctttgcacgacggcgtgacgccggcggaagcggcaacccgcgccagcgcgcccgccgccgtgccaaaaccggcagcggaacctgaggccgttgcggctgcatccccggctgcgcccgtggcggcgcaaccggctaaagcactggtggaaaccgcgccggcacctgtcgaacctgttgcggataaaaccccagcgtctcaccaacctagtggcgatcgttaa

SEQ ID NO: 426447 - DNA, 264 bp, Serratia marcescens
atgggcggtattagtattacgcaattgttgatcatcgcagtgatcgtggtgctgctgttcggcaccaaaaaactgcgcacgctgggctccgatctcggcgcctcgatcaagggcttcaaaaaggcgatcggcgacgatacgccgtcgaaccccaacacggctgaaaaaagcagcctggatgacgctgacttcgcggccaagcctattaccgataagcagccggaagtgaaaccggaagagtcgaagaacaaagagcaggtataa

SEQ ID NO: 426448 - DNA, 1632 bp, Serratia marcescens
atgaccccaggcgaactgcgccgtttgtattttatcgtccgcgtttttctcagctatgggctggacgaactgatccctaaaatgcgtttgacgctgccgctgcgctttggccgccgtctgctgttctggatgccgaatcggcacaaggacaagccgctgggcgaacggctgcggctggcgctgcaggagctggggccggtatggatcaagttcggccagatgatgtcgacccgccgcgatctgtttccgccgcacattgccgatcagctgacgttgctgcaggatcgggtggcgcctttcgacggcgcgctggcgcgtaaacatatcgagctggcgatgggtggcccactggaaacctggttcgacgatttcgatcagcagccgttggcctctgcctcgatcgcgcaggtgcataccgcgcggttgaaaaccaccggccaggaagtggtgctgaaggtgatccggccggatatcgggccgatcatcaaggccgacgtgcggctgatgtaccggttggccggctgggtgccgaagctgttgccggacggccgccgtctgcgcccgcgtgaagtggtgcgcgagtacgagaaaaccctgctggacgaattgaacctgctgcgcgaagcggccaacgccattcagctgcgccgcaatttcgacggcagcccgatgctgtacgtaccggaagtttattccgactactgccgtgaaagcgtattggtgatggaacgcatctacggcattccggtctcggacatcgccacgcttgaacggcagggcaccaacatgaaactgttggcggaacgcggcgtccaggtgttctttacccaggtattccgcgacagcttcttccatgcggacatgcatcccggtaatattttcgtcagctacgaacatcctgaagatccttgctatatcggcatcgactgcggcatcgtcggctcgctgaacaaggatgacaagcgctatctggcggaaaacttcatcgccttcttcaaccgcgattaccgcaaggtggcggaactgcacgtcgactccggttgggtgccgcgcgacaccaacgtggaagacttcgaattcgccattcgcaccgtgtgcgagccgattttcgagaagccgctggcggaaatttccttcggcaacgtgctgctgaacctgttcaacactgcgcgccgcttcaatatggaagtgcagccgcagctggtgttattgcagaagaccttgctgtatgttgaagggctggggcgccagctctacccgcagctggatctgtggactaccgccaagccgttcctcgagagctggctgcgcgatcaggtcggcattcctgccgtggtgcgcgcgctgaaagagaaagcgccgttctgggcggagaagctgcccgaactgcccgagctgttttacgacagcctgcagcagcataaactgttgcaacaaagcgttgataagctgaccaaccaaatgcaggctcagcgggttcgtcaggggcagtcacgttatttgttcggcgttggcgctacactgttagtaagcggtacgctgttgctgctggggcaaatcgaggtgtttcccgcctggatgatggccgccggcatcgtatgctgggtgattggctggaagcgaaccacctga

SEQ ID NO: 426449 - DNA, 609 bp, Serratia marcescens
atgctgtttacccctctgctgaccgctgcgctggaaacctcgctgaataacctgctgtttcgcgatcgcagcatgaaagccgctcgccaacgcctggcgggcaaggtgctgcgcatcgaactggaagagctggcttcaccgctggtgctggtgttcagcgaactgcgcgtagacgtgcttgggcagtccgaagacagcgccgattgcacggtgcgcagccgcattcccgtcttactgaagctgcgcgatcgccagcagttgccggtgctgatgcgcagcggcgaattgacggtggaaggcgatattcaggtggtgcaacagctggttggcctgctcgatctggcggagtgggatccggcggagtggctggcgccttacatcggcgatatcgccgcccagggcattacgcaggcgctgggaaaaggcgcctcgctgctgaaagccggctttatgcgccggcagcaggacatggcggagacgttgacggaagagtggcgcctggcgccggggccactggaagtggtgtggttcaacgaagaagttgatgctctcgcccgcagcgcggaagcgctgtttgcccgcatggacaagttggagggcaagcgatga

SEQ ID NO: 426450 - DNA, 756 bp, Serratia marcescens
atggcagatcaaccgcaggaaaccaccgatttcggttttcgcaccgtcgctagagacgaaaaacaggccatggtggcggacgtttttcattcggtagcggcaaagtatgacgtgatgaacgacctgatgtcgttcggcatccaccgtatctggaagcgtttcaccattgactgcagcggcgtgcgccgcgggcagcgcgtgctggatctggccggcggtaccggcgacctggccgccaagttctcccgcatggtcggcgagcaggggcaggtggtgctggcggacatcaacgattcgatgctgaagatggggcgcgagaagctgcgcgatcgcggcatcgtcggcaacatcaattacgtgcaggccaacgccgaagcgctgccgttcccggacaattacttcgattgcatcaccatctccttcggcctgcgcaatgtcaccgacaaagacaaagcgctgcgctcgatgttccgcgtgctcaagccgggcggccgcctgctggtgctggagttctccaagccgctgctggcgccgctgagcaaggcttacgatgcctactccttccacgtgctgccgaagatcggcgagctggtggtgaaagatccggacagctaccgctacctggcggaatcgatccgcatgcaccccgatcaggaaaccctgaagggcatgatgggcaacgccggttttgaaaacgtcacctatttcaacctgaccggtgggattgtcgccctgcatcgcggcttcaagttctga

SEQ ID NO: 426451 - DNA, 1548 bp, Serratia marcescens
gtggataccagtctgatttatgggattggcggtgtcgcgatcggcatgctgttggggtggctgatcgccagtctgcgggtgcagcaggcgaatgcgcaacatgaaaccgaactgcggttgctggagcaagcgttgcagcaggcgcagcaggaaacggcggcgcggcaagaggctctgcagcgccacgagcagcagctgcggcagagcgagctggagctacgcaacctgcacagccagttggcggccgggcatgaaaagctgcaacagctcaaccattggcgcaacgaatgtgaactgcttaatcaggagctgcgcgcccagcgcgaggtcaacagcgcgcaggaggccgagctgcgcgaagtcaccatccgtctggaagagacgcgcatggcggcggaagagaagcagcgcctgcttatcaacagcgaacagcgcctcaccacccagtttgaaaacctcgccaaccgcatttttgaacacagcggccgcaaggtggacgagcaaaataagcaaagcttggatcggttgctgctgccgctgcgtgaacagctggacggtttccgccggcaggtgcaggacagttttggtcaggaagcgcgggagcgccacacgctgacgcacgagatacgcaatctgcagcagttgaacgcgcagatggcgcgcgaagccatcaacctcaccaaggcgctcaaaggcgacaacaagacgcagggcaactggggcgaggtggtgctgagccgggtgttggaggcttccgggctgcgcgaagggcacgagtatgaaacgcaggtcaacgtgcgggtggatcaccagagccgcatgcagcccgatgtgatcgtgcgcctgccgcagggcaaggacgtggtgatcgacgccaagatgtcgctgattgcctacgagcgctatttcaacggtgaagacgaggtggagcgcgaagcggcgctgagcgaacatatcgcctcgctgcgcggccacattcgcatgctgggccgcaaggactatcagcagctgccggggctgcgctcgttggactatgtgctgatgttcattccggtcgagcccgccttcttgctggctatcgatcgcgaaccggagctgatcagcgaagcgctcaagcacaacatcatgctggtcagcccgaccacgttgctggtggcgctgcgcaccatcaccaacctgtggcgctatgagcatcaaagccagaacgcgcagcgcatcgccgatcgcgcggcgaaactgtatgacaagatgcggctgttcgtggacgatatgtccgcgctggggcagagcctggacaaggcgcagggcagttatcgtcaggcgatgaacaaactgagcgaaggccgtggtaatcttatcggccaaattgaaggtttccgcgcgctgggggttgaggtcaaacgtccgataaacccgctgctggcgcagcaagccggcgcgcaacacgatgaagcggaagaggcgaacgacgacgatgtcgccgcgctgccgcagacgaaagacgatgacgataccaccggggaaccgggcttcgtttcgcacggctga

SEQ ID NO: 426452 - DNA, 531 bp, Serratia marcescens
ttgagcctcaatgacgttatcaactgggtcagcgacgtcgtgcgtcagcacgaaggctgggccattcccatcatcttcttcctggcgttcggtgagtcgctggcgtttttgtcgctgctgctgccggccacggtgatcctgctggcgctgggcgcgctgatcggcgaaagcggcatcgccttttggccgatttgggccgccgccgccgtcggggcgtttttcggcgactggctctcttactggatcggctatcactatcaggatcgcgtggcccatatgtggccgctgtcgcgcaatccgcagctgctggtgcgcggccacgcattctttgaacgctggggcgtgctgggcattttcatcggccgcttcttcggcccgctgcgcgccgtggtgccgctggtgggcggcatttgcggcatgccgcagcgttatttccagttagccaacgtcacgtcggcgatgatctgggcgttcggcattctggcgccgggggcattcggcatcaagtggctcagccagtggctgggctga

SEQ ID NO: 426453 - DNA, 783 bp, Serratia marcescens
atgaccgcccagatcctgcttcatccttcgctcgcgccgctcgacggcggcatcaatttccgcgacttcggcggcaacggcgtggccgacgggcgccgcatcaagcgcggcctgctgttccgctccggttccctcgagcggctgacggaaaacgactgcgcctttctcgccggcgtgccggtgcgctcggtgctggactatcgcgatgccgacgaggtgcaggccaagccggatattttgtggagtggcgccgattatcaccacgtgccggccaacccgctgagcagcgaagtcaacgccaacctggagaagctcaccaacgaaacgctggccgccttcgacgcccgcgcgttcatgctggagctgtatcgccgcctgccgttcggcaatgcggcctatcagcggctggcgcagctgttgagcaatcctggcggcggcgccatcgtgcagcactgcgcggtcggcaaggatcgcaccggggtcggttcggcactggtgctgttcgcgctgggggccgacgaagcgacggtgctggaagactatctgctgaccgaaaccacgctggccactttccgcgagcagatgctggatcagctttctatcaagctgaatacggcggcgctggaacaattcgcctacgtgctcagcgcgcgcgaggagttcctgatgacggcgttgggctgcatccgtcagcaatacggttccaccgaccgctggctggaagcggaatacggcctgggcgcggcccagcgcgaagcgctgcaggcgttctacctcgagtaa

SEQ ID NO: 426454 - DNA, 762 bp, Serratia marcescens
atgtctcagtctgacgtttttcatctcggcctcaccaagaacgatttacaaggggcccagcttgccatcgtgccgggcgatccgcagcgcgtagagaagattgccaagctgatggaaaatccggtgcatctggcctcccatcgtgaattcactacctggcgcgcggagctggacggcaaggcggtgatcgtctgctctaccggtatcggcggcccgtctacctctatcgcggtggaagagctggcgcagctgggcattcgcaccttcctgcgcatcggcaccaccggcgccattcaggcaaacatcaacgtcggtgacgtgctggtcaccacggcggcggtacgcctcgacggcgccagcctgcacttcgcgccgatggagttcccggcggttgcggacttcgcctgcaccaccgcgctggtggaagcggccaaggccagcggcgccaccacgcacatcggcgtgaccgcctcttccgataccttctatccgggccaggagcgttacgacacttactccggccgtgtggtcagccgcttcaaaggctcgatggaagaatggcaggcgatgggcgtgatgaactatgaaatggaatccgccacgctgctgaccatgtgcgctagccagggcctgcgcgccggcatggtggccggggtgatcgtcaaccgcacccagcaagagatcccgaacgccgagaccatgaaaaacaccgaaagcaaagcggtgcagatcgtggtggacgccgctcgccgcctgctgtaa

SEQ ID NO: 426455 - DNA, 828 bp, Serratia marcescens
atgaaaaccgaacatgtgatgacattagaacaggctcaggggggattcgccccggccgccgcgccgttggccgcctccgcgattatcaccgacgaacagggcattcacgccgggcaaacgaccattccttctcagggcgacgcgctgccggcctacgtcgccaaacccgccgaccagagcggccctttccccatcgtcctcgtggtgcaggaaatcttcggcgtccatgaacatattcaggatctgtgccgccgcctggccaagcagggctatctggcgatcgcgcccgagctctatttccgccagggcgacgccaacgactacaccgatatcggcgagctgttccagcagttggtgaccaaggtgccggatcgtcaggtgctgtcggatctggatcacgccgcgcactgggctattcgccacggcggcgacgccggcaagctggcgatcaccggtttttgctggggcggccgcatcacctggctgtacgcggcgcataacccgcagttgaaggcggcggtcgcctggtacggcaaactggtcggcgagaaaacgctgaactcgccgaagcatccggtcgatgtcgccacccacctgtcggcgccggtgctggggctgtatggcgggcaggacagcggcatcccgctggagacggtggaaaccatgcgtcaggcgatccgcgccgccaacgccgaggccgaaatcgtggtgtatcccgaggtcgggcatgcgttcaacgccgattatcgtcccagctacaacgccgaagcggcggaggacggctggcagcgcatgctggcgtggttcgcccagcacggcgtcaaataa

SEQ ID NO: 426456 - DNA, 2289 bp, Serratia marcescens
atggggaatatgacgatggcaattttgaatcacacactgggttttcctcgcgttgggctacgacgtgagctgaaaaaagctcaggaaagctactgggccggcaactcaacgcaggaagagctgttggcggttggccgcgagctgcgcgctcgtcattggcagcagcaacagcaggccggggtggatttggtgccggtcggcgatttcgcctggtacgatcatgtgttgaccaccagcctgctgctgggcaacgtgccggcgcgccatcagaatgcggatggcacgatcgatctggacacgctgtttcgcatcggccgtggccgcgcaccgaccggcgagccggcggccgcggcggaaatgaccaaatggttcaacaccaactatcactacatggtgcccgaattccagcaaggccagcagttcaagctgggctggactcagttgctggacgaagtggacgaagcgctggcgctcggccatcgcatcaagccggtgctgctgggcccggtgacttatctgtggctgggtaaggtgaagggcgaggcgttcgaccgcctgtcgctgctgaaagacatcctgccggtttaccaacaggtgctggccgagctggcgaaacgcggcgtcgagtgggtgcaaattgatgagcctgcgctggtgctggaactgccgcaagcctgtctggatgcgttcaaaccggcttacgacgcgctgcaggggcaggtgaagctgctgctgaccacgtatttcgacagtgtcggccacaacctcgataccgtccgcacgctgccggtgcaggggctgcatgtcgatctggtcgccggccatgacgatatcgccgcgctgagcgccgcattgccgcaagactggctgctgtcgctgggggtaatcaacggccgcaacgtctggcgcgccgatctgagccgctggttcgaacgtctgcagccgctggtgggcagccgtccgctgtggatcggcagctcctgttcactgctgcacagcccgatcgatctgagcgtggaaagccgtctggacgaagaagtgaaaagctggttcgccttcgccctgcaaaaatgcgccgagctggcgctgttgagctcggcgctgaacgcgcctgacgcgacgaaacgggccgaactggacgcctacagcgcgccgatccgcgcccgctgtcagtcgagccgcgtgcacaacccacaggttgagcgccgcctggcggcgatcaccgcgcaggacagcgaacgccacagcgcttacgccgagcgcgccagggcgcagcgcgaacgtttcaacctgccggcttggccgaccaccaccatcggttcgttcccgcagaccaccgagatccgcggcctgcgtctggacttcaaacagggccgtttggacggcaacaactaccgcaccagcatcggtgagcacatcaaacaggcgatcgtcgagcaggagcgtctcgggctggacgtgctggtgcacggtgaagccgagcgcaacgacatggtggaatatttcggcgagaacctggacggcttcgtgtttacccaaaacggctgggtgcagagctacggctcccgctgcgtgaagccgccggtgatcatcggtgacgtcagccgcccggaagccatcaccgtcgaatgggccaaattcgcccagtcgctgaccgacaagccggtgaaaggcatgttgaccgggccggtgaccatcctgtgctggtcgttcccgcgtgaagacgtgacccgcgaagtgattgccaagcagattgcgctggcgctgcgcgatgaggtggaagatctggaaaaagccggcatcggcatcatccagatcgacgaacccgcgctgcgcgaagggctgccgctgcgccaatccgactgggcggcgtatctgaactgggcggtggacgccttcaaactgaacgccgccgtggcgcgggacgacacccagatccacacccacatgtgttactgcgagttcaacgacatcatggactccatcgccgcgctggacgccgacgtgatcaccatcgagacctcgcgttccgatatggatctgctggaagccttcaaagagttcgaatacccgaacgaaatcgggccgggcgtctacgatatccactcgccaaacgtgccgagcgtggaatggattgaagcgctgctgcgtaaagcggcgcagaacatcccggcggaacgcctgtgggttaacccggattgcggcctgaaaacccgcggctggccggaaacccggcagtcgctggccaacatggtattggcggcacagcgcctgcgcgagcaagcgtga

SEQ ID NO: 426457 - DNA, 945 bp, Serratia marcescens
atgatcgaactgaaacatttacggacgctgcaggccctgcgcaacagcggttcgttggcgggggcggcggcccaacttcatcagacgcagtctgccctgtcgcaccagttcagcgatcttgagcaacgtctgggcttcaagctgttcgtgcgcaagagccagccgctgcgcttcaccgcccagggcgagatcctgctgcagctggcggaacaggtgctgccgcagatccaacaggcgctgcaggcctgccacgaaccgcaccagaccacgctgcgcatcgccatcgaatgccacagctgcattcagtggctgacgccggcgctggacaacttccgccggcgtttcccgcaggtggtgatggactttacttccggcgtgactttcgatccgcagccggccttgcaacagggcgagctggatctggtcatgacgtcggatattctgccgcgcagcggcctgcactattcaccgatgtttgatttcgaggtacgcctggtgctggcgccggatcatccgctggccggcaagccgcacatcgagccggaagacttgagtgacgaaacgctgttgatttacccggtgcagcgccagcggctggatatctggcggcattttctgcagccggcgggcgttagcccggcgttgaagaacgtcgataacacgctgctgctgatccagatggtatcggcgcggatggggattgcggcgctgccgcactgggtggtggaaagtttcgaacaacaggggctgatagtgaccaaaaccctgggtgacggcctgtggagccgcttgtacgccgccgtgcgcgacggcgaacagcgccaggcggtaaccgaagcctttatccgctcggcccgccagcacgcctgcgatcatctgccgtttgtgcgcgacgcggcacgccctggcgctgccggcgccaaagcgttgacggccgacgtataa

SEQ ID NO: 426458 - DNA, 861 bp, Serratia marcescens
gtgctgcttttggttataaccaccatcctgtgggcgttttctttcagcctgattggcgagtacctggcgggccaggtcgacagcgggttctcggcgctggtgcgcatcgggctggcggcgttggtgttcctgccgtttctgcgctggcgcaatatcaagcccagggtgatcctgctgtatatgctggtgggcgccttccaactgggcatcatgtacctgttcagcttccgcgcctatctctacctgacggtgccggaattcctgctgttcaccgtgctgacgccgctgtacatcaccttgatctacgatttgctgagcggccggcgtctgcggtggggctacgtattcagcgcgctgctggcggtgctgggcgcggtgattatccgctatcaccagctgagcgaacacttttggtgggggctgctgttggtgcaggcggcgaatatcagcttcgccatcggcatggtcggctataagcgcctgatggaagtgcaccccttgccgcagcacaccgccttttcctggttctacctgggggcggcggtggtggcggtggtggcctggttcctgtggggcaatccgcagcagctgccgaccaccaatctgcagtggggcgtgttgatctggctgggcgtggtggcgtcggggctgggctactttatgtggaactatggtgcgacgcaggtggatgccggcacgctcggcatcatgaacaacatgcatgtgccggccggtttgttggtcaacctggccatctggcaacagcagccgcattggccgagctttatcatcggcggggcggtgatcgtcgcttcgctgtgggtgcatcgccgctgggtggcgccgaaacggctcggctaa

SEQ ID NO: 426459 - DNA, 330 bp, Serratia marcescens
atgaaaacttctcacatcctgtttgttctgctgtggctgcccggcctggctgcggcagccaacggcgtaaccgacctgcgctcacagcagcagttgctcaaccaaaacagccaacaggctcagcaacagcgcctgttgaacaatcggcagatggatcaacgccgcctgcagcagcaacggcagttcgacaatcaacggcagcagctgttgcaaacctcgccgaacggcgggcagctgctgcccaacggcaaccagccgcgcgatccgttcaatcgcaccgcgccggcggtgccgcaggcgccgatgccggctacgcccgcacgcccataa

SEQ ID NO: 426460 - DNA, 957 bp, Serratia marcescens
atgcctggctttatgatgtcactgtggcaccagatcgtgctgtctttaccgctgtttgtgctgatcgcgttgggttatgggctgattcgctgggggaaatggcctgccggcatcaccgatggcctgacgcgcttcgtgttttccctcgccttgcccgccatgctgtttcgcatgatgtgcgacttctcgcagcgcccggcggtcgatgcccggctgctgatcgcgtttttcggcagttgcctgatcgtattcgtgctcggccgtctcgtcgcccggcgcctctttcggctggatggcgtcgccggatcggtgtttgcgctgggcggcattttctccaataacgtgatgctcggcttgccgatcgccagcgtgatgctgggggaggcggcgatcccgtcggtggcgctggtgctggtgttcaacggcctgatcctgtggacgctggtgacggtgtcgatcgaatgggcgcgcaacggttcgccgacgctgagcggtttcgttaaaaccgcgcgcagcgtgctgaccaatccgctgatcgtcggcattctgtccggcaccctgttcagcctgaccggcctgccgctgccggccttcgtcgatcggccgatcagcatgctcggccaggtggcggcgccgctgtcgctggtggtgctcggcatggggctggcggagtaccgcatcggcgaaggctggcggctgagctgcgccatctgcgtgctgaaattgctggtgcagccattagtgatttggctgctggcctggatgatggatctgccgccgatggagacccgggttgtggtgctgctggggtcgatggcggtgggggtgaacgtctacctgatgtcgcgccagttcaatacgctcaccggcccggccgccaccagcctggtgatgtccaccgtgctggcggcgatcactacgccgctgatcctcaccgttatgggcgtgcgggcgtag

SEQ ID NO: 426461 - DNA, 738 bp, Serratia marcescens
atgaccagacactggccttaccctcatattgtcgcccaccgcggcggcggttctctggcgccggaaaacaccctggcggcgatcgacgtcggcgcgcgccacggccacaagatgatcgagttcgatgccaagctggcgcaggacgggcaaattttcctgctgcacgacgacacgctggatcgcaccagcaacggctggggcgtggcgggcgagctgccgtgggacaaactggtgcagctggacgccggcaactggtacagctcggccttcaagggcgagcggctgccgctgctgtcggaggtggcagaacgctgccaggaacacggtctgatggccaatatcgagatcaagccgaccaccggcagcgacgatgaaaccggccgggtggtggcgctggcggcgcggctgctgtggcaagggcagaccgatccgctgctttcttccttctcggtggacgcgctggcggcggcgcagcgcaccgtgccggatttgccgcgcggcctgctgctggaggactgggacgacaactggcgcgagctgaccgaacgcctggattgcgtctcgctgcatatcgatcacaaagcgctgaccgccgagcgggtaaaagcgttgaaagacgccgggctgcgcattctggtgtataccgtcaaccaaccggatcgcgcgcgcctgctgctcgactggggcgttgactgcatttgcaccgaccggatagatttgatcggcccggatttttaa

SEQ ID NO: 426462 - DNA, 1071 bp, Serratia marcescens
atggcaggattaaaactacaggcggtcaccaagtcttacgacggtaaaacgccggtgatcaaacagatcgacctcgacgtggtggacggcgaattcatcgtgatggtcggcccgtccggctgcggcaaatccacgctgctgcggatggtggccgggctggaacgcaccaccagtggtgatatctatatcgatacccggcgcgtgaccgatctggagcccaaggatcgcggcatcgcgatggtgttccagaactacgcgctctatccgcacatgagcgtgtacgacaacatggcctacggcctcaagatccgcggtttcggcaaggatcatatccgccagcgggtggaagaagcggcacgcatcctggagctggagccgctgctcaaacgcaaaccgcgcgagctttccggcggccagcgccagcgcgtggcgatggggcgcgccatcgtgcgcgaaccggcggtattcctgttcgatgagccgctgtccaacctggacgccaagctacgggtgcagatgcgcctggagctgcaacagctgcatcgtcgtctgaaaaccaccagcctgtacgtgacccacgatcaggtggaggcgatgaccttggcgcagcgggtcatcgtgatgaacaagggcgtggcggagcagatcggcaccccgagcgaagtgtaccaacggccggcttcgctgttcgtcgccggctttatcggatcgccggcgatgaacctgctgccaggcaccctgagcgccgacggcggccagctgctgctggcggacggcatggcgctgccgttgccggtggccaaaccgcagtgggcggggcggccgttgacgttgggcattcggccggagcatattcagttggtggcgcaagaccagggcgtgccgctgcagctgcagacgctggagctgctgggggccgataatctggcgcacggccagtggggcggccacggggtgatcgtgcggctatcgcatgaaaccttgccggcggcgggcagtacgctatatttgcagctgcctgctcaggcgctgcacttctttgacaccgacagcggattacggatggattga

SEQ ID NO: 426463 - DNA, 846 bp, Serratia marcescens
atgattgagaatcgacgcgggctggatatcttcagccatgtgatgctgattatcggcgtgctggtggtgctgttcccgctgtacgtggcctttgtcgccgccacgctggacgacaagcaggtgtttcaggtgccgatgacgctggtgcccggcggccacctgtgggagaacatccgcaatatctggcagggcggcgtgggcaacctcaaggtgccgttctcgctgctgctgctgaacagcgtgatcatggcgctggcgatcaccttcggcaagatcgcggtgtcggtgctgtcggcttacgccatcgtgtacttccgctttccgctgcgcagcctgttcttctggctgattttcctcaccctgatgctgccggtggaggtgcgtatcttcccgacggtggaggtgatctccaacctcaacctgctggacagctacaccggcctgacgctgccgctgatggcctcggccaccgcgaccttcctgctgcgccagttcttcatgacgctgccggatgagctgctggaggcggcgcgcatcgacggcgccgggccgatgcgtttcttctgggacatcgtgctgccgctgtcgaaaaccaatctggcggcgctgttcgtcatcacctttatctacggctggaaccaatacctgtggccgatcctgatcaccagcgacgcctcgatgggcaccgcggtggcgggcatcaagagcatgatctccacttccggcgcgccgacccagtggaaccaggtgatggcggcgatgatcctgactttattgccaccgctggcggtggtgcttctgatgcagcgctggtttgtgcgcggtctggttgatagcgagaaataa

SEQ ID NO: 426464 - DNA, 888 bp, Serratia marcescens
atgtcatcttcccgtcccggtttcggctgcagctggttgccctatgcgttggtgctgccgcagctgctgattaccgccgtcttctttttatggcccgccggcgaggcgctgtggtattcggtgcagagcctcgatccgttcggcctgtccagccagtttgtcgggctggataactttaagcagctgtttcaggatccttactatctcgactcgttctacaccacgctgatcttcagcttcctggtggcgggcatcgggctggcggtttcgctgttcttcgccgcgctggtggactacgtgctgcgcggcagccgcctctatcgcacgctgatgatcctgccctatgcggtggcgccggcggtggcggcggtattgtggatctttctgttcaaccccggcctggggttgatcacccatttcctcaacgggctgggctataactggaaccatgcgcaaaacagcgggcaggcgatgttcctggtggtgctggcctcggtatggcagcagataagctataacttcctgtttttcctcgcggcgctgcagtcgatcccgcgctcgctggtggaggcggcggccattgacggcgccggcccggtgcggcgtttcttccatctggtgctgccgctgatcgcgccggtgagcttcttcctgctggtggtcaatctggtgtacgccttcttcgataccttcccggtgatcgacgccgccacaggcggcgggccggtgcagtccaccaccacgttgatctacaagatctaccgcgaaggcttcgccggattggatctctccagctccgccgcgcagtcggtgatcctgatgctgctggtgatcggcctgacggtgatccagttccgcttcgttgaacgtaaggtgcgctatcaatga

SEQ ID NO: 426465 - DNA, 1320 bp, Serratia marcescens
atgctcacctacgctattcgcaaaaccacgctgtgcgtcgcgttgaccctggcggtcagcactcaggcgctggcggcgaccgagatcccgttctggcattcgatggaaggcgaactgggtaaggaagtggactccctggcggatcgcttcaaccagtcgcacagcgacgtcaagattgtgccggtttacaaaggcaactacgaacagagcctggcggcgggcatcgccgcttaccgctccggcaaggcgccggcgatcctgcaggtttacgaggtgggcaccgccaccatgatggccagcaaggccatcaaaccggtctacgaagtgtttaaagaggccggcatcaacttcgacgagtcggtgttcgtgccgacagtagccggctattacaccgacaacaagagcggccatctgctgtcgcagccgttcaacagttccacgccggtgctgtactacaacaaagacgccttcaagaaggccggcctgaacccggaccagccgccgaaaacctggcaggagctggcagcggataccgccaaactgcgtgaggccggcatgaagtgcggctacgccagcggctggcagggctggatccagctggagaacttcagcgcctggcacggcgtgccgttcgccagcgaaaacaacggtttcggcggcaccaacgccaagctggagttcaacaagccgctgcaggtcaagcatatcgcgctgctcgaagcgatgaacaagaagggcgatttcacctacttcggccgcaaagacgaatccaccgagaagttttataacggcgactgcgccatcaccaccgcgtcatccggttcgctggcggacattaagcactacgccaaattcaactacggcgtcggcatgatgccgtacgacgccgacgcgaaaaacgcgccgcagaacgccatcatcggcggggccagcctgtgggtgatgaacggcaaagacgccgccacctacaagggcgtggccgagttcctgcagtacctggcgcagccggaaatcgccgccgaatggcaccagaagaccggctatctgccgatcaccaccgcggcttacgatctgaccaagcagcagggcttctacgacaagaacccgggtgccgacgtcgccactcgccagatgctgaacaagccgccgttgccgttcaccaagggcctgcgcctcggcaacatgccgcagatccgcagcgtggtggatgaggagctggaaggcgtatggaccggcaagaaaacgcctcagcaggcgttggacgccgccgtgcagcgcggtgatgtattgctgcgccgtttcgaagcatcgaccaagtaa

SEQ ID NO: 426466 - DNA, 1188 bp, Serratia marcescens
atgaagacagaagggttactcgcgcagcgcatcgttaacgtaaaaagttcggccatccgtgaattgcttaaacacagcaagatggaacacgtcatttcgctggcgggcggcatcccctctgatgcgctgttcgatttcgaaggattgagcatcgccacccagcaggcgatcaccgaacagccgaaaagcgcgttccagtatggcttgaccgagggcagcccgctgctgcgtgagcgcatttgcgcgctgtgcgccgagcgcggcgtcaccgcgcgcgcggaagaggtgatggtcaccgccggctcgcagcaggcattggatttggtgatgcgcgccatcgtcaaccccggcgacgtgttcgtggtggagcgcccgacctacctggcggcgctgcaaacgctggagctggcggaagccaacatcatgtcggtctcgtcagacagcgacggtatggtggtggaagagctggccgagctgctgaaaacccagcgcatcaagggcgtgtacgtggtgccgaacttcggcaaccccagcggcatcaccctgagcgccgcgcgccgcgaactgctggtgaagctggccgccgaacataacttcctgatcatcgaagacgatccgtacggcgagctgcgtttcaccgaagagcgccacccgacgctgcatcaggtgtcgcagcgggtgctgggcaacaccgaccacatcatctatacctcgaccttctccaagatcctggcgccgggcctgcggttgggctgggcgattctgccgccgttcctgctgcataaagtggcgatcatcaaacaggcggcggatctgcacgccagcgcgctgtcgcagagcatcgtcgaatgctacctcggcctggatcgcctgccggcgcagatcgacaagatccgcaccgcctacaagcaaaagggcgagatcctggccggtttggtggagcaggagctgggcgactacatcaccttcgataagccgaagggcggcatgttcctgtgggcgcgtttccgccagccgttcaacgccaccgaatggctgaataccacgctgcagcagggcgtggtgttcgtgccgggggaatacttcttctccgacaacccggatcgttcgaccttccgcctgtcgttcgccaccgccaccgagcaacaaatgcaggaagcggtggcgcgcctgcgccgttcgctgtaa

SEQ ID NO: 426467 - DNA, 702 bp, Serratia marcescens
atgctgtcattcaatcaggtatccgcccattacggcaaaattcaggcgctgcatcaggtcagcctcacgataagccagggtgaaattgtgacgttaatcggcgccaacggcgccggtaaaaccacgctgctcggcactctgtgcggtgagccgcgcgccagcgaaggcagcatcgtctttcaggatcaggacatcacccagtggcaaacctcgcgcatcatgcgcgaagcggtggcgatcgtgccggaagggcggcgcgtcttctcgcgcatgacggtggaagaaaacctggcgatgggcggcttcttcgccgatcgccggcagtatcaacagcgcatcgaacgggtgttcactctgttcccgcgcctgctggagcgccgaaaccagcgcgccggcaccatgtccggcggcgaacagcagatgttggccatcggccgcgcgctgatgagccagccgaagctgctgctgctcgacgagccctcgctcgggctggcgccgatcatcatccagcagatcttcgacatcattcagcagctgcgggaagagggcatgaccatcttcctggtggagcaaaacgccaatcaggcgctgaaattggcggaccgcggttatgtgctggaaaacggccgcgtggtgttggaagatacgggggctgcattgttagccaacgaagcagtgaggtcggcgtatctgggcggttaa

SEQ ID NO: 426468 - DNA, 771 bp, Serratia marcescens
atgagcgttcaacctttactgcaggtggaaggcctgtcgatgcgtttcggcgggctgctggcggtcaacaacgtggcgttgacgctgaacgaaggcgaaatcgtgtcgctgatcggccccaacggcgccggtaagaccacggtgttcaactgcctgaccggtttttaccgcccgaccggcggcaccatcaaattgcgcgatcgccacctggaagggctggcggggcaggccatcgcccgcatgggcgtggtgcgcaccttccagcacgtgcggctgttccgtgaaatgacggtgatcgagaacctgcaggtggcgcagcatcagcacctgaaaagcggcgtgtttgccgggctgctgaaaaccccggccttccgccgcgccgaagccgaggcgctgacgcacgcggcggagtggctggagcgcgtcggcctgctggagatggccaaccgttcggcgggcaacctggcctacgggcagcagcggcggctggagatcgcccgctgcatggtgacccggccggagctgctgatgctggatgaaccggctgccggcctcaacccgaaagagaccgacgagctggatcacctgatcgtcgagctgcgcgatcggcataaggtatcggtgctgctgatcgagcacgacatgaagctggtgatgggcatctccgaccgcatttatgtggtgaatcagggcacgccgctggcgcagggcacaccggcggagatccgcaacaacccggacgtgatccgggcttatttgggcgaagaataa

SEQ ID NO: 426469 - DNA, 1284 bp, Serratia marcescens
atgaaactcaatctgctcaatgcgctgatcgccacggcggtgctgttcgtgatggcgtcgttcctgatgggcatgcagcttagcctggacggcaccaagctggtggtgcacggcgcggcggaagtgcgctggatgtggatcggcatcggctgcgtcatcgtctttttcttccagctgttgcgcccgctgctgcagcagggattgaaaaaagtctccggcccggcgttcgtgctgccgagcttcgacggcaccacgccgcggcaaaagctgctggcggctctgctcatcgtcgcggcggtcgcctggccgttcctggtatcgcgcggcacggtggatatcgccaccctgacgctgatctacgtgatgctgggcctcggcctcaacgtggtggtgggcttgtccggcttgctggtgctcggctacggtggtttctacgccatcggcgcttacacctacgcgctgctgaatcactattacggcctcggcttctgggagagcctgccgctggcgggcatcgtcaccgccgccttcggcttcctgctcggtttcccggtgctgcggctgcgcggcgactatctggcgatcgtgacgctcggcttcggtgagatcgtgcgcatcctgctactgaacaataccgagatcaccggcgggccgaacggcatcagccagatcccgaaaccgacctttttcggcctggagttcaaccgcagcgtgcgcgacggcggttgggataccttccataacttcttcggcctgaaatacgatccgagcgatcgcatcatattcctgtatctggtggcgctgctgctggtggtgcttacgctgttcgtcatcaaccgcctgctgcgcatgccgctcgggcgcgcatgggaagcgctgcgcgaagacgagatcgcctgccgctctctgggtctcagcccgacgcgcatcaagctgaccgcctttaccatcagcgccgctttcgccgggtttgccggcacgctgttcgccgcgcgccagggcttcgtcagcccggaatccttcaccttcgtcgaatcggccttcgtgttggcgatcgtcgtactggggggcatgggctcgcagttcgcggtcattctggcggcgatcctgctggtggtgtcgcgcgaactgatgcgcgatctgaatgaatacagcatgttgctgctgggtgcgctgatggtgttgatgatgatttggcggccgcaggggctgctgccgatgaaacggccgcagctgaagctgcaggcggcggacattcacgcgggcaagggggagcaggcatga

SEQ ID NO: 426470 - DNA, 927 bp, Serratia marcescens
atgtcagagcagctcctctattttctgcagcagatgttcaacggcttaacgttgggcagcacctatgcattgatcgccatcggttacaccatggtttacggcattatcggcatgatcaacttcgcccacggcgaggtgtacatgatcggcagctatgtctcctttatcgtgatcgccgccctgatgatgctcggcattgacgtcggctggttgctgatcggcgccgcgttcctggtctcgatcgtcatcgccagcgcctacggctggagcatcgagcgggtggcctacaagccggtgcgcaactccaagcgcctgattgcgctgatctcggccatcggcatgtcgatattcctgcaaaactacgtcagcctgacgcagggctcacgcgatctggcgctgcccagcctggtgaccggccagtggatgctgggggaaagcaatggcttcgccgccaccatcagcaccatgcagctgaccatctggctcgtgaccttcctggcgatgctggcgctgacgctgtttatccgctattcgcgcatgggccgcgcctgccgcgcctgtgcggaagacctgaagatggccagcctgctgggcatcaacactgaccgggtgatctcgctgaccttcgtcatcggggcggtgatggcggcggtggccggggtgttgctcggccagttctacggcgtcatcaacccctacatcggctttatggccggcatgaaagccttcaccgccgcggttctgggcggcatcggcagcattcccggcgcgatgatcggcggcctggtgctgggcgtggcggaagcgctgacctccgcctacctgagcaccgaatacaaagacgtggtgtcgttcgcgttgctgatcgtggtgctgctgatcatgccgaccggcatcctcgggcgtccggaggttgagaaagtatga

SEQ ID NO: 426471 - DNA, 1116 bp, Serratia marcescens
atgaaattaacaacaggtaaggcactgctggcgggttgtattgcgatggccatgagccaggcggccatggcgaaagacatcaaggtggcgatcgtcggggcgatgtccggtccggtcgcgcagtatggcgacatggagtttaccggcgcgcgccaggcgattgccgacattaacgccaagggcggcatcaagggcgacaagctggtcggcgtggaatacgacgacgcctgcgacccgaaacaggcggttgcggtcgccaacaaggtgatcaacgacggcattcgctacgtgatcggccacctgtgctcctcttccacccagccggcgtccgatatttatgaagacgaaggcgtgatcatgattaccccggcggccaccaacgccgatctgaccacccgcggctacaagatgatcatgcgcaccaccggcctggactcggatcagggcccgaccgccgccaaatacatcctcagcgacatcaagccgaagcgcatcgccgtggtgcacgacaagcagcaatatggcgaaggcctggcgcgctcggtgcgcgacagcctgaaaaaacagggcaccgaagtggcgatgttcgaaggcatcaccgccggcgacaaagacttctccaccctggtggcgcgcctgaagaaagagaatatcgacttcgtgtatttcggcggttactacccggaaatgggccagatcctgcgccaggccaagcaggccgggttgaccacccgcttcatggggccggaaggcgtgggcaactcctcgctgtccaacatcgccggggccgcttcggaaggcatgctggtgacgctgccgaagcgctacgatcaggtgcctgccaaccagccgatcgtcgatgcgttgaaagccaagaagctggatccgaccggcccgttcgtctggaccacctatgccgcgctgcagtcgctgaccaccggcatggagcgcagcggcagccaggaaccggcggacatcgtcaaggatctgaaaaccggtaagccggtggagaccgtgatggggccgctgagctgggatgacaagggcgatctgaaaggcttcgagttcggcgtgttcgaatggcatgccaacggcacgtccacaccgatcaaataa

SEQ ID NO: 426472 - DNA, 393 bp, Serratia marcescens
atgaaactgaccatcgagcgcctgaccgcgctgtccccgcaagatcttatcgacctcggtaaaatttggccgcaccagcagccggaacagtggcagagctggctgagcgacggcaaggcgctgttcgccgcccgcttcaacgagcggctgctgggggcggtgaaaatcgcactgcaggacgaccgcgccgagctgcaggacctgctggtacgcgaagtgacgcgccgccgcggcgtcggtctttacctggtgcaggatgcgcagcgtcagctgccgcagatcgcccactggcagctgtcgaccgccggcctggcgccgcgcgaacgcggggaagtcgataacttcatgcgcgcctgcggcttcgcaccgcagggcgatctctggcaaaaatga

SEQ ID NO: 426473 - DNA, 1218 bp, Serratia marcescens
atgaaacgccggctggcggcgctaatcttgattgtgcttgggctggcggccgcgctcctcggacgccagcaggcgctgcgcctggcctcaggctgggatcagcaggtttatatctggcagcgggtctggacgccgcagcacgccgatgcgctggcacacagccgcgatctgttcagtgggctgcgcgtgctggcgctgcaggtgcatccgcgcgagggctggcgggagatcccggccgatctcagcctgttgcggcaggacggccgcccgctctggctggtggcgcgcctcgacggccagctgccgcagctggaccaagaggccattatccagcgcatgcaggcgctcacccagcgctggcaggcggccgggctgcccgtcaccggcgtcgagatcgatcatgacgccgccaccgcccgcctgccggactaccaacgctttctgcagcaactgcgccaacggctgcccgccgctttgcagctcggcatcaccgccctgccggcctggatcggctcgcccgacctgcccggcgtactgcaacaggccgacagctccgtcctgcaggtacatgcggtgctctcgccgcagcaggggctgtttgacggctccttggcgctgcgctgggtgcggcagtacgcctccgtcacaccgaagccgtttcgcgtcgcgctgccggcctacggcatggcactgctggggtttgatgcgcagggcgcgcaggtggagagcgagtcctcgctgcgcgtggcgggcaacggccgcgagctgacggtcgcgccgcagcagatcgccgattttctgcagacgctggcgcagcaaacgccgccccggctgcgcggcattatctggttccgcttgccgctggcggacgatcggcgcgcctggtcgctcgccacgctgcgagcggtgatcgaacggcagccgctgaacgtcgactggcagataaaatttaggcctcagccacagcaaaacgggctgtatgatctgataattcataacaacgggccggtggacgccccgctgccgcaagaggtggccatccgcgccgacgactgcctggcggcggacgcggtcggcaactaccggctggaatccgcaccgcagcggcaacgctttattcgcatcagcggcgatcagctgcgcgccgggcaatcccggccgctgggctggctgcgctgccaacaactgacgccaggaggcacccttgtcacaccttga

SEQ ID NO: 426474 - DNA, 2073 bp, Serratia marcescens
ttgtcacaccttgatacgcgcgcggcacggaacacccgccgccttcttccgctggccatgctgatcggcgccgcgctgccgctgagcggctatgcctgcggcccggatttccctaaccggctgctgatcgaccgcaacggcaccctgctgtatatgccggagggcaatttcgccttcgaagccggccggctggtgccggcggataagcagctgccgcactggcaagcccccccgccgccgatgccgccgaaaccgatgccgcagtcgccggaaacggtggcgatcggcaaaatgcgcgccgccaaaacggtggaagaggctgacgccgtcaatactcaggggttgtccaacgccgcacgcctttatcaactgggcgccgtcgctttcgccagccacgatccgcgcgccacagactatttccagcaggtgctgaagctcccggccgccgaacagggcgactgggggctgcgggcgcagtattcacttgggcgggtgttgatggctgaccacggtacgccggtgaatgaatcgggtgaagcggcccccgccgccgagcatccgcctaaagccgaacttgaacaggcgctggcggcgttccagcaggtgatcgatcgggtgaaaagcggcaccgccgatcccgaccagctggcgctgagcagcctcgggcagcaggcgcgcatccacctgtggctgggtgacgtcgcccccgctgcccacctgtacgcacagcaggcggcgcagggcgatccgagcggcgggcagtcgctgcagtacgtctccagctacctggtcaatcccgaccatctggaaacgctgaagcaggtgatcggcgatccgttgatccagcagctggtgaccattgagctgttcgcccgcagcggcaacctgcaaatggcggataccgacggcaacggccgctctgcccagatcatcagccagatcctgacgctgctggacggcacggtgaaaagcggcttcgccggcagcgatcggctggcggcattggcctaccgctccgggcaatacccgatggcggcgagcctgctgaaaaacgccggcgacggtggcctggcgtggtggctgcgcgccaaaatggcgctgcgcgacggcgacgtgaaagccgccaccgccgcctacgccaaggcggcaagcgcgttccccgccgacgaaagctggggcgaacagcgtaacgccgactttgtcgcggaaaccatcgtccccgagtgccgggtggccggcgaacaggctatcctggcgctgaaccgcggcgactatctgcaggcgatggacctgctttatcgcggcaaagcgctctactgggccgacgtggccgatgtggcagagcgcgtgctgaccgtcgatgagttgaaaggctttgtcgataagcacgccccggcgccgacgacgccgctcaagccggttaacccggacgactacggtggcggccagcaaatcacgccggaagttcagctgcgcgaactgctggcgcggcgcttgatgcgcgccgggcgggccgcggaagcgcaggactatttcgatatccccaactaccggcaagcggcgcagcagtacgccaatgagctgaaggccgccaaggacaagtccgccgcgccgctggcacgcgcgcaagcttactatcgcgcggccaacctgctgcgcgcccaggggctggagtttaccggctatgagatgacaccggactacgccatctatggcgctggctattcctatctgggggatgcgttcgatactcgcgagctgaagcataaaagctggatcgacagcgcagaagcggcgcgcgccaaggcggcgctgccggcgcaggacaaccgtttcctgcactatcgctggcaggcggtggggctggcgcaacaggcggccgatctgctgccgccgaaaagccaggcctatgccgccgtgctgtgtaacgccgccagctgggttatcaagcgcgacgccaaaaccggccgggcgctttatcaacgctacatcaacaccggcactcgctacccgtgggcggcgaaattcggctacgactgcccagcgccggacttcgccgccgtggcgccataa

SEQ ID NO: 426475 - DNA, 858 bp, Serratia marcescens
atgaccaaagaaatgcaaactttagccttagtaccccaaggtagcttggaagcctatatccgggcagccaacgcctatccgatgctgacggcagaggaagagcgggagctggctgaacggctgcattatcagggcgatctggatgccgctaagcagctcatcctgtctcacctgcgctttgtcgctcatattgcccgcaactattcaggctatggtctgccacaggcggatctgattcaggaaggcaatatcggcctgatgaaagccgttcgccgcttcaaccctgaagtcggcgtgcgtctggtttcctttgcggtgcattggattaaggcggaaatccacgagtacgtattgcgcaactggcgcatcgtgaaagtggcgaccaccaaagcgcagcgcaagctgttctttaacctgcgcaaaaccaaacagcgtttgggctggttcaaccaggacgaagtggaactggtggcccgcgagctgggcgtaaccagcaaagacgtgcgcgagatggagtctcgcatggcggcgcaggacatgacgttcgatccgactccggacgacgaggcccgcgatggccagtcgatggcgccggtgctgtacctgcaggacaagagctcagacttcgctgaaggcattgaggaagataactgggaaagcaacgccgcagacaaactggcctatgcgctggaaggtctggacgagcgcagccagcatatcatccgcgcccgctggctcgacgacgacaacaagtcgacgctgcaggagctggccgatcagtacggtgtttccgccgagcgcgtgcgccagctggaaaagaacgccatgaagaaattgaaaatggcgattgaagcctga

SEQ ID NO: 426476 - DNA, 954 bp, Serratia marcescens
atggccaataacgcaaaaaccgccaagagcaaggcgctgcgcggcggctggcgcgaacagtggcgttacgcctggatgaacgccatcaaagacatgctgcgccagccgttggcgacgctgttgacggtgatggtgatcgccatctccctgacgctgccgagcgtgtgctacatcgtgtggaaaaacgtcagcaccgcggccagccagtggtacccgacgccgcagctgacggtctacctggataaatcgctcgacgacgacgcggcgctgaaagtactcgacgccatcaaggcggaagccggcgtggagaaggtgaattacctgtcgcgtgaagaagcgcgcggcgagttccgcaactggtcgggctttggcggtgcgttggacatgttggaagagaacccgttgccggcggtggcgatcgttacgccgaagatgagcttccagagttcggataccctcaacaccctgcgcgatcgcgtggcggcggtgcagggcgtggaagaagtgcgtatggatgacagctggtttgcccgcctggcggcgctgaccgggttggcgggccagatcgcggcgatcatcggcgtgctgatgatcgtggcggtgttcctggtgatcggtaacagcgtgcgtctgagcatcttcagccgccgcgacaccatcaacgtgatgaagctgatcggcgccaccgacggttttatcctgcggccgttccttaacggcggggcgatgctcggctttgccggcgcgctgctgtcgctggtgctgtccggcgcgctggtgtggcagctggagtcagtggtcgccggggtggccaaggtgttcggcaccaccttcaccctgcacgggctgggctgggacgaggcgctgttgctgctgatcatctccgcgatgatcggttggatcgccgcctggctggcgacggtgcaacatttacgccgatttacaccacagtaa

SEQ ID NO: 426477 - DNA, 672 bp, Serratia marcescens
atgattcgctttgaacaggtcagtaaagcttatctgggcggacggcaagcgctgcagggggtcgatttccatctgcgcccggcggaaatggcgtttctgaccggccattccggcgcggggaaaagtaccctgctgaaactgatttgtggtatcgaacggcccagcgccggccacatctggtttggcggccacgacatcagtcgtttgaaaaaccgcgaggtgccgttcctgcgtcggcagatcggcatgatcttccaggatcaccacctgctgctggatcgcacggtgtatgacaacgtggcgatgccgctgatcatcgccggcgccagtaccgaagacatccgccgccgcgtctccgccgcgctggacaaggtcggtttgctggataaagcgaagaacttcccgattcagctgtctggcggtgagcagcagcgcgtgggcatcgcccgtgcggtggtgaacaagccggcggtattgctggcggatgaaccgaccggcaacctggacgacgcgctgtcggaaggcattctgcgcctgtttgaagaattcaaccgcgtcggcgtcactgtattaatggcgacgcacgacaccgggcttatcgcccgccgcaattaccgcatcctgacgctgagccagggccgcatgcaagggggcgctcaccatggccaataa

SEQ ID NO: 426478 - DNA, 1653 bp, Serratia marcescens
atggcaaaagataagaaacgtgggtttttctcctggctggggtttggccagaaggaaaaggaagaagagcaacagcaacctgagcagccggtagagcaggcggagcctcaggccgcggagacgccggctgaaccggccaccgccaagctggatgacaagctccccgcccaggaatctgaacctgccgcctccgtcgacaccccgggagagtgggatagcggccaggccggcgaacccatcgcggaaaacctgccggcggcggccgaacacccgacggcgcaagcgttggccgaagagattgtcagcgtgaccgagcaggtagtggcgcagcagcagccggtcgtcgagcccgagccggtggttgagcccgagccggtcgttgaacccgagccagttgttgagcctgagccggttgtcgagcccgagccggttgtcgaacctgagccggtcgtcgagccagagccggtcgtcgagccagagccggtcgtcgagccagagccggccgtcgagccagagccggccgttgaacctgagccagttgttgagcctgagccagttgttgagcctgagccagttgttgagcctgagccggttgtcgagccagagccggtcgttgagcctgagccgatcgttgaacccgagccggttgtcgaaccagaaccggaaccggaagaagaagcgccgcttgaacctgtggtgccggccgctgcgcaagagcaggagcggccgaccaaagagggcttcttcgctcgcctgaagcgcagcctgctgaaaaccaagcaaaacctcggctccggctttatggggctgttccgcggtaaaaaaatcgacgacgatctgttcgacgagttggaagaacagttgctgatcgccgatgtcggcgtggagaccacgcgcaagatcatcacctccctgacccagcacgccagccgcaagcagctgaaagacgccgaagcgctgtatggcaagctgaaggaggaaatgtccgaaattctggccaaggtcgatcagccgctggatgtcagcgggaaaaccccgtatgtcattctgatggtcggcgtgaacggtgtgggtaaaaccaccaccatcggcaagctggcgcgccaattccaggcggaaggcaagtcggtgatgctggcggcgggggatactttccgcgccgcggcggtggagcagctgcaggtgtggggcgaacgcaaccgcattccggtggtggcgcagcataccggggcggattccgcttcggtgatcttcgatgcggtgcaggccgccaaggcgcgcggcatcgatgtcttgatcgccgataccgccggccgtctgcagaataaatcgcacctgatggaagagctgaagaagatcgtccgcgtcatgaaaaaactggacgaccaggccccccatgaggttatgctgacgctcgatgccagcaccggccagaatgcggtcagccaggcgaaattatttaatgaggccgtgggcttaaccggcatcacgctgactaaactggacggtaccgccaagggcggggtgatcttcgccatcgccgatcagttcggtatcccgattcgctatatcggcgtcggggaaggcatcgaagatttgcggccgtttaaggctgatgattttattgaggcactttttgcccgagaggattaa

SEQ ID NO: 426479 - DNA, 621 bp, Serratia marcescens
atgacaagactctcgccacgggcggcggccaaaaaaccgacccaggccgcagccggacagatccgcatcatcggcggccaatggcgcggtcgcaagcttccggtgccgaacagcccggggctgcgccccaccaccgatcgggtgcgcgaaaccctgttcaactggctggcgccggtgattcagggcgcgcgctgcctggactgtttcgccggcagcggcgcattagggctggaagcgctgtcgcgctacgccggcagcgccacgctgttggaattcgaacggccggtggcgcagcagctggaaaaaaatctggcgctgctgcagggcaagggggtggttatcaacaccaacgcgctgagctggctggcgggcgagggccaaccgttcgacgtggtgttcctcgatccgccgtttcgcaaaggcctgctggcggagaccgccttgctgctggagcagcgtggctggctggccgacgaggcctggatctatgtagaagccgaggcggaaagcgccgcggcggacgtgcctgccagctggcagctgcaccgggagaaggtcgccggccaggtggcctatcgcctttatattcgttcgcaagagaaaaccgaccatgctgattaa

SEQ ID NO: 426480 - DNA, 273 bp, Serratia marcescens
atgctgattaatctgggccgcctgctgatgctgtgcgtgtggggcttcctgctctctaacctgttccatccttttcccaagccgctgaagtatttcatcgacgtggcgctgttctttatggtggtgatgcacggcctgcagctggtgctgttgaaatccacccagccgaaggatcagccaatcagctactggcaagaagccaagatctttatctttggcgtgttcgagctgctggcctggcaaaagaaacagccgcccatcaagaagaaatga

SEQ ID NO: 426481 - DNA, 357 bp, Serratia marcescens
atgagcaaaccaccgttattttttgtcgccgtgattgcgctgatcgccgtgctggccacgcaacgctacttcaaacagcgccagcgggaggcggaaaacgatcgcgcgccgatgcgcagcctgcaggtgacggtgagcgacaagcgcagcttcccggtcgccaggacccgcgcgccgcagcgcgaaccgctggtcaatgagccgatgtattacgaggtggtgttcagcccgaaccagggcggtgaagacatcacgcttcggctgaaacagtggcaatacaacccgatagaaaaaggcgcgcagggcacgttgaacatgcagggcacgcgcttcgtctctttcagcgttcagccgtag

SEQ ID NO: 426482 - DNA, 627 bp, Serratia marcescens
atgagttggccgttccttgccgtattcttttccggttggctgttcgtcgacgcctcataccgtggcccgcgctggcagcgctgggtgttcaaacccgtcacgctgctgctgctgttgctgttggcctggcaggcgccggtgctcggcgccgcgggttatctgatcgtgctcggcctgctggcgacgctgatcggcgacgcgctgctcctgttgccgcgcgagcgggtgctgtacgccatcggcgcctttttcctgtcccatctgctgtataccctgagcttcgccagccagatgacgttcagcctgttctggccgctgccgctggcgctgctggcgatcggcgcgttgctgctggccaccctttggacccggctggaagagatgcgctggccgatcgtcacctacgtggcgatgacgctgctgatggtctggctggcgggcgagcaatatttcctgcgcagcaccgatttcggcttctcgctgctgaccggcacctcgctgctgctgctggccaacgtggtttggctgctcaaccgctaccgtttcaccttccgtgcggcggacgccatcgtggctttctgttacttctccggccacttcctgatcgtgcgttcgctctacctgtaa

SEQ ID NO: 426483 - DNA, 378 bp, Serratia marcescens
atgaaaggtactttaacgcgcaccgctttggcggcgggcggcatgatggtgacaagtgtggtcatggccggcagcctggcgctgccgaccgcgcagtcgctggcggggcaatggcaggtggccgacagcgagcggcaatgccaaatcgagtttttggcgaatgagcaaagtgaaaccaacggctatcagctggtggatcggcaacggtgtttgcaaagcgtgtttgcggcggaagtcgtgggctggcgcccggcgccggacggcatcgctctgctgcgggcggatggcagcacgctggcgttcttctcgcgcgacggcgatctgtatcgcaatcagctgggcgccgatgatgccctgacgttgaaagcgctggcttga

SEQ ID NO: 426484 - DNA, 1464 bp, Serratia marcescens
atgcaatctactaaaaaggcaattgaaattactgaatccagccttgcggccgcgacaaccggctacgatgctgtagacgacctgctgcattatcatgagcggggcaacgggattcagattaatggcaaggattcattttctaacgagcaagctgggctgtttattacccgtgagaaccaaacctggaacggttacaaggtatttggccagccggtcaaattaaccttctccttcccggactataagttctcttccaccaacgtcgccggcgacaccgggctgagcaagttcagcgcggaacagcagcagcaggctaagctgtcgctgcagtcctgggccgacgtcgccaatatcaccttcaccgaagtggcggccggtcaaaaggccaacatcaccttcggcaactacagccaggatcgtcccggccactatgattacggcactcaggcctacgccttcctgccgaacaccatttggcagggccaggatctgggcggccagacctggtacaacgtcaaccaatccaacgtgaagcatccggcgaccgaagactacggccgtcagacgttcacccatgagattggccatgcgctgggcctgagccacccgggcgactacaacgccggtgagggtaacccgacctatcgcgacgtcacctatgcagaggatacccgccagttcagcctgatgagctactggagtgaaaccaacaccggtggcgacaatggcggccactatgccgcggctccgctgctggatgacattgccgccattcagcatctgtatggcgccaacctgtcgacccgcaccggcgacaccgtgtacggctttaactccaacaccggtcgcgacttcctcagcaccaccagcaactcgcagaaagtgatctttgcggcctgggatgcgggcggtaacgataccttcgatttctccggttacaccgctaaccagcgcatcaacctgaacgagaaatcgttctccgatgtgggtggcctgaagggcaacgtctcgatcgccgccggtgtgaccatcgagaacgccattggcggttccggcaacgacgtgatcgtcggcaacgcggccaacaacgtgctgaaaggcggcgcgggtaacgacgtgctgttcggcggcggcggggcggatgagctgtggggcggtgccggcaaagacatcttcgtgttctctgccgccggcgattccgcaccgggcgcttcagactggatccgcgacttccagaaagggatcgacaaaattgacctgtcgttcttcaacaaagaagcgcagagcagcgatttcattcacttcgtcgatcacttcagcggcacggccggcgaagcgctgctcagctacaacgcttccaacaacgtgaccgatttgtcggtgaatatcggtggccatcaggcgccggacttcctggtgaaaatcgtcggccaggttgacgtcgccactgactttatcgtgtaa

SEQ ID NO: 426485 - DNA, 2319 bp, Serratia marcescens
atgcacaatcagcaaaaccataatcatcaggaacatcaccacgccgaaggcggatgcggctgcaaccacagccacagcaaaacgcagcatggctgcagcagcgaaccgaaaaacgccgccgcgcaggccgaacaggcccaccatcatcacgatcatggcgatagcggctgctgcgccgccacgcccgacgatccggacgaggaaagcgacaggctggccgccgctcccccttccggcagccaacgtttcagctggaaagtcaccggcatggactgccccagctgcgccaagaaaatcgaaaatgccgtcaccgcactccccggcgtcgacagcgcgcgggtgctgtttgcgaccgagaaactggtagtcgacgcacagtccgacatcagcctgcggatccaggacgcggtcgcccaggccggctttaccctgctcggcactcagaacgccaaagccgccgcgccgaaaacctcacgcttcggcgaattcgcaccgctgctgctgttaactaccttgatggtcgtcagctgggtgctggatcgggttaacccagagctggggcgcatcgcctttatcgccaccacgctggtcggattggcgccggtcgccgccaaggcgctgcgtttgatccgctccggcacgccattcgccatcgaaacgctgatgagcgtggcggccatcggcgcgctgttcatcggcgccaccgccgaagcggcgatggtgctgctgttgtttatggtcggcgaactgctggaatcctacgccgccaaccgcgcgcgacgcggcgtgacggcgctgatggagctggtgccggaagacgcgttgctgctgcaaggcacggaacgcaaacgcgtgccggtcgccagcctgcgccctggcgacgtgattgaaatcgcgcccggcgggcgcctgccggccgacgccgagctgctcaatccgttcgccagcttcgacgaaagcgccctgaccggcgaatcggtgccggtcgagcgccagcagggcgagaaagtggccgccggcagcctgtccgtcgatcaggcggcgcagatgaaggtgatctccgagcccggcaaaaacgccatcgaccgcattctgcagctgattgaagaggccgaagagcgccgcgcgccgatcgaacgcttcctcgaccggttcagccgttattacaccccggccattatgctgctggccgtcgcggtgatcctgctgccgccgctgctgttctcgcagccgtgggatacctggatctatcgcggcctgacgctgctgctgatcggctgcccatgcgcattggtgatctcgaccccggcggccattacatccgggctggcggccgccacgcggcgcggcgcgctgattaaaggcggcgcggcgctggagcaactgggccagatacaaaccatcgccttcgataaaaccggcaccctgaccgaaggcaagccgacggtgaccgacgtgctgccgatcggcgcgctcaccgaacagcggctgctgcagcttgccgccgcggtggaggccggttcacatcacccgctggcgcaggcgatcatcaaccgcgccgccgcaagcggggccgagttgccgctggcgcaggcgcgccgcgcgctggccggcgtcggcgtggaagggatcgtggacggcaagaccgtgctgatcagcgcgccgggcaagctggcgccgggcctgctcgacgttcaatggcagagcaaggtagacaagctggaaaacgccggtaaaacggcggtggtggtgctggaagacggcgcgcccatcggcttgctggcgctgcgcgacacgctgcgcagcgacgccaaacaggcgatagccgaactgaacgcgctgggtattcgcggcgtgatgctgaccggcgacaacccgcgtgccgccgcggcgatcgccggcgagctgggcctcgactatcgcgctagtctgttgccggaagataaggtcaacgcggtcaccgagctgagcgaactgcgcccgacggcgatgatcggcgacggcatcaacgacgccccggcgatgaaagcctccagcatcggcatcgccatgggcagcggcaccgacgtggcattggaaaccgccgacgccgccctgacccacaaccggctgctgggcgtcgctgagatgatccgcatctcgcacgccacccacgccaatatccggcaaaacatcaccatcgcgctggggttgaaaggggtcttcctgatcaccagcctgctagggctgaccggtttgtggctggcggtgctggcggactccggcgccaccgcgctggtcaccgccaacgcgctgcggctgttgagaaagcgcagctaa

SEQ ID NO: 426486 - DNA, 246 bp, Serratia marcescens
atgactgacttatttgcccaggcagaccagacgctcgacgcgctgggcctgcgttgcccggaaccggtgatgatggtgcgcaaaaccgtgcgccatatggacaacggcgaaacgctgctgattatcgccgacgatccggccaccacccgcgatattccgggcttctgccgctttatggagcacacgctggtggcgcaggagaccgagcaggcgccataccgttatctgctgcgtaaaggtgtataa

SEQ ID NO: 426487 - DNA, 660 bp, Serratia marcescens
atgtattcgtttaccgcacagcagcgcttcacggcgttggtctggctttcgctgtttcatatcgccatcattacctccagcaactacctggtgcagctgccgatcaccgttttcggcttccataccacctggggcgcctttaccttcccgtttatcttcctcgcgaccgatctgaccgtgcgcatcttcggcgcgccgctggcgcggcggattatcctggcggttatggtgccggcgctgttcatctcctacgtgatctccaccgtcacctatcagggagaatggcagggcttcgcggcgctgggcagttttaacctgttcgtggcgcgtatcgccgtcgccagctttatggcctacgtgctcggccagatcctcgacgttcacgtcttcaatcgcctgcgtcaacgcagcgcctggtgggtggcgccggcggcggcgatgttcttcggcaatatcagcgatacgctggcgttcttcttcatcgccttctacaagagcagcgatcccttcatggccaacaactgggtggagatcgcgctggtggattacagcttcaaggtgatgatctgcctgctgttcttcctgccgatgtacggcgtgttgctgaacatgctgctcaaacgcatcgcggcgtgcagcggcagcctgcagccgggctga

SEQ ID NO: 426488 - DNA, 435 bp, Serratia marcescens
atgaccccaatcgtccgcaccgccacgctcgaagaaatccaccgcctttaccaacgcatccccgaattcggcggcctgcatagcctggccgagctgcagcggcgcatcggcggtgcctccgccagcctgttgatcgccgacatcgacggccagccagccggtttcaaactcggttatcaacagcgggaaacggtgttttacagctggctgggcggcgtgctgccggcatttcgtcgccacggcgtggcgcaggccttgttggccgaacaggagcgctgggcgcgggcgcagggctatcgccaactgacagtcaaaacccgtaaccggttccgcgccatgctgacgatgctgctcgcccaccactatcagattgttcagctggaaaagaaaggcgaagtggctgattatcggctattactggagaaaaacttgtga

SEQ ID NO: 426489 - DNA, 564 bp, Serratia marcescens
atgcgtaaagtagcgaaattgatgggtatcagcctgctggcgcttggcctcgcggcctgcgacggcgacaccaaagacaccaaggcagcgtctgacggcgcggcggccagcgcgccggccgggcagcaggtcagcctgctggacggtaaactggcgttcaccctgccggtcggcatggcggatcagagcggcaagctgggcaaccaggccaacaacatgcatgtttacgcagacagcaccggccagcgcgcggtgatcgtgatcctgggcgacaagaccgccgacagcctggagaccctggccaagcgcctggagaatacccagcgcgcgcgtgacgccaacctgcaggtgatcaccaacaaggcgctcgacgtcaacggcgtgccgctgcgtcagctggacagcatcatcaccagcggcggcgaaaaagcctattcctccgtcctgatcggctcgctgaacaacaacatgctgaccattcaggtgacgctgccggcggacaatcagcagcaggcgcaggccgaagccgaaggcatcatctccaccctgaagctgaagcagtaa

SEQ ID NO: 426490 - DNA, 1200 bp, Serratia marcescens
atgagcctgcatcaggaccacagctttgaaagctgcatcaaatgcaccgtctgcaccacctattgcccggtcgccaaagtgaacccgctctatccggggccgaaacaggcggggccggacggcgagcggctgcggctgaaagatccggcgctgtacgacgaagccttgaaatactgcaccaactgcaaacgttgtgaagtggcctgcccgtccgacgtcaaaatcggcgatatcattcagcgcgcccgcgccgacttcgcccagagcaagccgacgctgcgcgacgccatcctcagccacaccgacatcatgggctcgctgtcgacgccgttcgcgccgatcgtcaacgccgccaccgggctgaaaccggtgcgcaagctgctggacaaggcgctgaagatcgatcaccgtcgcgaactgccgaaatactcgttcggcactttccgccgctggtaccggcaacaggcgcaggctcagcggcgctatgccgagcaggtggcgtttttccacggctgcttcgtcaactataaccatccgcagctgggcaaggatttgatccgggtattcaacgcgctggatatcggcgtgcagctgctgaaacgcgagaaatgctgcggcgtgccgctgatcgccaacgggtttattgagcaggccaaaaagcaggccagggttaacgccgagtcgctgcatgaagcggtgcttgagcgcggcatcccggtggtggcgacctcatcgagctgcaccttcaccctgcgcgacgaatatcctcatctgctggacgtggacaccactccggtgcgcgatcgggtggagctggcgacgcgctatctctatcgcctgatcaatcaggggcgcagcctgccgctgaagcgcacgccgctgcgggtggcttatcacacgccttgccatatggagaagatgggctggaccgcctacaccctggagttgctgcagcagataccggagctggagctggtggtgctggattcgcagtgctgcggcatcgccggcacctacgggttcaaatcggagaactacgccacctcgcaaggcatcggcgcgccgctgttccggcaaatcgaagagagcggagtggatctggtagtgaccgactgcgagacctgcaaatggcagatagaaatgtccaccagcaagcgctgcgagcatccgatcaccctgctggcgcaggcgctggtataa

SEQ ID NO: 426491 - DNA, 1269 bp, Serratia marcescens
atgcgatttgacgtggtggtgattggcggcggcctggcgggcctgagctgcgccattgccgtggccgaacagggcaagcgctgtgcggtggtcagttccggccagagcgcgctctacttctcctccggctcgctcgacctgctggcgagattgccggacggcacgccggtcgaaatgccgctggcggcgttgccgcagctggcgcagcaggcgccgcagcatccgtatgccctgatcgggcccggccgggtggcggcgttgtccgccgccgcgcagcggttgttggagcgctgcgggctgaacctgcagggcgagggcgccaacaaccatctgcgcattacgccgcttggcacgcgtcgcgccacctggctcagcccgcaggcgatcccgacgctgccgctgaccggccaactgccgtggcggcgcattgcggtgatcggcatcgaaggtttcctcgatttccagccgcagatggccgccgactctctgagccgggagctcggcgtagagacggaggtggcctatctgcacatgccggcgctggacagattgcgcaataaccccagcgagttccgcgcggtaaacatcgcccgggtgctggatttgatggaaagtctgccgccaatggccgaggaactgcggcggttggcgggggcagccgacgcgctcttcctgccggcctgtttgggattggaggacgacgcgtcgctggcggtgctgcaggatgcggtcggcaagccgatccggctgctgccgacgctgccgccttcggtgcccggcatgcgcttgcatcaggcgctgcggcggcgttttcaacagctgggcggcgttttcatgcccggcgacagcgtgctgcgcgccgagtgcgaagccggccgcgtcacgggcctgtatacccgcaaccacggtgatattccgctgcgggcgcagcaggtggtgctggccagcggcagcttcttcagcaacgggctggtggcggatttcgacggggtgcgtgagccgatcttcgggctggatgtacacagccgcgcggatcgcgccgactggagccggcgcgagctgttcgcgccgcagccttatctgcaatttggcgtgcgcaccgacggcaggctgcgggcgatgaagcagggcatgccgttcgacaatctgtacgccatcggcgcggtcgccggcggctacgatccgctgcagcagggctgcggcgccggcgtgtcattgatcggtgcgctgcacgtcgcgcagcagatcgccgcggaggaaaacgcatga

SEQ ID NO: 426492 - DNA, 1650 bp, Serratia marcescens
atgagcagctattttgacggcggcgaaacggatgtgatcatcatcggcggcggcgccaccggcgcaggcatcgcccgcgactgcgcgcggcgcggcttgcgctgcattttgctggagcgccacgacatcgccaccggcgccaccggccgcaaccacggtttgctgcacagcggcgcgcgctatgcggtgaccgacggcgagtcggcgcgcgagtgcatcgaagagaaccgcatcctgaaacgcatcgcccaccactgcatcgagcgcaccgatgggctgttcatcaccctgccgcaggactcgctggactatcagcaacagtttatcgccgcctgtcgccaggccgacatcggcgccgaagcgatcgacccgcagctggcgctgcggctggagccggcggctaacccggcgctgatcggcgcggtgcgcgtgccggacggcaccgtcgatcccttccggctgaccgccgccaacatgttggacgcgcgcgaacatggcgcgcagatcctgacctatcaccaggtggtgggattgttgcgcagcggcgatcgggtgacgggcgtgcgcgtttacgaccatcagaatcagcggcgctatgcgctgcatgcgccggtggtggtcaacgccgccggcatctggggccagcagatcgccgaatacgccgatttgcgcatccgcatgttcccggccaagggggcgctgctgatcctcggccaccgcatcaacaacatggtgatcaaccgctgccgcaaaccggcagacgccgacatcctggtgccgggcgacaccatctcgctgatcggcaccacctcgacccatatcgactacgaccaaattgacaacatgctggtgaccccgcaggaagtggacattctgatccgcgagggggcgctgttggcgcccaccctggcgcagacccgcattctgcgcgcctacgccggggtacggccgttggtggccagcgacgacgaccccagcgggcgcaacgtcagccgcggcatcgtgctgctcgatcacgccgcccgcgacgggctggaagggtttatcaccatcaccggcggcaagctgatgacctaccgcctgatggcggagtgggccaccgacaaggtgtgcgaaaagcttggcgtaaaccgcccttgcaccaccgcgcaggatgcgttgcccggctcccgccagtcggcggaggagacggtgcgcagcgtggtttctctgcccgccagcattcgtggctcggcaatttaccgccacggcgatcgcgccagccaggtgccggcggccgatcggctcgacaccagcctggtgtgcgaatgcgaggcggtgaccgccggggaagtgcgctatgcggtcaactcgctgaccgtcaataacctggtggatctgcgccgccgcacccgcgtcggcatgggcacctgccagggcgaactctgtgcctgccgcgccgccgggctgttgacgcgctttaacgtcagcacgccgcagcagtccatcgcgcagctgtcacagttcctcaacgaacggtggaaaggcgtacggccgatcgcctggggcgacgcgctgcgcgagagtgaatttaccagctgggtttaccaggggctatgcgggcttgaagcccaggccgacaaggagcaggaggcggatgatgcgatttga

SEQ ID NO: 426493 - DNA, 1356 bp, Serratia marcescens
atgttgagtatttttaagccggccgcacacatcgcccgtgtgccgagcgataaggtagacccgctctaccgtaagctgcgctggcaaattttcctggggatcttcttcggttacgccgcttactatctggtgcgtaagaacttcaccctggccatgccttacctgatcgaacaaggcttcagccgcggtgacctcggcttcgcgctgtcgggcatttccatcgcctacggcttctccaaattcatcatgggttcggtctccgaccgttccaacccgcgagtgttcctgcctgccggcctgatcctggcggcggcggtgatgttgttcatgggcttcgtgccgtgggccacctccagcatcgccatcatgttcgtcctgctgttcctgtgcggctggttccagggcatgggttggccgccgtgcggccgcaccatggtgcactggtggtcgcagaaagaacgcggcggcatcgtctccatctggaactgcgcccacaacgtgggtggcggcctgccgccgctgctgttcctgctgggcatggcctggttcaacgactggcacgctgcgctttacatgccggccttcggcgccatcctggtggctctgatcgccttcggcctgatgcgggacaccccgcaatcctgcggcctgccgccgattgaagagtacaaaaacgactatccggacgactacagcgaaaaagacgaagaagagctgaccgccaaacagatcttcatgcagtacatcctgccgaacaagctgctgtggtacatcgcggtcgccaacgtgttcgtctatctgctgcgttacggcattctggactggtcgccgacctacctgaaagaagtgaagcacttcgcgctggacaagtcttcctgggcctacttcctgtatgaatacgccggtatcccgggcaccctgctgtgcggctggatgtcggacaaagtgttcaaaggcaaccgcggcgccaccggcgtgttcttcatgacgctggtgaccatcgccaccgtggtgttctggatgaacccgccgggcaacccgaccgtggacatgatctgtatgctggtcatcggcttcctgatctacggcccggtgatgctgatcggcctgcacgcgctggagctggcgccgaagaaagccgccggcaccgccgcgggcttcaccggcctgttcggctacctgggcggctcggtcgcggccagcgccatcgtcggctacaccgtagacttcttcggttgggacggcggcttcatggtgatgatcggcggcggcgtgctggcggttatcctgctgctgctgaccatgctgaacgaaaagaaacaccacgcggaaatcgctgccggcaaacgcggctaa

SEQ ID NO: 426494 - DNA, 1080 bp, Serratia marcescens
atgcggactcaagtcaaagccctgctgacagggatcattctcgctacctcaatggtcagcgccgcgcaggcggcggacaaagtagtgatcgcccaccgcggtgccagcggctacctgccggaacacaccctgccggcgaaggcgatggcctacgcgcagggcgccgattacctcgaacaagatctggtgatgaccaaagacaacgagctggtggtgctgcacgaccattacctcgatcgcgtcaccgacgtcgccgaacgcttcccggaccgcgcgcgcaaggacggccgttattacgccatcgactttacgctggcggagatcaaatcgctgaagttcaccgaaggctttgaaatcgaaaacggcaagaaggtgcagggctaccctggccgcttcccgatgggcaaatccgacttccgcgtacacaccttccaggaagagatcgagttcgtgcagggtctgaaccattcgaccggcaagaacatcggcatctaccctgaaatcaaggcgccgtggttccacaaacaggaaggcaaggacatctccagcaaagtgctggcggtgctcaagcaatacggctacaccggcaaaaacgacaacgtctacctgcagtgcttcgacgccaacgagctcaaacgcatcaagaacgagctggagccgaagctgggcatggatctgaagctagtgcagctgatcgcctataacgactggcaggaaacctacgagcagaaagccgacggcaagtgggtagaatacgactacgactggatgttcaagccgggcgcgatgaagaaaatcgctcaatatgccgacggcatcgggccggactaccacatgctggtggtggcggataaatccaagccgggccacatcgtgctgaccgacatggtgaaagaagcgcacgccagcaagctggcggtgcatccgttcaccatccgcgccgatgcgctgccgaagtacgtgaccgacgtgaatcagctgtatgacgtgatttacaatcaggccggcgtcgacggcgtgttcaccgacttcccggacaagggcgtgcagttcctgcagaagcagggccagcacaagtaa

SEQ ID NO: 426495 - DNA, 798 bp, Serratia marcescens
atgtatcacgtcgtcgcttccgatttagatggcacgctgctgtctcccgaccataccctgtcgccgtacgccaaagaaacgctgaagttgctgacccagcgcggcgtgcatttcgtattcgccaccggccgccaccatatcgacgtggcgcagatccgcgacagcctggagatcagcgcctttatgatcacctccaacggcgcgcgggtgcacaacaccgccggcgagctgattttcagccacaacctggacgaggatatcgcccgcgatctgtacggcatgctgcacgacgatccggagatcaccaccaacgtctaccgcaacgacgattggtttaccaaccgcgaaagcccggagcaggaagaattcttccaggagtcggtgttcaaatatcagctgttcgaaccgggcctgctggaaaccgacggcgtctgcaaggtctacttcacctgcgaagatcacgagcggctgctgcaggtggaagacgccatcaacgcgcgctggggcgatcgggtcaacgtcagcttctcgttcccgacctgcctggaagtgatggcgggcggcgtgtcgaaagggcatgcgctggaagaagtggccaagatcatcggctatacgctgcaagagtgcatcgccttcggcgacggcatgaacgatctggagatgctgtcgatggccggcaagggctgcatcatgcgcgacgcgcatcagcgcttgaaggatatgttgccggagctggaagtgatcggctccaacgtcgataacgcggtgccgcactacctgcgcaagatgttcctctga

SEQ ID NO: 426496 - DNA, 1044 bp, Serratia marcescens
atgacctcgttcactctcagctccgatgactggttaacgcgtgaaacgcagttcgctgccttcgccaccgggccgctgctggacttctggcggctgcgggaagaaggcgagttcagcggcgtggacggcgtgccgatccgctttgtgcgtttcagttccgcgcggcatcagcgggtggtggtggtcagccccggccgcatcgaaagctacgtgaaataccccgaggtggcctacgatctgttccactgcggttacgacgtggtgatcgtcgatcatcgcggccaggggcgctccggccgtttactggcggatacgcaccgcggtcatgtggtaaacttcgccgactacgtggacgatttcgagcagctttggcagcgcgaggtcgaatcgcgcggttatcggcagcgcttcgcgctggcgcattcgatgggcggcgcgatcctggcgcagttcctgcagcgccggccgcaggcgttcgacgcggcggcgttttgcgcgccgatgttcggcatccagttgccgatgccggattggctggccgaccgcattctcgactgggcggaggcccacccggcgatccgcgactattacgcggtgggcaccggccagtggcggccgctgccgtatgtggtcaacgtgttgacccacagccgcgaacgctaccggcgcagcctgcgctattacgccgattaccccgagctgcaggtgggcgggccgacctaccattgggtgcgggagagcatccgcgccggccggcagattatcgctcgggccggggcgatcacaacgccgctgttgcttttgcaagccggtgaagaacgagtcgtcgacaaccgttcgcaccaggctttttgtcaggctctgtcagacgcggggcgcccttgcgaaggggggcttccgtgggttatcaacggcgcacgccatgagatcctgttcgagcgggacgcgatgcgcgccgaagcactgaacgcaatcctgcgcttctttgctcaacacttaggcggcgcgctgccgccgacaactccatcagaggttagaacataa

SEQ ID NO: 426497 - DNA, 621 bp, Serratia marcescens
atgaccttggactggtggttaacctatctgctgaccacgcttatcctcagcctgtcccccggctcaggcgccatcaacaccatgagcaccggcatcagccacggctatcgcggcgccgccgcgtcgatcgccgggctgcaggccgggctgagcgcgcacatcgtgctggtaggcatcggcctcggtgcgctgatatcgcaatcgctgctggcgttcgagctgctgaaatggctgggcgccgcctacctggtgtggctcggcatccagcaatggcgcgccgccggggcgctggatctgcatgcgctggcgggtagcatgccgcgccgccgtctgttccgccgcgcggtgctggtcaacctgaccaacccgaaaagcatcgtgttcctcgccgcactgttcccgcagttcattttgcccaatcagccgcaggccgagcagtatctggtgctcggcgttaccaccgtggtggtggatattctggtgatgatcggttacgccaccctggcgacgcgcatcgccggctggctgaagaccccgcgtcagatgcagctgctcaaccggctgttcggctcgctgttcattctggtggcggggctgctggcgaccgcccgcaaggcctga

SEQ ID NO: 426498 - DNA, 621 bp, Serratia marcescens
atgctgatgctgtttctcaccgtggcgctggtgcatctgattgcgctgatgagcccggggccggacttctttttcgtgtcgcaaaccgctgccagccgctcgcgccgcgaggcgatgatgggcgtggtcggcatttctctcggcatcgtggtatgggccggcgtggcgttgatggggctgcatctgatcctgcagaagatggcctggctgcatcagatcatcatggtcggcggcggcatttacctgtgctggatggggtggcaactgctgcgttccgcgcgggcgcagcaagcgcagccggcggcggaagcccaggtggcgttgccgaaggccgggcgcagctttattcgcggcttcctgaccaatctgtccaacccgaaggcggtgatctatttcggcagcgtgttctcgctgttcgtcggcgacagcgtcggcgccggggcgcgctgggggctgttcctgctgatcgtcgccgagaccttcgtctggttcagcctggtggcggtggtgttcgcgctgccggcgatgcgccgcggctaccagcggttggccaagtggatcgacggggtggcgggcgtgctgttcaccggcttcgggttacacctgatctttacccgctga

SEQ ID NO: 426499 - DNA, 1845 bp, Serratia marcescens
atggggaagtgtgtgtcaaccgcagcagtgattaacagagagttgctggccgagcaggtattgcgcgataccttcggctaccagcaattccgtccgggccaacaaacgattatcaacgccgcgatcggcgggcaggattgcctggtggtgatgccaaccggcggcggcaagtcgctgtgttaccaaatcccggcgctggtgatggacggcctgaccctggtggtttccccgctgatctcgctgatgaaggaccaggtcgaccaactgttggcttacggcgtttccgccgcctgctacaactcgacgcaaacccgcgaggagcagttggacgtcatggccggctgccgcaacggcaccattaagatgctgtacatcgcgccggaacggctgatgatggaaagcttcctcaacctgctcgaccactgcccgccggcgatgctggcggtggatgaggcgcactgtatttcgcagtggggccatgacttccggccggaatatcgcgcgctgggtcagctgaaacagcgcttcccgtcgatgccggtgatcgcgctgaccgccaccgccgacgagtccacccgcggcgatatcgtgcgcctgctgtcgttgcaggatccgctggtacaggttagcagctttgaccggccgaacatccgctacacgctggtggaaaaattcaagccgctcgatcagctgtggcgcttcgtgcaggatcagcgcggcaagagcggcattatctattgcaacagccgcgccaaggtggaagacaccgccgcgcgtctgcagagccgcgggctgagcgtcggcgcctaccacgccgggctggacaacgatcgccgtgcgcaggtgcaggaagcgttccagcgcgacgatctgcaggtggtggtggccaccgtcgccttcggcatgggcatcaacaaacccaacgtgcgcttcgtggtgcatttcgacattccgcgcaatatcgaatcctattatcaggagaccggccgcgccgggcgcgacggcctgccggccgaagccatcctgctgtacgatccggccgacatggcctggctgcgccgctgtctggaggaaaaacccgccggacagcagctggatatcgaacgccacaagctgaacgccatgggcgcgttcgccgaggcgcaaacctgccgccgtctggtgctgctcaactactttggcgaaggcaagcacgagaactgcggcaactgcgacatctgcctcgatccgccgaagcgctatgacgggctggaggatgcgcgcaaggcgctgtcctgcgtgtaccgcgtcggccagcgcttcggcctggggtacatcgtggaagtgctgcgcggctccaacaaccagcgcattcgcgaatacggccacgataaactgccggtgtacggcatcggccgcgatcagaccaccgaacactggaccagcgtgctgcgccagctgatccacctgggctttatcacccagaacatcgccatgcactcggcgctgcaattgaccgaggcggcgcgtccggtgttgcgcggcgaagtggcgctgcagctggcggtgccgcgtatccagagcctgaagtcgcgcggtagcgccaaccaaaaatcctacggcggcaattacgatcgcaagctgttcgccaagctgcgaaaactgcgcaaatcgatcgccgatgaagagaacattccgccgtatgtggtgttcaacgacgccacgctgctggaaatggccgaacagatgccgatcaaggccggcgatctgctgagcgtcaacggcgtcggccagcgcaaactggagcgtttcggcgcgccctttatggcgatgatccgcgaccatctcgacaatgacgaagactga

SEQ ID NO: 426500 - DNA, 879 bp, Serratia marcescens
atgcgcattttgtcagggatcgtttccgccacgctgctgatgccggcgctggcattggctgcggaagccaaagagcagcagattcacgataagccggcggtgcgcggcagcattatcgccaacctgctgcaggagcacgataatccgttcacgctgtacccttacgatcccaattatctgctgtacaccgacaccagcgatatcaaccaagaggccatcaagacatacaactgggccgacaaggcgcgcaaggacgaggtgaaataccagcttagcctggcgtttccgctgtggcggggcattgccggcgacaactcggtgctcggcgcgtcttatactcagcgctcctggtggcaattgtccaaccgcggcgagtcttcgccgttccgcgagaccaactacgagccgcagctgttcgtggggtgggcgaccgattaccgctttgccggttggacgctgcgcgatgttgaaatcggcgttaaccatcagtccaatggccgctcggacccgacgtcgcgcagctggaatcgcggctatgcgcggctgatggcgcaaaacggcaactggcaggtggatctcaagccctggttccgtttctcggagagctcgagcaacgacgacaacccggacatcaccaaatacatgggatactaccggctgaaggtcggttacgcctggggcgacagcgtgttcagcgtcgacagccactacaactggaacagcggctacggcggcgcggaactgggctggagctatccgatcacccgcaacgtgcgattctatacccaggtgttcagcggctacggcgaatcgctgatcgactacaacttccggcagacacggatgggcgttggtgtcatgctgaacgatattatgtaa

SEQ ID NO: 426501 - DNA, 471 bp, Serratia marcescens
atgtcgaccacaccactaaccctggaagccgcccgccgcaagatcggcgaaatctttgtctaccacatgccgttcaaccgcgagcttggcctggagctgcgccgcttcgacgatgattacgtcgagctgagcttcaccaaccagcgcaagctggtgggcaacgccgcacaggaaattctgcacggcggcgtgatcgccgcggtgctcgacgtcgccgccgggctggcctgcgccggcggggtgctgacgcgcatggagccgctgatcgaagaagagatcgccgccaaactgtcgcgcatgggcaccatcgatctgcgcgtcgactacctgcgccccggccgcggcgaacacttcgtcgcctccgccagcgtgctgcgcagcggcaataaggtcgccgtcgcgcgcgtagaactgcataaccacgacggcctgcatatcgcgaccgcgaccgccacctatctggtcggctga

SEQ ID NO: 426502 - DNA, 888 bp, Serratia marcescens
atggacgcaaagcaaacgcgtcagggcattttcttcgccctggccgcctattttatgtggggcatcgccccggcctatttcaaactgattcagcaagtatccgcggacgagatccttacccaccggatcatctggtcgtttttcttcatgctggcgctgatcacgctgggccgcaactggccgaaagtgcgcgccgcctgccaaaatcgcaaacggctgctgctgctggcggtcaccgcgctgttgatcggcggcaactggctgctgttcatctgggcggtgaacaaccaccatatgctggaagccagcctgggctacttcatcaacccgctggttaacgtgctgttggggatgctgtttctcggcgagcgctttcgccgcatgcagtgggtggcggtggcgctggcgttcaccggggtgctggtgcagctctggcagttcggttcgttgccgatcatcggtctggggctggcgttcagcttcgccttctacggcctgctgcgcaagaaaatcgccatcgacgcccagaccggcatgctgatcgaaacgctgtggctgctgccggtggcggcggcctatctgttcctgttcgccgacagccccaccagccacctgagcgccaacccgtggtcgctgaacctgctgctggtcgccgccggcatcgtcaccaccgtgccgctgctgtgcttcaccgcggcggccacccggcttcgcctgtcgacgctcggtttcttccagtatctcggcccgacgctgatgttcctgctggcgatcaccttctacggcgaaaccgtcggccaggacaaactggtgaccttcggctttatctgggcggcgctgatcctgtttaccctcgacgcgctctacacccagcgcaagctgcgctga

SEQ ID NO: 426503 - DNA, 951 bp, Serratia marcescens
atgctgagcgcttttaaattagataaccgccgcttgtcccgtctggagctggacgactcggatgatctcacgtcatcgctgtgggttgatctggtcgagccggaagagggcgagcgtgagcgcgtgcagaatgagctgggacaaagcctggcgacgcgtcccgaactggacgacatcgaagcctccgcccgtttcttcgaagatgaagacggtctgcatatccactccttcttctactttgaagatgcggaagatcacgccggcaactccacggtggcgttcaccatccgcgacggccgcctgtataccctgcgcgagcgtgaactgccggcgtttcgcctgtaccgcatgcgcgcccgcaaccagaccatgctcgaaggcaacgcctacgaactgctgctggatctgttcgaaaccaagattgaacagctggcggacgagatagagaacatctacagcgatctggaacagctcagccgggtgatcatggaagggcatcagggcgatgaatacgacgccgcgctatcgacgctggcggagctggaagatatcggctggaaggtgcgtttgtgtctgatggatacccagcgcgcgctcaacttcctggtgcgcaaggcgcgtttgccgaccggccagctggagcaggcgcgtgaagtgctgcgcgacatcgaatccctgctgccgcacaacgaatcgctgttccagaaggtgaacttcctgatgcaggcggcgatgggcttcatcaacatcgagcagaaccgcatcatcaagatcttctcggtggtgtcggtggtgttcctgccgccgacgctggtggcctccagctacggcatgaacttcgaattcatgccggagctgaaatggtcgttcggctacccgggcgccatcaccttgatgatcctggccggtctggccccttacctgtacttcaagcgcaagaactggctgtaa

SEQ ID NO: 426504 - DNA, 474 bp, Serratia marcescens
atgaaacagattaccgcccatgaactgaccgcgatgagcgaacaggccgccagcgtgccccgcctgcgcgcgcaccgcaccttacacgaagagttgagcgacccggtgcaacgcctggcgatcgccatggaacccggcacctatatccgcccgcaccgtcacccgcaaacctgggaactgctgacgccgctgcgcggccgttttgtcgtgctgcagttcaacgatgacggcgtcgtgatgcagcgcaccctgctcggcgaagaaaccaaagtgctggagatgccggcatttacctggcatgcggtgttgtcagtcgatgccggcggcgtggtgttcgaagtaaagcagggcccgtatcaggcgttgaccgaagaggactgcatgccgtgggcaccgcaggaaggcggtgaaggcaccgaagcggtgatgcgctggtatgccaccgcgcaggtcggcgaccgctaccctcactga

SEQ ID NO: 426505 - DNA, 2163 bp, Serratia marcescens
atggacgtctccgatctgctcgacagcctgaatgaaaaacaacgtgaagccgtggcggcgccgcgcagcaacctgttggttctggccggagcgggcagcggcaagacgcgggtgctggtgcatcgcatcgcctggctgctgtcggtggagaactgctcgccgtattcgatcatggcggtgaccttcaccaacaaggcggcggcggaaatgcgccaccgtatcgaacatctgatcggcaccagccagggcggcatgtggatcggcaccttccacggcctggcgcatcgtctgttgcgcgcccatcacctggaagccaacctgccgcaggatttccagatcctcgacagcgacgaccagctgcggctgctcaagcgcatcatcaaggcgctgaacgtcgacgagaagcagtggccgccgcgtcaggcgatgtggtacatcaacggcaagaaagacgagggcctgcgcccacagcacgtcgagacctacaacaacccggtagaagccacctggctgcgcatttaccaggcctatcaggaagcctgcgatcgcgcggggctggtggatttcgccgagctgctgctgcgcgcgcacgagctgtggctgaacaagccgcatatcctcaaccactaccgcgaacgtttcaccaacgtgctggtggacgaattccaggataccaacagtatccagtacgcctggatccgtttgctggcgggcggcaacagcaacgtgatgatcgtcggcgacgatgaccagtcgatctacggctggcgcggcgcgcaggtggaaaacatccagcgcttcctgaaagatttccccggcgcggaaaccatccgcctggagcagaactaccgttccaccagcaacatcctgaaagcggccaacaccctgatcgccaacaacgacgggcgcatgggcaaaaacctgtggaccgaaggcggcgaaggcgaaccgatctccatctactgcgccttcaacgaactcgacgaagcgcgcttcgtggtcaaccgcatcaagacctggcaggacaacggcggcgcgctgaacgactgcgccatcctgtaccgcagcaacgcccagtcgcgcgtgctggaagaggcgctgctgcagacggcgatgccgtaccgcatctacggcggccagcgcttcttcgaacgccaggaaatcaaggatgcgctggcttacctgcgcctcatttccaaccgcaacgacgacgcagccttcgagcgcgtggtcaacaccccgacgcgcggcatcggcgatcgcaccctcgacgtggtgcgccaggcggcgcgcgatcgccagctgacgctgtggcaggcgacgcgcgagctgatgcaggacaaggtgttggccggccgcgctgcgtcggcgctgcagcgctttatcgaactggtggagtcgctggcgcacgaaaccgccgacatgccgctgcacgtgcagaccgaccgggtgatccgcgattccgggctgttcatcatgtatgagcaggagaaaggcgaaaaggggcaggcgcgcatcgaaaaccttgaggaattggtgacggcgacgcgccagttcagctatcaggacgaagatcaggatctgatgccgctgcaggcgttcctgtcgcatgcggcgctggaagcgggcgaaggccaggccgacgcctatcaggacgcagtgcagctgatgaccctgcactcggccaaggggctggagttcccgctggtgtttatcgtcggcatggaagagggcatgttcccgagccagatgtcgctggatgaaggcggccgtctggaggaggagcgccgcctggcctatgtgggcgtaacgcgcgccatgcagaagctgacgctgacctatgccgaaacgcgccgtctgtatggcaaagaggtttaccaccggccgtcgcgctttatcggcgaactgccggaagagtgcgtggaagaagtgcgcctgcgcgccagcgtatcgcgcccggtcaatcaccgccgtatgggcacgccgatcagcgagaacgataccggctacaagctgggccagcgcgtgcgccatcccaagtttggcgaaggcaccatcgtcaatctggagggcagcggcgagcacagccggctgcagatcgccttcccaggcgagggcatcaagtggctggtggcggcctacgctcgcctggaaacggtataa

SEQ ID NO: 426506 - DNA, 717 bp, Serratia marcescens
atgcatttttatcgcccgctgcgcccgctggcggcgctgactttcgatctggacgacacgctgtatgacaatcgcccggtgatccggcaaaccgaacaacagtcggtggccttcctgcagagctaccaccccggtctgaacagcttccagtcggcggatttccaccgcctgcgccaggagctgcgcgaacaggatccggagatctaccacgacgtcacccagtggcgctggcgcgccattcatctggcgctgagccggcaggggctgcgcgatgccgacgcggcgatcggggccgatgcggcgatgcaaaacttcgcgctgtggcgcagccgcatcgaggtgccgcaagcgacccacgccacgctgaaggcgctggccgcgcgctacccgctggtggcgatcaccaacggcaacgccgatccggcgcagtgcggcctggacggttacttccagttcgtgttgcgctccgggccggatgggcgcgccaagccgtatcaggacatgtatcacctggccgtcgagcggctgggcgtggcgcccgagaagatcctgcacgtgggcgacgatctgaccaccgacgtcgccggcgcgctgcgcgcggggctgcaggcctgttggatcaacgatcggcaacgctgcctgatgcaggccgccgacagccgcctgctgccgcatattgagatttcgcagttggcatcgctgacagcattgttataa

SEQ ID NO: 426507 - DNA, 912 bp, Serratia marcescens
atgacgccgattgcgcccagcctgcagcagccggtggacgcttttctgcgttatctcaaggtagaacggcaactcagcccgctgacgcagcttagctattcgcgccagctggcggcgctgatgcgcctggcgcaggagatcggcgtcaccgactgggcggcgctggacgccgcccgggtgcgcatgctggcggcgcgcagcaaacgcgccggcctgcagtccgccagcctggcgctgcggctttcttcattgcgcagtttcctcgactggctggtcagccagggcgtattgcacgccaaccccgccaaaggcatccgcacgccgcgcagcggccgccatctgccgaaaaacatcgacgtcgatgaaatgaaccagctgctggagatcgatctcaacgatccgctggcggtgcgcgatcgcgccatgctggaggtgatgtacggcgccggtctgcgcctctccgaactggtggggctggattgccgccatgtcgatatggcggccggcgaggtgtgggtgatggggaaaggcagtaaagagcgcaaattgccgatcgggcgcaccgccgtcacctggctggaacactggctggcgatgcgcgatctgttcgggccggaagatgacgcgatgttcctgtccaatcaggggcggcgcatctcgacgcgcaacgtgcaaaagcgcttcgccgaatggggcgtgaaacagggcgtcaacagccatattcacccgcacaagctgcgtcactccttcgccactcacatgctggagtccagcggcgatctgcgcgcggtgcaggagctgctcggccacgccaacctgaccaccacgcaaatttatacccacctcgactttcaacatctggcgaacgtgtacgatgccgcgcatccgcgcgccaaacgggggaaatcctga

SEQ ID NO: 426508 - DNA, 714 bp, Serratia marcescens
atgaaaagcgtagaagaacagagcgtcgccggcctggcgctggatgacgacaccgtgatgcagtacctgctgcagaacccggatttctttattcgcaacgcgcgccaggttgagcagatgcgcgtgcctcacccggtgcgcggcaccgtttcgctggtggaatggcatctggcccgccagcgcaatcacatcgagcggctggaagaagagatcacgctgctgatggagcaggccagcgccaacgaagggctgttcgcccggttgttgcacctgcaggccgatctggccaccgccgacagcctgcaggacatgctcaaccggctgcagcgctgggcgcgcggttttggtttggccggcgccacggtgcgcctgttcgccgagcgctggaagatcggcgcgccttccgatttcacccatctggcgctgacgcgttcggcgttcgagccgtttcgcattcagcggctgggcagcgaacaacattacctcggcggcctgaacggccccgaactgctgctgctgttgccgcaggccaaacagattggccagattggctcggtggcgctgtcgatgctgggcgacgatggcgaactgggcatggtgatcttcagcagccgagatacgcaacactatcagcagggcatgggcacggtgatgctcaatcaactggcgcgcatgctgccggcgctgctggaacgctgggtcgaacgcgcatga

SEQ ID NO: 426509 - DNA, 825 bp, Serratia marcescens
atgcagttctccaaaatgcacggtctgggcaacgactttatggtggtcgatgccgttacacagaatgtctatttttcacctgagctgatccgccggctggccgatcggcacctgggcgtcggctttgaccagatgctggtggtagaaccgccttacgatcccgagctggattttcactaccgaattttcaacgccgacggcagcgaagtggcgcagtgcggcaacggcgcgcgctgcttcgcgcgctttgtgcggctgaaagggctgaccaacaaacgcgacatccgcgtcagcacccaaaccgggcgcatggtgctcagcgtcaccgacgacgatctggtgtgcgtcaacatgggcgagcctaatttcgatccgcaggcggtgccgttccgcgccgccaaggctgaaaagacctacatcatgcgcgccgcggaacacaccgtgctgtgcggcgtggtgtcgatgggcaacccgcattgtgttttgcaggtggacgatgtaaaaaccgccaaggtggagctgctcgggccggtgctggaaggtcatgagcgcttcccggaacgggccaacatcggctttatgcaggtggtcagccgcgatcatatcaagctgcgtgtttacgagcgcggcgccggcgaaacgcaggcctgcggcagcggcgcctgtgcggcggtggcggtggggatccaacaggaattgctgtcagaagaggtgcatgtagaactgccgggcggcagcctgcatattcgctggaaagggccgggcaacccgctgtttatgaccggcccggcaacccatgtctatgacggatttattcatctatga

SEQ ID NO: 426510 - DNA, 213 bp, Serratia marcescens
atgcaaatgaaaaaacaactacgctatgcgctgatggccgttctggttaccggcctcgccggctgtggtctgaaaggcccgctttacttcccgcctgccgaccccgccagccaaaaaccggccaagccgccggtgcaaacgggcgatcaggtgcaaaagaaccagcaggagcagtctggctctcagcaaaaaccgtcgatggtcgaccagtaa

SEQ ID NO: 426511 - DNA, 321 bp, Serratia marcescens
atgaacgacagcgagtttcaccagttggccgaccagctgatgctgaatattgaagagacactggacgattttgacggcgatgcggatatcgattacgaaaccaatggtggcgtaatgacgctgagcttcgaaaacggcaccaaaatcgtcatcaaccgccaggagccgctgcaccaggtgtggctcgccaccaaggccggcggctaccacttcaactaccgcgacggcgcttggctatgcgatcgcagcgggcagccgttttaccagctgctcagcgaagcggccagcgcgcaggccggcgaggaattgcgtttttcctga

SEQ ID NO: 426512 - DNA, 2553 bp, Serratia marcescens
ttgtacctctacatcgagacattgaagcagagactggatgcgatcaatcagctacgcgtcgatcgcgccctggcggctatgaagcccgcgtttcaacgggtatacagtctgctgcccaccttactgcaccaccaccacccgctgatgccgggttacctgaacggtaacgttccccacggcatttgcctctacacgcctgatgaaactcaacaagattacctgaacgatttagaagacaaatggggcagcccgtttgacaaaccggccagcggcgagctgccgatcaccggcgtctattcgatgggcagcacctcgtctatcggccaaagctgcagctcggatctcgacatctgggtctgccaccagtcctggctggacaacgaagaacgcacccgcctgcagcaaaaatgcagcctgcttgagaagtgggccgcctcgatgggggtggaagtcagcttcttcctgatcgacgaaaaccgcttccgccataatgaaagcggcagcctgggcggcgaagactgcggctcgacgcagcatatcctgttgctcgacgaattctaccgcaccgcggtgcgcctggccggcaagcgcatcctgtggaacatggtgccgggcgaagaagaagcgcactacgatgagtacgtgctgtcgctgtacgcgcagggcgcgctgacgccgaacgagtggctggatctcggcggcctgagttcgctgtcggcggaagagtacttcggcgccagcctgtggcagctgtacaagagcatcgattcgccttacaaggcggtgctgaagaccctgctgctggaagcctattcctgggaatatcccaatacccaactgctggcgacggacatcaaacatcgcctgcatcagggcgagatcgtcagcttcgggctcgacgcctactgcatgatgctcgagcgcgtcacccgctacctgaccgacatcaacgacaccacccgcctcgatctggcccgccgctgtttctacctgaaagtgtgtgaaaagctgtcgctggccaaggcctgcgtcggctggcggcgcgagatcctcagccagctggtcagcgaatggggctggagcgaagagcgtctggcgatgctggacaaccgcgccaactggaaaatcgaacgggtgcgcgaagcgcataacgagctgctcgacgcgatgatgcagagctaccgcaacctgatccgtttcgcccgccgcaacaacctcagcgtcagcgccagcccgcaggatatcggcgtgctgacccgcaaactgtacgcggcgttcgaagcgctgcccggcaaggtgacgctggtgaacccgcagatttcgccggacctgtcggaaaacgacttaacctttattcacgtgccggttggccgcgccaaccgcaccggctggtacctgtataatcaggcgccggccatggattctattgtcagccatcagccgctggaatataaccgctacctgaacaagctggtggcctgggcctattttaacggcctgctgacgccgcagacccgcctgcacatcaagagcggcaacctgtgcgacaccgccaagctgcaggaactggtggccgacgtttctcatcacttcccgctgcgcctgccggcgccgacgccgaaagcgctgtacagcccgtgcgagatccgccatctggcgatcatcgtcaatctggaaaacgatccgaccgccgccttccgcaatcaggtggtgcatttcgatttccgcaagctggacgttttcagcttcggccagcagcagcagtgcctggtgggcagcatcgatctgctgtaccgcaactcctggaacgaagtgcgcaccctgcatttcagcggcgagcagtcggtgctggaagcgctgaaaaccattctcggcaaaatgcaccaggatgccgcgccgccggagtcggtggaagtgttctgctacagccagcacctgcgcggcctgatccgcacccgtatccagcagctggtgtcggagtgcatcgagctgcgcctgtccagcacccgcctggagcccggccgcttcaaggcggtgcgcgtcgccgggcagacctgggggctgttcttcgagcgcctgagcgtatcggtgcaaaagctggagaacgcggtggagttttacggcgccatctccaacaacaagctgcacggcctgtctatcaaggtggaaaccgatcaggtgcatttgccgccggtggtggacggcttcgccagcgaggggatcatccagttcttcttcgaagacacctcagacgacaagggcttcaatatctatattctggacgagtcgaatcgggtggaggtgtaccaccactgcgagggcagtaaagaggagctggtgcgcgacgtcagccgcttctattcatcctcgcacgatcgcttcacctacggctccagcttcatcaacttcaacctgccgcagttctatcagatcgtgcagctcgacgggcgcacgcaggtgatcccgttccgcagcaacgtgctgtccagcctgtgcgtgacggtggccgacggcgccgcgcagccgctgaaacagcagttccagctgcattga

SEQ ID NO: 426513 - DNA, 942 bp, Serratia marcescens
atgttagacaaaattattcgaattgccacccgacaaagcccgcttgcactctggcaagcacattatgtgcagcaacgtctgatggcctgccatcccggcctgcaggtcgagttggtgccgatggtgacgcgcggcgacgttattctggatacgccgctggcgaaagtcggcggtaagggcctgtttgttaaagaactcgagctggcgctgctggaaggccgcgccgacatcgccgtgcactcgatgaaagacgtgccggtcgatttccccgccggcctgggtttgaccaccatttgcgaacgcgaagatccgcgcgacgcttttgtttccaaccgtttcgcctcgctcgatcaactgccgcagggcagcgtggtcggcacttccagcctgcgccgccagtgccagctgcgtgaacgccgcccggatctgatcgtgcgcgacctgcgcggcaacgtcggcactcgcctggccaagttggacaacggcgactatgacgcaattattctggcggtggccggcctgaaacgcctggggctggagcaacgcatccgcagcccgctgagcgccgaagagtgcctgccggcggtcggccaaggtgcggtcggcattgaatgccgtctcgacgacagcgtcacccgcgcgctgctggcgccgctgaaccatgcggccaccgaaacccgcgtgcgcgccgaacgggcgatgaacacccgtctggaaggcggctgccaggtgccgatcggcagctatgccgaactggatggcgacagcctgtggctgcgtgccttggtcggcgcgccggacggcagccagatggtgcgcggcgagcgccgcggcccggccgccgaggccgaacggatgggcgttgagctggcggaagagctgctggcgcgcggcgcgcgcgagatcctgcgcgaagtttatcagggaaatccgccggcatga

SEQ ID NO: 426514 - DNA, 741 bp, Serratia marcescens
atgacgatcctggtaacccgcccatcgccttcgggagagcagttagtgagccggctgcgcgcactcggccgggttgcctatcatgcaccgctgatcgacttcgcccccggcggcgatctgccgcagctgccgcaggcgttgcagcagttgaacgccggcgatctggtattcgtgctgtcgcagcattcggtgaactatgccgattcggtcatcggccgcgccgggctgagctggcccgcgcacctgacttattacgccatcggccgcaccaccgggctggcgctgcaccgcatcagcagtttgccggtggaatacccgcgggaacgcgagatcagcgaaacgctgctgctgctgccggcgctgcaaaagctggcgggcaaacgcgcgctgattttgcgcggcaacggcggccgcgagttgctgggcacgacgctgagcgagcgcggcgccgacgtcagctattatgaatgctatcaacgcagcccggtgcactacgacggcagcgagcagagcgcccactggcagcgcgccggtgtggatacgctggtggtgaccagcggtgaaatgttacaacagctctatactttagttcctgattactatcgttcttcatggctgctgcgttgccgcctggtagtagtgagcgaacgcctggctaccctcgcccgggatttgggctggcgtacgattcgggtagctgacaacgccgataatgacgcgctgatccgcgcgctacaataa

SEQ ID NO: 426515 - DNA, 1125 bp, Serratia marcescens
atgacggaacaaaataccccatccgccccggttgaagagccaaccaccgcggttgagagctcccagcagccagccgctgccagccgcaaaggcaagaacaccggcccggtgctcggcgcgatcgctatcgtgctggtcatcgccctcggcgcgggcggctattaccacacgcaccagcaggcgcaacagctgatcgccgccaatcaggcgctgcagcagcagcttgaaggcgtgaagcagagccagcagcaggaaagaaatgcgctggaaggcctgttgcagcagcagggtaaaaccctggacgccgccgatcgcgagcaggctaacctcgcgcgccaactgagcgagctgcaggaaaaagtggcgaccatctccggcagcgacgccaaaacctggctgctggcgcaggccgatttcctggtgaaaatggccggccgcaagctgtggagcgatcaggacgtgaccagcgccgccgcgctgctgaaaagcgccgacgccagcctggcggacatgaacgatcctagcctgctcgacgtgcgccgcgccattaccgaagacatcggcacgcttgctacgctgacccaggtcgattacgacggcatcatcctcaaggtcaatcagctgtccaatcaggtggataacctgcgcttggcggacaacgacaccgacgaagcgccgatggatcaaaacagcagcgagctctccggttcgatcgccgagtggcggcagaacctggccaagagctggcgcaatttcatggccgacttcattaccatccgccgccgcgacgccagcgccgaaccgctgctggcgccgaaccaggacatctacctgcgcgaaaacatccgttcgcgcctgctggtggccgcgcaggccatcccgcgccaccagaacgagacctacaagcaatcgctggaaaccgtctccacctgggtgcgcgcctatttcgacaccaccgatccggcgaccaaggccttcctggaagagctggacagcctgagccaacagtcgatctcgatggacgtgccggatcagctgaaaagccagccgctgctggaaaaagtgatgcagacccgggtgcgcaacctgatgacccagtcccctgccgctcaccaggagggttaa

SEQ ID NO: 426516 - DNA, 1197 bp, Serratia marcescens
atgttacgcgtgctatttctgttcctggtggtgatcgccagcgtggtgctcgggccgatgttggccgggcatcaaggctatgtgctgatccagaccgacaactacaatatcgaaaccagcgtcaccggcctagcgatcatgctggtgctgctgttcgtggtgctgctggtgatcgagtggatcctgcgccgtctcttccgcaccggcgcccgcacgcgcggttggtttatcggccgcaagcgcactcgcgcgcgccagcaaaccaaagccgcgctgatcaagctggcggaaggcgactacaagcaggtcgagaagctgatgacgcgcaacgccgatcatgccgaacagccggtggtgaactacctgctggccgccgaggccgcacagcaacgcggcgatgacttccgcaccaaccaatatctggagcgcgctgccgaagcggccgacaccgatcagctgccggtggatatcacccgggttcgcatccagctggcacagggcgagaaccacgccgcgcgccacggcgtcgatcgcctgctgaaccaggcgccgcgtcatccggaagtattgcgcctggcggaacaagcctatctgcgcaccggcgcctatgcatcgctgctggaagtgctgccgtcgatgcgtaaaatcgaactccacagcgaagagcaactgcaggcattgcagcagcaggcttatatcgggctgatgaatcaggcgatggcggacgaaggcagcgaaggcctgaagcgctggtggaaagatcagagccgcaagacgcgtcacgaagtgccgctgcaaatcgcgatggtggaacacctgatcgaatgcaacgaccacgaactggcgcaggagatcgtgctcgacagcctgaagcgccaatacgacgagcgcctggtgctgctgctgccgcggctgaagtccggcaaccccgagcagttggagaaagcgctgcgccagcagatgaagcagcacggcgcgacgccgctgctgaacagcacgctggggcagctgctgatgaaacacggcgagtggcagcaggcagccgacgtcttccgcgaagcgctgaaacagcgcccggatgcctacgactacgcctggttggccgatacgctggaaaaactgcatcgttcggatgaagcggcgcagatgcggcgcgaaggactgatgttgacgctgaaacagaacggcggcgaatag

SEQ ID NO: 426517 - DNA, 1137 bp, Serratia marcescens
atgaaaggacgttggggcaaatacctgctgggcgggttgatggtggcggtgttggcgggctgttcgtccaagccgaccgatcggggtcagcaatataaagacggccgtctggatcagtcgctggagctggtcaatcagcccaacgccaaaggttcgccggtcaacgccaaggattattcggatcagctgatggagatcaagtacgcgtcgccttcgctgtttaaccgcaacaacggcacctatcaggcggtacaaaattggatggcgtccggcgccgacacgcgcatgctgagccagtacggcctcagcgcttaccagatggaaggcgtcgacaattacggcaacgtgcagtttaccggctactacacgccggtggtgcaggcgcgctatacccaacagggcgagttccgctatccgctgtaccgcatgccgccgaagggcaggggccgcttgccggatcgcgcgggcatctattccggcgcgctcgacgatcgctatatcatcgcttacaccaactcgctgatggacaacttcatgatggaagtccagggcagcggctatgtcgactacggcaacggccagccgctggtgttcttcggctacggcggcaagaacggccacgcctatcgcagcatcggcaaggtgctgatcgatcgcggcgaagtggccaaggcggacatgtcgatgcaggcgatccgtcagtgggcggatacccacagcgccgcagaggtgcgtgagctgctggagcaaaacccatcgttcgtgttcttccgcccggaagcttttgcgccggtgagaggcgccagcgcggtgccgctgatcgccaaagcctcggtggcctccgatcgttcgctgatcccggcgggcaccacgctgctggccgaagtgccgctgctggacaacaagggtaaattcacgggaaaatacgagatgcgtctgatggtcgcgctcgacgtgggcggcgccatcaagggccagcattttgacatgtatcagggcatcgggccggaagccggccactcggcggggtactacaaccactatggccgcgtctgggtgctgaagaacaacggcggcggtcagctgttcagcgccaatcagtcaaacggcggcggttcgttgctggccacccgctaa

SEQ ID NO: 426518 - DNA, 807 bp, Serratia marcescens
atgagcacagcttattcggaagcctatctgcagcgtttcggcggcacggcgcggttgtacggccagcaggcgctggcggtgttcgcgcaggcgcacgtctgcgtgatcggcatcggcggcgtgggttcctgggcggctgaggcgctggcgcgcaccggcatcggcgccatcaccctgatcgacatggatgatgtttgcgtcaccaataccaaccgccaaatccacgcgttgcgccaacacgtcgggcaatcgaaaaccgaggtgatggcggagcgtatcctggcgattaacccggaatgccgggtgacctgcatcgacgatttcatcaccccggacaacgtcgccgagctgctggatcataacttcagctacgtcatcgacgcgatcgacagcgtgcggccgaaggcggcgttgctgtcatactgccgccgcttcaagatcccggtggtgaccaccggcggcgccggcgggcagattgacccgaccaagatcgaagtggccgatctggcgaaaaccatccaggatccgctggccgccaagctgcgcgagcggctgaagcacgatttcaacgtggtgaaaaacggcaagggcaagctgggcatcgactgcgtcttctccagcgagccgttggtttacccgcagccggacggttcggtgtgcgcttcacgcagcacggcggaagggccgaaaagaatggattgcagcgcggggttcggcgcggcgaccatggtcaccgctactttcggcttcgtcgccgtgtcgcacgcgctgaaaaagatggtggcgaaggcggcgcgtcaggcgtaa

SEQ ID NO: 426519 - DNA, 435 bp, Serratia marcescens
atgctcgccccccatccttttggccgagaggtcaccgccgaggcgttgatcgccaccttcagcacgctgaaacagtgggaagatcgctaccgccagctgattatgctcgcgaaacggctgccgccgctgccggaggccttgcgcagtgaagaaatggcgctgagcgggtgtgaaaaccgcgtctggttggggcaccagttgctggaagacggcacgctgcacttctatggcgacagcgaaggccgcatcgtgcgcggcctgctggcggtgctgctgaccgaagtggaagggaaaacgccgcagcagatcgccgcattggatccgctggcactgttcgaccggttagcgctgcgcgcccagctgagcgccacccgcgccggcggcctggcggcgttggccgccgccgtcaaggcgatcgccgcccgttacgcctga

SEQ ID NO: 426520 - DNA, 1206 bp, Serratia marcescens
atgacgccttttaaccccagcctttttcgccaacagtttcccgcgctcgcgcaggacggcatctatctggacagcgccgccaccgcgttaaaaccgcaggcggtgatcgacgccacgcagcaattttatcgcgatgacgccgccaccgtgcaccgcagccagcatcgggcggcgcaggatctgaccgcccgcttcgagcaggcgcgcggccaggtggcgcagctgatcaatgcgccgtcggccgacgacatcgtctggacgcgcggcaccaccgaagcgatcaacctggtggcgcagagctacctgcgtccgcgtctgcagccgggcgatgaaatcctggtgagcgaagcggaacaccacgccaacctgatcccctggctgatggtggcggaacaaaccggcgcgcgggtggtgaaactgccgatcggcgccgatcggttgccggatttgacgcagctgcccaccctgctcaacgacaaaacccacctgttggcgctggggcaaatgtccaacgtcaccggcggctgcccggatctggcgccggcgatcgcgatggcgcatgccgccggcgcacgcgtgatgatcgacggcgcacagggcgtggttcacggcccggccgacgtacggctgctcgacatcgacttctacgccttttccggccacaagctgtatgggccgaccggcatcggcgcgctgtacggcaaagccgagctgctagcgcagatggtaccctggcaaggcggcggcaagatgctgacccaggcatcgttcgacggctttgccccgcaaaagccaccgcatcgcttcgaagccggcacgccaaatatcgccggcgtgctggggttggccgcggcgctcacctggctcagcgaacaggacatggcggcggcggagcgctacagccgcgagctggcggaccaggcggaacagcggctggcacagttgccgggctttcgcagcttccgcagctcgggctccagcctgctggcgttcgacatcgccggcgtacaccacagcgacatcgtcaccctgctggcggagcaaggcattgcgctgcgcgccggccaacactgcgcgcagccgctgatggcggcgttgggcgtcagcggcacgctgcgcgcgtcgttcgccccctacaatacgcaacaggacgtcgatacgctggtcagcgcgttgactcacgccctcgatctgctggccgactga

SEQ ID NO: 426521 - DNA, 225 bp, Serratia marcescens
atgaagaaaacagccgcagttctctctgccctgatgcttacgttcaccctggccgcctgttccagcaactacgtgatgcataccaatgacggacgcaccattgtcgctgacggcaagcctaaagtggacaacgataccggcatgatcagctataaagacgccaatggcgtcgagcagcagatcaaccgcgccgatgtgaaagagatggttgaaagcaaccagtaa

SEQ ID NO: 426522 - DNA, 918 bp, Serratia marcescens
atgtctaaacgcttacctcccctcaatgcgctgcgcgtgttcgatgcggccgctcgccacctgagtttcaccaaggcggcggaagagctgttcgtgacccaggccgcggtgagccaccagatcaagtcgctggaggacttcctcgggctgaagctgtttcgccggcgtaaccgctcgctgctgctgaccgaagaggggcaaagttactacctcgatatcaaggagatcttctcttcgatcaacgaggcgacgcgcaagctgcaggcgcgcagcgccaagggggcattgaccgtcagtttgccgccgagcttcgccattcagtggctggtgccgcgcctgtccggctttaactcagcttatccggggatcgacgtgcgcatccaggcggtggaccgcgaagaagacaagctggcggacgacgtcgacgtggcgattttctacggccgcggcaactggccggggctgcgcgccgagcgcctgtatgcagaatatctgctgccggtgtgttcgccgagcctgctgaccggcgatcatccgctgaaaaccgccgaggatctggcttatcatacgctgctgcatgacgtttcacgccgcgactggctggcgtatacgcgccaattggggttgcagcacatcaacgtgcaacaggggccgattttcagccacagcgccatggtggtgcaggcggcggtgcatggccagggcgtggcgctggtgaacaacgtgatggcgcaaaccgagattgaagccggtcgcctggtgtgcccgttcaacgatgtgctggtcagtaaaaacgctttttatctggtatgtcatgacagccaggcagaactgggtaaaatagccgccttccggcagtggatcctggcgcgtgccgccagtgaacaagagaagttccgcttccgctacgaacaataa

SEQ ID NO: 426523 - DNA, 381 bp, Serratia marcescens
atgctggttttcgccgctatcagcggctttgtgtttgtcgcgttgggcgcattcggcgcgcatgtgttaagcggtacgctcggcgccaacgaaatggcctggatccgcaccgggctggagtatcaggggttccacaccctggccatcctggcgctggcggtcgcgatgcagcgccgcgtgagcctgtggttttactggagcggagcgctgttggcgttcggcaccgtgttgttcagcggcagcctctattgcctggcgctgtcgcacctgaaggtctgggtatacatcacgccggttggcggcgtgtgcttcctgatcggctggatattgatgttgattggcgctttgcgtctgaggaaaaaggccgagcgccatgaataa

SEQ ID NO: 426524 - DNA, 1104 bp, Serratia marcescens
atgaataagattgcgttgtactgccgtcccggcttcgaaaaagagtgcgcggcggagatcaccgacaaagccgcccagcgggagattttcggctttgcgcgggtaaaagagcacagcggttacgtgctgttcgaatgctatcagccggatgatgccgaccgcctggcgcgggaaattccgttccgcgaactgattttcgcccgccagatgatcgtggtgggcgagctgctgcgcgatctgccgccggaagatcgggtatcgccgatcgtcggcatgctgatcggcgtggttgatcgcggcggcgagctgcgggtggaagtgccggacaccaacgaaagcaaagagctgatgaagttctgccgcaagctgacggtgccgctgcgcgccgcgatgcgcgagcagaaggtgctgatggcgcgcgagaaccccactcgcccggtggtgcacgtgttcttcatcgcgccgggctgctgctatgtcggttactcctacagcaacaacaactcgccgttctacatgggcattccgcgtctgcgcttcccggccgatgcgccgagccgttcgacgctgaagctggaagaagcgttccacgtgttcatccccgccgacgagtgggacgaacgcctggccagcggcatgcacgcggtcgatctgggggcctgcccgggcggctggacctatcagctggtaaaacgcagcatgatggtgcattcggtggataacggcccgatggcgccgagcctgatggaaaccggccaggtgacgcaccaccgcgccgacggcttcaagttcgagccgaacagcagcaagatctactggctggtgtgcgacatggtggagaagccggcgaaggtaaccagtctgatgatccagtggttggtgaaaggctggtgccgcgaagcgatttttaacctcaagctgccgatgaaaaagcgctacgaggaagtgtcgcagaacctgatgagcatccgcgaagcgctgggcgctgccggcgtcagcgtcgaagtgcatgccaagcagctgtatcacgaccgcgaagagatcaccgtacacgtgcgccgcatgtggtcggcggtgccgggccggcgcgacgagcgcgattaa

SEQ ID NO: 426525 - DNA, 759 bp, Serratia marcescens
atgatgatacacctactgattgtcgacgccctgaacctcatccgccgcattcacgccgtgcagggttccccttgtgtcaacgcctgccgccacgcgctgcagcagttgatccagcacagccgcccgacccacgcggtggcggtcttcgacgaggacgatcgccgcgacagctggcgtcaccaaattctgccggactacaaggccgggcgttcgccgatgccggaaaacctgcagcaggagatgccgcagctgcgcgaggccttcgccgaactgggcgtcgccagctggcattctcccggcaacgaggcggacgatctggcggccacgctggcggcgaaggtcgccggcggcggccaccaggtgaccatcgtctccaccgacaaaggctactgccagcttttggcgccgaacgtgcagatccgcgattatttccagaaacgctggctggatatgcctttcgtgcaacaggaattcggcgtgcagccgcagcagctgccggactattgggggctggcggggatcggcagcagcaagatccccggcgtggccggtatcgggccgaaaaccgccgtgctgctgttgcagcagtcgggtagcctggacgggctctatcagcagctggaacaggtgccggagaaatggtgcggcaagctggagcggcaccgcgagctggcctacgtcagcaaacaagtcgccacgctgcgcaccgatctgtcgctggacggcaacctgcagcagctgcgcctgccgatactataa

SEQ ID NO: 426526 - DNA, 1365 bp, Serratia marcescens
ttgattacacacatcagcccgcttggctctatggatttattgtcgcagctggaagtagacatgctgaagcgtaccgccagcagcgacctgtaccgcctgttccgcaactgttcgctggccgtgttgaactccggcagccaaaccgacaacagcaaacagctgctgtcacgctatgaaaccttcgacatcaacgtgctgcgccgcgaacgcggggtgaagctggagctggtcaacccgccggaagaggcgttcgtcgacggccgcatcatccgctcgctgcaggccaacctgttcgccgtactgcgcgacatcctgttcgtacacggccaaatcgccagcgccggccgtttccagcacctgaacctggaaaactcggcccacatcaccaacctggtattctcgatcctgcgcaatgcacgcacgctgcatctggatgaagatcccaatatggtggtgtgctggggcggccactcgatcaacgagaacgaatacctgtacgcgcgcaaggtcggcagccagctgggcctgcgcgagctgaacatctgcaccggctgcgggccgggcgcgatggaagcgccgatgaaaggcgcggcggtcggtcacgcgcagcagcgttaccgcaacagccgtttcatcggcatgaccgagccgtcgatcatcgccgccgagccgccaaacccgctggtgaacgagctggtgatcatgccggacatcgaaaagcgcctggaagccttcgtgcgcatcgcgcacggcatcatcatcttcccgggcggcgtcggcaccgccgaagagctgctgtacctgctgggtatcctgatgaacccggagaacagcgaacaggtgctgccgctgatcctgaccgggccgaaagagagcgccgattacttccgcgtgctggacgagttcatcatgaacacgctgggcgatgccgcgcgccgtcactacaccatcatcatcgacgatccggcggaagtggcgcggcagatgaagaaagccatgccgctggtgaaggaaaaccgccgcaacaccggcgacgcctacagcttcaactggtcgatccgcatcgcgccggatctgcagctgccgttcgagccgacccacgagaacatggcgaacctcaacctgtatccgaaccagccgccggagcaattggccgccgcgctgcgccgcgcgttctccggcatcgtggccggcaacgtgaaggaaaacggcatccacgccatcgagcagttcggcccgtacaagctgcacggcgagccgcagatgatgaaacagatggacagcctgctgcagggctttgtcgcccagcaccgcatgaagctgccgggcagcgcctatgtgccctgctacgaaatcgtcgcctga

SEQ ID NO: 426527 - DNA, 846 bp, Serratia marcescens
atgtcctcatatcaagaccaccaggccctgtcggggctgacgctgggcaaacccaccgcctaccgcgatcgctacgacgcctcgctgctgcaggcggtgccgcgcagcatgaaccgcgagccgctggggctgtaccccgataacctccccttccacggcgcggacatctggacgctgtacgagctctcctggctgaacgccaacgggctgccgcaggtggcggtcggtgaaatcagcctcaacgccgacagcctgaacctgatcgaatcgaaaagcttcaagctgtatctcaacagcttcaaccaaaccccgttcgccgattgggaaacggtgcgcagcacgctgcagcgcgatctgtccgcctgcgcccagggcgaggtgagcgtcaccctgttcagcgtcgagcagttggaaggcacgccgatcgcccgcctggccggcgactgcatcgatcagcaggatatccgcatcgacaattatgagttcaacgccgactacctgctgaacgccgccggtgaagaggtggtggaagagcaattggtcagccacctgctgaagtccaactgcctgatcacccatcaaccagactggggctcggtgcagataagctaccgcggcggcaagatcgatcgcgaagcgctgctgcgctacctggtctccttccgccaccacaacgaattccacgagcagtgcgtcgagcgcatctttaacgatttgatgcgctactgccggccgcaaagcctgacggtttacgcccgctacacccgccgcggcgggctggatatcaacccgtggcgcagcaacgtcgaattcgctcccgaacgcggccgcctggcgcgccaataa

SEQ ID NO: 426528 - DNA, 582 bp, Serratia marcescens
atggccgtcagtttaacgtatgcgggaaagaatatggaccatgatgtatcgcacgctctgcgtgaattcactcaacgctatgtcgagttgtggcagcaagagcgcggccacgcgccggccagccaggcgctgtacggcgtgccgtcgccctgcatcgtggagaaccgcgaggacgaagtgttgtggttgccacagcctttcgaaccggcggcgacgttggaaaaggtagaagccgcgctggagctgcgtttgcagccggacgcgcaccgtttctacacgcagcaatacgccggcgacatgagcgcgcagttcggcgagcatcgtctgagcctgctgcaggtctggagcgaagaggattttatccgcctgcaggagaacctgatcggccatctggtgacgcaaaagcgcctcaagctgccgccaacgctgttcctggcgaccaccgaatccgagatgacgatggtgtcgttgtgcaacgtcagcggcaacgtggtgctggaacagttcggcagcgataagcgtaccctgctggcggcgacgctggggaatttcctcgatgcgctgcgcccggtgctggactga

SEQ ID NO: 426529 - DNA, 1239 bp, Serratia marcescens
atgtccgtaataacagagaaaaaaaaccacgcgacgcccggtaaggccatgctggcttcagtcaccggttacgccatggacgggtttgacctgctgatcctcggctttatgctgccggccattagcagcgaattaggattaacctcatcggccgccggttcgctggtcacctggacgctgatcggcgcggtgctgggcggcgtgatcttcggccacctcagcgatcgcttcggccgaatccgggtgctcacgatcaccatcctgatgttttccctgttcaccggcctgtgcgccgtggcgcaaggatattgggatctgctggcctatcgcaccctggcgggcatcgggctgggcggcgagttcggtatcggcatggcgctgatcgccgaagcctggccggcggagaagcgcaaccgcgcttcggcttacgtcggcatgggctggcaactgggcgtgctggcggccgccttcctgacgccgctgctgctggaacacatcggctggcgcggcatgtttttggtcggcctgctgccggcgctggcgtcattcctgatccgccgcactctgggtgaaccggaggaattcgtgcggcagaaagacgctgggcaatcgctctccttcctgcagcgtttgcgcctgctgtttaaggatcccgccaccagcaaggccagcatcggcatcttcattctctgttcggtgcagaacttcggttactacggcctgatgatctggatgccgacttacctggcgaaaaacttcggcttctcgctcaccaagtccggcctgtggacggcggtgacggtggtcggcatgacgttcggcatctggctgtttggcgtactggccgaccgctttccccgctggaagatcttcgtgctgtatcaggtcggcgccgtggtgatggtgatcggttacgcccagttgagcgacccgacgctgatgctgttcgccggtgccgtgatgggcatgttcgtcaacggcatgatcggcggctacggcgcgttaatttccgatacctacccggtgcaggcacgcgccaccgcgcagaacatcctgttcaatctggggcgcggcgtcggcggcctggggccattggtaatcggtgcgctggtgacgcaggtgtcgtttaccgcggccatcagcctgctggcggcaatttacctgctggatatctacgccacgctgttcctgctgccgaaaaaacagggcgcaggcgatacgctgggcgcgattggttaa

SEQ ID NO: 426530 - DNA, 333 bp, Serratia marcescens
atgcagatgagtatacataaccaggtgcgccgcagtttgcaggcgattgaacaatccatgcgcgatctggcgctgtggcaggccgcgccgcctgatcatgaggccttctccagcaccgagccgttctgcatcgacagcatgtcggccgaagcctggctgcaatgggtgttcttgccgcgcatgtatgcgttgctggacgccgaagcgccgctgccgacgcgtttcgccattacgccttatttcgaagaggcgttgaaagatcgtgaaccgagcagcctgccgctgctggtgctgctgcaacagctggatttgatgttgaataaagcgccgtaa

SEQ ID NO: 426531 - DNA, 5976 bp, Serratia marcescens
atggatttattaaggtttatcctgcgtttgccttttaccctggttaagggcgtttgccgcctgctgggcgggattttgtcgctgttggggcggttgctgagaccgctggtcggcaacctcagctggcgtgcgccggcctggtgggctgcgctgccgcgcggttttttgcggctcgaaagcggcgtagataaacacccgaaagcgatcggtttgggcttgctgctgctggcgggcgccacaggcggcgcgttttacggctggcactggtggcaaaaccgcccccagcccatcgaaccggcgccaatggcggttcaggagatcagcgccgagttggccaaccccgagccgatagactacgccgccgcccggcaggcgccgcaaacggtgagcctgaccttcagcggctcggccgcggcaataagcgcggtgggtaaaaccgtgagcgccggcatcatcctcaaaccggctgcagaagggcagtgggcgtggcgcaatgagtcgacgctggtgttcacgccgaaaaaaccgctgccgatgggcgcgaaatatgacgtaatcctcgagcccgccaccttgctggcgccgcaggtcaagctcgccaaaacccgctatgccttcaccgtgcccgcgttcgattaccgcctggggcaggccgagtattaccgcgatccgcaagatgcgcagaaacgcagcgcgattttcaatttgcagttcaatgcgccggtcgacgtcgccagctttgaaaaacagatttcgctgggattgaaggagggcagcgcttcctccgagaaaaagctgaacttctccctggtctatgacgagaaaaaactgaacgcctgggtgcattccgagccgctgcaggcgctggatcagggcggtgctgtgcatctgaccgtcggcaaaggcgttaaatcgacggcggccggcaatgcggtcgaagaggcgaaaagcaactgggtcaaagtaccgacgctgtacagcctggcgctgagcgacgccagcgcccaggtggtggataccgacggcggccaagggcagcgtgcgctggtggtcggcttcagcgatgcggtgaaggataaagagctggcgcgggccaccaaagcctggctgctgccgcagcacgatccgagagatgccgagaccgccaacgatgctgaagatttctatcaatggacggtcgacagcgtcggtaaaaacgtgctggcgcaggcgacggcattgccattgacgcttaacgaggcggaagaggcctaccagccgcagttcagcttccgtttcgaagccccggcgcaccgcttcgtgctgatcgagatagacaaccagctggtctccgtcggcggttacaaaatgccgaagaaggtttatcgagtggtcgaagtgccggagttcccgaaatcgctgcagttcatgtctgcaggctcactgctgtcggtcaacggcgacaaacagatcagcgtggcggcgcgcaacgtggcgggcctgcggctggacatcaagcgggtgatcccgagccagctgcagcacattgtctccttcaaaagccgggaatattcgtccacggaattcaaccggcttaacgatgagtatttcaccgagcatttcaaataccagacggcgctcaacaacgagcggccgggggaagtgaactatcagggcatcgatctctcccgctatctctccaccaacgccagttcccatcgcggagtattcctgctgacgctgtccgaatggcagccgaaccggaaaccggcggcggaagaggcgggcgccgagccagaacaggaaccggacgagagcaccggggaagatcagcccgacgtcggcgattcgcgctttgtggtggtgaccgatctgggcatcgtcgccaagagctcgcaggataagacgcgcgacgtctttgtgcagtcgattcaaagcggcgcgccggtcagcggcgccaacgtgtcggtggtggccaaaaatggcgtgacgctgctcagccaaaccaccggggccgacggccacgtgcgtttcccggcgctcgacgtgtacaccaacgagcgccagccggtgatgttcctggtggaaaaggagggggatgtctccttcctgccgaccggcagctataacgatcgcgggctggacttctcgcgcttcgacgtcgccggtgaacaaacgccgaccgatccgcgcacgctcagcagttacctgttctccgatcgcggcgtttatcggccgggggatacctttaacatcggcctgatcacccgcgccgccgactggggcgttggcctggccggcgtgccggtgcgcgccgaaatccgcgatccgcgcgacaagctgatgaccaccgtgccgctgacgctgggcgccagcggtttcaatgagctgagctataccaccgatgaaaactcgcctaccggcgagtggaacgtctatctgtatctgatcggcaaaaacaacgatacctccacgctgctcggccataccgcggtcaatgtgaaggagttcgaaccggatcagctgaaagtgaagctggcgctgacgccgaaccgtcagcaaggctgggtcaaaccgtccgagctgaaggccagcatcaatgtgcagaacctgttcggtactccggcgcaggatcgccgcgtgagcaccaggctgacgctgcggccgatgtatccgagcttcgatcgcttcccggattatgcgttctatgaaaatcggcaaaacagcgacgggttcgaaaccgagctggaagatcgcaccaccgatgagcacggcgcggccgatatcccgctcgatctgaaatcctacgccgacgccacttatcagctgcagctgctgtcggaggcgttcgtcgccggcggcgggcgctcggtggcggcgaccgcccgcacgctggtttcgccttacgattacctgatcggggtgaaggcggacggcgatctgggctacatcaaccgcgacgcggagcggcatctgaacgtgatcgccatcgatccgaatctgcaacagatcgccctgccgaatctgaagcaggtattgatcgagcagaaatacatttcggtgctgaccaaacaggattcgggcgtttacaaataccagtcgaagatgaaggaagtgcagctgtcggaacagccgctggcgctgagcgggcagggcgcggatctgcggctggcgaccgataagccgggcgacttcgtgctggtgattgaagatgcgcagggcaaaacgctcaaccgcgtcgcctacagcgtggccggcaacgccaacctgagccgttcgctggatcgcaacgccgaactgaagctgaaactgaaccaggcggaataccagccgggcgaagagatcgaggtggcgatcaacgcgccttataccggcagcggcttgatcaccatcgagaaggacagggtttacgcctggcagtggttccacaccgacaccaccagctcggtgcagaagatccgcgtgccggccggcatggagggcaacggctacatcaacgtgcagttcatgcgcgatatcaactccagcgagatcttcatgagcccgctgagctatggcgtgatgccgttcaagatcagcaccaaggcgcggcaaaacagcctcgaggtgacggcgccggaggtcatcaagccgggtgaaaacctgacgatgaccgtcaagaccgacgcgccgcagcaggtggcgctgttcgccgtcgatgagggcattctgcaggtggcgcgctaccgcctgaaggatccgctggagttcttcttcagcaagcgcgaactgaacgtgagcagctcgcagatcctcgatctgatcctgccggagttcagcaagctgatggcgctgaccgcggcgccgggcggcgatgcgggcgaggggctggatctcaacctcaacccgttcaagcgtaagcgcgataagccggtggcctattggtccggcattaccgaggtcagcggcgagaagcagttcgtttacccggtgccggactacttcaacggcaagatccgcgtgatggcgatttcggtgaccccggagaaaatcggcaaggcgcaaaccgccgccacggtgcgcgacaatttcatcatgacgccgaacgtgccggcgatggtggcgccgggtgacgagttcgacgtcagcgtgggcgtcagcaacaacctcgacgggctgaacggccagtcggtggccatcaacgttctgttgacgccgccgccgcagttggaggtggtgggcaacgcgacgcaaagcctgacgctggcggaaaaacgcgaaggcgtgatcgctttccgcctgcgcgccaaagccgtgctgggcgatgcgccgctggtgttcgacgcccgttacggcgaccaggccagccgccgcactgtcagcacctcggtgcggccggcggcgccgtaccgtacccagtcggtgatggggcgcatgagcggcggcagtcagaacgtcgatggcctgcgccagatgtttgacgctttcgcgcagcgccgggcggcggtgtctaattcgccgctggtgctgaccagcgggctggcgcagtacctggcggattacccgtattactgttccgagcagatcgtcagccgctccattccgctgatgctgcagagccgccaccccgagatgaaaagcagcctgagccaggcggaagtcagcaagcagctgcgcaacctgcttggcgtgctgcgcgcgcgccagaacgacagcggagcgatcggcgcctggcgttcgtcgccggatgccgatcctttcgtcacgccttatgtggtgcagtatttgctcgaagccaaagcggcgggctacgccctgccggaaggcatgctggacgaggccaacggcgcattgcgcgagctggcggccagcggattcgacgatctgtatctgctgcgcctgcgcagctgggcggtttacctgctgacgctgcagggtgaagtgaccaccaactcgctggcggcggtgcaggatacgctgcaaaaacgctatggcgaagggtggaaaaccgatctgagcgcgctgtatctggcttcttcctatcggttgttgaagatggacgacgaagccgccgcgctgttgcaaccgagctggcagcagctgagcaaggcgtatgacagcgcctggtggacgcagaactatttcgatccgctggtgcaggatgcgacgcggctgtatctgattacccgtcacttcccggagaaggtggcgtcgatcccgccgcaggtgctggagaatatggtcaaggcgctgaaagaagagcgttataccacctactcctccgcgatgagcattctggcgctggaaagctattcggcccaggtggcggcgcaatccgccaatgcggatgccttgggcatcgtgcaggtaggcaaagccggcggcgagccgcagcgcatcagtgagctgcaggggttgttcgttcaggggcagttcaacgccgatgctaccgcggtgcgcttcaccaacggcggtagcgcgccggcctggtatgtggtgacgcaggccggttacgacctgaatgcgccgcaaaaagcgctgtcgcgcggcattgagatcgtccgcgattacaccgacgaacagggcaagccggtgacgcaggtgacgctggggcagaagatcaacgtccatctgaaggtgcgcgccaactcgaaagaggggcagagcaacttggcgatcgtcgatctgctgccgggcgggttcgaagtggtgcagcagacgccgccggaaccggccgacgccggcgaggagagcgaagaccgcggcggttggcagtcgccactggccgcctctggctccacctgggcgccggattacagcgatatccgtgaagatcgggttattatctatggcagcgccggcaccgaggtacaggagttcgtctatcagatcaaggccaccaataccggcagctttattgttccaccggcctacggcgaagccatgtacgatcgtgaagtacaggcgatgtcggccggtggcggcaagctggtggtggtgccggcgggcaacgactag

SEQ ID NO: 426532 - DNA, 2349 bp, Serratia marcescens
atgaagatcctgaccgggcgcgtgctgcaaaacggcttgatggcggtgtttttactggcgctgctgctggccgcgattcggctgtggccgcatccgcccctgtggcatgggctgccgcagtcttccgtctattacgacaggcacggcgctctgctgcgcatcaccctggccaacgacgaccgctaccggctgtggacgccgctggagcaggtgtcgccgttggcggtgcgcgggctgctgctgcacgaagaccgctggttctactacaaccccggttttaaccccgtcagcctaatgcgcggcttctggcgcagctatgtcgccggcggcaaaatgcagggcggatcgaccatcagcatgcagctggcgcgcatgcgctggcatctcaacacccgcacgccgggcggcaagctgctgcaggtgctgcgtgcggtgcagctggaactgagctactccaagcgcgatatcctggaagcctacctgaattacgccccttacggccgcaacatcgaaagcatcggcgccgccagcctgatctatttcgccaagtcgccgaaggatttgaccctgccggaggcgctgacgctggcggtgctgccgcagtcgcccagctaccgtctggagccgaaaaccggcgtgctcggcgccgcgttgacgcaggcgcgcaaccgtctgttccagcgctggcagcgggtttaccccaccgacgccagccagcaaacgctgttccgcctgccgctggcgctgcgccagcccgagcaagtgccctatatcgcgccgcactttatcgaacagctgcgccagcagacgcagcaactggtgcagcgcgatacccgcgtcgacaccacgctggacgccgggttgcagcggctggttgagcggcaggtcaatgcctttattgcccgcaaccgcagccgcggcatccaaaacgccgcggtgctgctggtggacagccgtgatatgggggtgcgcgcgctggtgggatcggcggactattacaaccgtccgattcaggggcaggtgaacggcaccaacgccaaacgctcgccgggttcgacgctcaaaccgttcatctacgcgctgggcatggagcagggcgtgctgcatccgatgaccatcctgaaggacgtgccttcgtcgttcggcgcctatgcaccggaaaacttcgaccggcgctttcttggcccggtgaccgccactgacgcgctgaatttcagccgcaacatcccggcggtgtatgtcgcctcgcagctacgccagccgaccttttatcagtttttacgcctgaccggcgtcgccaatatggccaacgaaagccactacgggctgtcgttggtgctgggcggcggcgaggtgacggcgcaggaattggcgaagctgtatgcgctgctggcgaaccgcggcgagctgcggccgcttcgtatgcagctgaacgaggccgaatcgacgccggtgcggctgctgagcgaggaggccagtttcatcacgctggatatgctgcgccagcaccggcggccgggcgatacgctggcgcagcgttcttcttcgctgccggtgtactggaagaccggcacttcctggggctttcgcgacgcctggagcgtcgggattttcggcccttacgtgctggtggtgtgggaaggcaacttcgatgggcgcggcaacaatgcgttggtcggcgccgaggcggccgcgccgctgttcttcaacatcatcgacagcgtcaatgccagctaccccggcctgcgggaaccgaagcacccgttcccccaacggctgcggcgggtggatatttgcctcgccagcggcgatctgccgacgccgtggtgccagcagaagggcaagacctggttcattcccggcaagtcgccgatcaaggtcgacagcgtctatcggccggtggtgctggatattcacagcggcgaggtcgtttgcccgccgtatgacgcggcgcagacccgtaccgaaatttttgagttctggccttccgatctggccaacgtgttcgcccaggccgggctgccgaagcgggcgccgccggtcaaccgctgcaaggacaacggcatcgccgtcggcggcaacgcgccgcgcatcacttcgccgctgaaaaacaccacctataccctgcgccagtcgcagcaggggcgagataaaatcgccttcaacgcggtgatggacgccgacagcaagacggtgtactggttcgttgacgatatctatctcggcagcagcgccagcaaaaagccgatcgactggcggccgatcgacaacgggcgctaccgcattcgggcggtggacgatcgcggccgcgccgatatgcggctggtgaccatcgaatgggtgaactag

SEQ ID NO: 426533 - DNA, 771 bp, Serratia marcescens
gtgattgagattttgtatcaggatgaacacctggtggcggtgaacaagccgtcgggttggttggtacaccgcagttggctggatcgtcatgagacccgctttatgatgcagacggtgcgcgatcagctcgggcagcacgtctttaccgtgcaccgtgtcgatcgcccgacttccggcgtgctgctgatggcgctctccagcgaggtggcgcgtctgctgtcgctgcagttcgagcagcatcaggtgcagaaaacctaccatgcggtggtgcgcggctacgtgcaggagggggcgaccctcgactacccgctgacggcggagctggacaaaatcgccgataaacatgccgatgccgataaagggccgcagccggcggtgacgcactaccggccgctggcgcaggtagagatgccggtggccgtcggccgctacgacagcgcgcgctacagcctggtggagctgcagccggaaaccggccgcaagcaccagctgcggcgccacatggcgcatcttcgccatccgatcatcggcgacagcaagcacggcgatctgcggcagaaccgtggcatggcgcagcatttcggctgcccgcgcctgatgttgcacgccagccatctgcagctgacgcacccggtgaccggtgaggcgctgcgggtgacggcgcgctgggacgaagactggcaaggggtgatgacgcagttcggctgggcgggagtattccctgaacttgccggggttgagtttagcgcggctaacggtcaggatagctga

SEQ ID NO: 426534 - DNA, 453 bp, Serratia marcescens
atggctcaggttggtatcttcgtgggaacggtctacggcaattcgctgctggtggcggaagaggcgcaaaacatcctcagcgaacagggccatgaggtcaaactgttcgaagagggcacgctggaggcctggcagtattaccgtcagcactacgcgctggtgattacctccaccaccgggcagggcgatctgccggacagcatcgcgccgctgttccacgccattcgcgatcaggtcggctaccagccggagctgcgctatgggctgatcgccctcggcgacagcagctatgacaacttctgcggcgccgggcgcgcgttcgacgcgctgctgcaggagcagggcgctacccgcgttggtgaagtgctggagatcgatgcgatggaacagccggagccggaagtggccgcctgcccgtgggtcgagcagtggggcacgctgctgcaatcgtaa

SEQ ID NO: 426535 - DNA, 390 bp, Serratia marcescens
atgtacgataacttgaagagtttgggcatcaatcaaccggaagacgtcgatcgctatagcctgcgtcaagaggccaacaacgacatcctcaagatctatttccgcaaggacaagggcgagttcttcgctaaaagcgtgaagttcaagtacccacgccagcgtaaaaccgtggtggcggacaacgccggccagggctacaaggaaattcacgagatcaacccgaacctgcgttacgtgatcgacgaactggatcagctgtgccaacgcgatcaggtggaagtggatctgaagcgtaaaatcctcgacgacctgcgccatctcgaaggagtggtgtcgcacaagattgccgagatcgaagccgatctggaaaaactcacccgcggcaagtaa

SEQ ID NO: 426536 - DNA, 825 bp, Serratia marcescens
atgcagcaattacagaacgttattgaaagcgccttcgagcgccgtgcggacatcaccccggcgaacgtagacaccgtaacgcgcgaagcggtaaaccaggtgatcggcctgctggacagtggcgccctgcgcgtcgccgagaagatcgacggtcaatgggtcacccatcagtggctgaagaaagccgtgctgctctctttccgcatcaacgacaacaaggtgatggacggcgcggaaacccgctactacgacaaggtgccgatgaagttcgccgactacgatgaagcgcgcttccagaaggaaggtttccgcgtcgtgccgccggccaccgtgcgccagggcgcgttcatcgcgcgcaacaccgtgctgatgccgtcttacgttaacatcggcgcctacgtcgacgaaggcaccatggtcgacacctgggccacagtcggttcttgcgcgcagatcggcaaaaacgttcacctgtccggcggcgtcggcatcggcggcgtgctggagccgctgcaggccaacccgaccatcatcgaagacaactgcttcatcggcgcgcgctccgaagtggtggaaggcgtgatcgtggaagaaggctcggtgatttcgatgggcgtatacctcggccagagcacccgtatctatgaccgcgagaccggcgaaatccattacggccgcgtgccggcgggttcggtggtggtttccggcaacctgccgtcgaaagacggttcctacagcctgtactgcgcggtgatcgtcaagaaagtcgacgccaaaacgcgcggtaaagtcggcattaatgagttattgcgcactatcgactaa

SEQ ID NO: 426537 - DNA, 2622 bp, Serratia marcescens
atgccgcccgcctcccccagcacctacggcgacgaagagctcacctgcccgatgctgaaacagcggctggagcagttccaactgtggctggcggcggcgttcgatgccggctccagcgccgaaagcctggtggcggcgcgcagcgactttatcgatcgcctgctgcgccggctgtggacgttctacggcttcgaagatatcccggaaacggcgctggtggcggtcggcggctacggccgcggcgaactgcacccgctgtcggacatcgacgtgctggtgctcagccagcgccggctgacggaacagcagtcgcagcgggtcggcgaattcatcaccctgctgtgggatctcaagctggaagtgggccacagcgtgcgcactctggaagagtgcctgctggaagggctggcggatctgaccgtggccaccaacctgatcgaatcgcgcatgatctgcggcgacgtcgcgctgttcctgcagatgcaaaaacatatcttcagcgacggcttctggccttcgccgcagtttttccacgccaagatcaacgagcagcaggagcgccatcagcgctaccacggcaccagctataacctggagccggatatcaaaagcagccccggcggcctgcgcgatattcacacgctgctgtgggtggcgcggcgccacttcggcgccacttcgctggacgaaatggtcggcttcggtttcctcacccaggccgagcgcaacgagctgaacgagtgccagagcttcctgtggcgcatccgcttcgcgctgcacctggtgctgccgcgttacgacaaccgcctgctgttcgatcgccagctcagcgtcgcgcagctgctgcgctatgaaggcgaaggcaacgagccggtcgaacgcatgatgaaagacttctaccgcatgacgcggcgcgtcagcgagctgaaccacatgctgctgcagctgttcgacgaggccatcctggcgctggacgctaccgagaagccgcgcccgctgaacgacgatttccagctgcgtggcgatctgatcgatctgcgcgacgaaacgctgtttatccgcgagccgcaagccatcatgcgcatgttctacctgatggtgcgcaaccgcgagatcaagggcatttactccaccacggtgcgccagctgcgccacgcgcgccgccatctgaaacagccgctgtgcaccattccggaagcgcgcgatctgtttatggccatcctgcgccaccccggcgcggtgtcgcgcgcgctggtgccgatgcaccgtcacagtgtgctgtgggcctatatgccgcagtggggcaagatcgtcgggcagatgcagttcgacctgttccacgcctataccgtggatgaacacaccatccgcgtgctgcagaagctggagagtttcgccgacgaccagactcggccgcgccatccgctgtgcgtggagctatatccgcgcctgccgcacccggaactgctgctgctggcggcgttgttccacgatatcgccaaagggcgcggcggcgaccactcgatcctcggcgcggaagacgtggtggagttcgccgaacttcacggcctcaactcgcgtgaaacccagctggtggcctggctggtgcgctgccacctgctgatgtcggtcaccgcgcagcgccgcgatatccaggatccgacggtgatccagcagttcagcagcgaagtgcagagcgaaacccgcctgcgctatctggtatgcctgacggtggccgacatctgcgccaccaacgaaaccctgtggaacagctggaaacagagcctgctgcgcgagctgtatttcgccaccgagaagcagctgcgccgcggcatgcaaaacagcccggatctgcgcgaacgcgtgcgccatcaccgcctgcaggcgctggcgctgctacgcatggacaacatcgacgaagaggcgctgcaccgcatctggagccgctgccgcgccgactatttcctgcgccactcgccgaatcagctggcctggcacgcccgccacctgctggcccacgattccacccagccgctggtgctggtcagccgccaggcgacgcgcggcggcaccgagatcttcatctggagcccggaccgcccttatctgttcgccgccgtcgccggggagatggatcgccgcaatctgagcgtgcacgacgcccagatcttcaccaaccgcgacggcatggcgatggacacctttatcgtgctggagccggacggcagcccgctggcgcaggatcgccacgcggcgatccgccaggcgctgctgcaggccatcacccagcgggagtatcagccgccgcgcgtgcgccggccctcttccaagctgcgtcacttcagcgtgccgaccgaggtcactttcctgccgacccataccgatcgccgcagctacctggagctgaccgcactcgaccagcccggcctgctggcgcgggtgggcgaagtgttcgctgacctggggctgtcgctgcacggcgcgcgcatttccaccatcggcgagcgggtcgaggacttgtttatcctggccgacggcgagcggcgcgcgctcgaccaggaaacgcgcagaaagttggagcaacggttgacagaggccctcaccccaaacgataaaatgtga

SEQ ID NO: 426538 - DNA, 795 bp, Serratia marcescens
atggcaatctcaattaaaacacctgatgacatccaaaaaatgcgcgtggccggccgcctggccgccgaagtgctggaaatcatcgagccgcacgtcaaacctggcgtgaccaccggcgagctggaccgtatctgtcacgagtacatcaccaacgagcagcaggccatctccgcctgcctcggctatcacggcttcccgaaatccgtgtgcatctcggtgaacgaagtggtgtgccacggcatcccgagcgacgacaaaacgctgaaagacggcgacatcgtcaatatcgacgtgaccgtgattaaagacggcttccacggcgacacctcaaagatgttcatcgtcggcaaaccgaccattctgggcgagcgcctgtgccgcgtcactcaggaaagcctgtatctggcgctgaagatggtcaagccgggcatccgcctgcgcaccctgggcaaggctatccagcaattcgtcgaggccgagaaattctccgtggtgcgcgagtactgcggccacggcatcggcgaagtgttccacgaagagccgcaggtgctgcactatgatgccgatgacggcggcgtggtgctgcaggcgggcatggccttcaccatcgaaccgatggtcaacgccggcgactaccgcatccgcaccatgaaagacggctggacggtaaaaaccaaagatcgcagcttgtcggcgcagtatgagcatactattgtggtcactgataacggctgcgagataatgacgttgcgcaaggatgacaccatccccaacatcattacgcacgagatgtaa

SEQ ID NO: 426539 - DNA, 726 bp, Serratia marcescens
atggcaactgtttccatgcgcgacatgctcaaggctggtgttcacttcggtcaccagacccgttactggaacccgaaaatgaagcctttcatcttcggcgctcgtaacaaggttcacatcatcaacctggagcagaccgtaccaatgttcaacgccgctctggctgaactgagcaagatctcttcccgtaaaggcaagatcctgttcgtaggtaccaagcgcgcagcaagcgaagcggtaaaagacgctgctaacagctgtgaccagttcttcgtgaaccaccgctggttgggcggcatgctgactaactggaaaaccgttcgtcagtccatcaagcgtttgaaagatctggaaatccagtctcaagacggcaccctggacaagctgaccaagaaagaagcgctgatgcgcactcgtgaactggccaagctggaaaactccctgggcggtatcaaagatatgggcggtctgccagacgcactgttcgttatcgatgccgatcacgagcacatcgcgatcaaagaagccaacaacctgggtatcccggtattctctatcgttgataccaactccaacccagacggcgttgacttcatcatccctggtaacgacgacgcaatccgtgcagtaaacctgtacctgactgccgttgctgccgctgtgcgtgaaggtcgttctcaagatctggccgttcaggcggaagaaggcttcgtagaagctgaataa

SEQ ID NO: 426540 - DNA, 852 bp, Serratia marcescens
atggctgatattaccgctgccctggtaaaagaactgcgcgagcgtaccggcgctggcatgatggattgcaagaaggcgctggttgaatccaacggcgacatcgaactggcaatcgaaaacatgcgtaagtccggtgcgatcaaagccgctaaaaaagcaggcaacgtagctgctgacggcgtgatcaaaaccaagatcgaaggcaactacggcatcattctggaagttaactgccagactgacttcgtagcgaaagacgccggtttccaggcgttcgccgacaaagtgctggatgcggccatggccggcaaaatcactgacgttgacgtgctgaaagcacagttcgaagaagagcgcgtagcgctggtggcaaaaatcggcgaaaacatcaacattcgtcgcgttgcttccctggaaggcgaagtgctgggcagctacctgcacggcgcgcgtatcggcgttctggttgcggctaaaggcgctgacgaagagctggttaagcaaatcgcaatgcacattgcggcaagcaagccagagttcgtgaagccggaagacgtgtctgctgaagtggtagaaaaagagtaccaggttcagctggacatcgccatgcagtccggcaagccgaaagaaatcgcagagaaaatggttgaaggccgcatgaagaaattcaccggcgaagtttctctgaccggtcagcctttcgttatggatccgagcaaatccgttgctcaggtgctgaaagagcacaacgctgacgtgaccaacttcattcgcttcgaagtgggcgaaggcatcgagaaagtcgaaaccgacttcgctgctgaagttgccgcgatgagcaaacagtcttaa

SEQ ID NO: 426541 - DNA, 726 bp, Serratia marcescens
atggcaaccaatgcaaaacccgtatatcagcgtattctgcttaaactgagtggcgaagccctgcaaggtgcagaaggttttggtatcgacgccagcgttttggatcgcatggctcaggaagtgaaagagctggtcgaactgggaattcaggtcggtgtagttattggcggcgggaacctgttccgcggcgcgggcctggcgcaagccggcatgaaccgcgtagtgggcgaccacatgggaatgctggctaccgtgatgaacggcctggctatgcgtgatgcactgcaccgtgcctatgtgaacgcccgcctgatgtcggcgatcccgctgaacggcgtgtgtgacaattacagctgggcagaggcgatcagcctgctgcgcaacaaccgcgtggtgatcttctccgccggtaccggcaacccgttcttcaccaccgattccgccgcttgcctgcgcggcatcgagatcgaagcggacgtggtgctgaaagccaccaaagtggatggcgtatactccgccgatccggtgaaaaacccggatgcgacgctgtatgaacaattaacctatcaggacgtgctggagcgcgagctgaaagtgatggatctggctgcgtttacgctggcccgcgatcacggtctgccgatccgcgtgttcaacatgaacaagcctggcgcgctgcgccgcgtggtgatgggtgagaacgaaggtacgctgatcagcaaataa

SEQ ID NO: 426542 - DNA, 522 bp, Serratia marcescens
atggaaaaaagcgtagaagcattcaaaaaccaaatcagcaagatccgcaccggccgcgcttctccaagcattctggacggcatcatggtggaatactacggcgccgctacgccgctgcgccagctggccaacgtgaccgtggaagactcccgcacgctgaaaatcaacgtgttcgaccgcagcctgagccaggccgttgagaaagcgatcatgagctccgatctgggcctcaacccgtcttccgccggttctgacattcgcgttccgctgcctccgctgaccgaagaacgccgtaaggatctgatcaagatcgtgcgcggcgaggccgagcagggccgcgtagcggtgcgtaacgtgcgtcgcgacgccaacgacaaggtcaaggcgctgctgaaagacaaagagatcagcgaagacgaagaacgtcgttcacaagacgagattcagaaaatgaccgacgcttacatcaagctggtcgacgccgcgctggcggagaaagaaaaagagctgatggatttctaa

SEQ ID NO: 426543 - DNA, 1197 bp, Serratia marcescens
atgaagcaactgaccattcttggctcgaccggctcggtagggaccagcaccctggccgtggtcagggcaaatcccgacctttttgcgatcaaagcgctggtggccggccgcaacgtcgcggtcatggcgcagcaatgcatggaatttcggcccgccttcgccgcgatggcggatgaaagcgccgcgcgcgaactgcgcgccattctggcggaaaacggcgtcgctaccgaggtattggccggggagcaagcggcctgcgaactggcggcgttggacgacgtcgatcaagtgacggcggccatcgtcggcgccgcggggctgttgccgacgctggcggcgatccgcgcaggcaagcaggtgctgctggccaacaaagagtcgctggtcacctgcggccgtctgtttatggatgcggtacggcaaagccaggcgcagttgctgccgctcgacagcgagcacaacgcgatttttcagagtttgcctgagagcattcagcgtcagttgggatactcttccctggacagtcatggtgtttcgcgcatcgtgcttaccggctccggcggcccgttccgcaccacgccgctggagcagttcgccgcgatgaccccggatcaagcctgcgcccacccgaactggtcgatggggcgcaagatctcggtggattccgccaccatgatgaacaaaggtctggaatacattgaggcccgctggctgtttaacgcctcggccgagcaaatggaagtgatcctgcatccgcagtcggtgattcactcgatggtgcgctatgccgacggcagcgtgctggcgcagctgggtacgccggatatgcgcacgccgatcgcccacgcgatggcgtatccgcagcgcgtgaactccggcgtggaggcgctggacttctgtcgcatcggttcgttgaccttcgccgaaccggagcgcgagcgttatccttgcctgtatctggcgattgaagcgttcgatgccggccaggcggcgaccactgcgctgaacgcggccaacgaaatcgccgtggcggcatttttgcagcagcagattcgctttaccgacattgcggcggtcaaccgccaggtggtggagcgccttgcgctgcaggaaccgaccagcatcgaagcggtcttagacattgaccgccaggcgcgcgccgccgccgaggagcgcgttcgcacgttgcgcggttga

SEQ ID NO: 426544 - DNA, 759 bp, Serratia marcescens
atgtcgtccgcaaaccaacaagaggctaatccatcttccccggggccgcgtcatgtcgccatcatcatggacggtaacggacgctgggccaaacgtcagggcaagttacgtgtcttcggtcataaagcaggggtgaaatcggttcgccgcgcggtcagttttgccgccagccaccatttagatgcgctcacgctttatgccttcagcagcgaaaactggaaccgtccggtgcaggaagtctccgccctgatggagctttttgtccgtgctctggatagtgaagtaaaaagcctgcataaacataacgtcaggctgcgagtgatcggcgatatcagccgcttcagcgcgcgtttgcaggagcggatccgccgctctgaagcactgacggaaaataacgatggcctgacgctcaatatcgctgccaactacggtggccgttgggatatcattcagggagtaaaggaactggccgaacgggtacgggtgggggagttgcacccggatcagatcagcgaggaattattgaacgagcgggtttgcatgagcgacctggcgccggtggatctggttatccgcaccggtggcgagcatcgcatcagtaacttcctgctgtggcaaatcgcctatgctgaactttactttactgatgtgctctggcctgatttcgatgaacttgtctttgaaggtgcgctgaatgcatttgcacaacgtgagcgccgcttcgggggaacaacacctatcggcgccgatgcgtcctag

SEQ ID NO: 426545 - DNA, 843 bp, Serratia marcescens
ttgctgaagtatcgcctcataactgctctgattttaatcccgatcgttatcgcggcgctattcctgttgccgccgctggcctttgctctggtaacgctcgtcgtgtgcatgttagcagcctgggagtggggccaactggccggttttacctcccgttcgcagcgcatctggctggcgatactgtgcggttttctgctggcgctgatgatgctcagcgttcccgcttaccatcaatccgtgccgcagataagcggctcgctgtggctgtcgctggcctggtggctggcggcgctgctgctggtgctgttctaccccggctcggccgccatctggcgcaactcgcgcccgctgcgcctgctgttcggcctgctgaccatcgtgccgttcttctggggcatgctggcgctgcgccagttcggctacgagcaaaacccgtttaccggcgcctggtggctgctgtacgtgatgctgctggtgtggggcgcggattccggcgcctatatgttcggcaagctgttcggcaagcataagctggcgccgaaggtctctccgggtaaaacctgggaagggctgattggcgggctgctgacgtcggcggtcatttcctggctgttcggccgctacgcgccgctgaacgtggtgccgaccacgctgttggcctgttcggtgatcgccgcgctggcttcggtgctgggcgatttgaccgaaagcatgttcaaacgcgaagcgggcatcaaggacagcggtcacttgatccccggtcacggcggcatactggatcgtatcgacagcctgaccgcggcggtgccggtgtttgcctgcctgatgctgttggtgttttaa

SEQ ID NO: 426546 - DNA, 1359 bp, Serratia marcescens
atgatggtcagcgtgctttggaacctggtggcgtttctgattgcgctcggtattttgatcaccgtgcacgagttcggacacttttgggttgcccgccgttgcggcgtgcgcgttgaacgcttctccatcggcttcggccgggcgctgtggcgccgcaccgatcgccagggcaccgagtacgtcatcgccttgattccgctcggcggctacgtgaagatgctggacgagcgcgtggagtcggtggcgccggaaatgcgccatcaggccttcaacaacaaaaccgtctggcagcgcgcggccatcatcagcgccggccccatcgccaacttcctgtttgctatccttgcctattggctggtgttcatcatcggcgtgccgagtttccgtccggtgatcggcgaaatcgcgccgcaatccatcgccgccaaggctgaaatttcgtctggcatggaactaaagtcggttgacggcatcgaaacgcctgattgggaatcagttcgtctggcgctggtggcgaagattggcgatgcgcaaaccgaagtcggcgtcgcgccgttcggctcttcgcaggtggtgaccaaaaccctggatttgcgccagtggaactttgaaccggacaagcaggatcccgttgtcgcgttgggcattatgccgcgcggcccgcagatagaatccgtgttggcggaagtgcagcctaactcggcggcgcaaaaggcgggtttacaagcgggggacaggatcgttaaagtcgatggtcagccgttgggtcgttggcagacgctggtgaagcgtatccacgatggcccggggcaaccgctggctttggagattgaaagaaacggcgcccccttgtctttgacgctgataccggatacaaagccggtgggaaaagacaaatcggtggggtttgcaggcatcattccaaaggtgctgccgctgccggacgagtataaaacgattcgccagtatggaccgttcccggcgctgtatcaggccggcgacaagacctggcagctgatgcggctgacggtcaacatgctgggcaaattaataaccggtgatgtaaagctgaacaacctgagtggcccgatctcgattgcacagggagcaggggcgtcagccggagtcgggttcgtgtattatctgatgttcctggcgttgattagcgtcaacctgggtatcatcaacctgttcccattaccggtgttagatggtgggcatctcctcttcctggcgatagaaaagctgaagggtgggccggtttccgagcgagtacaggactacagctaccgcataggttcgatcgtgctggtgttgttgatgggtcttgcacttttcaatgatttttcccgcctctag

SEQ ID NO: 426547 - DNA, 2427 bp, Serratia marcescens
atggcgatgaaaaagttgctcatagcgtcgctgctgtttggcagcgccaccgtatacggtgcagacgggttcgtagtgaaagatattcatttcgaaggcctgcagcgagtcgccgtcggtgcggcgttactcaacatgccggttcgcgtcggcgataccgtcactgacgatgacatcagtaataccatccgtgccttgtttgccaccggcaacttcgaggacgtgcgcgtactgcgcgatggtaataccttgatcgtgcaggtgaaggaacgtcctaccatcgccagcatcactttctccggcaacaagtcggtgaaggatgacatgctcaagcagaacctggaagcctccggcgtccgggtgggcgaggcgctcgaccgcaccacgatctccagcattgaaaaagggctggaagacttctactacagcgtcggtaaatacagcgcctcggtgaaagccgtagtcacgccgctgccgcgcaaccgtgtcgacctgaaactggtgttcacggaaggggtctccgccaagattcaacaaatcaacatcgtcggcaaccatgccttcaccaacgacgaactgatctcgcgcttccagctgcgtgacgaagtgccgtggtggaacctggtcggcgatcgcaaataccagaagcagaaactggcgggcgatctcgaaaccctgcgcagcttctatctggatcgcggctatgcccgcttcaacatcgattctacccaggtgagcctgacgccggataaaaaaggcatctacatcaccatcaacatcaccgaaggcgatcagtacaagctttccgatgttgtcgtgaacggcaacctggccggccactcggcggaagtcgctcagatcaccaaaatcgaaccgggcgagctgtacaacggcagcaaggtgaccaaaatggaagacaacatcaaaacgatgttgggccgttatggttacgcctacccgcgcgtcggcactcagcctgagatcaacgacgcggataaaaccgtcaaactgcacgtcaacgtcgacgcgggcaaccgcttctacgtgcgtcgcatcaagttcgaaggcaacgacaccagcaaggattccgtactgcgtcgcgaaatgcgccagatggaaggcgcctggctcggcaacgagcaggtcgaacagggtaaggagcgtctgaaccgtctgggctacttcgaaacggttgacgtggaaacccagcgcgtgccgggcaccgccgatcaggtcgacgtcacctacaaggtgaaagagcgcaacaccggtaccttcaacttcggcgtcggttacggcaccgagagcggcgtcagcttccaggcgggcgtgcagcaggataactggttgggtaccggctactcggtgggcatcagcggcaccaagaacgactaccagacctataccgaactgtcggtcaccaacccgtacttcaccgttgacggtgtgagcctgggcggccgcatcttctacaacgactttaaggcggatgacgcggatctgtcggactataccaacaagagttacggtatcgacggcacgctgggcttcccgatcaacgaaaacaactcgttgcgtaccggcctgggctacgtccacaacggcctgtcgaacatgcagccgcagatcgcgatgtggcgttacctcgactcgatgggcgtggatgcgaacaagaccgatcgcgccagctactcgacggacgactttacgctgaacctgggttggacctacaacaacctggaccgcggctacttcccgacgtcgggtaaccgcactacgttgaacggcaaggtcaccattccgggctcggacaacgaatactacaaggtgacgctggacagcgtacagtacgtgccgatcaacgacgatcgcacctgggtgctgttgggccgtggccgtctgggttacgcggatggcttgggcggcaaggaaatgccgttctacgagaacttctacgccggtggttcgagcaccgtgcgtggcttccagtccaacaccattggtccgaaggcggtgtactacaactccaactcgtaccagtgtcagttcaacgccggcagcacgaccacgcgtcagaacatctgtagctcggatgacgcggtgggcggtaacgccatggcggtcgccagcctggagctgatcaccccgacgccgttcatcagcgagaaatacgccaactcggtgcggacgtcgctgttcatcgatgccggtaccgtgtgggataccaagtggaagaataccgacgaaacgctgatgtacggcgtgccggactacagcaaggccagcaatattcgctcttccgccggtatcgcgctgcagtggatgtcgccgctggggccattggtgttctcttacgccaacccgatcaagaaatacgaaggcgacaagtccgaacagttccagtttaacatcggtaagacctggtaa

SEQ ID NO: 426548 - DNA, 498 bp, Serratia marcescens
gtgaaaaagtggttgtgtgccgcaggcctcggtttagcaatggctgcttcagctggcgttcaggcagcagataagatcgctgtcgttaacgtctccagcattttccaacagctgccggcccgcgaagcggtcgctaaacagctggaaaacgagtttaaaggccgtgcaagcgaactccagaacatggaacgtagcctgcagaccaaaatgcaacgtctgcagcgtgacggcgctaccatgaaagccagcgatcgcagcaagttggaaaaagacgtgatggcgcagcgcgagcagttctctcagaaagcccaggctttcgagcaggacaaccgtcgtcgccagatggaagagcgtaacaagatcctgagccgcattcaggacgctgtgaaatctgtcgccagcaaaggcggttatgacgtggtgatcgacgccaacgccgttgcctatgcagactcttccaaagatatcactgctgacgtgctgaaacaggttaaataa

SEQ ID NO: 426549 - DNA, 849 bp, Serratia marcescens
gtggtgcttaccgaagcggatttaccacactgccgtactgcggcgctggtggttaaaaacccttacctgacctacgcgcgcatggcgcagctgatggacaccacgccggcgccggcgcaggatattgcgccaagcgcggttgtctcgcctgaagcgcaactggggcagaacgtcgccattggggcgaacgcggtgattgagtcgggtgcggtgcttggcgataacgtggttatcggcccgggctgcttcatcggcaaacacgcacgcatcggcgcgggaacgcgtctgtgggcgaacgtcacgatttatcatgcggttgaaatcggccagcgctgcctgatccagtccggcaccgtgatcggcgcggacggtttcggctatgccaatgagcgcggcgagtggatcaaaatccctcagttgggcacggtgattatcggcgatcgcgtcgaaatcggcgcctgcactaccatcgaccgcggcgctttggataacacccaaatcgggaatggtgttatcatcgacaaccaatgccagattgcacataacgtcgtgattggcgacaataccgccgtcgccggcggtgtgatcatggccggcagcctgaaaatcggccgctactgccagatcggcggtgccagcgtgatcaacggtcacatggaaattgccgacaaggttgttgttaccggaatgggaatggttatgcgaccaatcaccgaacctggggtatactcttcgggcattccgttgcagcctaacaaggtttggcgtaaaaccgctgcgttggtgatgaatatcgatgagatcagcaaacgcttgaaagctgtcgaacgtaaagtcggaaaagactaa

SEQ ID NO: 426550 - DNA, 456 bp, Serratia marcescens
ttgactactgacactcatactctggatattgcagaaattttggatctgcttcctcaccgttacccgttcttgctggtcgaccgcgtcctcgagtttgaagagcacaaatatctgcgtgcggtgaagaacgtatcggtgaacgaaccgtttttccagggccacttccctggcaaaccgattttcccaggcgtattgattctggaagccatggcgcaggccaccggtatcctggcgtttaaaagcgtcggcaaactggagccgggcgagctgtattacttcgccggtatcgatgaagcacgcttcaaacgccctgtggtgccaggcgatcagatggtcatggaagtcaccttcgagaaaactcgccgcggcctgactcgcttcaaaggcgtggcgaccgttgacggtaaaattgtctgcgaagcaaccatgatgtgtgcccgcagccgggaggcttaa

SEQ ID NO: 426551 - DNA, 789 bp, Serratia marcescens
gtgattgaccaaaccgcctttatccatcctagcgcgatagtcgaagaaggcgccgtgatcggcgccaacgtgcatatcggccctttctgctacgtcggttcccaggtggaaatcggtgccggcacggtgctgaaatcccacgtggtggtgaacggcattaccaagattggctgcgataaccagatttatcagttcgcttccatcggtgaagtgaaccaggatctgaaatacgcgggcgaaccgacgcgcgttgaagtgggcgatcgcaaccgcatccgcgaaagcgtgaccattcaccgcggcaccgcgcagggcaccggcctgaccaaagtgggcaatgacaacctgctgatggtcaacgtgcacgtcgcccacgactgcgtggtcggcaacgcttgcgtgctggccaacaacgccacgctggcggggcatgtggaaatcgacgatcacgccatcatcggcggcatgacggcgatccaccagttctgcattatcggcgcgcatgtgatggtaggcggttgttccggcgtcgctcaggacgtgcctccattcgtcatcgctcagggtaaccacgcgacgccgttcggcgtcaacgcggtcggcctgaagcgtcgcggttttgacaaggatgaaatgcaggcgatccgcaacgcctacaagatcctgtatcgcagcgagaaaacgctggatgaagcgaaagcggaaatcgaatccctggccaaagaacagccggtggtgcagcagtacctcgatttctttacccgttccacccgcggtatcattcgctga

SEQ ID NO: 426552 - DNA, 1149 bp, Serratia marcescens
atgtcgaatcgtccattgactatcggattggtcgccggagaaacctccggtgacattctcggcgccggtttgatccgcgcgctcaaggcgcagatccccgacgcgcgtttcgttggcgtcgccggcccgctgatgcaggccgaaggctgcgaagcctggtacgaaatggaagagctggcggtaatgggcgtggtagaagtgctcgagcgtttgccacgcctgttgaagatccgcaaggatcttacccgccgcttcggcgagctgcggccggacgtgtttgtcggcatcgacgcgccggacttcaacatcacgctggaaggccgcctcaagcagcgcggtatccgtaccattcactacgtcagcccttccgtgtgggcctggcggcaaaagcgcgttttcaaaattggcaaagccaccgatctggtgctggcctttctccctttcgaaaaagcgttttacgatcgtttcaacgtgccctgccggtttatcggccacaccatggcggacgccatgccgttgcagcccgatcggctggcggcgcgcgctcagcttggcatcgatccgcaggcgcgctgcctggcgttgctgccgggcagccgcggcgccgaagtcgagatgctgagcgccgacttcctcaagaccgcgcagctgctgcgcacccgttatcccgagctggaagtggtggtgccgctggtcaacgccaaacggcgcgagcagtttgagcgcatcaaggcggaagtggcgccggatctgaccgtacacctgctgaacggccaggggcgcgaggcgatgatcgccagcgacgcggcgctgctggcatccggcacggcggcgctggagtgcatgctggccaagtgcccgatggtggtgggctatcgcatgaagccgttcactttctggctggcgcagaaactggtgaaaacgccttacgtttcgctgccgaatctgctggcggggcgggagatcgttaccgagctgctgcagcatgactgcgtgccggacaaactggccgccgccgtgatgccgctgctggaagagagcccgcaaaccgaagcgctgaaacagactttccttaccttgcaccaaagcatccgttgcggtgcggacgaacaggccgctcaggctgtgttggagctggcgaaagcatga

SEQ ID NO: 426553 - DNA, 594 bp, Serratia marcescens
atgattgaaccctttatctatcccgctgccacgctgattgccggcgtggacgaagtgggccgcgggccgttggtcggtgcggtggtcaccgccgccgtgatcctcgatccggcgcagccgatcgtcgggctggcggattccaagaaactcagtgaaaaacgccgcctggcgctgtatgacgaaatcgtcgccaaggcgctctcctggagcctggggcgcgccgagccggcagaaatcgaccaactgaacattttgcacgccaccatgctggcgatgcagcgcgcggtggccgggttgcatatcgcgccggacatggttttaatcgacggtaaccgttgcccgaacctgccgatgcgttcgcaggcggtggtgaagggcgacagccgcgtggcggagatcagcgcggcgtccattctggcgaaggtcacgcgcgatcgtgaaatggccgcgctggacagcgagttcccggactacggtttcgcgcagcataagggttacccgaccgccttccacctggagcggctggccgcgctgggcgccaccgagcatcaccgccgcagcttcgcgccggtgaaaagggcgctggcgctgtag

SEQ ID NO: 426554 - DNA, 3489 bp, Serratia marcescens
atggccgaacctcgttttattcacctgcgcgtccacagtgactattccatgattgatggattggccaagacggcgccgctggtgaaaagagccgccgcgttagccatgcctgctctggcaatcaccgatttcaccaacctgtgcggattggtgaaattctacggcagcgcgcacggcgccgggatcaaaccgatcatcggcgcggatttccatgtgcaaagcgaagagctgggcgacgagctggctcagctgacggtgctggccagcaacaacgaaggctaccagaacctgacgctgctgatttcccgcgcctatcagcgcggctacggcgccgccggcccgatcatcgatcgcgactggctgattgaacatcgcgaagggctgattctgctctccggcgcgcgtcagggcgacgtcggcaagtttctgctgcgcggcaaccaggcgcaggtggatcagtgtctggacttctaccagcagcacttcccggactgttactacctggaactgattcgcaccggccgcccggacgaagagaactacctgcatgcggcggtggcgctggccaccgagcgcggtttgccggtggtggccaccaacgacgtgcgcttcctggtggaagatgacttcgacgcccatgaaattcgcgtcgccatccacgacggctttacgctggacgatcccaagcggccgcgcaactacagcccgcagcaatacatgcgcagcgaagacgagatgtgcgagctgttcgccgacattccggaagcgctgctgaacagcgtcgaaatcgccaagcgctgcaacgtcaccattcgcctcggcgaatacttcctgccgcagttcccgaccggcgacatgagcaccgaggacttcctggtactcaaatcgaaagaggggctggaagagcgtctcgagttcctgttccccgatcctgaagtgcgcgcgcagcgccgcccggaatacgacgagcgtcttgacgtcgagctgaaggtgatcaaccagatggggttccccggctacttcctgatcgtgatggagtttatccagtggtcgaaggacaacaacgtgccggtgggcccggggcgcggttccggcgccggttcgctggtggcctatgcgttgaaaatcaccgacctcgatccgctggagttcgacctgctgttcgaacgtttcctgaacccggaacgtgtctcgatgcccgacttcgacgtcgacttctgcatggagaagcgcgatcaggtaattgagcatgtggcggagatgtacggccgcgaagcggtatcgcagatcatcaccttcggcaccatggcggcgaaagcggttatccgcgacgtgggccgcgtgctggggcacccgtacggcttcgtcgatcgcatctccaagctggtgccgccggatccgggcatgacgctggaaaaagccttcgctgccgaaccgcagctgccggaaatttacgaggcagacgaagaggtcaaggcgctgatcgacatggcgcgcaagctggaaggggtgacgcgcaacgccggtaaacacgccgggggcgtggtaattgcgccgaccaaaatcaccgacttcgcaccgctgtactgcgacgccgaagggcagcacccggtgacccagttcgataagaacgacgtggaatacgccgggctggtgaagttcgacttcctcggtctgcgcaccctgaccatcatcgactgggcgctggagatgatcaacgcccggcgagccaagaccgggctggagccgatcgacatcgccgccattccgctcgacgacaagaaaagcttcgatatgctgcagcgctcggaaaccacggcggtgttccagcttgaatcgcgcggcatgaaagacctgatcaaacgtctgaagcccgactgcttcgaagacatgatcgcactggtggcgctgttccgtccggggccgctgcagtcggggatggtggataacttcatcgaccgcaagcacggccgcgaagagatctcctacccggacatccagtggcagcacgagtcgctcaagccggtgctggaacccacctatggcatcatcctgtatcaggaacaggtgatgcagattgcccaggtgctggcgggctatacgctgggcggcgcggacatgctgcgccgtgcgatgggtaaaaagaacccggtcgaaatggccaagcagcgcggcggctttgaagatggcgccaaagcgcgcggcatcgacggcgaactgtcggtgaaaatcttcgacctggtggagaaattcgccggatacggcttcaacaaatcgcactccgccgcctatgcgctggtgtcgtatcagacgctgtggctgaaagcgcactacccggccgagtttatggcggcggtgatgaccgccgatatggacaacaccgataaggtggtggggctggtggacgaatgctggcgcatggggctgaagatcctgccgccggacatcaacagcggcctgtatcacttccacgtcaacgacgacggcgagatcgtttacggcatcggcgccatcaagggcgtgggggaagggccgatcgaagccatcatcgaggcgcgcaacagcggcgagcagggttacttcaaagacctgttcgatctctgcgcgcgctcagacatcaagaaactgaaccgccgcattctggaaaaactgatcatgtccggcgcgttcgatcgcctcgggccgcaccgcgccgcgctgatgaattcgctcggcgacgcgttgaaagcggcggatcagcatgcgaaagccgaagcgatcggccaggtggatatgtttggcgtgctggcggaagcgccggagcaggtggagcaatcctacgccaatatcgcgccctggccggagcaggtggtgctggacggtgaacgggagacgctggggctgtacctgaccggccacccgatcacccagtacctgaaggagatcgaacgttacgccggtggccagcgtttgaaagacatgcacccgacggatcggggcaaaatgaccaccgccgtcgggctggtggtcgccgcgcgggtgatggtgaccaagcgcggcaaccgcatcggcatctgtacattggatgaccgttcgggccgcctggaagtgatgttattcaccgaagcgttagaaaaataccagcatttgttggaaaaagaccgtatccttatcgccagtggacaggtcagctttgatgactttagcggcgggcttaaaatgatggcccgcgaggtaatggacatcagtgaagcccgggaaaaatacgctcgcgggcttgctatctcgctgactgacaggcaaattgatgaccagcttttgaaccgtctccgtcagtcgttggaaccccatcgctcggggacgattccagtgcatctctactatcaacgggaagatgcgcgagccaagctgcgttttggcgcaacctggcgcgtgacgcccaccgaccgcttgttgatcgacttgcggacgttggtaggcaatgagcaggtggacttggaatttgactaa

SEQ ID NO: 426555 - DNA, 960 bp, Serratia marcescens
atgagtctgaattttcttgattttgaacagccgattgcagagctggaagcgaaaattgactcgctgactgcagtcagccgtcaagacgaaaaattagatattaatctggacgaagaggttcagcgcctgcgtgaaaagagcgttgagctgacgcgcaagatttttgccgatcttggggcctggcagattgcccaattggcacgccacccgcgccgtccttataccctggattatatcaaacacatctttaccgacttcgaagagttggcgggcgatcgcgcttacgccgacgacaaagcgatcgtcggcggtattgcgcgcctggatggccgcccggtgatgatcatcgggcaccagaaaggccgtgaaaccaaagagaagatccgccgcaacttcggcatgccggcgccggaaggctaccgcaaggcgctgcgcctgatggaaatggccgcgcgcttcaagatgccgatcatcacctttatcgataccccgggcgcttatccgggcgtgggcgcggaagagcgcggccagtccgaagccatcgcgcgcaacctgcgtgagatgtcgcgcctgaacgtgccggtcatctgcaccgtcatcggcgaaggcggctccggcggcgcgctggcgatcggcgtgggcgataaggtgaatatgctgcagtacagcacctactcggtgatttcgccggaaggctgtgcctccattctgtggaagagcgccgataaggcgccgctggccgcagaagcgatgggcatcaccgcgccgcgtctgaaagagctgaagctgatcgactcggtgatcccggagccgctgggttccgcgcaccgcgacgtaccggcaatggccgccgcgctgaaagcgcagctgctggccgatctgaaagatctggacggtctgaacgacgaagagttgctcaaccgccgctaccagcgtctgatgaactacggctactgctga

SEQ ID NO: 426556 - DNA, 2139 bp, Serratia marcescens
atgaatatcatcgccatcatgggcccgacgggcgtctactacaaagatgagccgatccgcgagctccacgcggcgctggccgccatgggattccagctggtgtaccccaaaaacagcggtgatctgctgaagctgatcgaagccaatgcccgcatttgcggggtgatcttcgactgggacgactacagcctggagctgtgcagcgaaatcaacgagctgaatgaatacctgccgctgtacgcctttatcaatacccattccaccttcgacgtcagcctgcatgaaatgcgcatggtgctctatttcttcgagtatggcctgaatgcggcggacgatatcgcgcagcgcatccagcagtacaccgcagaatacatcgataccattacgccgccgctgaccaaggcgctgttcaactatgtgcgcgaagggaagtacaccttctgcacgccgggccacatggccggcaccgcgtttcaaaaaagcccggtgggctgcctgttctatgactttttcggcgccaataccctgaaggccgacatctcgatttcggttaccgagctcggttcgctgctggatcacaccgggccgcacctggaggccgaagagtatatcgcgcgcaccttcaacgctgagcagagctatctggtcaccaacggcacctccaccgccaacaagatcgtcggcatgtattcggcgccggccggcagcaccgtgctgatcgaccgcaactgccacaaatcgctgtgccacctgctgatgatgagcgatatcgtgccgatctatctgcgcccgctgcgcaacgcctacggcatcctcggcggcattccgcagcgcgagttcacccgcgaaagcatcgccgcccgggtgctggagaccgagaacgccacctggccggtgcatgcggtgatcaccaattccacctatgacggcctgctgtacaacaccgactacatcaagcagacgctggaggtgccatcgatccactttgactccgcctgggtgccttacaccaacttccatccgatttacgacggcaagagcggcatgagcggcgagcgggtgcccggtaaggttttctacgaaacccagtctacgcacaagctgctggcggccttctcgcaggcctcgatgattcatatcaagggcgactacgacgagagcaccttcaacgaagcctacatgatgcacaccaccacctcgccgcactacggcatcgtggcgtcgatggagaccgcggccgccatgctgcgcggcaacccggggcgccgcttgatcaaccgctcggtggagcgcgcgctgcattttcgccgtgaagtgcagcggctgcgcgaggagagcgacagttggttcttcgacatttggcagccggaagagatcgatgaggcgcaatgctggccattggatccggacgacaactggcacggcttcggccagaccgatcgcgatcacatgtacctcgatccgatcaaggtgacgatcctgacgccgggcatgaacgagctgggcgcgctggaggaggaagggatcccggcggcgctggtggcgaagtacctcgacgagcgcggcatcgtggtggagaagaccgggccgtacaacctgctgttcctgttcagcatcggcatcgacaaaaccaaggcgatgagcctgctgcgcggcctgaccgacttcaagcgcgcctacgatctcaatctgcgggtgaagaacatgctgccggatctgtacgccgaggatccggatttctatcgcaacatgcgcattcaggatctggccgccggcattcatcgcctgatctgccagcacgatctgccgcgcctgatgcagcgggcgttcgacgtgctgccggaaatgaagctgacgccgcaccagatgttccaggagcaggtgcggggcaacgtggaaacctgtgagctggatcagctggtgggcaaggtggcggccaatatgatcctgccgtatccgccgggcgtgccgctggtgatgccgggggaaatgatcaccgaagagagccgggcggtgctcgattttctgctgatgctgtgctcgatcggcgagcgctatcccggttttgaaaccgacatccacggcgccaggctgacggaggacgggcgctatctggtgaaggtgttgaagccttcctga

SEQ ID NO: 426557 - DNA, 453 bp, Serratia marcescens
atgaaaatgcgtcccggcgtcatcggttcgttaatgtgtatttccacttcggtttgggcaacgacggcgccagtttgcgtaaaaacagaccggctccaaatcgaggggttgttcgagcggtggaataccgctttacagagtggagaagcgcgaaaagtcgcgaatacttatctggacgatgcggtgttgctccccacgctttccaacaagatgcggctgacgaatgccgaacgggtggattacttcagacattttctggcgaaaagaccggtgggcaacattaaaagccgcaccatacgccttggctgcaacaccgcgatagataccggcatctatgcctttacgttcgcagacaaatcgacggtatcggcgcgttatacctttacctatgcctgggacggtgacgagtggaaaatctccactcatcactcctccgtcatgccggaaagctga

SEQ ID NO: 426558 - DNA, 390 bp, Serratia marcescens
atgctggcgttacgtcaggtacaccatatcgcgatcattggcgcggattacgccgccagtaagcatttttactgcgacattctcggattcaccctgctgagcgaggtctaccgcgagaagcgcgactcctggaaagcggatctggcgctcaacgggcaatacgccatcgagctgttttctttcccttcgccgccggctcgcgtcagccgcccggaggcctgcggcctgcgccatttggcgttcagcgttgacgacattgaccaggccatcgcccatctgcaggcggccggcgtcgcctgcgaaccggtacgcgtcgatccttacactcaatcccgctttacctttttcagcgatcccgatggtttaccgttagaattatacgagagttaa

SEQ ID NO: 426559 - DNA, 1554 bp, Serratia marcescens
atgcaagagcctgcttttcgcgtcggggagtggctggttacccctgccgacaacaccatcagccgcgacggacgccaaaaaacgctggaaccgcgcctgatcgacatgctgtgctatttcgcccgccatccggacgtggtgctgagccgcgacgagctgatcgacaacgtctggaagcgcaatatcgtcaccaaccacgtggtgacccaatgtatttcggaactgcgcaaatacctgaaagacggcgacagcgacagcccggaatacattatcaccgtgcccaagcgcgggtataagctggcgacgtcggtgatctggtgtgaagagggggagacgcaacccgctcccgcaccggcgccgcagattgcggtgatcatgcatgaaccggaagacggcagcgaggaagacgagacgccgtatgtgccgccgcgccgggcaagcgcgccggttgccgcgcccggcgaaaagaagccgcgcttttatcgccgctcgaccttctgggtgtggctggcgtttctggcggcgctcagcgtctgcgtggcgtttgtcggcatcgccacgctgtcgcagcgcgtgccggtatcgaccatgccggtgctgctcaacccgcgcgatatcgatattcgcatccagggcggcgagagctgcagcaactggatgccgcagctctcttatgtggtgggcgtcagcgagctgatcaccgattcgctgaacacctactcgaccttcctggtgcacgaccagaccaactacaactattccggccccagcaactcgggcaagtcgctgtatatcgagttcgtcaatcagcgccactaccgcgcccagcagtgtttcctgtccgtgcggctggtggataacgccgacagctcagtcatgctggacaagcgttacttcattaccgccgataaccagctgaagatccagaccgacttcctctccagcctgtccgcagcgctgaagcagccctggccgccacagctggagcagcgtctggcgcagctgctgcccgacaacgggccgctgctgcagcgtttctaccaggcgcatcagttgctgatccacggcgacgccgattcgttgacccgcgccagcgcccagctgagcgagttgattaaaagcgcgccgaacttccactacctgctggcggaaaaagcgctggtggacctgctgcgcaattcttatcaaccgttcgacagccaggtcttggcgcaactgcgcgccgatatcagccatctggcgaccatcccggaattgaaaaacacgccaatcatgcagcaagttctggcggtagatgcattgacgcaggggcgcattgacgaggcgcaccgggcgatcgatctggggattgaattgcaaatgtcgtggctgaattatgtgctgctggggaaagtatatgaaatgcaggggcagaaccatttggcggcggattcttatattaccgcattcaatcttcgccccggcgaagacacattgcattggatcaccaatggcgtattccagacgtcattgaccaacgtggtgccttatttaaataactatcagcgccaataa

SEQ ID NO: 426560 - DNA, 1344 bp, Serratia marcescens
atggcttcacccaagaaaatagggcttattgcctgcaccggcgtcgtcgccggtaatatgatggggagcgggattgccttattgcccgccaacctggcgagtctcggatctatcgccatctggggatgggtgatctcgattatcggggcgatgtcgctggcctatgtgtatgcccgcctcgccaccaaaaacccgcagcagggcggccctatcgcctacgcgggtgaaatttccccggccttcggtttccagaccggcgtgctttattaccatgccaactggatcggtaacctggccatcggcattaccgccgtttcttatctctccaccttcttcccggcgctgaacaacccggtacctgccggcatcgcctgtatcgctatcgtgtggatcttcaccttcgtcaacatgctgggcggaacctgggtcagtcgtttgaccaccctgggcctggtgctggtgctgatcccggtgatcgtgactgccaccgtcggctggcactggtttgacgccgccacctatcaggctaactggaatacctccggcaccaccgacagccatgcggtcatcaaaagtatcctgctgtgcctgtgggcgtttatcggcgtggaatccgcagcggtcagcaccggcatggtgaaaaacccgaaacgcaccgtgccgctggcaaccatgctcggcaccggcctggcgggcattatctacatcgctgccacccaggtgatcagcggtatgttcccggcgtctgaaatggccgccagcggcgcgccgttcgccatcagcgcctcggcgattatgggcaactgggccgcaccgatggtttccgccttcaccgccttcgcctgcctgacgtcactgggttcgtggatgatgctggttggccaggccggggtccgtgccgccaacgacggcaacttcccgaaagtgtacggcgagctggataaaaacggcattccgaagaaaggcctgctgctggccggttgcaaaatgaccgcgctgatggtgctgatcaccctgatgagctccgccggcggtaaagcgtccgacctgttcggcgagctgaccggcatcgcggtgctgctgaccatgctgccttacttctactcctgcgtagacctgatccgcttcgaaggggtcaacgtgcgcaacctgctgagcctgatcgcttcggtgtgcggttgcggcttctgcttcatcgcgctgatgggcgccaactcattcgaactgtccggcacctttatcatcagcctgattatcctgatgttctacgcccggaaaatgaatacccgccaggctaccaacgcagcggcggtcgatgaaaacaccacggccaaagcgcactga

SEQ ID NO: 426561 - DNA, 2139 bp, Serratia marcescens
atgaacgttatcgccatcatgaatcacatgggtgtctacttcaaagaagagcctatccgtgaactgcatcaggcgctggaaagtctggatttccgcatcgtttaccctaacgatcgcgaagacctgctgaaactgatcgagaacaacgcccgtctgtgcggggtgatcttcgactgggacaaatacaacctggagctgtgcgaagagatcagccagctgaacgagtacatgccgctgtatgcgttcgccaacacctattcgacgctggacgtcagcctgaacgatctgcgcatgcaggtgcgcttcttcgaatatgcgctcggcgcggcaaccgacatcgccgccaagatcaaacagaacaccgacgagtatatcgacaccatcctgccgccgttgaccaaggcgctgttcaaatacgtgcgcgaaggcaaatacaccttctgtacgccgggccacatgggcggcaccgcgttccagaaaagcccggtgggcagtatcttctacgatttctttggcccgaacaccatgaagtcggatatctcgatttcggtgtccgaactgggatcgttgctggatcactccggcccgcacaaagaggcggaagagtacatttcccgcgtattcaacgccgaacgcagctatatggtgaccaacggcacctccaccgccaacaagatcgtcggcatgtactcggcgccggcgggcagcacggtgctgattgaccgtaactgccacaagtcgctgactcacctgatgatgatgagcgacatcacgccgatctacttccgtccgacccgcaacgcctatggcatcctcggcggtattccgcagagcgagttccagcgcgccaccatcgccaaacgcgtgaaggagaccccgaacgccacctggccggtgcacgcggtgatcaccaactccacctatgacggcttgctgtacaacaccgactttatcaagaacaccctggacgtgaaatctatccacttcgattccgcctgggtgccttacaccaacttccacccgatctataaaggcaagtgcggcatgagcggcggccgcgtggagggcaaggtgatctatgaaacccagtccacccacaaactgctggcggccttctcgcaggcttcgatgattcacgtgaagggcgacatcaacgaagagaccttcaacgaagcctacatgatgcacaccaccacctcgccgcactatggcatcgtggcgtcgaccgaaaccgctgcggcgatgatgaaaggcaacgccggcaagcgcctgatcaacggctctatcgagcgcgcgatcaagttccgcaaagagatcaaacgcctgaaagtcgaatccgacggctggttcttcgacgtctggcagccggagcatatcgatgagccggaatgctggccgctgcgttccgacagtgcctggcacggcttcaagaacatcgataacgaacacatgtatctcgacccgatcaaggtcaccattctgacgccggggatgagcaaggaaggcgagatgcagccgttcggtatcccggccagcatcgtggcgaaatacctcgacgaacgcggcatcatcgtcgagaaaaccgggccgtacaacctgctgttcctgttcagcatcggcatcgacaaaaccaaggcgctcagcctgctgcgcgcgatgaccgacttcaaacgctcgttcgatctgaacctgcgggtgaaaaacatgctgccttcgctgtatcaggaagcgcctgatttctatgaaaacatgcgcattcaggatctggcgcagaacattcaccgcctggtggagcaacacaacctgccggacctgatgtatcgcgcgttcgaagtgctgccaaccatggtgatgaacccgtaccaggcgttccagaaagagctgcacggcgaagtggaagaagtctatctggaagagatggtcggcaaggtcaacgccaatatgatcctcccatacccaccgggcgtgccgctggtgatgccgggcgaaatgctgaccgaggagagccggccggtgctggaattcctgcagatgctgtgcgaaatcggcgcgcattatccgggctttgaaaccgacattcacggcgcctatcgtcaggcggacggacgttatcgagtgaaagtgctgaaggcgaaataa

SEQ ID NO: 426562 - DNA, 1452 bp, Serratia marcescens
atgaaaacaccctcacagccgcgcgcaatctactatgtcgtagccatacaaatttgggaatatttcagcttttacggcatgcgtgcgttactgattctctatctgacccaccaactcggctataccgacagccacgccatcgatctctacagcgcttacgcttcgttagtttacgtcactcctattttgggcggctggctcgccgaccgcctgctgggcaatcgcgtcgcggtgattgccggtgcggcgctgatgacgctggggcatatcgtgctcggcctgagtgcggtctccgcccagtcgctctatctggctctggccatcatcatctgcggctacggcctgttcaaatctaatatcagctgcctgctgggcgagctgtatccggcgcaggactcgcgccgcgaagggggcttctcgctgctgtacgccgccggcaacgtcggttccattttggcgccgatcgcctgcgggttggcggccgagcgctatggctggcacgtcggctttgcgttggccgggatcggcatgttcgccggcctggcgatcttcctgctcggcgggcgccacttccgccatacccgcggcgtgaatgcaccgctgatgcgcgccaaaagcctgggtttgccgcactggggttggctgttggcggcgctgctggcatcgccgctgttcttcacgctgctgtttgtgcacgactgggccggctatttgctcgggctggtatgcgtggcggcggtggtgctggtggcgcgcattatgctgcgtgcggacgccggccagcgccgggggctgtggcagatcgttgtgctgatgctgctgggcacgttgttctgggctttcgcccagcagggcggcagctccatcagcctgtttatcgatcacttcgtcgatcggcgctggttcggctggacggtgccgaccgcgctgttccagtcggttaacgcctgtgcggtgatgctgggcggcgtggcgctggcatggctggcgagcggcgacggtacgggcgatcgcacgttgcgcatctggtgcaagttcgccttcggtctgctgttgatcggcgtcggctttacgctgatggcgctcaatacgcggctgcacgggccgggatcgatggggctgatgatcgccggcctggctgtgatgggcttcgccgaactgtttatcgatccggtggcgatggcgcagatcacccggctgaatatccccggcgccaccggcgtgctgaccggtatctatatgctggcgaccggctcgatcgccaactacctggcgggcattattgccaatcagaccgccgaggatcacatcgagggtgcggcgatgcaggcgtatggccgcattttcgctcagatcggctggggagcggccggatgcgcgctggcggtgatcgcggtgctgggcggctggtggttgctggcgcggcgccaggcccggacggttaatgcttga

SEQ ID NO: 426563 - DNA, 1332 bp, Serratia marcescens
atgaatactgatcaattaacgacgcgggtggcagaccagttgggcgcgcagcagcggctgctggtggcgttcagcggcggcctggattccagcgtactgctgcatgtgctggcggccttgcgccgccagcgtccggcgctgcagctgcgtgcgctgcacgtgcatcacggcctgagcgcctttgccgaccgctgggttgagcattgccgcagccgctgtgccgactggcagatcccgctgacggtgacgcacgtgcaggtggacgcccgccagggcggtatcgaagcggcggcgcgtgcagcgcgctatgccgccttcagcgccgcgctgacggagggcgaagcgctgctcaccgctcaacaccttgacgatcaaagcgaaaccttcctgttggcgctcaagcgcggcagcgggccggcggggctgtcggcgatggcggcgcgcgcggcgttgggcgagcacctgctgttgcggccgctgttgggctgttcgcgtcagacgctggaaagctacgcgcaacgccacgccttaacctggatcgatgacgacagcaatcaggacacgcgcttcgatcgcaatttcctgcggttgcaggtgctgccgcagctcaatcaacgctggccgcacttcgcctcggcggtgtcgcgcagcgccggcctgtgcgccgagcaggagcaactgctggacgaactgctggcggaaccgctgcaaagcctgttggcggcggatcgctcattggcgattgacggcctgacagactgttcgccggtgcggcgcttcgccttgctgcggcgctggatcgcattgtttaacgtcactatgccggcgcgtgagcagcttcagcgcctgtgggaagaggtggcgctcagccgggaggatgccgaaccgcagctgcagctcggcgcctatcagattcgccgtttccgcggccggttgcacctgttgccgccgctggcggcgctgcgcgatgtgcatctgccctggcagcctgaccagccgctgacgttgccggacgggctggggcagttgattcccggtgagggcgagctggtgctgcgcgcaccgcagccatcgcaacaggtcagcgttcggttcggcggcgtgcagggtgtggtgcgcatcgtggggcgcgcccattcgcggccgataaaaaaactgtggcaggagctgggtattccgccctggcagcgtgaacgcatcccgttgatttattatgatgagcagctgatcgccgcgctgggcgtattcgtctgtgaagcggggcaggtgccggaaggcgaacgcccgtggcggctgcgctgggaaaaaaatcataatagcgaggagcaatga

SEQ ID NO: 426564 - DNA, 315 bp, Serratia marcescens
atgaagtttgtggggatcacgctgttggccaccggcctgttcagcctgccggcgttggcggcgggggatgcggccgccggccaggcgaaagccgccgcctgcgcggcgtgccacggcgcgcagggcaaggtgacggtgccgatgtacccgaatctggccgggcagaacgccatgtacctgcagcacgcgctgcaggcgtataagaaaggggagcgcaacggcggccaggctgaggtgatgaaggcctatgtgtcggggctgtcggatgacgatatcgccgatctggcggccttttacgccagcctgaagccttaa

SEQ ID NO: 426565 - DNA, 264 bp, Serratia marcescens
atgttgatgaatgatgagtaccaacccatcaattgcgatgactacgacaacctggaactcgcctgtcagcataaacttattctgaagctggagttacgcgacggagaagtgatcgaggccaaggcgatcgacctgctgcaaaagaaacgcgttgagtatctgaccatcgaacagaacggccaacagcgcgacctgcgccttgaccatatcagcagtttcagtcatccggaaatcggtaccgtggtcgtcagtctgtcggactga

SEQ ID NO: 426566 - DNA, 549 bp, Serratia marcescens
atggcgctgaaagcaaccatttataaagccgcggtcaatattgctgatatggatcgtcacttctaccacgacgccacgctgacgctggcgcaacacccgtccgaaaacgagcagcgcatgatgctgcgcttgctggcctggatctgccatgcggacgaacggctggtgttcaccaaagggctgagcgccgacgacgagccggagatctggcagcgcaacgaccacaatgggctggaaatgtggatcgagatgggattgcccgacgagaagcgcattcgcaaggcctgcaaccagtcgccgcgcgtggtgctgtacgcttacggcgagcgcgccgcgcacgtatggtggcagggaatgcagggcaaggtggccggccacaagaacctgagcgtgcgtttcctcgacgacgaacagctggcgcgcctgacggcattggccagccgcaccatgacgctgcaggcgacgttgcaagagggaactatttggctgtccgatgctcagaatagtctggaaatccagtttgccgagtggcagcaggcacaggtgtga

SEQ ID NO: 426567 - DNA, 414 bp, Serratia marcescens
gtgcttgaactgtcaagaaacgtagccataccggataatgagctggaattgacggcgatccgcgcgcagggcgcgggcggccagcacgtgaacaaaacctcaacggcgatccatttgcgctttgacatccgggcatccagcctgccagagtattataaggaacggctgctggcgctgaatcatcatcttattaccgctgatggcgtggtgattatcaaggcgcaagagtatcgcagccaggaattgaatcgcgaagcggcgttggccaggctggccgcgctgattcggcaggcgatggtggtggaaaaaacgcgcaaggcgaccaagcccacaaaaggggccaaattgcgtcgcctggaaggcaaggcgcgtaaaggcgccaccaaggcgctgcgtggcaaggttcgcacttag

SEQ ID NO: 426568 - DNA, 684 bp, Serratia marcescens
gtgaaaaaaattacggtagccctgttcctcgcggcaggcgcactctcgttgttgggatgcaacaatcattatcagccgaaggaacaaccgctgcagccaatgccgcagagctatcaaggggtgttgccttgcgccgattgcggcggtctggagacggcgctgttcctggatgaggacggcaccttcgtgctgcaggaaacctatcgcggcaccaaagacggcgatcagacctttgccgactacggcaaatgggcgcgcaccgcggataagctggtgctgaccgacagcaacggcgaaaaacgctatttccgcccgatgggcaagagcctggaaatgctggatcgcagcggcgtgccgatcgagtccaagctgaattaccgtctggatccggttgagaagccgttgcctaaaacgccgatgacgctgaaaggcagctacacctatatggcggacgcggcggtcttcaaggactgcgctaccggcaaaaccttcccggtggacaacaacatcgcgctggagcaaggttacgccaaagcatacaagaccgccggcgagccggtattcctgacgttcagcgcgcacttcagcgtgcagccgtcgatggaggaaggtctgaccgagaaggcgctggtgccggacggcaaaatcgtgtttgaccgcagcaagaactgcagcagcaaataa

SEQ ID NO: 426569 - DNA, 1719 bp, Serratia marcescens
atgcgtactagccaatatctgctctccacactgaaggagacacctgccgacgccgaagtgatcagccaccagctgatgctgcgcgccgggatgatccgcaagctggcctccggtctttacacctggctgccgaccggcctgcgcgttctgaaaaaggttgaaaacatcgttcgcgaagaaatgaacaatgctaacgcgatcgaagtgtccatgccggtggttcagcctgccgatctgtggcaggaaagcggccgttgggagcaatacggccccgagctgctgcgctttgtcgatcgcggcgatcgtccgttcgtgctgggcccgacgcatgaagaagtgatcaccgatctgatccgcaacgagatcagctcgtacaaacagctgccgctgaacttcttccagatccagaccaagttccgtgatgaagtgcgcccacgtttcggcgtgatgcgttcccgtgagttcctgatgaaggatgcctactccttccatacctcacaggagtctctgcaggagacttacgacgcgatgtacgaagcgtacagcaaaatcttcagccgcatgggcctggatttccgcccggtgcaggccgataccggctcgatcggcggcagcgcctcgcacgaattccaggtgctggcagacagcggtgaagacgatatcgtgttctccaccggttccgacttcgccgccaacatcgagctggcggaagcggtcgcgccggcggcgcctcgcgcggcggccggcgaagaattgcgtctggtggatacgccgaacgccaaaaccatcgttgagctggtcgatcagttccagctgccggtggaaaaaaccgtgaagacgctgatggtgcgcgccaccgaagagagcggccacaagctggttgccctgctggtgcgtggcgatcacgagctgaacgaagtcaaggccgagaagctggcgcaggttgccgcgccgctgaccttcgccactgaagaagaaattcgcgccatcgtcggcgccggcccgggttcactcggcccggtcaacctgccgatgccggtggttgccgaccgcagcgtggcggcgatgagcgactttggcgccggcgccaacgtcgacggcaaacactacttcggcatcaactgggagcgcgatctgccgctgccgcaggtggccgatatccgtaacgtggtggacggcgacgccagcccggacggtcagggcacgctgctgatcaaacgcggcatcgaagtgggccatatcttccagctcggcaccaagtactcggaagcgatgaaagcgaccgtgcagggcgaagacggccgcaaccaggtgctgaccatgggttgctacggcatcggggtcacgcgcgtcgtggccgccgccatcgagcagaaccacgacgaacgcggcatcatctggccggacgccatcgcgccgttccaggtcgctattctgccgatgaacatgcacaagtcgttccgcgtgcaggcgctggccgaagagctgtacaacaccctgcgctcccacggcatcgacgtgatcctcgatgaccgcaaagagcgcccgggcgtgatgttcgcggatatggaactgatcggcgtgccgcactctatcgttatcggcgaccgcaatctcgacaacgaagagatcgagtacaagaaccgccgcgtcggcgagaagcaaatgatcaaaaccggcgaaatcgttgatttcctgctgggccagatcaaacgctaa

SEQ ID NO: 426570 - DNA, 708 bp, Serratia marcescens
atgaccgaattcgttttcgagcagatcggcgtgatccgctcgccgtataaagaaaaattcgccgttccccgccagccggggctggtcgaagacggtggcggcgaactgctgctgttgccgccctacaaccaggcggaggcggtacgcggcctcagcgatttcagccatctgtgggtgatgttcattttccatcaaaccctggaaggcggctggcggccgacggtgcgtccgccgcgtttaggcggcaatgcccgcatgggcgtgttcgccacccgctccaccttccggcccaacccgctcggcatgtccctgatcgaactgaaaggcgtgcgggtaaaaaacggcgaagtgacgctggagctgggcagcctcgatctggtcgacggtaccccggtggtagacatcaagccgtatctgccgttcgccgaaagccagccgcaggcccgcgccggcttcgcccaggacgcgcccgccggcgatatgccggtacgtttcgcgccacaggccgagcagcagctgcagcaacatcaggcgcgttacccgcaattaaggcgttttatcagccaggtgctggcgcaagacccccgtcccgcctatcgtaaaggagaggacgtcgaacgggattacgccgtctggctgctggatttcaacgtgcgctggcgcgtcgtggacggtcataccgaagtgttggcgctcgacccgcgttaa

SEQ ID NO: 426571 - DNA, 405 bp, Serratia marcescens
atgcgtgttttacctctctgtttgttagcgctcgcgctggccggatgttcatcgcagcgtatcgcgccgtcctcaacaaacagcaccagcaagccgaccaccaccagcccggccaagaccacgccggccgcccgccccgctccggtaaaactgtacaaaagtgcagaagagctcgtgggcaagccgttccgcgatctgggtgaagtgtctggcgaatcgtgccaaaccaccgtacaagactccccaccgaatctggccaccgcccgtaaacgcatgcaaatccgcgcgtcttacatgaaggccaacgccgtgctgctgcacgactgccagatcgtcagcggcgtcgccggttgttaccagcaggccgtctgccagggctcggcgcttaacgtctcgtccaaatga

SEQ ID NO: 426572 - DNA, 816 bp, Serratia marcescens
atgtcgttaaaatttaaatctatcgcggcaattggcgcactgatcggctctctggctctggcgggctgcggccaggatgaaaagaatccgaaccacatcaaggtcggcgtgatcgtcggcgctgagcagcaagtggccgaagtggctcagaaagtggcaaaagagaaatacggtctggacgttgaactggtcactttcaacgactacgtgctgcctaacgaagcgctgagcaaaggcgatatcgatctgaacgccttccagcacaagccatacctggatcagcagatcaaagatcgcggctacaagctggtgccggtcggcaacacctttgtttacccgatcgccggttactccaagaaaatcaaatcgctggacgagctgaaagagggttctcagatcgcactgcctaacgatccgaccaacctgggccgttcgctgctgctgctgcagaaagtcggcctgatcaaactgaaagacggcgttggcctgctgccgaccgtgttggacgtgaccgagaacccgaaaaacctgaagctggttgagctggaagcgcctcagctgccgcgttccctggacgatcagcagatcgcactggcggtgatcaacaccacctacgccagccagatcggcctgacgccggcgaaagacggcctgttcgtggaagataaagactcgccttacgtcaacctgctggttgcacgcgaagataacaaagatgcggaaaacgtgaagaaattcgtgcaggcctatcagtctgacgaagtggacgccgccgccaacaaaatcttcaacggcggtgcggtgaaaggctggtaa

SEQ ID NO: 426573 - DNA, 654 bp, Serratia marcescens
atgtctgaggcaatgatgtggttgatggcgcgtggcgtgtgggaaaccgtcatgatgacctttgtctccggcttcttcggtttcgtgctcggcctgccggtcggcgtgctgttgtatgtcacccgcccggggcagatcatcgccaacaactcgctgtataaaatcctgtccgggctggtgaacatcttccgttctatcccgttcattatcctgctggtttggatgattccatttacccgcatgatcgtcggcacctctatcggtctgcaggcggccatcgtgccgttgaccgtgggcgccgcgccgttcatcgcgcgcatggtggaaaacgccctgctggagatcccgtccggtctggtggaagcggcgcgcgccatgggcgccacgccgatgcagatcatcaagaaagtgttgctgccggaagccctgccgggcctggtcaacgccgcgaccatcacgctgatcaccctggtgggctactccgccatgggcggcgcagtcggcgccggcggtctgggccaaatcggttaccaatacggttatatcggttataacgccacagtgatgaataccgtattagtattactggtagttttggtttatctgatccagttctgcggcgatcgcatcgtcaaagccgttacccataaatag

SEQ ID NO: 426574 - DNA, 1032 bp, Serratia marcescens
atgattaaactttctaacatcactaaagtgttccagcagggttcgcgcaccattaccgcgctctctgacgtgacccttcacgtccctgccgggcaaatctatggcgtcatcggttcctccggcgccggtaaaagcacgctgattcgctgcgccaacatgctggagcgcccaacgtccggccaggtgctggtcgatggtcaggatctgacctcgctgtcggaaagcgaactgacgcgcgcccgtcgccaaatcggcatgatcttccagcacttcaacctgctctcttcccgcacggtgttcggtaacgtggcgttgccgctggagctggacaatacgccgcgcgccgagatcaaaaagcgcgtgaccgaactgctggagctggtcggcctggcggacaagcacgacgcctacccggccaatctgtccggcggccagaaacagcgcgtggcgatcgcccgcgcgctggccagcaatcctaaagtgctgctgtgcgatgaagccaccagcgcgttggatccggccaccacccgttccatcctggaactgctgaaagacatcaaccgccggctgggcctgaccattctgctgatcacccatgaaatggacgtggtgaaacgcatctgcgaccaggtcgcggtcatcagccaggggcaactgatcgaaaaagacagcgtcagcgaagtattctcgcacccaaaaaccccactggcccagcagttcattcagtccacgctccatctggatatcccggacgactacgccgcgcgcctgtcgccggagcgtcagggcgaccgccaaccgctgctgcgcctggagttcacaggccagtcggtcgatgcgccgctgctgtctgaagccgctcgccgcttcaacgtgaacaacaacattatcagcgcccagatggattatgccggcggcgtgaaattcggcgtgatgctggcggagctgcacggcagcgacgaagacgcgctggcgacgattaagttcctgcaggaaaatcaggtaaaagtagaggttctgggttatgtctga

SEQ ID NO: 426575 - DNA, 564 bp, Serratia marcescens
gtgacacaaagcgttccagcaatttttctcgatcgtgacggtacgattaacgttgaccatggctatgtccatgaaatcgacaacttccactttattgacggcgtgattgacgcctgtcgcgaactcaaaaagatgggcttcgcgctggtaatggtgaccaaccagtccggcattgcgcgcggcaagttcagcgaagaccaattcatgtacctgaccgagtggatggactggtcgctggccgatcgcgacgttgacttcgacggcatctatttctgcccgcaccatccggaggcggtagtagaagagtatcgtcaggtgtgtgactgccgtaaaccgcagccgggcatgctgctgcaagcgcagcaggaattgaacatcgatatggccgcttcttatatggtgggagataaaccggaagatatgcaggcggcgatcgcggccggcgtcggcaccaaggtgctggtgcgtaccggcaagccggtgacggagcagggcgaaaagctggccgattgggtgctaaatagcctggcggccctgcctgaagccatcaaaaagcgggtttaa

SEQ ID NO: 426576 - DNA, 1653 bp, Serratia marcescens
atgaagcgcttattctctgccaccgcgctgctgttgctgcccggtctggcctgcgccgaagccatcggcggcgaagtgcatcgtcagccgctgaacatccaggcgatcgtgatgtttatcctgtttgtcggcgccacgctctacatcacctattgggcgtccaaacgcacccgttcccgtcaggattactacaccgcgggcgggcgcatcaccggcctgcaaaacgggttggcgatcgccggcgacttcatgtctgccgcctcgtttctcggcatctccgccctggtctacacctcgggctatgacggcctgatctactccatcggcttcctcatcggctggccgatcattctgttcctgatcgcggagcgcctgcgcaacctcggccgctatacctttgccgatgtcgcctcttaccgcctaaaacagaaaccgatccgcaccctgtcggcctgcggctcgttggtggtggtggcgctgtatctgatcgcgcagatggtcggcgccggcaagctgatccagctgctgttcgggctcaactaccacgtggcggtgatcctggtcggtatcctgatggtgctgtacgtgctgttcggcggcatgctggccaccacctgggtgcaaatcatcaaggcggtgctgctgctgtccggcgccagctttatggcgctgatggtgatgaagtcggttaacttcgacttcaacaccctgttcgccgaagcggtgaaggtgcatccgaaaggcatcgccatcatgagcccaggcggcctggtgtccgatccgatttccgcgctgtcgctcggcctggcgctgatgttcggcaccgccggtctgccgcacatcctgatgcgctttttcaccgtgagtgacgccaaagaagcgcgcaagagcgtgttctacgccaccggttttatcggttatttctatatcctgacctttatcatcggcttcggcgccatcttgttggtcagcgccaatccggcgttcaaagacgccaccggcgcgctgctgggcggcaccaacatggcggcggtgcacctggccaatgccgttggcggcaacttcttcctcggctttatctcggcggtggccttcgccaccattctggcggtcgttgcaggcctgacgctggccggcgcctcggccgtttcccatgacctgtacgccagcgtgatgaaaaacggcaaggcgaccgagcgcgacgaactgagagtatctaagatcaccgttgtagtgctaggcattgtcgccattgccctggggatcttgttcgagaagcagaacatcgcctttatggtcgggttggcgttctccatcgccgccagctgtaacttccctatcatcatcctgtcgatgtactggtcgcgtttgaccactcgcggcgcgatgattggcggctggctgggcctgttgacggcagtgattctgatgatcctcggcccgacgatctgggtgcagatcctcggccatgaaaaaccgatttacccgtatgaatatccggcgctgttctcgatgattgtcgcctttgtcggtacctggctattctcgatcaccgacagctcactggccgggcagcaagagcgggaacgcttccgggctcagtttgtccgttcgcaaaccgggttgggcatctctcagggtagctcgcattaa

SEQ ID NO: 426577 - DNA, 312 bp, Serratia marcescens
atgaatgacaccatttatcaagggattgaagaaaacccgcgctttaaagagctggtgagaaaacgcggccggttcgcctggctgctttcgctgattacgctggcgctgtacgtcggctttattctgttaatcgccttcgatccgcaatggctcggcacgccgatcgccgccggatcgaccatcactcgcgggatcccggtcggcgtcgggctgatcgtgatctctttcgtcttgaccgggatctacgtgtttcgcgccaacggcgagttcgatcgcctcaccgcagaaattctgcgtgaggtgaaacaatga

SEQ ID NO: 426578 - DNA, 1959 bp, Serratia marcescens
atgagccaactgcataaacacgctattccttctgcaattgcagaacgcgccctgattaatccggcacaataccaagagtattatcaacagtcggttcaagacccagaggctttctggggtgagcatggcaaaatcctggattggatcaaaccctataccaaagttaaaaatacctcgttcgatccgggccacgtcagcattcgctggtttgaagacggcacgttgaacctggcggccaactgtctggaccgccatttggccgagcgcggcgaccaaaccgccattatctgggaaggcgatgacccgacccaatccaaaaaagtgacttacaaacagttgcaccatgacgtctgccagttcgccaacgtgctgaaaaagctcggcgtgaaaaagggcgacgtggtggctatctatatgccgatggtgccggaagcggcggtcgcgatgctggcctgcgcgcgcatcggcgccgtacattcggtgatcttcggcggcttctcgccggaagcggtcgccgggcgcattatcgactccaacgccaagctggtgatcaccgccgatgaaggcctgcgcgccggccgcgccgtgccgctgaaaaagaacgtcgatgatgcgctgaaaaatcccagcgtggtcagcgtcgccaacgtggtggtgttccaacgcaccgggaagccgggctactggcaggaagggcgcgatctgtggtggcatgagctgatccagggcgtctccgccgactgcccgccggaagaagtgaacgccgaagatccgctgtttatcctgtacacctcaggctcgaccggcaaaccgaaaggcgtgctgcacaccactggcggctacctggtgtacgccgcgatgacctttaaatatgtgtttgactaccacgacggcgacatttactggtgcaccgccgacgtgggctgggttaccggccacagctatctgctgtacggcccgctggcctgcggcgccaccacgctgatgttcgaaggcgtgcctaactatccgggcgtcaatcgcctgtcgcaggtgatcgacaagcaccaggtcaacattctgtataccgcaccaaccgccattcgcgccctgatggccgaaggcgacaaggcgatcgaaggcacccgacgcgattcgctgcgcatcatgggctcggtcggcgagccgatcaacccggaagcctgggagtggtactacaacaagataggcaacgcaaagtgcccgatcgtcgacacctggtggcaaaccgaaaccggcggcttcatgattaccccgctgccgggcgccaccgagctgaaggccggttccgccacgcggccgttcttcggcgtacagccggcgctggtcgataacgtcggcacaccgcaggaaggcgcctgcgaaggcaacctggtgatcgtcgactcctggccgggccaggcacgcaccctgttcggcgatcatgaccgcttcgagcaaacctacttctcgaccttcaaaggtatgtacttcagcggtgacggcgcccgtcgcgacgaggacggttactactggatcaccggccgcgtcgacgacgtgctgaacgtctccggccaccgtctgggcaccgccgagatcgagtctgcgctggtatcgcacccgaaaatcgccgaagccgcggtggtcggcattcctcataacatcaaaggccaggcgatctacgcctatatcacgctgaaccacggcgaagaaccgacgccggagctctataccgaagtgcgcaactgggtgcgcaaagagatagggccgatcgccacgccggacgtgctgcactggacagattcgctgcccaagacgcgctccggcaagatcatgcggcgtatcctgcgcaaaattgccgccggcgacaccagcaacctgggggacacctccacgctggcggatccggccgtagtcgacaagctgttggaagaaaaacaatcaatgaaagtgccgtcataa

SEQ ID NO: 426579 - DNA, 1317 bp, Serratia marcescens
atgaaaagtgtaaaaattagcctggcttggcaaatcctgatcgcgttggtactgggtattattgttggcgcggtattgcacaaccagaccgaatctcgtgagtggctggtgagtaatattctcagcccggcgggcgatatctttattcgtctgatcaagatgattgtggtgccgatcgttatttccacgctgatcgtcggtattgccggcgtgggcgatgcgaaaaagctgggccgcatcggattgaaaaccattatttacttcgaagtgatcaccaccgttgccatcgtggtggggttgacgttggccaacgtattccaacccggccacggcatcgatatgtcgacgctgaccacggtggacatttcgcagtatgagaaaaccaccgaacaggtgcaaagcggttcgcacagcctggtggcgaccattctgtcgctgatcccgtcgaacgtcttctcgtcgatggccaagggcgacatgttgccgattatcttcttctcggtgctgttcggtctggggctgtcgtcgttgccgaaagagaccaaagagccgctgctgaaggtgttcaaggcggtgtccgaaagcatgttcaaagtcacccacatgatcatgcgctatgcgccgatcggggtgtttggcctgattgcggtcacggtagccaacttcggtttcgcttcgctgctgccgctggccaaactggtggtgctggtgtacttcgccatcgcgttcttcgccctggtggtgctgggggcggtcgcccggctgtgcaacctgcgcatctggacgctgatccgcatcctgaaagacgaactgatcctggcttattccaccgccagctcggaaacggtgctgccgcgcatcatcgaaaagatggaggcttacggcgcgcccaagtcgatcaccagcttcgtggtgccgaccggctactcctttaacctggatggctcgacgctgtaccagagcatcgccgccatctttatcgcccagctgtacggcatcgagctgtcgttggggcaggagatcgtgctggtgctgacgctgatggtcacctcgaaagggatcgccggcgtgccgggcgtctcgttcgtggtgctgctggccacgctgggcagcgtcggcattccgctggaaggcctggcgttcatcgccggcgtggaccgtatcctggatatggcgcgcaccgcgctgaacgtcgtgggtaacgcgttggcggtattggtgatcgccaaatgggagcaccagttcgatcgcaagaaggcgctggcctacgaaacggagtttctggcgcagaaggtgaagccggccaatcaggcctaa

SEQ ID NO: 426580 - DNA, 1344 bp, Serratia marcescens
atgtcggacaccgctttggcctctgaatggttgccgctggcgccagcgcagcttgatttctgggaagaacacaccttgcaccccgggcagaccctgtccaccgtcgcacactgcaccgaactgtgcggcgtagtagaggaagagacgctctgccgggcgatcgccactaccctcgccgagacgcaggcgtttgccctgcgctttggtgagcggcgtggcgacgctcctccgccgttacggcacgatccacaacgcataccgccattacaacgcatcgatctgcaaacgcacggcgatccctggcaggcggcgcaaagcctgatgcgcgaagatatcgcgcagcgccgggcactgcacagcgagccgctagccgccgcctggctgctcaagctggggccggagcgctacctctggtacgtgcgtgcgcaccatattctggttgatggcttcggcatggccttgattgaacaccgctgcgccgcgttgtatgcgcactatctgggtgaaggcagcgcgggtattcccttaggcgcctttgacgcctttcaacaggccgagctggcctacgctgattctgagcgatgcgagcgcgatcggcgcttttggcagagctatctgccgccgtcgcaggcgctgccgacggtgcgcaagggcggtgaggcctatggcgtgcggcgtctaagcacccaccaccggctgccggcggcggtatcgcaacggctggcacagctggcggaacgcagcggcatcaattggcccgacttgctggtggcgctgtcggcggcctggctgtttcaggtgatgccgcgcgacacccgacaaggcgatacgctgccgatgtggatgccggcgatgaatcgccgcgggcaggctgccaccaacgtgccttcgctggcggtcaacacgctgccgctgctggtgtcgccacccccgtcggcgacgctgggagattttctgatgacgatggcgcagcaactgcgggagctgcgcagccacgccggctaccgcctgcgtcaactggccgccgatcgcggcgtggagccaggctcgcgcttctttatttctcctttcatcaacgtgcaacccttcgatgcgccccggtttaccggctgcagcggcacccgccgcgtattggccggcggttcgggcgacggttttaatctgacttatcgcggccgcaccgacgcccgcgatctgcaggtcgatatcgatatttatctggaacagttcccgacggaggatgtgctggactatggcgaggcgctgcaagagtttctgttgcgcgcgctgcagcgggaagcctgggaacaaccgctggcggctctgacggcgttgcctgcctga

SEQ ID NO: 426581 - DNA, 3096 bp, Serratia marcescens
atggagacagcattaaccgcactgcagcaggcctatcttctgggccgcagcgatcgatggccgctcggcggcgtggcgatgcacgactttcgcgaataccgcgcccggcagccggatatgccgcgctttgaagcgcgcctgaccgagctggtacagcactacccggcgttgcgcacctgcatcgatgtgcagcgcggcacgcagcacgtacgcccggaggtgacgctgcatctggatcgtcacgatctgcgcgcccttgatggcgaagcggcgcagcgccaggtcgaacaactgcgcgagcgttactcccaccagcgccacgatccgagccaaccgctgtggcgcatcgccgtgatccaacttgccgaacagcaggatccgacgggatcgccgtacgatacgctgatctttaccagtttcgatgccttgatcctcgacggccaagggatctccaccgtgatcgcacgcctgttcgacgatcgccctctgacgccgaccgccgccgcgctgccgctccccaccgcatcggcggcgcagcgccaggccgacgccgcctactggcgcgaaaagctgcaggatgtcaccacgccgtcggcgttgccgtggcgcgccccgctcgccaatctcacctcgtcgcgctatcgccgcgccagcctgacgctgccgcgcgatacgataaaacggcttggccgtctgggatcgccgcatgcgctgctgcgcaacagcctgctgtcggcgctgatcctcgatacgctggcccactggaccaccgacggcgagctgtgcgtcggcgtgccggtagcgttccccgccgccgacggcgctctgggcaacgcctccagcttcgtggcggtgcgctattcccgccacggcgaagactttatccagcgcgcgcaagccttacaggacgacgtgctcggcgcgctcgaccacctgacgttttccggcgtcgatctggcgcggcagttgctcggccaaagccagggcggcccggcgctgccggtgatcctgaccaactgcctgggctgggaaacgctgccggccgaggcgccggtgcgcttccacgacggcctgacccaaacgccgcaggtcgccatcgacattcgcctgacgctggacagcgaaaaaaacctgcagctgtgcgtggactacgccgagcaggcgctgcacggcgagcaggtagaagccatgctggcggcactgcagcgacgcatcctgcacagctgtcaacgggccgacctggcgatcgcgccgcgggacttcatcgatctgacgcattaccgccacaacgacagcgaagcgaattacgcaccttatccttatttagcgcagctggccgagcggctgtttggcgtacaaaacggcggcaacgcgctgatctgcggcgaacagacgctgacctaccgcgaactgggccagcggatcgccacggcgatcgccaacctgcagagccgcggcgtgcagccgggcaacgtggtggcgctgtatctaccgcgcagcccggaacagatcatcttcagcctcgcctgcgccctgcagggcgtgatctgggtgcctgtcgatatcaactcgccgccggagcgcaccgcctacctgctggaaaactgccggccgacgctggtggtgcacggcggcgatctggagacgccgatcggcgtaacgccggcggccctgctggcgccgacggatcgcgcgcctgcgctgccggatgaacagacgttggcggaacgcagcgccagccaggccgcgagctactacctgtatacctccggcaccaccggtaaacccaaatgcgtggtgctcaacaaccgcgccaccgccaacgtcgtccaccagactcagcaacgctgggcggtcaccgccgacgacgtcttcatctccgtcacgccgccgcaccatgacatgtcgatgttcgatctgttcggttcgctgtgcgccggcgctacgctggtactgccggcgccgcatcaggaaaaggacgccatcagctggaaccagctggtggaaaagcaccgggtcaccctgtggtgttcggtgcccgccattctggagatgctgctcacctgcaaaacggccgacagcctgcgttcgctgcgcctggtggcgcaaggcggcgactacatcaagccggcgacggtgcaaaccctgcgcaccctgcgcccggatctcgcgctgttctcgctcggcgggccgaccgaaaccaccatctggagcatctggcacccgatcgccccgcaggagagcggcacggtgccttacggccgcccgctgccggccaaccgctacttcatctgccatgacgacggcagccactgcccggccggcgtggtcggccgcattcataccgccggggtcaacctggcgttgggctatctggagcagggggagctgaagcagcatgacttcgtcaccctcgaagggccggacgggcaaccgctgcgcgcttttcgcaccggcgatcagggctactaccgtgcggacggcaacatcatgttcgccacccgggtgaacggctatgtgaagatccgcggcgtgcgcgtctcgttgccggaaatcgaagatgtgctgcgccgccatccggcgatcctggatatggtggtggtggactatcccagcggagagaacaacgaagcggcgctcggcgccctgtatctgacccgcgacggcaaaccgctgccgctgtccgagatccgcgccttcgccaccggctatctgccctgcacccatattcccacgcgctttatccatgccgaggcgctgccgctgtccgccaacggcaaaaccgaccgccatcgcatccgcgccgatctgagcgaccagcaaaccgcgccggcgctgaacgcctgtgcggcgccgccgccgaacgcgcctttggcgcgcagcgcagagatcctgactatttactggcaggcgatcggcgtaacgccacgcccggaatggggggaagagacggcgtttatcaccatggggctgaagttgccgcatatcaaacaggtggcggagcgcctcaatgacgctttcggcactcggctggtaagcagttcgctcctgccatgcaagaacgcgcgcgaagtggcggcattgctggccaactga

SEQ ID NO: 426582 - DNA, 1611 bp, Serratia marcescens
atgaaagctttgaccacgatgcaggccgcctattgggtaggccgacagtccgctcctcccctcggcggcatggccgcccacctgtatgcggaattcgacggcggcgagctggatctcgcccgactacgccaggccgtcgaggcgctgtacctacaccatccgctgttgcgcctgcgcattaccgatgatggccggcagacgatcgcgcctcccggcccccggcacaccttgcatctcgacgactggcggcacgccgatacagcgacgctggcagccgcgctcgccgccaaacgccaggcaaaaagtacccagctgctgccgctggaacagggtgtgccctgcgatatcagcctgagcctgttgccggaagggcgcagccgcctgcatgtcgatctcgatatgatcgccggcgatgccatgagctttcgcctgttgatggaagatctgacggcgttttatcaccagtgcccaccggcgcccccccatgacatgccgccggcctacttcgaccacctcgaacggcgcgacgccgacgaggcgctgcgccagcgacgcgaacgcggccagcgttggtggcgtgagcgcctggcgcaggtgccaccggcgccgcacctgctgcgcacgccggaccgctgccgcagcgatcgcctggccatacagctgaatgcggaagaaagccgcgcactggaggacgtcgccaaacggcaccacacctcgctctcgacgctgtttttagcgctgttcgcgctggccgtcggccagggttggaacatgacgcgctttcggctcaacgtgccgctgttccaccgcgagagcgagcgggaggacgcgcatcgcctcatcggcgatttctctaacctggtgctgctcggcgtggagctgaacccgacggaaaatctgagcgccttctgccggcgcctgatgacgcagctggcggagctgatcgagcatgcggattaccccggcgtgagcgtgatgcgcgatctgtcgcgcctgcacggcagcctgcagccttcgccggtggtgtttaccgccggtttcggcatccgcggcaagacgctgttttccgaacgggtcaccgacaccttcggccatctcggctgggtcatctctcaggggccgcaggtggcgctggatgcgcaggtcgcccacgtcgacgacggcattctgatcaactgggacgtgcggctggatgcgttccccgagcaggtgctgccacgcctgctggcctgttaccgggcgctgctgcacttggccgcgcggcaaacggaggcgttcgatcgcccgctgtcgcagctgttggcgcaatgcacgcccgacgcgctggcgcagcaggcaccggtgcgccaggtgctgcatcggctgctggcgcgggtggcccccggggccggcttgcgcgaccacgacgatatccgccggttggccttgccggatgccggggtgaacgcgctgctgacggtgctcaacaagtatctggcggcggcgctgacggcacaggatctggcggcgcattcctcccctgcggcgctggcggcgctgatctgccaacgctcgcccgaggcaggacggcatgcgaaaacgctgctcgccgcgctggcgccgcagcactga

SEQ ID NO: 426583 - DNA, 2094 bp, Serratia marcescens
atgggcaagcattttgcggctcaacggcatgaaagcgtaggaaacggggaaaaagcgggaatgaaagccattggggcgttttcctccgtatttttaggggtttgttcactggcgatcggtaacgtcaacgcggcggaaacgaagagcaacgaaacctaccaggacgcggaaacgctgctggttaccggtgagaaggtcaaacgttctattttcgacaccagttccagcgtgcaggtgttcgacagcaaccgcatcgcatcgatgcccgacgcagtgcagatccccgatctgctgcgcatgacccccaacgtggtggatctgggcatcggcaacgaacttccgaccgtgcgcggtatcgacggttccggtccgaacgtcggcgccaacgccttcctcagcggcacccgcccgcgcctcaacctgtcgttggacggccgttcgctgacctataacgaacaggcgttcggcccgcagtcgctgtgggatctggatcgcgttgaagtgttcctcggcccgcaaagctacattcaggggcgcaacgccatcgccggcgccatcgtcatggccagtaaagatccgaccttcgagtgggaaagcgccttcaagggcggcgccggcaaccaacactcttcgcaactggccgccatggcgtccggcccgctggtggaagatcagctggcgttccgcgtgagcgtcgatcgccagcgccgccgcagcgaggccgatctgcaggcctatgcgccggtgggcgatccgcgcgaagtggaagccaccaccgcccgcgccaagctgttgttcaatccggccggcttgcgcgacctgactaccaaactgacctttaaccatttcggcagcaccgcaccacagaacgaaagcctcaacccgcagccgcacccaaccaatccgcgccacgatccgcgccgcgccgtgttcaaaagcaacatgaacagcaccatctgggatctggcctgggaggcctccgatgcgctgacgttggaaaaccgcgttatctataccgatttcaacatcaaccgtcctaccgcttacaacatccaatacgccgagattgacggccaggaagttcacgtagagccggtggtgcgcttcggcggcgcggacagccgcctgcacgggctggctgggctgcgttatttccacggtacgcaggatgagttcgtcaacatcttcggcggatcgaccttcaaggataaaaccgatacccattcggcgttcgctgagctgacctatgcgctgacgccgcaggtggacgtgaccgccgccagccgtctggaacgcgaacaccgccgccgcgacggcggcagtcaggcggtgcgtatcgacttcgatgaaacctacaccgtgttcctgccgaagctggacgtggcctggaaaccgacggatacccaaacctacggcgccaagatcgcgcgcggctataacgccggcggcggcggcatcacgatcggcacgccggtggtcagctatacctacggttccgagtatgtgtggaactatgagctgtatacccgccatcacctgaaagacgccaacgtggtgctgacgggtaacatcttctacaacgattacaaagacatgcagctgccgtactcgttgggtgagaactccagcgtgatccgcaacgccgacaaggtggaaacctacggtgcggaaatcggcgccacctggcagccgcgttgggactttgaactgttcggcaacctcggcctgctgaaaaccgacatcaagaaattctcgggcagcggcgtggaagggcatgagctggcgcgcgcaccggcttacaccgccaatatgggcgccaaatatcagttcctgaaagggtgggagctgagcagcaacgtggcgttctcggactcctattactcggcgtatgacaacgattcgcgcgggcgtatcggctcctattggacggccaacgcccagctggcttacaccttcgactacggccgcgccacgctgtatgcgaaaaacctgtttgattccgaccgccgcgagatgatcagaagtaatgacatctacacggcgaccctgcagcgaggccgcctggtcggcgcggcggttgagctgaatttctaa

SEQ ID NO: 426584 - DNA, 2910 bp, Serratia marcescens
gtgatcggtgattttgacagcattctgagcgatgaagaggcccagcggctggagagcgcgtttcaggcgctgggcgcggcgtcggcgagcggcgagcggccggtaagcgaagccgaagaacgggcatggtttgcccatctgcagcagggtgacgcacgcgggcagcgggcgttggcctggcgtttgacgggggatgtggatatcgcccaattgacggcggcgctgcaggcgctggtgcgggaaacgccgggcgtggacgtgcgctacgtttttgatgacgaaaacggcctggtgaaacgccccgccggctcggcgccgttgccgttgagccttcgtcaggtggcggacgaacaacaggccatttgtcgcctgctgcaagcgcaggcaacgccgtttgtactggaaagcgaagcgccgctgcgctgcctgctgttgctcacgccgggcgataacgtgattttgggcgtggtcttgcatgacatcctggcggaaacgctgccgtggcgtcatctgccggcgatgctgtccgcccgttataacggggacgcgatgcctctgcctttcgcggcggagccggtcgagctggcggaaactccggagccgcagttgccgtgggtgcgccaggcggtctcactgcaggattatcgcagcccggcgcagcgcgctgaagccttaccgccggtgggcgcgcgcgtggtcacgcgcattgcgcgctcgctgttgcccgccaacgacacgccgcgggcgctgctggcggcggtggcggcgcggtttgccgagttcgtcgccgcgcaggccggcgggcaagcggtgcagctgtgcgtgccggcggcggatacggcggagtgcgtcggcctggagctgggcctgacggcgccgccgctgatgcgcctgaccgtgcagcatggcgagggcgacgccgggcagcggctgctggcacaaaccgtggctgaacagccggacccgcaacgggcgcagctgctggtggcctggcgcgacgatctggccgcagagtggcggctggaaggcgttcacgccgaacgcctgttgctgccgccgctgcatacgccgtttgagctggcgctgctgctggagttgccggaggcggaagcgctgacgctcgagctggtcaccgatccgcgcctctctccgcatgtggcgcctttcctgctggaacagttcagcgccttcctggccgggcagcggattgccgtcgcattgccggcggctgagtccgtttccccggcgatggccgcgccggcggcgaacggcgacgcggacgaaagcgttgcaccgctgattttgcaggagttccgtgaggcgctggtggcgccggaaatgaccctggatgaagacttcttcgatcgcggcggccattcgctggtggccacccgggtgatcggccgtttgctgagcctgcatcagatcgaaatcaacattaacgacctgttcagccatccgacggcgcgcgggttggcgggatatgccaaacgcctgaacgttgcgcagccgaatgccgcggtggccaccgccgacgatcatgatcgggcgcaggcaccgctgtcgctggcgcaggaatcgctgtggaaggtgtatgaagccttcggccatgacgagattttcaacctgccgttctctttgcgcttcttcgatgcggtggatgaaacggcgctgcgtcaggcgtttatcgacgtcatgactcgccataccgtgctgcgttcacgcttcgtcgagcagcagggcgcggtggtgcaggtggtggtgccggccgccgagctgccggagtaccagtggttccgcttctcccacgagacgccagcgggcaacgccgccgccctgttggccgacgccggccagcaccggttcgatctggccgccgagctgccgctgcgcgtcacgctgctgcgcgatgcggacaacggtcagcaactgctgtcgctgctgttccaccatgtggtgctggatgaatggtcgctcaacctgatgatggatgaattgggcgtcgcctaccgccatcgcgtcgtcggccaggcgccgcagtggagcgggcagccgccgcagttccacaccttcgcccggcagcagcgggcctccggggtgcagcagcaacatctggactactggctcgacgcgctgcgcggcgcgccggtcggccaaccgatcttccggcaagagccatccacccacccggcggtgccggcaccggcagacgtcaacggcggctggctggagttcgaggtcgattccgccgtggcggaaggcctgtatcagctcgcccgccgcaacaacgcttcgctgttcaacgtggtgtatgccgggattacctcggcgctgcgcctgcttggcggcccggcggatctgttggtgggcacctcgacctccggccgtaacgacgccgagttcttcgataccgtcggctacttcaccaccgtggtggtgcaccgcgtgcgcttcgacgaggggctgacggtggccgggttggtcagccaggtgaaaaacaccatcaacggctcgctgccgtacaccgatattccgatcgatctggtggaggaagggctgttcggtgtggacgccgaccgcaagaaccacatgttcgaagtgttcatccagatccacagccgcatcaagctgaacggcgagttccagctgcaggacggcagcgcgatcgcctaccgccaggtggagccggaaaaagccgagtcgctgcttggcctgcagtttgaggtgatggaagacgatctggccggggcgaaatccctgcgggtgatgatgacctatcgccaggatcactacagccgggagcaggccaatctgatcgccgacggcgttcagcacgtctttacccagtttgcgcagcacatcgctggcgatatcgctctggcggcgctgccgcccgggccgcaggcatga

SEQ ID NO: 426585 - DNA, 1233 bp, Serratia marcescens
atgtctggaaccctagcaaccccgcgcgcgttactgtcgctgctggtggcggcctctctggtggtcgccggcgctgcgcaggccgacgatgccggcatcaaaccgcaggacatcaagcgcgaggcgctgtcgtcggcggtggtggagatggcctacagcacctcgcaacaggcgttgttcgtcagcgcgccggactggaaggaagaggcgcgctcccgcgtgctgcggctggatcccaacaccctggcgatcaaggcggagatcccgctgcaggtgaaaggcttcggcgtggcgctgaacgatgcgggcaatcgcctgtacctgactcagggcttcaacggcgaagtcggggtggtggacaccaccaccaaccacgcgctgggcagcatcaagctgctggacaaagcggtgctggagcaggcctacaagcaggcgggcatcagcggcaagcgcctggacttcctgctggcggagttgaagaagttcaaaatcaccgaggactacctgtaccgcattcgcgagatcaagtatgacgcgcaaagcggccgcttgttcctgccggggctgggcttcggcgtcgacagcgtgctgtacgtggtcgataccaaggccggcaagctggagaaagtgatcccgggcttcggctacaacgcggtgggtatcacattggatgagaagggccgccgggtattcgtctccaacatgcaggggcaggtgatcaccctgaacgccgacacgctggcgatcaccgccacccacgaagtgcaggccgatcagctgctgaatctggtgtatgatccggcgagcaatcgtctgctgggtgtcgatcagggtattgatcgcgataactaccgcaatcatcatctggggcacgactacgtgaagcgcagcagcggccaccgggtattcgcgctggatgcggacagcggcaaggtactggccagcgagctgacggatgaggtgccgatcggcctgctgctcgacgagcgcagccagcggctgtacgtcgccaaccgcaaaggcgtgcgcgtggatcacggcgccgggacgctgacggtgttcgacgccaagacgcttaagcgtctgcaaaccgtagatctgccgccgcaccctaacagtctggcgttggatccgaaaggcgacgcgctgttcgtgacggtgaaaaacgacggcgcttccaccaaggccggcaagccggaaagcgtggtgcgtattcagctgcacaccaactaa

SEQ ID NO: 426586 - DNA, 2283 bp, Serratia marcescens
atgaaaagcaagctatcacgttattctttagccactcttatcggcttgggattgggcgcgtccgcgttcgccaacgccgcgcagcagaccgacacccccaccacggaagaaaacagcggcgcagcggataaaaagccgcgcggcgaagacaccatcgtcgtgaccgccgcccggcagaacctgcaggcgcctggggtgtccaccatcaccgccgatgagatcaagaaacgcccgccggcgcgcgacatcagcgaactgatccgcaccatgcccggggttaacctgaccggcaactccaccagcggccagcgcggcaacaaccgccagatcgatatccgcggcatgggcccggaaaacaccctgattctgatcgacggcaaaccggcctccagccgcaactcggtgcgtcagggctggcgcggcgagcgcgactcgcgcggcgataccgcctgggtgccgccggaaatgatcgagcgcatcgaagtgctgcgcggccctgctgcggcgcgctacggcaacggcgccgcgggcggcgtggtcaacatcatcaccaagaaggccggcgatgcgctgcacggctcgctgaacggctacttcaacgtgccgcaacacaagcaggagggcgccaccaaacgcaccgacttcagcctgtccggcccgctgagcgattccctgagcttccgtctgttcggcggctacagcaaaacgcaggccgacgcctgggacattaacgaatcgcataagtccgaacgcgtcggcgcctacgccaacagcgtcccggccgggcgtgaaggggtggtcgataaaaatatcgacgccttgctgcactgggacttcgcccatctgcagtcgctggagttcgagtacgcttacggccgccagggcaacctgtacgccggcgatacccagaacaccaacaccaacgccctggtgcagagcaactacggcgaagagaccaaccgcatctaccgtgaaaccttcggcctgacccaccgcggcgcctgggacaacggcgtgagcaccaacaactacgtgcagtttgagcgcacccgcaacacccgcctgaacgaagggctggccggcggcaccgaaggcatcttcgacaccaaaaacaccggcttcggcaccaccaagctggacgacttcctggcgcacagcgaagtcagcgtgccgtttgaactgggcgttgcccagaccgccactctgggcaccgagtggacccagcagcggatgaaagacggcacgtccaccagccaaacgctgatgggcggcaccattcccggcatgactaccggtacgcgcagcccttatgcttccgcgcatatcttctcgctgttcgccgaagacaacattgaactgaccgacaccaccatgctgacgccgggcctgcgctacgatctgcattcggaatccggcaataactggagcccggcgctgaacctgtcgcaggaactgggcgactacttcacgctgaagatgggcatcgcgcgttcctacaaagcgccgacgctgttccagaccaacggcaactatctgctgtacagcaaaggtcagggatgtgccggcagcgataccaaaaacggctgctacctgctgggcaacgacgatctgaaggcggagaccagcgtcaacaaagagatcgggctggaattccataacgaaggctggctggccggcgtgacctacttccgcaacgattaccacaacaagattgaggcgggtaactctcgcatcgccaccagcagcaccggcacggcggtctatcagtgggaaaacgtgccgaaagcggtggtgcaagggctggaaggctcgctgaacgtgccggtcagcgagaccgtcacctggagcaacaacgccacctacatgatcgagaacaagaacaagaccaccggcgattacctgtcggtgatcccgaagttcaccgtcaactcgaccctcagctggcaggccacgcaggatctgtcgatgcagtccaccctgacctggtacggccgtcagaagccgaagaagtacaactaccagggtaaaccggccaccggcggcgaaacccgcgaggtcagcccttatgccgtcgtcggcgccagcgcgacctatgacctgaccaaaaacgtcagcctcaccgccggcatcgataacctgttcgacaaacgccagttccgcgccggcaacgcgcagaacgtgggcgatccgaacaccggcgcgatcaacatcgccggtgcaggcgcggccacctacaacgaaccgggccgcacctactacatgagcatcaacacccacttctga

SEQ ID NO: 426587 - DNA, 1308 bp, Serratia marcescens
ttgacggtggcacggcgcggtacgccatgggtagaaccggcgggtaacggccgctggcgaaccacctttttctggcgcgatcctcagggatgcgaattgacctccgcctaccgccgcgtgtggatcaacatcaactgcctgaccgaccatcaccagccgaatccgccgcaaagcctgcagcgtttggccggcaccgacgtgtggtactggcagaccgagctgagcggcgcctggcgcggcagctactgctttattccctgctttgacgagcggccgccggcgttcagcggcgacgatgcgcacgccaacatgcacaacctgcgccactggtggcaccaggtgttcgccagcgccacccccgatctgctcaacccgtatcgctcctggcaaagcgccagcggccacagcgtctccggcctgcacatgccggatgcgccgccgcagccggtatggcgttcgttcgacgagtatgagatcgccagcgggcgctgcacgccgccgctgccggcgcgtttgcagcgccatacctggcagagcgagcgcctgggcaacagccgcgacgtttggatctacaccaccggcgacagcaagccggccgagcgtccgttggctatcctgctcgacggtcagttctgggcgaagcagatgccggtctgggagccgctgatgcagctgacccgcgagggggcgttgccggaagcggtgtatgtgttgatcgacatcatcgatctgccgcaccgggcgcgagaattaacctgtaaggacgatttctggctggcggtgcaggaagaactgatgccgcagctggccgactgggcgccgcacagcgacaaaccggccgatacggtggtggcggggcaaagctttggcggcctggcttccctgtatgccgggctgcgctggccgcagtgcttcggcgcggtaattacccagtccggttcctactggtggccgcggcgcgacatgttgcagctgccgagcattcccgatgatgcctgctggctgatgcagcaggtggaacgacacggcctgggcaaccacggcgcgctgaaggtatttatggaagccggttcgcaggaaaagctggtgcaccgggtcagcggcgaaatggcggcgcgcctgagcgacgccggccatcgggtgcactaccgggtggtggaaggcgggcacgacgcgctgtgctggcgcagcggcctgaccgacgggctgcaggcggtctgggcctccgctttcgccaccgctcatccggcatcggcgacggcaacggcacgaggaacacatgatggaaagcctgaatccgttcgatga

SEQ ID NO: 426588 - DNA, 210 bp, Serratia marcescens
atgatggaaagcctgaatccgttcgatgatcaacagcagcgcagcctggtgctgcgcaacgtacaacaacaatacagtttgtggccggatttccgcgccattccgtccgattggacgatcgtcttcggcccggcggcgcgcaccgcgtgcaccgagtggctggaacagcattggcaagacattctgccggtcgcagcaagcaaggcgtga

SEQ ID NO: 426589 - DNA, 3945 bp, Serratia marcescens
gtgtcacacacccctaactctctcagcggcccggcgcttgcgggcgaatggccgctggtcgcggcgcaacccggcatctgggtcgccgatcaaatctccccgcatcgcaatgcctacgcggtggcccacgccatcgaactcaacggccccattgccgtggagcctctgctgcaggccatcatccagggcctgggcgaggtggacatgctgcgcctgcgttttgcggaacgcgacggcgtgccggtgcaatggctggatgacgcgctggcggtgcacgagccggaacttgtcgatctgacgacgtcgccggatcccgaagccgccgcgcgcgcgctgatggacatcgatctggcgagcgatctgcgcgccggcagcggcgcgccgctgtatcgccatgtggtgatgcgcctggcggataaccgctggttctggtatcagcgctatcaccatctgctggtggacggtttcagcttcaccgccatcgctcgccgcgtggcggcgatttacacccatatttgccgcggcgacgcgctggaaccgacgcctttcacggcgttcagcgacgtggtggcggaataccaggcttaccgggaggcgccggcctggcaacgcgacgccgatttctggctcgaaaaagcgcggcagttgccgccgccggccacgctctgcccacagccgctggccgggcaaacccccacgccgcgcatccatcgattggaacagcgctgcgatccgcaggccttcgccgaactggtgcaatgcggcgcgcagcagaagctgaacgccgccgatatggcggtggcgctggtggcgctgtgggtatcgcgcctgagcggccaaccgagtttcagcgccggttttatcttcatgcgccgtaccggatcggccgccctgtgcgccgccgggccggtgatcaacgtactgccgatggagatgcatctcgagccgcaggccacgctgtatgaggccgccgcccgcatcagccgcgagctgaaaacggtgcgccgccatcagcgctacgacgccgagcaggtgcagcgcgatctggggcgcatcggcgacggcgaaccgctgtacggcacggtcttcaacttcaaaatgttcgattaccagctggatttcgccggtatcgaaggcatcactcacgatctggcctccgggccggtgcgcgatctggagattgcgctgtttatcgacgaacaccatcagttgaaggtggagctgctggccaacgccgagcgttatggtcgccaggaactgcaggcgcacctgcagcggttgccgctgctgctggcgcagttcgccgcgcaggcaacgttgccgatcggcgaagccgatatgctgaccgccgacgatcatgcgctgctggcgcgggtcaacgacacggcgcacccggtgccggcgaccacgctgagccagctgctggcgcagcaggcgcaaaccacgccggacgcgccggcgctagcggatgcgcatttcaatttcacctaccgcgaaacgcgcgagcaggtcatggcgctggcgcgcgagctggttgcgcagggcgtgcggccgggcgacatcgtggcggtggcgctgccgcgttcggtgttcctgtcgctggcgttgatggcgatcgtggaagcgggcgccgcctatctgccgctggacaccggttatccggacgagcggctggcgatgatgctggaagacgccgcgccccggctggtcatcaccaacccggcgcagcaggcgcggttcgccgacaagggcgaaattttgctgtatgacgcgccgctgccggccgaccacgccgccggggtggcgatcgcgggcccgacgccgaaccatgcggcctatattatctttacctccggctccaccgggcgtccgaaaggcgtgctggtcggccatcaggcgatcgtcaaccgcctgctgtggatgcaacaccagtatccgctgggggcggacgacgcggtgctgcagaaaacgccgtgcagtttcgacgtctcggtatgggaattcttctggccgctgatggtcggcgcccggctggtgatggcgccgccggaggcgcaccgcgatccgcagcagctgcaacagctgatcgcgcagcaccgcattaccacgctgcacttcgtgccgtcgatgctggcggctttcgttgccgccctggacgacgacgcggcggtggcgagctgcgccgcgctgcgccaggtgttctgcagcggcgaagcgctgccggcggagctgtgccgcctgtggcaaagccgcacggcggtgccgctgcacaacctctacggcccgaccgaagcggcggtggacgtgacctggcatccggcccacggcgacgcgctggcgaaggtgaccggcgccaacgtgccgatcggcctgccggtatggaacaccgggctgcgcattcttgacgcgcgcctgcggccggtgccgccgggcgtggcgggcgatctgtatctgaccggcgtgcagctggcgcacggctaccttggccggccggatctgaccgccagccgctttgtcgccgatccgttcggcgagggcgggcgcatgtaccgcaccggcgacgtggcgcgctggctgccggacggcgcggtggaatatttgggccgcagcgacgatcagctgaagatccgtgggcagcggatcgagctgagcgaaatcgaccacgccttgctgtcgctgccgggcgtgcgccaggcggtgacgcacgcgctggtgttgcagggcacgccggtggacgccggcggcgatgcgcgccagttggtgggctatctggtgatgcagcctggcgcgggctgggatgcggaagccctgcgcgcggcgctggccgaccggctgccgccgcacatggtgccggtggcgctggtggaaatgagcgatttgccgctgagcgccaacggcaagctggatcgcaaggccttgccgcagccgcagggcggcgagcgcaaggctgggcggccgccgcaggccgggctggaaagcgagatcgcggcggtatttgcccgattgctgcagcgcgagcaggtgttcgccgatgacgatttcttcgcgctcggcggccattcgctgctggcgatgcggctggcggcggagctgcgccgcgatctgggcaaggcggtgtccgtcggccaggtaatggtggcgtcgcgcgtcgagcagctggctgtcttgttagcggaagatcgcacgcaggaagaggccgatcgcagcggcttcgacagcgtattgccgctgcgcgtcaccgaggggccgacgctgttctgtctgcacccggcgtccggtttctcctggcagttcagcgtattgccgcgctatctcgatcagcactggtcgctggtcggtatccagtcgccgcggccggacggcccgctggcactgagcgaagatatggatcaggtggtggatgcccacctgcagacggtgttgcaggtacagccgcacgggccgtaccacttcatcggctactcgctgggcggcacgctggcgcagggcatcgccgcccggctgcaggcgcgcggcgagcaggtggcgttcctcggcctgctggatacctatccgccggagacccaaaactgggacgtgatgctggacgacaacgtgttgaaggaggtgcagcgcgagcgcgagcagttcctggcggtgtcgcaggatacgctcgatccggcgctgggcgagacgcgcaccgcgatgttcgacaacattgaagccaactacgccgactcggtgcggttgttgtcgcacacgcgtaccgcccgtttccacggccaggcgacgctgttcgtcgccaaacgcacgctgcaggaagggatggacgtgcagcaaacctggtcgcagtacgtcgatgcgctgcaggcgcacgagctggactgcgcgcatgtcgatatcgtttcgccggcgtcgttcaaagtgctggggccgctgctgaaccggatcttgcgcacgctgtaa

SEQ ID NO: 426590 - DNA, 1257 bp, Serratia marcescens
atgagtagcaaaccctccatcctgcttgattttagcctgctgaaaaccaaccgggctttccgcgcggtattctgcgcgcgctttatttccattgtggcgctggggctgatggcgatcgccatcccggtgcagatccaggcgctgaccggttccaccctgcaggtcggactggcggtgacgctggccggcggcggcatgttcgccgggctgctgatggggggcgtattggccgatcgctatgagcggcgccgactgatcctgttcgcgcgctccacctgcggcatcggcttcgtcggcctgtgcctcaacgccctgttgccgtcgccttcgctggcggccatttatctgctggcggtgtgggacggcttcttcggcgcggtgggagtgacggcgctgctggcggccacgccggcgctggtgggccgcgaaaacatcgtgcaggcgggcgccatcagcatgctgacggtgcgcttcggctcgatcctttctccggcgatcggcggcctggtgatcgcccatatgggcattgcctggaactacggcctggcggcgttcggcaccctgctgacgctgctgccgctgctgagcctgccgcagctgatgccgccgccgcagccgcgtgaacacccgctgcgcgcgctggcgggcggtttcgccttcctgttccagaacaaggtgatcggcatggtggcgctgatcggcgcgctgctgaccatggccagcgcggtgcgcgttctgtacccggcgatggcggaaagctggcacatcgacgccgcccacctcggctatatgtacgccgccgtgccgctcggcgccgccatcggtgctttcaccagcgggcgcgtggcgcacgtggcgcgccccggatgggtgatgctgctgacggcgatcgcggcgttcgccgccattggcctgttcggcctgatgccgtggtacagcctggcgttgctgtgcctggtggcgttcggctacctgagcgcgctgaactcgctgctgcaatacggcctgatccagagcctgacgccggataacttcctcggccgcatcaacggcctgtggacggcgcaaaacgtggtgggcgatgcgctgggcgcgttgctgctgggggcgatgggcgcctttatgctgccggcgatgagcgccagcggtttcggtttcggcgcggcgctgctcggcatcctgttgctgttcgccatgaccggtttacgccaggtgacgctgcacaaaccggagccgcagcccgccacagaaaagtag

SEQ ID NO: 426591 - DNA, 1206 bp, Serratia marcescens
atggatactgccgtgaacgacatcaatcgaaaggaaatgcaggagcgcgaagaacaccggttcgccgctgatttttctccggcgtcgggcttcttctttacctcccctttccgcagcttgaccaccaccggatgtttcagccgcattcgcctgccggccgcggacggcgccgacctgaacggcgagttccagcgcagcgtgcggcaggcgtttgccgaggctcgtcaggccggcatcaaaaatccgctgctgtgcggcgctatcccgttcgatacccggcagccttcggcgctgtttattccgcagcagagccgctggttcgatcgcgccgcttttatggccggcgttcagccggcggcagaggggccggagctggctggcataacggagctgccgccgcagcagccgttcatgaacatggtcagcgatgccgttgacgcgatgaaggccggtgagctggataaagtggtcttgtcgcgcctgctggagatcgaaacgcgccggccggtggatcgccatgcgctgatggcgcgcgtgatcgcccaaaacccgcacggtttccacttccacgtgccgctggagcagggcgcgctgttgggcgccagcccggagctgctgctgcgccaggacggcggccgtttctactccaacccgctggccggttccgcccggcgcgatgccgacccgcagcgcgatcgcgaagtgggggagcggctgatggcctcggcgaaagatcgccacgagcatcgcatcgtcaccgaaagcatgcgtgacgtgctggccggccgctgccgctacctgaacgtgccgcacacccctgaactgttgaccaccaccacgctgtggcatctctccacgccgatcgacggcgaggcggcgtctccagacgaaaatgccctgtcgctggcctgcctgctacacccgacgccggcgctgtgcggcatgccgacggcccaggcacacgccctgatcggcaagctggagccgttcgatcgcggcctgtttggcggcatcgtcggctggtgtgatgacgaaggcaacggcgagtgggtagtgactatccgctgcggcaccgttgacggcaaccgggtgcggctgttcgccggtgccggcattgtggaagactcttcacccgaatctgaatggcatgaaacaggcaccaaactcagcaccattctgcgtgcctttggtatgaatcaaggataa

SEQ ID NO: 426592 - DNA, 1629 bp, Serratia marcescens
atgagcattgcctttaccccctggccggcggagttcgccagccgctatcgcgagcgcggctactggattgacaagccgctgaccgagatcctcgaccgccaggccaacaacgacgccccggcgattatcgacgcccagggcagcctgacctaccgcgagttgcagcagcgctccgatcgcctggcggccgctctgctgcgccgcggcgtaaaatccggcgacaccgcgttggttcagctgggcaacgtggcggagttctatatcgtgttcttcgcgctgctgaaaattggcgtggcgccggtcaacgcgctgttcagccatcagcgcagcgagctgaatgcctatgccgagcagatcaaaccggcgctgctgatcgccgatcgccagcacgcgctgtttgccgacgatcaattcctgaacgccttccgcgatgcgcatccttcgctgcgggttgtggcgctgcgcagccagcccgagggcgagctggcgctggccgcctggctggacgaggcgagcgacggttttgtcgcgcagccttccgcggccgatcaggtggcgttcttccagctttccggcggcagcaccggcacgccgaagctgatcccgcgcacccacaatgattactactacagcattcgccgcagcgtggagatctgccgtttcgacgcgcagacccgctacctgtgcgcgctgccggtggcgcataactacccgatgagttcgccgggcgtgctgggcgtgttttatggcgccgggctggtggtgttcgccgccgatccggacgccgggcagtgcttccgtctgatcgaacagcaccaaatcaacgtgacggcgctggtgccgccggcggtcacgctgtggctgcaggcgatcgaagagtggggcggcaatgcccagctcgccagcctgaaactgctgcaggtgggcggcgccaagctgggcgagacgctggcggcgcgcattcagaacgaaatcggctgccaactgcagcaggtgttcggcatggcggaagggctggtgaactacacccggctggacgacgacgaacgccacatcctgacgacgcaagggcggccaatgtcgccggacgacgaggtgtgggtggcggatgacgacggcaatccattgccggcgggcgaggtcggccggttgatgacgcgcgggccttataccttccgcggttactaccaaagcccggcgcacaacgccgacgccttcgacgccgacggtttctactgctccggcgatctgatcagtatcagcgaagacggctacatcaccgtgcaggggcggcagaaagatcagatcaaccgcggcggagagaagatcgccgccgaggagatcgagaacctgctgctgcgtcatccggacgtgatcaacgccgcgctggtgtcgatgccggacgcgctgatgggggagaagagctgcgcctatatcatcgccaacgcgccgctgaagccggtggtgctgcgccgccacctgcgcgagcagggcgtggcggacttcaaactgccggatcgctttattcaggtggacagcctgccgctgaccccggtcggcaaagtggacaaaaaacggctgcgccagcagctcgacgcgcaactacagactcaggctcagggagattaa

SEQ ID NO: 426593 - DNA, 861 bp, Serratia marcescens
atggccattccaaaacttaatgactacgcgctgccgacggcggacgaactgccgcaaaataaagtcacctggcaggtagaaccgcagcgcgccgcgctgctgatccacgacatgcagcagtatttcctcaatttctggggcgaagacagtgcgctgattaaacaggtggtggagaacatcgccaacctgcgccgctactgcaaacagcagggcatcccggtgttctataccgcgcagccgaaccagcagagcgatgaagatcgcgcactgttgaacgacatgtgggggccgggcctgaacaaacaccccgagcagcaggcggtgaccgccgcgctggcgccggacgaagacgacacggtgctggtgaaatggcgctacagcgccttccaccgctcgccgctgcaggagatcctgcaggagtccggccgcgatcagctgattatctgcggcgtgtatgcgcacatcggctgcctgaccaccgccatcgacgccttcatgcgcaatatccagccgttcatggtggccgacggcctggcggatttctcgcgcgacgaacacctgatggcgctgcgctacaccgccggccgctgcggccgggtggtgaccaccgcgtctctgttgccggctgccggtatcgccagcatcgatgcgctgcgtcagcagatcctgccgctgttggacgaggacagcgaagacatgggcaacgatgagaacctgatcgattacggcctggattcggtgcgcatcatggagctggcgacccgctggcgcaagatccgcggcgatatcgactttatcgcgctggcgcgcaacccgaccatcgacagctggtgggcgctgctttccgaagagaaagcctga

SEQ ID NO: 426594 - DNA, 1065 bp, Serratia marcescens
atgaatgctttgatcaccaagggaaaacgtgcggcatttccgctgatgctgctgtccacgctgctgttctccaatacgctgctggcgcagaccgcgccggaagtgctgcgcaagccggttggcaagggcgcctatgaaatggcctacagcccgagcgagaacgcgctctacctggcgacgtcgcagagccgcaagctggacaagggcggcatcgtttatcgtctggatccgaccacgctggacgtgacccagattattcataatgacatcaaaccgttcggcgccgccgtcaacgccaagaccggcacgctgttcttcggcaacacggtcaataactcggtgaccgccatcgacgccaagaccggcgacgtgaaaggccgcctggtgctggacgcgcgcaagcgctccgagaccgtcaagccgctggcgccgcgcgaactggtggcggatgccgacagcgataccctgtacatcaccgggctgggtgaatccagcgtggtgtgggtggtggacggcaaggatctgaccctgcgcgccaccgtgaccgacaccggcaaatacggcaccggcctggcgctggacgccgccgccaaacgtctgtatgtcaccaacgccgacggcgagctggtgaccatcgacacccaatccaacaaggtgctgtcgcgcaagaagctggatgagtccaaagagcacttcttcctgaacatcagcctggataccgctacccatcgtgcgttcatcaccgactccaagcagccgcaggtgctggtggtggatacccgcaacggcaacattctgagcaagatcgacgtaccggaatcgctggcggtgctgttcaacccggcgcgcaatgaagtttacgtcacccatcgccaggcgggcgaagtgagcgtaatcgacgccaagagctacaaggtgctgaacaccatcaagacgccgacccacccgaacagcctggcgctgtcgccggacggtcagacgctgtacgtcagcatcaagcaggcttccagccgcgagaaagaagccaccgcgccggacgacgtgatccgcgtagcgctgaaataa

SEQ ID NO: 426595 - DNA, 621 bp, Serratia marcescens
atgcctgcctcgcgtaccccgctgttattgtccgttatcaccctgctgctgctggccgcgctgatccacagcggcatccgcccttacgatcgcaccacctggctgatggaggtggcgccggtattggtagttttgccgctgctgtggctgacttatcgccgctatccgctgacgccgctgctctacacgctgattttatttcatgcgctgatcctgattttcggcggcatgtacagctacgcccgcgtaccgctggggtttgaggtgcagcagtggctggctcttggccgcaacccatacgacaaactggggcatttcttccagggattggtgccggcgctggtggcgcgcgagatcctccagcgcggcggctatgtgcagggccgcaagatgctgggctttgtggtgtgctgcatcgcgctggccatcagcgccgtttacgagctgatcgagtggtgggcggcgctggcgctgggccagggcgccgacgagtttctcggcacccagggtgacccgtgggatacccagtccgacatgttctgcgccttgctcggcgcgctatgcggtttgctgctgttcgccggttggcaagaccggcaaattcgccgcctgtgtcgataa

SEQ ID NO: 426596 - DNA, 381 bp, Serratia marcescens
atgtcgttaacgatagtgctcagctttgcgtggctaaatcttttggatctctataacaacgacacgttgttctttcagaagttaacgatttccgtcatcaataacacctcgttcgccgatgtcgtcgcctcttacctgagactgattctgtatctgcctttcgggctgttggcgatcgtgttgacgctgttgttttgcgcccggcggctatgcgatacccggctctttgtgctcgcttggccgatttctctggcggtcttcttggtcttttggtttgttaatgtcgctttccccggacatctcaatctggtgttggtcgctaaatcttgcgtactggcactgattgggctggttccgccgaggaaacgagaggccgaataa

SEQ ID NO: 426597 - DNA, 576 bp, Serratia marcescens
gtgcaacgtgaacacgtccttgataccgcgctgggcctgttggaacaacagggcctggcgaccgccacattagagatgctggcggaaaaactcgacgttcagcccggcgatctcaaacggttctggccggatcgcgaagcgctgctgtacgactgcctgcgctaccacggtcaacagatcgacacctggcgacgccagctgctgctggatgaaaacctgagcccgcagcaaaaactgctggcgcgctatgacgtgctggcggaatacgtgcaacacgaccgctatcccggctgcctgtttatcgccgcctgcagctttttcccggaaacggatcatccgatccaccagttagcggagcagcaaaagctgacctcgctggagctgacccgcgaactgctgcgcgaaatggacgccgacgacgccgacatggtggcgcagcaaatggaattgattcaggaaggctgcctgagcaaactgctggtaaaacgccagctccaggacgtatcggtcgccaaacggctggcggaagacatcttgcaggtggcgcagtgccgccgcaacggggcgctaagctag

SEQ ID NO: 426598 - DNA, 1725 bp, Serratia marcescens
atggatcaacgcttccttaaactgattttgctgctgtgcagcctgttcttcctgccgcaggcggcgcaggcttcgctgttcgcgccgaagggcggcagccagttcgtgcctgtcgatcaggccttcgccttcgatttcaagcagcaaggcagccaggtgacgctgaactggcagatccgccccggctactacctgtatcgccagcagatcaaactggtgccgcagcaggcgacgctcggcgcctttaccctgcccgaagggctgagccacaaggacgagttcttcggcgaggtggcgattttcaaacagcagctgaatctgcaggtgccgctgcaacaggcagcggccaacgccagcctcagcgtcacctatcagggctgcgccgaggccggcttctgctatccgccggaaacccgcgtcatcccgctggatgccgtcagcgccggcgatgtcgccccgctcccggcggctgcccctgcgccaaccgaacagcccgctacgccggccagcctgcctttctcgccgctgtgggcattgctgatcggcatcggcatcgccttcactccgtgcgtgctgccgatgtacccgctgatctccggcatcatcctcggccgcgaccggccgcaaagcagcggccgcattctggcgctggcggtggtttacgtgcagggcatggcactcacctacaccctgctggggctggtggtggccgccgccggcctgcagttccaggcggcgctgcagcacccttacgtgctgatcggcctgtcggtgctgttcatcgcgctggcgctgtcgatgttcggcctctattccctgcagctgccctcggcgctgcaaacccggctggcgagctggagcaacacccagcgcggcggctcactgaccggcgtgttcctgatgggcgccctggccgggctgatttgctcgccctgtaccaccgcgccgctcagcgccatcctgctgtatatcgcccagagcggtaacctgtgggccggcggcggcaccctgtacctgtacgcgctggggatgggcattccgctggtgatcgtcaccctgttcggcaaccgcctgctgccgcgcagcggcccgtggatgcagtacgtgaaagaggccttcggcttcgtcattctggcgctgccggtgttcctgctggagcgggtgatcggcgatctgtggggcctgcgcctgtggagcctgctcggcctggcgttcttcggctgggccttcgctctgagcctgagaagcgcgcgcggctgggcgcgtgccctgcaactgctgctgttggcggcggcggtgatcgccgcgcggccgctgcaggattgggccttcggcgccgatcaggcgcagcaggcggctcaacaacacctggcctttgcccgcatcaacaacgtcgagcagctcgatctggcgctgcaacaggcgcgcggcaagccggtgatgctggatctgtacgccgactggtgcgtggcctgtaaagagttcgagaaatacaccttcagcgatgcggcggtgcaggcgagcctggccaacgcggtgctgctgcaggcggacgtcaccgccaacggcgcggaacaggcggcgctgctgaagcatttgcaggtactggggttacccacgatcctgttcttcgatccggcgggccaggagctgacggccgagcgggtcaccggttttatgaaggcagaagccttcaacgcgcatttgcagaaagtgatgcgataa

SEQ ID NO: 426599 - DNA, 324 bp, Serratia marcescens
atgtctgattgcgaagctgtcgtcatactctgtaccgcacccgatgaagccagcgcccaggaactggcggcgcgggtcctgggcgataagctggcggcctgtgccacgctgctgcccggcgccacctcgctgtattactgggaagggaaactggaacaggaatacgaagtgcagatgctgttcaaaagcgatcgccgccgtcagcaggccctgctcgacaccctgaaacaacatcacccctaccagacgcccgagctgctggtgctgccggtgatggccggagataaagactacctgttatggatcaacgcttccttaaactga

SEQ ID NO: 426600 - DNA, 1302 bp, Serratia marcescens
atgctagccgtagaattggttatcgttctgctggccatctttttaggggccaggttgggcggtatcggtatcgggttcgcggggggattgggcgttctggtcctggcgctgatcggcgtcaagccgggcagcattcccttcgacgtgatttccatcatcatggcggtgatcgcggcgatctccgccatgcaggtcgccggggggatggattacctggtgcagcagaccgaaaagctgctgcgcaagaaccccaagcacatcaccattctcgcccctatcgtcacctacttcctgaccatcttcgccggcaccggcaacatctcgctctcggcgctgccggtgatcgccgaagtggcgaaagaacagggcatcaagccttgccggccgctgtcgaccgccgtggtgtccgcccagatcgccatcaccgcctcaccgatctccgccgcggtggtgtatatgtcttcggtgatggaaggccacggcgtcagctacctgcacctgctgatggtggtgatcccgtccaccttctgcgccgtgctggtgatgtcgctgctggtgacctggctgttcgactccaagctgtctaacgacccggtgtacctgaaacgcctggaagaaggcctgatcaccctgcgcggcaacaacgcgctggagatcaaaccgcgcgccaaagcctcggtgctgctgttcctgctgggcgtgctgtgcgtagtggcttacgccatcatcaacagcccgggtcttggcctggtggccaagccgctgatgaataccaccaacgccatcctgatcatcatgctgagcgtcgccacgctgaccaccctgctgtgccgcgtcgataccgacatggtgctgaactccagcaccttcaaggccggcatgagcgcctgtatctgtatcctcggcgtcgcctggctgggcgataccttcgtgcaggccaacatcgactggatcaaagagacggccggcagcgtcattcaggcgcacccgtggctgctggcggtgatcttcttcttctgctcggcgctgctgtactcgcaggccgctaccgccaaggcgctgatgccgatggcgctggcgctgaacgtgtcgccgctgaccgccgtcgcctccttcgccgccgtctccggcctgttcatcctgccgacctacccgacgctggtcgccgcggtgcagatggacgataccggcaccacgcgcatcggccgcttcgtgttcaaccacccgttcttcattcccggcaccatgggcgtgattttcgccgtggtattcggcttcctgctcggcagcatcatgctgtaa

SEQ ID NO: 426601 - DNA, 1437 bp, Serratia marcescens
atgtcaaacaacattcgtatcgaagaagacctgttaggaacacgtgaagtccccgcagacgcttactacggagtccacactctgcgtgcgattgaaaacttctacatcagcaacagcaaaatcagcgatgtccccgagttcgttcgcggcatggtgatggtgaaaaaggccgcggcgatggccaacaaagaactcaaaaccatcccgcgcaaaatcgccgacgtgatcatccaggcctgcgacgaggtactggataaaggcaagtgcatggatcagttcccggtggacgtgttccagggcggcgcaggcacctcgctgaacatgaacaccaacgaagtgctggcgaacatcggcctggaactgatgggccaccaaaaaggcgaataccagtacctgaacccgaacgatcacctcaataagtgccagtccaccaacgacgcctacccgaccgggttccgcatcgcggtgtacgcctccaaccagaagctgatcgacgccatcaaccagctgcgcgaaggcttcgaccgcaaggcgaaagagttcgaaaccatcctgaaaatgggccgcacccagctgcaggacgcggtaccgatgaccctcggccaggagttccacgccttcagcgtgctgctgaatgaagagacccgcaacctgcaccgcaccgcggagctgctgctggaagtgaacctgggcgccaccgccatcggcaccgcgctcaacaccccggaaggctaccagccgctggcggtgcaaaaactggcggaagtcagcggcctgccggtggtgccggcggaagacctgatcgaggccacctccgactgcggcgcctacgtgatggtgcacagcgcgctcaaacgcctggcggtgaaactgtccaaaatctgcaacgacctgcgcctgctctcctccggcccgcgcgccggcctgaacgaaatcaacctgccggagctgcaggcgggatcgtccatcatgccggccaaagtgaacccggtggtgccggaagtggtcaatcaggtgtgtttcaaggtgattggcaacgacacttgcgttaccatggcggccgaagcgggccagctgcagctgaacgtgatggagccggtgatcggccaggcgatgttcgagtcgatccacatcctgaccaacgcctgctacaacctgctggaaaaatgcattaacggcatcaccgcgaataaagaagtctgcgaacactacgtcttcaactcgatcggtatcgtcacctatctgaacccgttcatcggccaccataacggtgacatcgtcgggaagatctgcgccgaaaccggcaagagcgtgcgtgaagtggtgctggaacgcggcctgctgaccgaagccgagctggatgacatcttctccgtggagaacctgatgcacccggcctataaagccaaacgctatacggatgaaaatgaacaataa

SEQ ID NO: 426602 - DNA, 489 bp, Serratia marcescens
gtgcgctggttaccgctactgctgatatttctgctggcttacatagaaatatccatctttatcaaagtcgccgccgtgctcggcgtggctgtcaccctgctgctggtggtgttcagctcctgcgtcggcatttcgctggtgcgcaatcagggcatgaaaaccttcgtgcagatgcagcaaaaactggcggccggcgaaagcccggcagcggaaatggtgaaaagcgtttcgctggtgctggcgggcttcctgctgctgatcccgggcttcttcaccgacttcctcggcctgttgctgctgctgccgccggtgcaaaaatcgttgacgctgaagctgatgccgcatctgtcggtttatcgccccggcggttggacgggcggtgacgccgctaatggcaacaccttcgacggcgaattccagcgcaaggacgacgaacgctcggtgctggagcaccacccggacgaggagcgcaagcctcacgatcgttaa

SEQ ID NO: 426603 - DNA, 294 bp, Serratia marcescens
atgagtattcgtccattgcatgaccgcgttatcgtcaagcgcaaagaagttgaatcaaaatctgctggcggcatcgtcctgactggctccgctgcgggtaaatccactcgcggtgaagtggttgcagtgggtaaagggcgtgtgctggaaaacggtaacatccaaccgctggatgtgaaagttggcgatatcgtgattttcaacgacggctacggcgtgaaagcagagaagatcgacaatgaagaagtgttgatcatgtccgaaagcgacattctggcaattgttgaagcgtaa

SEQ ID NO: 426604 - DNA, 1647 bp, Serratia marcescens
atggcagctaaagacgtaaaattcggcaatgacgctcgcgtgaaaatgctccgcggcgtgaatgttctcgctgatgcagtaaaagtgaccctgggcccgaaaggccgcaacgtagtgctggataaatctttcggcgcaccgaccatcaccaaagacggcgtttccgttgcgcgtgaaatcgaactggaagacaagttcgagaacatgggtgcacagatggtgaaagaagtggcctccaaagcgaacgacgcggcgggcgacggcaccaccactgcaaccgtactggctcaatccatcatcaccgaaggcctgaaagcggttgctgcaggcatgaacccgatggatctgaagcgcggcatcgacaaagcggttgtcgctgcggttgaagaactgaagaaactgtccgtaccttgctctgattccaaagctatcgctcaggtaggcaccatctccgccaactccgacgaaaccgtgggtaaactgatcgcggaagcgatggagaaagtgggcaaagaaggcgttatcaccgttgaagaaggcaccggcctgcaagacgagctggacgtggttgaaggtatgcagttcgaccgcggttacctgtccccatacttcatcaacaagccggaaaccggttctgttgagctggaaagcccgttcatcctgctggccgacaaaaagatctccaacatccgcgaaatgctgccggtgctggaagccgttgccaaagcaggcaagccgctgctgatcatcgctgaagacgttgaaggcgaagcgctggcgaccctggtggtcaacaccatgcgcggcatcgtgaaagtggctgccgttaaggcgcctggcttcggcgaccgccgtaaagccatgctgcaggacatcgcaaccctgactgccggtaccgttatctctgaagagatcggtctggagctggaaaaagccaccctggaagacctgggccaggcaaaacgcgttgtgatcaacaaagacaccaccatcatcatcgatggcgtgggcgacgaagcaaccatccagggccgcgttgctcagatccgtcagcagatcgaagaagcgacctctgactacgatcgtgaaaaactgcaggagcgcgtagcgaaactggccggcggcgttgccgttatcaaggttggcgcagcgactgaagttgaaatgaaagagaagaaagcccgcgttgaagacgccctgcacgcgacccgcgccgcagtggaagaaggcgtggtggctggcggtggcgtagcgctgatccgcgttgcaggcaaaatcgccgcgctgaaaggcgacaacgaagaccagaacgtgggtatcaaagttgcgctgcgcgcaatggaagcccctctgcgtcagatcgtggtgaacgccggtgaagaagcttccgttatcgccaaccaggtgaaagcgggcgaaggcagctacggctacaacgcttactccgaagaatacggcgacatgatcgcgatgggtatcctggatccaaccaaagttacccgttctgctctgcagtacgcggcttccgtggctggcctgatgatcaccaccgaatgcatggttaccgacctgccgaaggctgacgcaccggatctgggcgcagcaggcggcatgggcggcatgggcggtatgggcggcatgatgtaa

SEQ ID NO: 426605 - DNA, 345 bp, Serratia marcescens
atgcggattaaagccttactgggtctctcggcagcgatgctgctggcgggttgcagcaccactcatgaactgaccgctgcgggtcagcagatcaagttcaccgacagcaagccggcggcggaatgccagctgctgggggaagtgaccggcacccagagcaactggctgtccggcaacggcggtgaaggcagctccatgcgcggtgcggccaacgatctgcgcaacaaggcggcggccatgggcggcaacgtgatctacggcgccaacagcccgagccagaatctgctctccagcttcgcaccgctggacagcaaaatggtcggtcaggtttacaagtgcccgtaa

SEQ ID NO: 426606 - DNA, 1029 bp, Serratia marcescens
atggcacacattataacccaaagtacggcacatagagaagattggttgcatcaactcgccgatgttattaccgatccagatgaattactgcagcttttgtcactgaatacgcacccggaactgccgcaggggcgcgatgcccgccggctgtttgccctgcgcgtgccgcgcgccttcgctgcgcgcatgcgccccggcgatgccaacgacccgctgctgcgccaggtgctgaccgccagagaggagttcatcaacgccccagggttcaccaccgatccactcgatgagcagcgcagcgtggtgccgggcctgctgcacaaataccgcaatcgcgcgctgctgctggtcaagggcggctgtgcggtcaactgccgttactgcttccgccgccacttcccctatcaggataatcagggcaacaagaacaactggcggcaggcgctggattatatccgccaacacccggaactggacgagatcattttttccggcggcgatccgctgatggccaaggacagcgagctggagtggctggtcggcgagctggaggccatcccgcacctgaaacgcctgcgcattcacacccgtctgccggtggtgatcccggcgcgcatcacgccggcgctgtgccgcctgctgtcggcctcgcgcctgcaggtgctgatggtcacccacatcaaccacgccaacgaaattgaccgcgatctgcaaagcgccatggcgcagttgcgcctcgccggcgtcacgctgctcaaccagagcgtactgctgcgcgacgtcaacgacgatgccgacacgctggcggtgctcagcaacgcgctgttcgatgccggtatcctgccttactacatccacgtgctggacaaggtgcagggcgcggcgcacttcatggtcagcgacgatgaagcgcgcgccatcatgcaggcgctgctgagcaaggtgtccggttatctggtgccgcgcctgacgcgcgaagtgggcggcgaaccgagcaaaacgccgatcgatctgcgcctgatgcaggagtga

SEQ ID NO: 426607 - DNA, 567 bp, Serratia marcescens
atggcgacttattctagcaacgatttccgtccgggtcttaaaatcatgttcgagggcgaaccttacgccgtcgaagccagtgagttcgttaagccgggcaaaggccaggcgtttgcacgcgtgaaaatgcgtcgtctgctgaccggcacccgcgtggaaaaaaccttcaagtctaccgattcttgcgaaggcgcagacgtgatggacaccaacatgaactacctgtacagcgacggtgagttctaccacttcatgcaccctgagtctttcgaacagcatcaggttgacggcaaaaccgtcggcgacgcggccaaatggctgcaggataacgcagagtgcatcatcaccctgtgggatggccgtccaatcgccgttcagccgccgaacttcatcgaagcggaaatcaccgataccgatcctggcctgaaaggcgataccgcagggactggcggcaagccggctaccctgagcaccggcgccgtggttaaagtgccgttgttcgtccagatcggcgaagtgatcaaagttgacactcgctctggcgaatacgtctctcgcgttaaataa

SEQ ID NO: 426608 - DNA, 132 bp, Serratia marcescens
atgctgaagaaaagtattatcgcgatcttctctttgatgattttgacctcgttgaccgcctgtaataccacccgcggcgtgggtgaggacattcaggccggcggcaaggccattcagcgcagcgcggaataa

SEQ ID NO: 426609 - DNA, 318 bp, Serratia marcescens
atggcctggattattctgcttatcgccggtttgcttgaagtggtttgggctatcggtctgaaatacactcacggttttacccggctgacgccgagcatcatcaccatcgccgcgatggtggtcagcatgttgttgttggccaacgccatgaaaacgctgcccgccggcaccgcctatgcggtgtggaccggcatcggcgcggtgggcgcggccatcatgggcatggtgctgttgggcgagtcgaccaatatcgcgcgtatcatcagcctgtgcctgatcgtggtcggtatcctcgggctgaagttcagcagtcactga

SEQ ID NO: 426610 - DNA, 534 bp, Serratia marcescens
atgcgtttatggtcaaagcttagcgtcatgctttccgccctgctctccgtcgcttgcagcgtctccccgcccaaagacatcaaggtcgtgacccctttcgacagtcagcgctatctcggcacctggtacgaaatcgcgcgtctagatcatcgttttgaacgcggcttgcagcgggtgaccgcccactacagcccacgcgccgacggcgggctgaaagtcatcaatcgcggcttcaatccgcagaaacagcaatggcaagaaagcgaaggcaaagcctactttatcggttcaccgcaggtcgcggcgctgaaagtgtcgttcttcggccccttctatggcggctataacgtaattgccctggatccggagtatcgctacgcgctggtttgcggccctaaccgcgactatctgtggatcctgtcgcgcaccccgacgcttgacgccggcgtacgcgacagcttattgcagacggccaaaggctacggtttcgccaccgatgcgctgatctgggtgcagcagcccgccgatcagtga

SEQ ID NO: 426611 - DNA, 360 bp, Serratia marcescens
atgataaatcaagcacctaaacgctccgacgagccggttttctggggattgttcggcgccggtggcatgtggagcgcgatcgtcgcgccggccatcgtgctgctggtcggcattctgctgccgctggggctgttccccggtgaagcgctgggttacgagcgcgtgctggcgttctgccagagcctgatcggccgcctgttcctgctgctgatgatcatcctgccgctgtggtgcggcctgcaccgcatccaccatgcgatgcacgatctgaagatccacgtaccggccggcaaatgggtgttctacggtctggcggcgatcctcagcgtggtcaccgttatcggcgtcgtcaccctgtaa

SEQ ID NO: 426612 - DNA, 393 bp, Serratia marcescens
atgacaactcaacgtaagccctatgtgcgcaccatgacgcccacctggtggcaaaagctaggcttttaccgtttctacatgctgcgcgaaggcacctcggtgctggcggtctggttcagcatcgtgctgctctacggcgtgttcgcgctgaagggcgccgccgagagctgggccggcttcgtcggcttcttgcagaacccgctggtgctgttgatcaacgtcgtcgccctgctggcggcggcgctgcacaccaaaacctggttcgatttggcgccgaaggccgccaatatcgtggtcaacagcgagaaaatgggaccaggccccatcgtgaaagggctgtgggccgtcaccattgtcgtcagcgtggtcatcctggccgtggccctgatctaa

SEQ ID NO: 426613 - DNA, 735 bp, Serratia marcescens
atggctgagatgcaaaccctgaagatcgaagtcatgcgctataacccggaaagcgacgccgagccgcatttcgtcacctacgccgtgccttacgacgaacagacctcgctgctcgacgcgctgggctacatcaaggataacctggcgccggatctctcctaccgctggtcctgccgcatggcgatctgcggctcctgcggcatgatggtcaaccgcgtgccgaagctggcgtgcaaaaccttcctgcgcgattacgtcggcggcatgaaggtcgaagcgctgggcaacttcccgatcgagcgcgatctggtggtcgacatgacccacttcatcgaaagcctggaggcgatcaagccttacattatcggcaacgatcgcaagccggaagacggcccgaacgtgcagaccccggcgcagatggccaagtatcaccagttctccggctgcatcaactgcggcctgtgctacgccgcgtgcccgcagttcggcctcaaccccgagtttatcggcccggcggcgatcacgctggcgcaccgctacaacctggacaaccgcgaccacggcaagaaacagcgcatgccgcagcttaacggccaaaacggcgtctggagctgcaccttcgtcggctattgctccgaagtctgtccgaaacacgtcgatcccgccgccgccatccagcagggcaaggtggagagcgccaaagacttcatgatcgccatgctgaagccgcaataa

SEQ ID NO: 426614 - DNA, 1797 bp, Serratia marcescens
gtgcaaacctttaacgccgatcttgccattattggggccgggggcgctggtttacgtgcagcaatagccgcagcggaagccaatccccaactgaaaatcgcgctgatctctaaggtctacccgatgcgcagccatacggtcgccgccgaggggggctccgccgccgtcacccaggatcacgataccttcgactaccacttccacgacaccgtcgccggcggcgactggctgtgcgagcaggacgtggtcgatcacttcgtgcatcagtgcccgcgcgagatgacccagctcgagcagtggggctgcccgtggagccgcaaaccggacggttcggtcaacgtgcggcgctttggcggcatgaagatcgaacgtacctggttcgccgccgacaagaccggcttccacatgctgcacaccctgttccagacctcgctgaaatacccgcaaattcaacgcttcgacgagcacttcgtgctggatatcctggtggatgacggccaggcacgcggcctggtggcactcaacatgatggaaggcacccgcgtgcagatccgcgccaacgcggtggtgatggccaccggcggcgccgggcgcgtctaccgctacaacaccaacggcggcatcgttaccggcgacggcatgggcatggcgttccaccacggcgtgccgctgcgcgacatggagttcgtgcagtatcacccgaccggcctgcccggttccggcatcctgatgaccgagggctgccgcggcgaaggcggcatcctggtgaacaaggacggctaccgttacctgcaagattacggcatgggcccggaaaccccgctgggcgagccgaagaacaaatacatggagctgggcccgcgcgacaaggtgtcccaggccttctggcacgaatggcgcgccggccgcaccatcgccaccccacgcggcgacgtggtctacctcgatctgcgccacctgggcgagaaaaagctgctggagcggctgccgttcatctgcgaactggccaaggcctacgtcggcgtcgatccggtgaaagatccgatcccggtgcgccctaccgcgcactacaccatgggcggcattgaaaccgatcagaattgcgaaacccgcatcaaggggctgttcgcggtcggcgaatgctcctccgtcggcctgcacggcgccaaccgtctcggctccaactcgctggcagaactggtggtgttcggccgcgtcgccggtgagcacgcggcgcgtcgcgcgctggaaaccgcgccggccaacggcagcgcgctggatgcgcaaacccgcgatgtcgaaacccgcctgagcaacctgatgaagcaggaaggcaacgaaaactgggcgaagatccgcgacgaaatggggctgtcgatggaagagggctgcggcatctaccgcacgccggagctgatgcaaaaaaccatcgataagctggcggagctgaaagagcgcttcaagcgcgtcaacatcaccgacaactccagcgtgttcaacaccgatctgctgtacaccatcgagctgggctacggcctggacgtcgccgaatgtatggcgcactccgcgtttaaccgcaaagagtcgcgcggcgctcaccagcgcctggacgaaggctgcaccgagcgcgacgacgtcaacttcctcaagcatacgctggcgttccataacccgcagggcgcaccgcgtctcgaatacagcgacgtgaaaatcaccaagctgccgccggccaaacgcgtctacggcgcagaagccgaagcgcaggagaaaaagaataaggagcaggcaaatggctga

SEQ ID NO: 426615 - DNA, 978 bp, Serratia marcescens
atgagcgaaacggcaagctggcagcctagtgcacccatcgccaatttgttgaaacgcgcagcgattctggctgagatccggcgtttcttcgccgatcgtggcgtgctggaagttgagacgcccaccatgagccaggcgacggtcaccgacgttcacctgttcccgttcgagacgcgtttcgtcgggccgggggcggcagagggcctgacgctatacatgatgaccagcccggaatatcacatgaagcgcctgctggcggcgggcagcggcccgatctaccaaatggggcgcagcttccgcaatgaagaagccgggcggcatcacaacccggaattcaccatgctggagtggtaccgtccgcactacgacatgtaccgcctgatgaacgaagtggacgatctgctgcaacaggtgctggactgcgagagcgcggagaccctgtcttatcagcaggcgttcctgcgccatctggacatcgatccgctgtcggcggagaaggcgcagctgcgtgaagcggcggccaagctcgacttgagcaacatcgccgatactgaagaagaccgcgatacgctgctgcagctgctgtttaccgtgggcgtggagccgcatatcggccgtgaaaagccggcgtttgtttaccacttcccggccagccaggcggcgttggcggagatcagcaccgaagaccaccgcgtggcggagcgtttcgaggtgtacttcaagggcattgagctggcgaacggtttccgcgagctgaccgacggccgtgaacagcagcagcgcttcgagcaggacaatcgcaaacgcgcggagcgaggcctgccgcagcagccgatcgactacaacctgctggcggcgttgcagcacggcatgccggaatgttccggcgtggcgctgggcgtggatcgcctggtgatgctggcgctgggcgccgagagcctgagcgacgtgttggctttcccggttgggatcgcctga

SEQ ID NO: 426616 - DNA, 3348 bp, Serratia marcescens
gtgcgcctgatcatcacgcttttgctcggttgcctgctgtggcaaccggcgctggccgctcccctgccgaccgagacccagctcaagcaagagctgaagcaggcggaaagcagcaaaaacgcgccgaatcaggcggagaccaccgaggcgctgcaaagcgccctcaactggctggcggagcgtaaagagtcgcagactcgctccgagcagtatcagagagtgatcgacgatttcccgaagatgacgcaggaactgcgccgccagctggtgctggaaagcaacaagatcctgccgaacggcgacgatctgccggccgccgagttggaacagcagatcctgcaaaccagcagtctgctgctggaacaggcgcgcctgctgcagcaagagcaggatcgcacacgggaaatcagcgattcactcggccagctgccgcagcagcagaccgacgcccgccgtgcgctgacggaagtgcagcgccgcctgcaggcgcagcccgccaacccgaccacgccgtacgcgcaggccgccctggccctgctgcagaccgaagccgcggcgcgcaaggccaaagtggacgagctggaactggcgcagctgtcggccaacaaccggcaggagctggcgcgcatgcgcgccgaagtctataaaaagcgccacgagaaaatagacgttcagctgcaggcgctgcgcaacaacctcaacgcccagcgccaacgcgaagcggaacaggcgctggaaaaaaccgagcagctggccgagcagaacggcgatttgccaaaaagcatcagccaacagctgcagatcaaccgcgaactgtccgccgcgctgaacagccaggcgcagcgcatggatctgatttcatcgcagcagcggcaggcggcggcgcagacgctgcaggtgcgccaggcgctgagcaccatcatcgagcaggcccagtggctcggttcgtcgtcggcgctgggggaaaccctgcgcgcccaggtggcgacgctgccggaaatgcccaagccgcaacagctggacggcgacatggcccagctgcgcgtgcagcgcctgcagtttgaaactcagctggaaaaactgtcgcagcgcgaattcaagcgcgacgacggcagcgcgctgaccaaccaggagcagcgcatcgtcgatgcccagctgcgcacccagcgcgagctgctgaactcgttgttgtccggttgcgacacccaaatcctcgagctgaccaagctgaaggtggccaacacccagttgatcgaagcgttgaacgaaattcgcgacgccacccaccgctatctgttctgggtgccggacgtcaatccgatcaacttctcttatccgctcaacgtggcgcacgatctgacgcgcgttctgtcgctggacacgctgtcgcagctcggcggcgccttcatgatgatggtgaccagccgcgaaacgctgatcccgatcttcggcgccctgctgctggtgattttcagcatcagttcgcgcaagcactaccacgccttcctcgagcgcgccagcagccgcgtcggcaaggtgacgcaggacgaattcttcctgacagtgcgcaccgtgttctggtcgattctggtggcgatgccgctgccggtgctgtgggccgcgctcggctacggcctgcagagcgcctggaactacccggtggcggaagcgatcggcaaaggggtgaccgccacgctgccgatcctgtggatctgcatgatctgcgccgccttcgcccacccgcaagggttgttcatcgtgcacttccgctggccggcgaagcaggtttcgcgcgccatgcgctactacaagatgtcgatctggctgatcgtgccgctgatcatggcgctgatcaccttcgatagcctgaaagagcgcgagttcgccaacacgctggggcggctgtgcttcattctgctgtgtctggcgctggcgctggtcacccacagcctcaaacgcgccggcatcccgctgtatctggataaaaacggctccggcgacaacatgctcaacagcgccttctgggggctgctgctgtcggcgccgctgctggcggcgctggcgtcgagcgtcggttatctcaccaccgcgcaggcgctgctggcgcgcctggaaacctcggtggcgatctggttcctgctgctggtcgtctaccacatcatccgccgctggatgctgatccaacggcgacgcatcgccttcgaccgcgccaaacagcgccgcgcagacattctggcccagcgcgcccgcggcgaagacgaaacctcgcataccccgaacagcaccgaaggttcggtggatatggattactcagagatagacctggataccatcagcgcccagtcgctgcagctggtgcgttcgatcctgacgctgatcgcgctggtgtcggtgatcgttttgtggtcggagatccactccgccttcagcttcctggaaaatatctcgctgtgggacgtgacctcgacggtcaacggcgtggaaaccgcccacccgatcaccctcggcgcagtgctgatcgccattctggtattgatcatcaccatgcagctggtgcgcaacctgccggcgctgctggaactggcggtgctgcagcacctggatctgtcgccgggcaccggttacgccatcaccaccatcaccaaatacctgctgttgctgttcggcgccattctcagcttttcctggatcggcatcgaatggtcgaaactgcagtgggtggtcaccgcgctcagcgtgggtctcggctttggcatgcaggagattttctccaacttcatctccggcctgatcatcctgttcgagaagccgatccgcatcggcgataccgtaacgatccgcaacctgaccggcacgataaccaagatcaatacccgtgcgaccaccatcgccgattgggaccgcaaagagatcatcgtgccgaacaaggcgttcatcaccgagcagttcgtcaactggtcgctctcggacgccatcacccgcgtggtgctgaccgtgccggccccgggcgaggccaatagcgaagaggtgaccaaaatcctgatgaacgccgccgagcgctgttcgctggtgctggacaatccggtgccggaagtctacctggtcgatttgcaacagggcattcagatcttcgagatgcgtatttacgccgccgagatgggccaccgcatgccgctgcgccacgagatccaccagttgatcctggcgggctaccgcgagcacggcatcacgctgccgtacccgccgttccaggtgcgcaccgagacgctgtcgcggctgaccaacaacggccgtacgccgccgtccacgccggcgccgaacaccaagcgcgacgccggggggctgtaa

SEQ ID NO: 426617 - DNA, 894 bp, Serratia marcescens
gtgctggatagcatcaagattaaattgcaatattggctaccgaagctggcgctgacccgcctggcgggctggggcgccgacaaacgggccggctggctgacccaactggtgatcaaggccttcgcccgcttctaccgcgtggacatgcaggaagcgcaaaatccggacctggcgtcttacgccaccttcaacgacttcttcgtgcgcccgctgcgcgatggcgcacgcccaatcatcgccgacgccaactggctggcgctgcccgccgatggcgccatcagccagctcggcccgatccgcgacgatcaaatcttccaggccaaaggccatcactacagcctggaagcgctgctggccggcaactacctgctggccgaaccgttccgcaacggcctgttcgccacgacctatctggcgccgcgcgattaccaccgcgtgcacatgccgtgcgccggcgtgctgcgcgaaatgatctatgtgccgggcgatctgttctcggtcaacccgctcaccgccgccaacgtgcctaacctgttcgcgcgcaacgagcgcgtgatctgcgtgttcgacaccgacatcgggccaatggtgcaaattctggtcggcgccaccatcgtcggcagcatcgaaaccgtttgggccggcaccgtcacgccgccgcgcgaaggcatcatcaaacgctggacctacccggccgccggtgaagagggcgccatcgcgctggaaaaaggcgccgagatgggccgcttcaagcttggctccacggtgatcaatctgtttaccgcaggcagcgtgcagctcgcgccgcagttgcaaaacggcaccgtcacccgcatgggtgaggcgttcgccgaaatcccggccgccgctgaaacaccacagaccccgctctaa

SEQ ID NO: 426618 - DNA, 1050 bp, Serratia marcescens
gtgagtaagaacaaactgtccaaaggtcagcaacgccgcgtgcaggcgaaccatcagcgccgtctgaagcgcgctgataacaaaccggaaccggatgattcccaactgggcgagccgcaggaaggcgtcgtcatcagccgtttcggcatgcacgccgacgttgaggcgccggatggcactcagcaccgctgcaatatccgccgtacgctgcgttcgctggtcaccggcgatcgcgtggtgtggcgccccggcctgggcgcccatgaaggggtgaagggcatcgtggaagcggtgcacgaacgcacctcggtgctgacgcgcccggacttctacgacggcgtgaagccgatcgccgccaatatcaatcagatcgtcatcgtgtcggcgatcctgcccgagctgtcgctgaacatcatcgaccgctatctggtggcctgcgaaacgctcgaagtcgagccgctgatcgtgctcaacaaaatcgacctgctggacgccgaagcgcgcaagctggtcgacggcatgatggatatctatcgcaagattggctaccgggtgctggaagtctccagccagacgcgggaaggcatggcggagttcgaacaggcgctggccgggcgcatcagcatcttcgccggccagtccggcgtcggcaaatccagcctgctgaatgcgctgctgccgccgtccgaagagcaaattctggtaaatcaggtttccgacgtatcgggcctcgggcaacataccaccaccgccgcacggctgtaccatttccagcacggcggcgacgtgatcgactccccgggggtgcgcgagtttggcctgtggcacctggagccggaacaaatcacccgcggatttgtcgaattccgtgattatttaggcggttgcaaattccgcgactgccgccacgataccgatcccggctgcgccatccgcgcggcgatggagaaaggcgatatcgcggaagagcgtttcgacaactatcaccgcattctggaaagcatggcgcaggtgaaggttcgcaagaacttcacggacgccgcagactga

SEQ ID NO: 426619 - DNA, 546 bp, Serratia marcescens
atgacaggaaacgaaaataacctgatttggatcgatttggagatgaccgggctggatcccgagcgtgaccgcatcatcgagatcgccacgctggtcaccgacgccaacctgaacatcctggcggaagggccggtgatcgccgtgcatcagtccgacgaacagctggcgctgatggacgagtggaacgtgcgcacccataccggcagcgggctggtggagcgggtgaaagccagccgccaggacgatcgcgccgccgagctggaaacgatagccttcctgcagcagtgggtgccggccggcaaatcgccgatctgcggcaacagcgtgggccaggatcgccgtttcctgttccgctatatgccggagctggaggcctacttccattaccgctacctggacgtcagcacgctgaaggagctggcgcgccgctggaagccggaaattctcgccggctttaaaaagcagggcacccatcaggcgctggacgacattcgtgaatcggtggccgaactggcgtattaccgcgaacatttcatccagctctaa

SEQ ID NO: 426620 - DNA, 1515 bp, Serratia marcescens
gtggccggagatgtcgttactccagaagtccaggccgcacagcacatcgctgcagacgcgctcggtcggtttgcccttgtccagcaccgcgccgacgcccggcagatccaccacgaactgggtcgggccgtaggccacgcccgtcggatccgggatgcggaattcttcgggaatatcctcgacggtcgccaacatgccagggccgttgatggctttgcccaggttgatcatcccccagccgtagagcgcgtcgatgcccggcgcccccatgtcggtggcggtggttttcagcacttccgccacctgcgcgccattcagatacgggaaacgctccatcagcaccgcgacgctgccggccacgtgcggcgccgccatcgaggtgccgctgtatttggcgtagccggtcgtcagattctccacgctggtgccttcaatcaccgagctgtatacccgggtgcccggcgccgaaacgcagaagctggcggtgtagccgcagcgggaagagaaggtgctgatgctgtagtcgccgctattagagggatcctgcaagctggcgaccgacagccagttcggtgcaatctccggcacgaaataggccaggccggccatggcatcggggttattcagattgccgtcgttaccggcggcgaagatggtgaccacgccgctgcgcgccgcgtcgatcgcgccctgataggcgccgccgggcttggtgccgaggatctgtttgatctgatcgaactgcttttgcgcatcgtttaccgtgaagtgtggataagccgggtcataacccccctcctcaaacttttcggtaatgccgatgccccagctgttgttgatgatgcgcgcgccgctggccaccagcgcatcccagccggcctggtacaccgcgccgtcgttgccgaggatgatgccgtcctccgggccgggatcgccgttttcggcgctgatgatctgcgcgttgaacgccacgccgtgcatggcgccgccgtcgcggctgccggcggcgatgccgcccacgtgggtaccgtgcgaaccgagcgtgccatcggagtccacgctcggcgtaccgtcatagcggaaagtgtcgcctttcttcaccgggatatagggatcggtgtattcgcggatgccttcggtgaccaaattgatcaccttattctcaccggcaaattcgggatgcttggcgtagaccggctgatcgaaaatgccaagtttgatgccttttccggtataaccagcggcgtaggcctggtcggcgtggatcgcccccagcccccattccgcgttgaactcactgctgcgccagctggccggatcgcccgctttgccgttctctatatagctggcagcctgcgccccgccgatcgccgtcaggcagatcagcatcgcgctccattgtgcgcgatgaactccgatttcaggccagccgaaggccgcccgagcggatttgactcctctaagtttcttctccatcccagataccgtccgttgttgtttgcaaatgttttataa

SEQ ID NO: 426621 - DNA, 639 bp, Serratia marcescens
gtgccgataaatgcttttcccaccccgttcgatccttcactgacgtccacccgggcaaaaacctaccgtttgttgctggccagcgcgatggcgctgtatgacgaaggcgcgtttccttcgatcaccgaactggcggcgtatgcgcaggtatcgcgtgcgaccgcctaccgctactttccgacccagagtgcgctgattagcgccgtggtggcggaaagcctggggcctattctggaatggcgcccgcaagacgatgatgccctgaagcgcatccagcagttgctgaccttcgcctatcctcagatggaacggcacgagggggcgttgcgcgcggcgttgcagctctctttgcagcagtgggcgcacgcgacgccgggcgaaaaattcgtgcgcggcaaccgcaagcgtctgttggcgctggcggtagaaccgctgcagggcaaactgccgccggactctctgcagagagtgattcatgctttctcgctgatttacggctcggaggtgttcctggtgctgaaagatatctgggggctggagcttgagagcattcaggacgtcacgcaatggatggccaaagccatccttcgtcaggcggaagaggacgcgacgaaccgcaaaaaaacatcagcaggataa

SEQ ID NO: 426622 - DNA, 1218 bp, Serratia marcescens
atgaaagatacttcaaattttgtctatattgctaccacagcagatacgaaaggacaagagttggagtatgtgcggcggctgattgccagcctggatttacccacgcgaaccgtcgatctctccacccgtagcttgccgtttgactccccggccgatatcggcccagaagaggtcgctcgccaccatccggcgggcgccggcgcggtcttctgcgccagccgcggccaggcgatcgccgccatggcgaccgctttcgaacgctttatcctgacgcgccgcgatatcgccgccctgcttggcctgggcggctccggcggcaccgccatcatcacgccggccatgcagcaactgccgatcggtctgccgaaagtgatggtctcgagcatggcggcgggtgacgtttccgcctatgtcggcgccagcgatatcagcatgctgtattcggtcaccgatctcgccggcctgaatcgcatctcgcgacgggtgctgggcaacgcggcgcgccagatagccggcgcagtccgcttcgccgccgtcgactctcacgacgacaagccggcgatcggcctgacaatgtttggcgtcaccacgccctgcgttcaggcgttgattgccgagttgggatcgctatgggattgtctgacgtttcatgcgaccggcagcggcggcagagcgttggaaaaactgatcgatagccgccaactgcacggcgccatcgatttgaccaccaccgaagtggccgatcacctgtttggcggcgtgctgccctgcaataccgatcgtttcggtgccatcgcgcgtaccggcatcccgtgcgtgctctcctgcggcgcgatcgacatgatcaacttcggcgcgccgaacacggtgccggctcgctatgccaaccgtctgcgccaccctcacaacccgcaagtgacgctggtgcgcaccagcgcgcgggagaatgcgttaatggggcgttggatgggcgaaaaaatcaacgcctgcgcgggcgaagtgcgtttcgttatcccggcgggcggcgtatcggctctggacgcgcccgggcaaccgttctgggatccggcggcgctggccgcctttacgcaagcgctggaagaaacggtgcgcgccaccgacaaacgccggttgataaaaacgccttatcatattaacgacccgcgctttgctcaggccgttgccgagcagttccggcacatggtcggcggagaatga

SEQ ID NO: 426623 - DNA, 489 bp, Serratia marcescens
atgcgtaaattgacggctttatttattgcttccacgctggccctgggttctgcttccgcggcgttcgctgcagacaccactgccccggcggcggatgcggcgccgatgaaaatgatgcatcacaagggtgaaggcaaaggcggcccgttcgccgggctgaacctgaccgagcagcagcgccagcagatgcgcgatatcatgaaagagtcgcaccagaagcgcgggccgggcatgaaagaggagcgccaggcgctgcacaatctggtcgcttccgacagctttgacgaagcgaaggcgaaggcgcaaattgacgcgatcggtaaagcgcaatccgaacgcatgctggagcgcgccaaagcggaaaataaaatgtataacctgctgacccctgagcagaaaaaacaatacaatgagaattatcagaaacgtgagcaaaagatgatggaccatatgaataaaatgaaggcgcagatgtcctccgatcagtaa

SEQ ID NO: 426624 - DNA, 1995 bp, Serratia marcescens
atgcccgcagaccaaggccctgagcttcttaacgcccacttcggcacccaaagcccccactggcggctggcgtttgacagcaatgccctggagctgtccgccgttaaaggcaaagcccacgtcgcggtggcgctcagcgccatggaagcggcgaaaatccgtcgcctgaccggcgtcaccgccagcctggagctgaccattacgctagccggtgcaccgctgcatctgcatctggtcgggcgccgcgtcaacaacctcgaatgggcgggcaccgcttccgccttcagcgacacccaatctgtggcgcgcgacctggtgcacggcctctccttcgccgagcaggtggtgtccgaagccaactcggtgatcgtgatcgtcgatcaacacggccgcattcagcgtttcaaccggctgagcgaggagtataccgggctgcacgaacacgaggtgatcggcaaaaacgttttccagctgtttatgagcccggaagaagccgccgcttcgcggcgcaacatcgccggcttcttccgcaacggttcgtcctatgaggtggaacgctgggtaaagacggtcaagggcgaacggctgttcctgttccgcaataagttcgtgcacagcggcagcggcaaaaacgaagtctttctgatctgctccggtaccgacatcaccgaagaacgccgggcgcaggagcgactgcgggtgctggccaacaccgatctcatcaccggcctgccgaaccgtaacgccatccaggacaagatcaatcacgccatcgccacgcgcggcgaagagagtttcggcctggtgtacctcgatctcgacaacttcaaaaaggtcaacgacgcctacggccatatgttcggcgatcggctgctggtcgaggtcgcgctggcgatcctcggctgcctgggcccggaccaggtgctcgcccgcctcggcggcgacgaattcctggtgctggcaccgcaagccgatcgcgaacgcctgcaaacgctggcgcagcgcatcatcgacaggctgaaaacccctttccgcatcggcctgattgaggtgtataccggctgttcgatcggcatcgcgctgtgcccggagcacggcaacgatctcgacagcctgatccgcagcgccgataccgccatgtacgtcgccaaggagcacggcaaacgtacctataccgtcttctcgccggagatgaataaacgcgtcgccgaatacatgtggctggacaccaacctgcgcaaagggctggagcaaaatcagctggtgctgtattaccagccgaaaatcgacgcgcgcagcggtgaagtgcacagcgtggaagcgctggtgcgctgggattcgccggagcgcggcctgatcccgccgctgcagttcatttcctatgccgaggagtccggcctgatcggcccgctcggccaatgggtgctgcagaccgccgccgggcaggcggcgcagtggcaagaacagggcttgaatctgcgggtggcggtcaatctctctgcccgtcagctggccgatgacagcatcgtcaacgacctgctcggggtgctgcgccgtcaccgcatggccccctgtctgctggacttcgagttgaccgaaagcagcctgattgaagacgagaaccgcgcgcgcgcgttgatcacccggctgcgcgaactgggcgcgcaggtgcatctcgacgacttcggcaccggctattcgtcgctggcgcagctggcgcgcattcctctggacgccatcaagctggataaaagcttcgtgcgcggggtgaatttcaacccggtatcgcaatcgttggtgcgcgcgatcgttgcggcggcggaggcgttggcgttccgggtgatcgccgaaggggtggagaccgagagcgaaaaccacttcctcgacgaggtcggcgtggacgaaaaacagggctttctgtttgcgcggccaatgctcccggaacagctggagcattggctgcagtcctatcgcccgcgctcaccctccgcatga

SEQ ID NO: 426625 - DNA, 867 bp, Serratia marcescens
atgaaattgcttaatcaccccacctgccgcccgtttaccgaagcgggcaatctgtcgcagctgtccgcctactatgaagaggggcggcacatcatgtggatgctgctgcgcgccgcgccgcgcccctgcttcaaccaggcgctgatcgaagacatcatgacgctggcgcaggcggcgaaggaatcttcgctgcggttcgatttctgggtcaccggctcgctggtgccgaacatgttcaacgtcggcggcgatctgcagttcttcgccgacgcgatcaaaaaccgcaagcgcgaggcgatgatggcctacgcgcgcgcctgcatcgactgcgtgcatgcggcggctcgcggtttcgacaccggcgcggtcagcattgcgatggtcgaaggcagcgcgctggggggcggctttgaagcggcgttggcgcaccatttcgtgctggcgcagaacaatgcgcgcatggggtttccggagatcgcgttcaatctgtttcccggtatgggcggttactcgctggtggcgcgcaaggcgggcatgcgcttggccgaggagctgatttggggcggcgagtcgcacaccgcagagtggttcgagagccgcgggctggtggatcagctgttccagcccggcgacgcctacatggcgacgcgcacctttatcgataccattcggccgaagctcaacggcatgcgcgccatgctgcgggcgcgtcagcgcgtgttgcagctgacgcgctccgagctgatggacattaccgaagattgggtgcactcggcctttaccattgaggaaaaagaccgcgcctacatcgagcggctggtgatgttgcaggatcgccataccctgaacctgcgtcgtgccggctaa

SEQ ID NO: 426626 - DNA, 1020 bp, Serratia marcescens
atgcctacaggaccagaccaggaacgccgccagcccgcacaagacacgccgccgaagccgcttatcgccatcaagaccggccatgagaccctcgaccgccgcatcggtggtttttcacgtctgattgaacgcatcaaagcctggccgagcgtggcgcacctgctgcgcgcggccgaacgctttaacgatcggctgggtagccagttcggcgccgccatcacctatttttcattcctctcgctgatcccgatcctgatggtgtcgtttgccgccgccggcttcgtgctggcctccaatccggatctgctggcccgcttgatcaaccggatcgtcggcagcatcagcgatccgacgctggccagcacgctgaagaacaccgtcaataccgccattcagcagcgcaccaccgtggggttgaccggcctggcgctggcgctctattccggcatcagctggatgggcaatctgcgcgaggcgatccgcgcgcagtcgcgcgatgtctgggagcgcaatccgcaggatcaggagaaaatctacttcaaatacacccgcgacttcatctcgctgaccggcctggtggtcgcgctgattatcacgctgtcgctgacctcggtcgccgggtcggcgcaggcggcgatcgtcaacgcgctggggctggacggcatcgaatggctgcggccggcgctgacgacgatcgcgctgtcgatctcgatcttcgccaactatctgctgttcctgtggattttctggatgctgccgcgccacaaaccgaagaaaaaagcgctgctgcgcggcaccttgctcgccgccatcggctttgaagtgatcaagttcgtgatgaccatgacgctgccgcaggtggcgaagtcgccttccggcgcggccttcggatcggtgatcgggctgatggcgttcttctacttcttcgctcgtttgacgctgttttgcgccgcctggatcgccaccgccgactacaaaggcgacaaagcgttgccggaacgcgagccgccagcgcgctga

SEQ ID NO: 426627 - DNA, 1323 bp, Serratia marcescens
atgcaagccaccatcgcacccccactcgacgccgacgaggcgtccacaccggtgaactcccgcgggaaagtcatcgtcgcctcgctggtcggcaccgccatcgagttcttcgacttctacatctacgccaccgccgcggtgatcgtgttcccgcacatcttcttcccgcagggcgacccgaccaccgcgacgctgcagtcgctggccaccttcgccgtcgcctttgtcgcgcgccctatcggctctgcgctgttcggccacttcggcgatcgggtagggcgcaaggtcacgctggtcgcctcgctgctgaccatggggatttccaccgtgctgatcggcctgctgccaagctatgaaaccatcggcatcttcgcccctatcctgctggcgctggcgcgctttgggcagggtctggggctgggcggcgaatggggcggcgccgccctgctggcgacggagaacgcgccggccaaaaagcgcgcgctgtacggctccttcccgcagttgggcgcgccgatcggcttcttcttcgccaacggcaccttcctgctgctctcctggctgctgagcgaccagcagtttatggattggggctggcgcgtgccgttcatcctctccgcggcgctggtgctgatcggcctgtacgttcgggtatcgctgcatgaaacgccggtgttcgccaaagtggccaaggccggcaaacaggtgaaagtgccgctcggcacgctgctgagcaagcatctgaaagccactatcctcggcaccttcatcatgctggcgacctacacgctgttttatctgatgacggtgtattcgatgacctacggcaccgcgccgcagccgctgggcctcggctactcccgcaacagcttcctgtggatgctgatggtggcggtgatcggcttcggcgtgatggtgccgatcgccggcctgctggcggatgcgttcggccgccgcaagaccatgatcgccattaccctgctgatgatcggcttcgcgttcctgttcccgcccctgctgggttccggcaatcaggcgctggtgatgggcttcctgctgtgcggcctgagcatcatggggctgacctttggcccgatgggcgcgctgctgccggagctgttcccgaccgaagtgcgctataccggcgcgtcgttctcctacaacgtcgcgtcgatcctcggcgcgtccgtggcgccttatatcgccacctggctggcggcccactacgggctgttctacgtcggcatgtacctggcggcgatggccgggttgacgctgctggccctgctgttgatgaaagaaacccgccaccggtcgctgtga

SEQ ID NO: 426628 - DNA, 768 bp, Serratia marcescens
atgtctctgcgtcgtgggttatttgtctgcgttgcgctgctggcggctctcgccatcgcgctctattacgggttgaagcctgatcatcccgatgcgctgtggcgcatcgtcagccagcaatgtctgcccaatcagcaagcgcatgacaacccggcgccctgcgcgcaggtagatgtgccggccggcttcgtggtgtttaaagatcgcaacgggccgctgcaatacctgctgatgcccagcgccaaaatcaccgggatagaaagcccggcggtgctggacgccactacgcagaatttcttcgcccaggcctggcgcgcgcgccacgtgatggcggaacgctatggcaaaccgatcgacgatggcgatatttcactggcgatcaactcggaatatggccgcacgcaaaaccagctgcacattcatatctcctgcctgctgccggcggtaaaacagcggctggcgcagatcggccccgattttatcgatcaatggcaaccgctgcccggcggcctgttggggcatgactatctggggcggcgggtgacccccgccgaactggaacaacagggcgccttccgcctgttggcttccggcctgccgcgcgccgaagggcgcatgggcagcttcggcctggcgatgaccgcgctgccggacggcgatttcctgctgctggcgaccgagcgcagcctgctgccgtttaccctggcctcggcggaagagatccaggatcacgactgccggctgctcacgccgccgccgcgcgcctga

SEQ ID NO: 426629 - DNA, 2040 bp, Serratia marcescens
atgacaagaacaggaaaggttttcagctggctgggcggcattgtgctgctggcgatcgccgcgctggcgatcttcatcgctaccttcgactggaatcgactcaagcccaccatcaacgacaaagtgtcggccgaactgcggcggccgttcgccatccgcggcgatctgggcgtcgactggtcgcgtaaccgggatgagggcggctggcgcgcctgggtgccctggccgcatattcacgccgaagacgtgtggctgggtaacccgaaaaacatgcccggcgacagcatggtgacgctgcagcgcgtcgacgccagcatcgcaccgctggcgttgctgaagaaagaactgctgatcccgcgcatttggctcaagcagccgaatgcgtcgttgcaacgcctggccaacggcgacaacaactggacgtttgacctggccgctggccaggatccgcagcaaccgccttccgactggtcgttcaccgttcacgacatcgtgttcgacaaggggcagatcgcctttaaagacgccacgctgaaggcggacttccgcgccgtcatcgatccgctcggcaaaccgctgccgttcagtgaagtgaccggcaaacagagcagcggcgaggccgccactcctgactacgtcttcggttggcaggtcaagggcaaatacaacggcgagccgctgagcggcagcggcaagattggcggcatgctgtcgctgcagagcgccgatctgccgttcccgctgcaggccgacgtgcgctccggcagtacccgggtggcggtggcgggcaccttgaccgatccgctgaacctcggcgggctggacgtgcagctgaaattttccggcgaaagcctgggtaatctctatggcctgaccggcgtgctgctgccgaacacgccgccgtatgcgaccgatggccatctgattgcccgcctgcatcagccgggcggcgccgtgttcgaatatcagaaattcgacggcaaaatcggcgacagcgacattcacggcgatttgaaatacgttgccggtaagccgcggccgacgctgagcggcgcggtgagctcccggcagctgaggttggcggatctggcgccgctgatcggcgcggactccaacgccgccaaagccgggcgcggcgagaagagccgccagccggcggataaggtgctgccggtcgaacagttcgatacgcaaagctggcgcaagatggatgcggacgtgaagtttgccgccgcacgcattgaacgcggcagcgatttgccgctgagcgatttggccacgcatctgaagctgaacaatggcgaactgcgcctggatccgctgcgcttcggcatggcgggcggcagcctgaacgccgtggtgcgcctcgacggcggcaaaaagccgatgcgcggccaggtggatatgcacgcgcgcaaactccagctcaaacagctgttgccgaacgtggcggcgatgaagcgcagcctcgggcagatgaacggcgacgccaggctgacgggcagcggcaattcggtagccgagctgctggcgaccagcaacggcgacctgcgcctgttgatcaataacggggtgatcagccgcagcctgatggagatccttggcctgaacgtcggcaactatctggtggcgcagctgttcggtgacgatgtggtgggcatcaactgcgcggcggcggacgtcggcatccgcaacggcgtcgccgcgccgtggctgttcgtgttcgacaccgagaacgcggtgatcaacatcaccggcaacaccaacctcgccaccgaacggctggatttgtccatcgatccggaaagcaaggggatgcgcgtgctgaccctgcgctcgccgctgtacgtgaaaggcaccttcaagcaccccgacgccggcgtcaaagccgggccgctgatcgcccgcggcgcggcggcggtggcgttgggcgcggtgctgacgccggcggcggcgctgctggcgctggtttcacccagtgaaggcggcgaggagaaccagtgcgggcagatcctgcgggagatgaaaggcaaaaaatag

SEQ ID NO: 426630 - DNA, 936 bp, Serratia marcescens
atgatcgcgatcggcccatgccaaaacagggtgaagaagaaaccgtgcggcaattcgtgcttaaagttttgcgcggcgcggccgataagctgggtaaagaaacagcggcagcgctctcacttccccgccacggcgatagtaccgatgataaccaacctgatctcgggtctgctggcgccctgttttgccctctatgcctgcgccaaatcgcggcgctactggcggcaatgccggcgcttgtataccttccagccgatttatcgcaccagcggcgcgctgctggcggtggaactgctgacggcggtatatcacccgaatgaaccggacaaacggcaatccccggaacagtatttttcctcgctcggcgtcgcccagcgtttgcgggtgatccaggaacagctggcgctgttgcagcgctggcaggcattgttcattcgccacgcgttgatggtgtcggtcaatatcgacggcatggcgctgcaagcgttgcagcgccatagcgagctgcagcggcagatcgccgagatgccctatctgcgcttcgaactggtggagcacgccgaaacggcgtcaaaccgcccgttgcaccagatggtcggcggcgaacggctgtggctggacgatttcggcagcgggctggccaacttctccgccgtcggcgcctggcgctatcaatacatcaaggtagcgcgcgaattgttcaccttgcttaaacagtctgaagagggcgtgcagctgctcggcaccctgatcaagatgatgaaccagtacagcgacggggtgatcgtcgaaggcgtggaaaccgagcaggagtggcggctggtgcagcgttccggcgcgttggccgcgcagggttactatctttcccgcccggcatgctttgaaactttacacagcgtaccgacgctgttcgccgcgcccggcgcgccggcgtga

SEQ ID NO: 426631 - DNA, 933 bp, Serratia marcescens
atgactatccgaaatctcgccgtgatcggcgaatgcatgatcgaactgtcgcagcagggcgcacagctgacgcgcggctttggcggcgataccctcaacaccgccgtctacctcgcccgccaaatgccggaacagacgctgcaggtgcattacgtcaccgcgctcggcaccgacagcttcagcgacgagatgctgcaggcctggcggcaggagaagatcgagaccgggctgattcagcggttggaaaacaaactgccgggcctgtacgtgatcgaaaccgacgccgccggcgaacgcaccttctactactggcgcaacgacgccgccgcccggtattggctggcgggtccccaggccgacgcactgtgcgcccggctggcgcagttcgattacctgtatctcagcggcattagcctggcgatcctcgcgcctgccgaccgcacgaagctgctggcgctgttgcgccgctgccgcgccaacggcggccaggttatcttcgacaataactatcgcccgcgcctgtggcacagccgtgaggaaacgcagcaggcctaccgtgaggtgctggcctgcaccgacatcgccttcctgacgctggatgacgaagagctgctgtggggcacgcagccggttgaacaggtggtggcgcgcacgcaggcgctcggcgtcggcgagatcgttatcaaacgcggcgcggatgcctgtctggtgttcagcgtggagggagagcggcttgaggtgccggcgatcgcgctgccgccggagcgcgtggtggataccaccgcggcgggcgactctttcagcgccggttacctggcggtacgcctgaacggcggcagctcccaacaggcggcgcagcgcggccacctgctcgccgcaacggtgatccaacaccgcggcgccatcattcccgcagcggcgatgcccgcatag

SEQ ID NO: 426632 - DNA, 696 bp, Serratia marcescens
atgaccgtcacattcgccaacgccgtcgccgcaagactgcatcttgacggccgactgcacgccttcagccaattcaaatacgcttatttgaccttcaacaaacaccttcccgatcgccatctgctggtctcgagctacccgcaagaatggctggacatctacagcgccaatcgctatcagcgcatcgatcccgtcgtgcgcgccgcccatagtcgctgcgcgccctttatgtggcacgacacccccgtcaccaccgaggatcggcattaccggaagatcttcagccaggcgcgggagtacgacatcgtgcacggctgcagctttgttttgcacgatcacgacaacaacctggcgatcttgtcgatcagcgccacggcagccgatgacgccgaactgcggcagctgatggaagacgagagggccagcctgcagatggtattggtcgatacccaccagcacgctctggccttggccagcgccgaggcgagccggacagaccggctctcgccgcgcgaaggggaaatcctctactgggccagccagggcaaaacctaccatgagatcgcgctgatcctggggataaaaaccggcacggtgaagtttcacatcggcaatgcggtgcgtaagctgggggtcgccaacgccaaacacgcgatccggcgctgcctcgaacggcaattgatcacgccaccgtag

SEQ ID NO: 426633 - DNA, 1476 bp, Serratia marcescens
atggctaactatttcaacacattgaacctgcgtcagcagttggcgcaattgggtaaatgccgctttatggcgcgcgacgaatttgctgacgaagccggctacctgaaaggtaaaaaagtggtgattgtcggctgtggcgcccagggcctgaaccaggggctgaacatgcgcgactccggtctggacgtcgcctatgccctgcgcaaagaagcgatcgacgagaagcgcgcttcctggcgcaaggcgaccgaaaacggctttaaggtcggcacctacgaagacctgatcccgcaggcggatctggtggtcaacctgaccccggacaagcagcactcttccgtggtgcgtgcggtgcagccgctgatgaaagacggcgcggcgctgggttattcccacggcttcaacatcgttgaagtgggtgagcaggtgcgtaaagacatcacagtggtgatggtcgcgccgaagtgcccgggcaccgaagtgcgtgaagagtacaagcgtggcttcggcgtgccgaccctgattgcggttcacccggaaaacgatccgaaaggcgaaggcatggcgatcgccaaggcctgggcagcggcgaccggtggccaccgagccggcgtgctggagtcctccttcgtcgccgaagttaaatccgacctgatgggcgagcagactattctgtgcggcatgctgcaggcaggttcgctgctgtgcttcgacaagctggttgcagagggcgccgatccggcttacgccgagaaactgattcagttcggctgggaaaccatcaccgaagcgctgaagcagggcggcatcaccctgatgatggatcgcctgtccaacccggccaagctgcgtgcctatgcgctgtccgaacagctgaaaaccatcatggcgccgctgttccagaagcacatggacgacatcatctccggtgctttctccagcggcatgatggccgactgggcggaagacgacgtgaaattgctgacctggcgcgaagagaccggcaaaaccgcgttcgagaatgcgccgcagtttgaaggcaaaatcagcgagcaagagtacttcgatcacggcgtgctgatggtggcaatggtgaaagcgggcgttgagctggcgttcgaaactatggtcgatgccggcatcatcgaagagtcggcttactatgagtcgctgcacgagctgccgctgatcgccaacaccattgcgcgcaaacgtctgtatgaaatgaacgtggttatctccgataccgcagagtacggcaactacctgttcgccaacgcggcggtgccgctgctgaaggacttcatgaccaccctgcaggcgggcgatttgggcaaagccgtggcgggtacggcggtggacaacgcgcagctgcgtgacgtgaacgaagcggtgcgcagccacccgatcgaaaccgtcggccgcaaactgcgtggctacatgaccgacatgaaacgcatcgccgttgcgggctga

SEQ ID NO: 426634 - DNA, 891 bp, Serratia marcescens
atggatttacgtgatttaaagctgttcctgcatctggccgaaagccatcacttcgggcgcaccgccaaggcgatgcatgtcagcccgtcgacgctctcccgccagatccagcggctggaagagatcctcgggcagccgctatttctgcgcgacaaccgcaccgtgcagctgaccgacgccggcgaacagctgaaagaattcgcccagcaaacgctgctgcaatatcagcagctgaagcactcgctcggccagcacggcccttcgctgagcggcgaactgcggctgttctgctcggtgactgcggcgtacagccacctgccgccgatcctcgatcgcttccgcgcgcagcacccgctggtcgagattaagctgaccaccggcgatgccgccgacgcggtcgacaaagtgcaatccaacgaggccgatctcggcatcgccggccgaccggaaacgctgcccgccagcgtggcgttcaccaaaatcggcgaaatcccgctggtgctgatcgcgccggcgctgccctgcgcggtgcgcagccaggcgttcgccgacaggcccgactgggccgagatcccgttcatcctgccggagcacggcccttcgcgaaaacgcatcgagctgtggttccgccgccaccgcatcagcaatccgctgatttacgccaccgtcggcggccacgaagccatcgtgtcgatggtcgcgttgggctgcggcatcgcgctgatcccgagcgtggtggtggacaacagcccggagccggtccgcaaccgcatctctcagctggataacatctcgatggtcgaaccgttcgagctgggggtctgcgtccagaaaaagcgcctcagcgatccgctgatcgacgccttttggcgcttgctgcatccccgctga

SEQ ID NO: 426635 - DNA, 702 bp, Serratia marcescens
atgacgcaacccttctccggctttagccagcagggtctgaatttcctgcagcaggtgcgaatcgagaacgataaggcgtggttcgacggcaaccgcgacatctacgagcgcgagctgctggcgccgtttcgcgcgctggtggagcagctggctcccggcatgctggcgatcgatccgctgttcgagactcgcccggcgatcggtaaaacgctgtcgcgtattcatcgcgatacgcgcttttcacatgacaaatcgcgctaccgcagccgcatgtggctaacgttcaagcgcccgagcaaagactggaaagacgcgccggtctactttttcgaactggggccggacatgctgcgctatgggctcggctactacagcgccaacaagccgaccatggatctgttccgccatacgctgaggcagcggccgcagcctttccttgaggtggccgcctgctgccggccgccattcgagctggtgggcgaaagctacaagcgcccgctggtgaaggaacaggcggcggagatcgccacctggtacaaccgcaaatcgttcgcggtgatggtgaccgacagcgaagtggaaaagctgttcagcgccgatctggcgccgctgctggccgaggcatttttgcagcttgagccgctctaccactggctgatgcaggtagagacgatgaagcagatcgatccggcggatctgtaa

SEQ ID NO: 426636 - DNA, 579 bp, Serratia marcescens
atggcggactggatgattaaacgcctgatcgcgcagggccgggagatggaacgccaaatcgcggcgcgcgatggcgcgcttttcgccggtgtggatgcgcagctcgagcagcatttcctgacgccgagccagcggctgtcgccgccgggcgtcggcaatgtcatgttgctgatggtttgcctgacgctggggctggcgggcgtgatgggcctggccacggacgtggcggccgcctggagcggcaagacttccgctgccgttctcatgggcagcggcgcgatcgtggcggtgtggatgacgttgatcctgttccaactggtgcagggtaaaaacagcggggtggtattgttgcaatattaccttggcatgctcggcctgttttgccttggcgcggcggcggcgtgggcggcggggaagaccggcatcgccactgtcgccatgctgctggggggcgtggttggcggggcgctattcagcaaccggtcggcgttctctctctatgtcgcttattttcgcacgcgtcggcgcgtgttgatcaaacgccgttggcagagagaagatctgcgcaacacccgataa

SEQ ID NO: 426637 - DNA, 996 bp, Serratia marcescens
atgaaaaccgctttttctacgccgttcggttcccccgaagacgatttgaccaacgccgagtttgcccgcctgttgggcaataccggcgtacaagaattctatcgcgatattaatctgcaagccttgcaggactcgctggactgcagcctcgcctttcatggcgtgggcattattttttccgacgggcagaactcatttttagtccgcccgacgcagcacaccggttactcaaacgcttcgcaggttacccacgtggtcatcagcaaaacggtggctcatacttcacgcgttgccgcgaccaatacgctgtcggaagcgttgagcaaacccagcgtcagcaaagagttggcctcggccgcgctgtcgtgcggaacgctgctggtatcggtatttttactggcgtcgggcagcgtcgccgtgccgtttaccggcggcaccagctcggcggtggcttatctgggctatgccggcatggccgccagcgcgttgcagtgcggcaatgggctgtaccgcgtcaacaagctttatgacgggaaaggcgatgaactggctcagctcgactcagaacagtggtatatcgctaccagtaccgtgctcgatgtgatctcgctggccagtgccggggctgccctgaaggaagcgacgatgacctaccgcgccatgcgccgcatttcggcgcgcaaggcgacggaatggctgaaaagcatgccccgtagcgaaaggaagcggctgaccgaaaacatcattcgggcggaaaatccgggaatttccaataacgtcttgaaagagatggtgaagaacggcttatacccgaagcgctacccgacggaagcgatccaaaacgggctgcgccagcaattgcattcggcgctcaataactcattgacgttcgtgggtagcggcatcagcggcaccctgtctgcgccggtgaatgtgaaaaccaccgggcagtattttgtgggcattatgcagaaattgccgcagatggtgaggtaa

SEQ ID NO: 426638 - DNA, 1545 bp, Serratia marcescens
atggcggtctctcaacccctacccagcgccccctgcggcgcggaatatctgcgagcggtactgcgctcgccggtctacgaggtggcgcaggtcaccccgttgcaggccatgagcaaaatctcttcgcgcctcggcaacaccattttggtgaagcgcgaagatcgccagccggtgcacagcttcaagctgcgcggggcctatgcgatgatcgccgggctggacgaagagcagaaggcgcgcggcgtcgtaacggcttcggccggcaaccacgcgcagggcgtcgccttctccggtaaacggctgggggtcaaaacgctgatcgtgatgccggtgtccaccgcggacatcaaggtggatgcggtgcgcggtttcggcggcgaagtgctgctgcacggcgccaatttcgacgaggccaaggcgaaggcgatcgagctttcccaacagcaaggaatgaccttcgtgccgccgttcgatcatccgacggtgatcgccgggcagggcacgctggcgatggagctgctgcagcaagacgcgcatctggatcgggtcttcgtgccggtcggcggcggcggcctggctgccggggtggcggtgctgatcaagcagctgatgccgcagatcaaagtgatcggcgtcgaagcggaagactccgcctgcctgcgcgcggcgctggatgccggccatccggtggatctggcgcgcgtcgggctgttcgctgaaggcgtggcggtgaagcgcatcggcgacgaaaccttccgtctgtgccgtgagtatctggacgacgtgatcaccgtggacagcgacgccatctgcgcggcggttaaagatctgttcgaggacgtgcgcgccattgccgaaccttccggcgcgctggcgctggcggggctgaaaaagtacgtgcagcagcacaatattcagggcgagcgtctggcgcacgtgctgtccggcgccaacctcaacttccacgggctgcgctacgtttccgaacgttgcgaactgggcgaacaacgcgaagcgctgttggcggtaaccattccggaacagcagggcagcttcctcaagttttgccaactgctgggcggccgctcggtgaccgaattcaactaccgctacgccgatgccgacaacgcctgcattttcgtcggcgtgcgtctgacgcgcggccacgccgaacggcgggagatcatcgacgaactcaacgccgacggttatcaggtggtggatctgtcggacgacgagatggccaagctgcacgtgcgctacatggtgggcgggcgtccgtcgaagccgctgcgcgaacggctgtacagctttgagttcccggagtcgccgggcgcgctgctgaagttcttgcagacgctgggcacgcactggaacatttcgctgttccactatcgcagccacggcaccgacttcggccgggtgctggcggccttcgagctggcgcaaagcgagccggaattcgagcgtcacctgcaggcgctgggctacgattgccacgacgaaaccgacaacccggcgttccgcttctttttgcaggggtga

SEQ ID NO: 426639 - DNA, 1851 bp, Serratia marcescens
atgcctaagtaccgttccgccaccaccacccacggccgcaatatggcgggtgcccgcgcattgtggcgcgcgaccgggatgaccgacgccgatttcggcaagccgatcatcgccgtggtcaactcctttacccagttcgtgccgggccacgtccatctgcgcgatctgggcaaactggtcgccgagcagatcgaagcttctggcggcgtggccaaagagttcaacaccatcgcggtggatgacggcatcgccatgggccacggcggcatgctctattccctgccgtcgcgcgagctgatcgccgactcggtcgaatacatggtgaacgcccactgcgccgacgcgatggtgtgcatctccaactgcgacaagatcaccccgggcatgctgatggcggcgttgcgcctgaatatcccggtgatcttcgtctccggcggcccgatggaagccggcaagaccaaactctccaaccagatcatcaagctggatctggtggatgcgatgatccagggcgctaacccgaacgtcagcgacgccgacagcgagcagatcgagcgttccgcctgcccgacctgcggctcctgctccggcatgttcaccgctaactcgatgaactgcctgaccgaagcgctgggcctgtcgcagccgggcaacggctcgctgctggccacccacgccgatcgcaaagcgctgttcctcaacgccggcaagcgcatcgtcgagctgaccaaacgctattacgagcaggacgacgagagcgcgctgccgcgcaatatcgccaacaaggcggcgtttgagaacgccatgacgctggacatcgccatgggtggctcgaccaacaccgtactgcacctgctggcttcggcgcaggaaggcgaggtggacttcaccatggaagacatcgatcgcctgtcgcgcaaagtgccgcacctgtgcaaggtggcgccgagcacgcagaaataccatatggaagacgtgcaccgcgccggcggcgtaatcggcatcctcggcgagctggatcgcgccggtttgctgaaccgcgaggtgaacaatgtgctggggctgaccctgccgcagacgctggaagcctacgacgtgatgctgacccgcgacgaaagcgtcaagaaaatgtactccgccgggccggccggtatccgcaccacgcaggcattctctcaggactgccgctgggattcgctggacaccgaccgcaaggagggctgcatccgcacccgtgagcacgcctacagtcaggacggcgggctggcggtgctgtatggcaacctggcggaaaacggctgtatcgtcaaaaccgccggcgtagacaaggaaatcctcaccttccgcggccctgccaaagtgtatgaaagccaggatgatgcggtagaagctatcctcggcggcaaagtggtggcgggcgacgtggtcgttatccgttacgaagggccgaaaggcgggccgggcatgcaggaaatgctttacccaaccacgtatctgaaatcgatggggctgggcaaggcgtgtgcgctgatcaccgacgggcgtttctccggcggcacctccgggctgtccatcggccacgcctcgccggaggcggccaacggcggcctgatcgccctggtgcaggacggcgacatgatcgcgatcgacattccgcatcgcggcatccagctggatgtcagcgagcaggagctggcggcgcggcatgaggcggaactggcgcgcggcgatgcggcctggacgccgaaaaaccgtgaacgtcaggtgtccttcgcgctgcgcgcttacgcctcgttggccaccagcgccgacaaaggcgcagtgcgcgacaagagcaaactggggggataa

SEQ ID NO: 426640 - DNA, 927 bp, Serratia marcescens
atgacaaagaaagccgattacatttggttcaatggtgagatggttccctgggccgaggccaaagtgcacgtgatgtcgcacgcgctgcattacggcacgtcggtatttgagggggtgcgctgctacgactcgcacttggggccggtagtgttccgtcatcgcgagcatatgcagcgcctgcacgattcggcgaaaatctaccgcatgccggtttcgcaaagcgttgacgaactgatggaagcctgccgcgccacgttgcgcaagaacaacctggtcagcgcgtacatccgcccgctggtgttcgtcggcgatgtcggcatgggcgtcaacccgccggccggttacaaaacggacgtgattatcgcggcgtttccttggggcgcttatctgggtgaagaagcgctggatcaaggcatcgacgcgatggtctcctcctggcaccgcgtcgcaccaaacaccatccccaccgcggccaaggccggcggcaactatctttcttctctgctggtgggcagcgaagcgcgtcgccacggctatcaggaaggcattgcgctcgacgtgcacggctacatttccgaaggggcgggcgagaacctgtttgaagtgaaagacggtgtgatttacaccccgccgttcacctcttcggcgctgccgggcatcacccgcgacgcgatcatcaagctggcgaaagacatgggcttcgaagtgcgtgagcaggtgctgtcgcgcgaatcgctgtacctggccgacgaagtgttcatgtccggcaccgcggcggaaatcacgccggtacgcagcgtggacggcattcaggtcggcatcggcaaatgcggtccggtgaccaaacagatccaacaggcgttcttcggcctgttcagcggcaagacagaagacaaatacggctggctggatccggtaaatccgtaa

SEQ ID NO: 426641 - DNA, 258 bp, Serratia marcescens
atgatgcagcatcaactctcgatccaggcgcgttttcgccccgaaatgttagagcgcgtattgcgggtcgtgcgtcatcgcggctttcaggtttgtgctatgaatatggtttccccggccaacgccgacagcatcaatatcgaattgaccgttgccagcccgcgtccggttgccctgttgtcatctcaattaagcaaactgatggacgtctcctgcgtcgagatccagcagccaacatcacaacaaatacgcgcctga

SEQ ID NO: 426642 - DNA, 1647 bp, Serratia marcescens
atgaatggcgctcagtgggtagttcaagcgttgcgtgcgcagggtgtggataccgtattcggctatccgggcggggcaatcatgccggtgtacgatgcgttgtacgacggcggtgtggaacacctgctgtgccgccatgaacagggcgccgcgatggccgccatcggctacgcccgcgccaccggcaaagtcggcgtttgcatcgccacttccggccctggcgccaccaacctgatcaccggcctggctgatgcgctgctcgattccgttcccgttgtcgccatcaccggtcaggtgggttccgcgctgatcggcaccgatgcctttcaggagatcgatgttcttggcctgtccttggcctgcaccaaacacagcttcctggtggaatcgctggacgcgctgccgggcattatggcggaagccttcgccatcgccgccggcggccgtcctggcccggtgctgatcgatatcccgaaagacatccagctggcgcagggcgacttgcacccgcatctgataccggtcgatgaagcgccggcattcccggcggcggcgttggcggaggcggccgagctgctggcgcaggcgcacaaaccgatgctgtacgtcggcggcggcgtgggcatggcgcaggcggtgccggcgctgcgcgagttcatcgccgtgacccgcatgccgaacgtcgccaccctgaaggggctgggcgcgccggatgcgcaagatccgctgtacctcggcatgttgggcatgcacggcaccaaggctgccaacctggcggtgcaggagtgcgatctgctgattgccgtcggcgcgcgtttcgatgaccgcgtgaccggcaaactgaacgccttcgcaccgcacgccaaagtgatccacatggatatcgacccggcggaaatgagcaagctgcgccaggcgcatgtggccctgcaaggcgatctgaaagcgttgctgccggcgttgcagcgcccgctgaacatcgccccctggcagcagcaggtgacggcgctgaaagccgaccacgcctgccgctacgatcaccccggccagccgatctacgcgccgctgttcttgcgccagctgtccgcccgcaagccggccaacagcgtagtgaccaccgacgtgggccagcaccagatgtggagcgcgcagcacatgacgttcgaacgcccggagaatttcatcacctccagcggcctcggcaccatggggttcggcgtgccggcggcggtaggggcccagatcgcgcgcccgcaagatacggtgatctgcgtctcgggcgatggctccttcatgatgaacgtgcaggaactgggtaccatcaagcgcaaacagctgccgctgaagatcgtactgctggacaaccagcgcctcggaatggtgcgtcaatggcagcagctgttcttcgacggccgctacagcgaaaccaacctgtccgataaccccgacttcctgatgctggccgccgccttcggcattcccggccagcgcatcagccgcaaggatcaggtggagggcgcgctcgaggcgctgttcaacaccgaaggcccttatctgctgcaggtctctatcgacgaactcgaaaacgtctggccgctggtgccgccgggcgccggcaacgaaaccatgttggaggaaatatcatga

SEQ ID NO: 426643 - DNA, 1233 bp, Serratia marcescens
atgtttggttggaccccgctgcaacgcaacgcggcaatcgcaagcttttcaagctggacgctcgacgctttcgattttttcgtgctggtattcttactcagtgacatcgcgcaatcctttcacgtcggtctggaacaggtgacgttggcgattttgctcacgctggcggtgcgcccgattggcgcgctgatcttcgggcgtgcggcggaaaaatatggccgcaagccgatcctgatgctgaatatcgtcttcttctcggtgtttgagctgctctccgccgccgcgccctcgctgacggtcttcttgctgttgcgggtgttgtacggcgttgcgatgggcggcatctggggcgtggcgtcgtcgttggcgatggaaaccataccggaccgctcgcgcggcctgatgtcgggtattttccaggccggctatccgttcggttatctgctggcggcggtggtgtacggcctgctgttcgaaacggtcggctggcgcggcatgtttgttatcggcgcggcgccgatcctgctgctgccgtttatttattattgcgtgcaggagtcgccggtgtggctggcggcgcgtgaacgcaaggaaagctctgccttgctgccggtgttgaagagccactggaagctgtgctgctatctggtgctgctgatggcggcgttcaatttcttctcccacggcacgcaggatctgtatccggtgtttctgaaagttcagcatggtttcgatccaaaaaccgttagtatcatcgccattagctacaatatcgcgtcaattatcggcggcgttttcttcggttcgttgtcggaaaagatcggccgcaaaaaagcgatcatcatcgccgcgttgctggcgctgccggtgatcccgctgtgggcattttccagcggttcgctgatgttggggatcggcgctttcctgatgcagttcatggtgcagggcgcctggggcgtggtgccgacctacctgactgagctggtgccggccaacacccgcgcggtgctgccggggttcgtgtaccagttgggtaacctgatcgcttcggtcaacgccacgctgcaagccaccatcgccgagcatcatgggcataattacggcctggcgatggcgatcgtcgccggtacggtggcggtggcgatcgccctgttggtgttcttcggtaaggatacgcgcggcaaggcgatcacagacgcggtgaaaaatccgggcgtgcgcgccaacgtgtga

SEQ ID NO: 426644 - DNA, 1524 bp, Serratia marcescens
atgtcactggcggtaatctatagccgcgccatcatcggcgttcaggccccttccgtgacggtggaggtgcatatcagcaatggcctgcccggcctgacgctggtcggcctgccggaaaccacggtaaaagaggcgcgcgatcgggtgcgcagcgccctgatcaataacggtttcacctttcccgcccggcgcatcaccgtcaatttggcgcccgccgatctgccgaaagaaggcgggcgttacgatctgccgatagcgctggcgatcctcgccgcctccgagcaattgcccctcgcaccgttggcgcgctacgagtttcttggcgagctcgcgctgtccggctcactgcgcgcggtcaggggcgcgatcccggcggcgctggcggcggctgatgccgggcggcaactgattctctcaacggacaacgccgccgaagtcggcctgatcgcgcagtcgcactcccataccgcccggcacctgttggaagtctgcgcctttctgctcggccagggcgaactgccggtggcggccacgcctcccgctgcggacaccgcctgcgacagcgccgatctgcgcgatatcatcggccaggagcaggccaagcgggcactggagatcgccgccgccggcgggcataacctattgctgattgggccgccgggcaccggtaaaaccatgctggccagccgcctcacgggcctactgccaccgctcacggagcctgaggcgctggaaagtctagcggtcgtcagcttgcagcatcacattcccactgccctaccatggcgccagaggccgtttcgcgcaccgcaccacagcgcctcgatggcggcattggtcggcggcggctcactgccgcgaccgggcgagatctcgatggcgcataacggcgtgctgtttctggatgaactgccggaattcgagcgtaaggtactggatgcgctgcgtgagccgttggaatccggcgagatcgtgatttcacgcgccaacgccaaggtctgtttccccgccagagtgcagctgatcgcggcaatgaaccccagcccgacggggcactatcaggggttgcacaatcgcgcctcaccgcagcaggtgttgcgctatctggcccggctgtcagggccttttctcgaccgtttcgatctgtctatcgaagtgccgctgttgccgccgggaacactcagtcatcggaaaacacacggagaaagcagcgaacaagtgcggaaaagagtgctgctggcacgcgcccggcaacttgaacgcgccggtaaagtcaacgcgctgctgagcaaccgcgaagtggaacgggattgcgttctgcagtcggcagacgccgagtttttggaggcgacattaaacgcgctggggttatcggttcgcgcctggcagcgcatcttgaaagtggcgcgcacgctggcggatttggcgggagatgctgagctcgacaggcgccacctcagcgaagcactgggctatcgcagcatggaccgcctgctgttacaactgcatcgtagtctggaatga

SEQ ID NO: 426645 - DNA, 339 bp, Serratia marcescens
atggcggatagcttcaccacgaccaatcgtttttttgataataaacattaccctcgcgggttctcccgtcacggcgatttcaccattaaagaggcgcaattgctagagcgcttcggctacgcgtttaacgagctggactcgggcaaacgccagccggccactgaagaagaacaactgttcgtcgcagtgtgccgcggtgagcgcgaagcggctaccgaacaggaaaaagtatgggctaaatatctggcgcgcacacgtcgcccgaagaaattccatactctgtccggcggtaaaccgcaggctgacgcagtagaagattacagcgacagcgaagactaa

SEQ ID NO: 426646 - DNA, 828 bp, Serratia marcescens
gtggataccgaattactgaaaacctttttggaggtcagtagaacgcgtcactttggcagagccgcagaatctttgtacttaacgcagtccgcggtcagtttccgcatccgtcagttagaaaaccagctgggcgccaatttatttacccgtcatcgcaataatatccgcctgacgcctgctggcgagcggcttctgccctatgccgagagcctgatgaacacctggcagctggcgaaaaaggaggtcgtgcgttcgctgcaacacaccgagttgtcgatcggcgctaccgcttcgctgtgggaagcctatctgaccccttggctacaggcgctctatcaacaacgcgaagcgctgcagctagaagccagggtggcattaaggcactctttggtaaaacaactgcatgaaaggcagctcgatttactgatcaccactgaaccgcctaagatggatgaattggccagccagcaactgagcaatttctcattacgcctgttctcatccgcgcatcgtgacaaacaggcccccatgccctacatcaagctggaatggggagccgacttccaccaacaggaaagccgcatactggaaggtgataacgtgccggtgcttactaccacctccgctcacctgacgcgtcagctgttggaaaccacgggtggatgtgctttcctgcccagccagtgggaaaaagagtatccacagttggtggccgccaccgagatcccgccgattatccgcccactgtatgccgtctggttgcaaaacagcgatcaacagcctttgattcggcaattacttaaaatacctttaaataccgcagcctaa

SEQ ID NO: 426647 - DNA, 1590 bp, Serratia marcescens
atgcaacaacctcgtccaatccgccgggccctgctcagcgtgtctgacaaagccggtatcgttgaattcgccgaagcgctttcccagcgcggcgttgaactgctctccaccggcggcaccgctcgcctgctggcagacgccggtctgcccgttaccgaagtttccgactacaccggcttcccggagatgatggacggacgagtaaagaccctgcacccgaaagttcacggcggtattctcggccgccgcggacaggacgacgccgtcatgactcagcatgacatccagcctatcgacatggtggtcgtcaatctgtacccgttcgcccaaaccgtggcgcgcccggattgctcgctggaagacgcggtcgagaatatcgatatcggcggcccgaccatggtgcgctccgccgccaagaaccataaagacgtcgccatcgtggtgaagagcagcgactacgccgccatcattaccgagatggacaacaacgacggctcgctgcgctatgccacccgcttcgatctcgccatcaaggccttcgagcacaccgccgcctacgacagcatgatcgccaactacttcggcgcgctggtgccggcgtaccatggcgagaccgagcagccgtccggccgcttcccgcgcaccctgaacctcaactacatcaagaagcaggatatgcgctacggtgagaacagccaccagcaggccgccttctatatagaagaagaggtaaaggaagcgtccgtcgcgaccgccgaacagctgcagggcaaggcgctgtcttataacaacatcgccgataccgacgccgcgctggaatgcgtgaaagagttcgccgagccggcctgcgtgatcgtcaaacacgccaacccttgcggcgtggcgatcggcgatgacatcctggccgcctacgagcgcgcttaccaaaccgacccgacctccgcctttggcggcatcatcgcctttaaccgcgagctggatgccgccaccgcgcaggcgatcatcagccgccagttcgtggaagtgatcatcgcgccaaacgtcacccaggaagcgcgctccctgctggcctccaagcagaacgtgcgcgtgctggcctgcggccagtggcagcaacgtgtggcggggctggacttcaagcgcgtcaacggcggcctgctggtgcaggatcgcgatctgggcatggtaaccgccgccgatctgcgtgtggtatccgagcgtcagccgaccgaacaggaactgcgcgacgcgctgttctgctggaaagtggccaagttcgtgaaatccaacgccatcgtttatgcacgtgacaacatgaccatcggcataggcgctggccagatgagccgcgtttactccgccaagatcgccggcatcaaagcgggcgatgaagggctggaagtgaaagggtctgccatggcctccgacgccttcttcccgttccgcgacggcatcgatgccgcggcggcggtcggcatcacctgcgtgatccagccgggcggctcgatccgcgacgacgaagtgatcgccgccgccaacgaacacggcatcgccatgatctttaccgacatgcgtcacttccgccattaa

SEQ ID NO: 426648 - DNA, 1284 bp, Serratia marcescens
atgaacattttgattatcggcaacggcgggcgcgagcacgcgctggcctggaaagccgcccagtctccgctggcggataaagtctacgttgcgccgggcaatgccggcaccgcgctggaagccaatctggaaaacgtggcgatcgccgccaccgacatccctgccctggtcgctttcgcccagagccatgacatcggtctgaccatcgtcgggccggaagcgccgctggtgatcggcgtggtcgatgccttccaggccgccggtttgaaaatcttcggcccgtcgcaggccgccgcgcagctcgaaggctccaaagccttcaccaaagatttcctggcgcgccaccgcatcccgaccgccgaatatgaaaactttaccgaggtggagccggcgctggcctatgtgcgccgcaaaggtgcaccgatcgtcatcaaggccgatggcctggcggccggtaaaggcgtgatcgtcgcgatgacgctgcaggaagcggaagaggcggtgcgagacatgctggccggcaacgccttcggcgacgccggtcatcgcatcgtggtggaagagttcctcgacggcgaagaagccagcttcatagtgatggtcgacggcgagaacgtggtgccaatggccaccagccaggaccacaagcgcgtcggcgacggcgacaccggcccgaacaccggcggcatgggagcttactccccggcaccggtcgtgaccgacgaaatccaccggcgcgccatggatcaggtgatctggccgacggtgcgcggcatggcggcggaaggcaacacctacgtcggcttcctgtacgccggcctgatgatcgccgccgatggccagccgaaggtgatcgaattcaactgtcgttttggcgatcccgaaacccagccgatcatgctgcgcctgcgttccgatctggtggaactgtgcctggcgggtgccgaaggccgcctgaacgagaaaagctccgactgggacgaacgccctgcgctcggcgtggtgctggcggccggcggttatccgggggactatcgcaacggcgaagtgatccaggggttgccgcagcaggaaagcgccgacggcaaggtcttccatgccggtacgcgcctgcagggcgatgacgtcgtcaccagcggcggccgcgtgctgtgcgtaacggcgctgggcgacaccgtggcgcaggcgcagcaacgcgcctaccagctggcggaaggcattcagtggccgggcagcttctgccgcaaagatatcggttatcgcgcgattgcgcgcggcaagtga

SEQ ID NO: 426649 - DNA, 672 bp, Serratia marcescens
atggcgccccttttgtttgctcgtcgggcgctcatggccgttggcatcgccgtcggcctgagtgcctgcagtttccattccgatatccccagctttaccgccagcggcttcgtggccgatcagggtgtgatacgcctgtggcgtaaagacgatgagcaacatcgtccgcaggtgttggtcagcgtctacagcccttaccgtggtccgggtaccatcaccacgctgtacacctatcagggcgacgtgctgcgccaaatcaaacgcaacgacgccgacggcgatcgagattccattcagctgcgctttgccgacgacggcacggtgagctttatgcagcgccagttggcgacacgccgcgaaccgttgaccagcgatgaaatcgctctgtaccaatatcaggcgcggcggatccttgaagtgagcaatgcgctgcgcgccggcaaggtgaaattgctgcaggggcgctggatgcagggcgaggtgcaaacctgcgacggccaacgcatgaaaccggggctggatgccgcctccatcgtttggatcgagaaacgcgcccgcagcagtagccggccggtgagcgtcgcctggctggaagcgcccgaaggcagcgaactgctgctggtggcgaacgacgacttctgcagctgggaaccgaaagaagaccagctgtaa

SEQ ID NO: 426650 - DNA, 273 bp, Serratia marcescens
atgaacaagactcaactgattgatgtaatcgcggacaaggctgacctttccaaagcacaagctaaactggctctggaatccaccctggctgctattactgagtctctgaaagaaggtgatgcagtacaattggttggcttcggtactttcaaagtaaaccatcgtagcgagcgcactggccgcaacccacagactggcaaagaaatcaaaatcgcagcagccaacgtgcctgcgttcgtttctggcaaagcactgaaagacgctgttaaataa

SEQ ID NO: 426651 - DNA, 591 bp, Serratia marcescens
atgctacgtaacccgattcatttacgtctggaacggctcgaggcctggcaacatttgacctttatggccagtttgtgcgagcgtatgtacccgaattaccagatgttctgcaaacagaccgagttcggcgatccggcggtttatcgccgcattctggatttggtgtgggaaacgctggtggtgaaggacgccaaggtcaacttcgacagccagctcgagaagttggaagaggcgattccgtcggcggaagattacgatctttacggcgtttacccggcaattgatgcctgtatcgcattaggggaactgatccattcgcggctcggcggggagacgctggagcacgccattgccatcagcgaaacatcgattcgcaccgtggcgatgttggaaatgacccaagccggtaaggaaatgaccgacgaagagttggaaagtttgcctgcggtagaggaagaatgggacattcaatgggaaattttccgcctgttggacgcctgtgaagagcgcgatatagacctgatcaaggggctgcgatccgacctgcgagaggccggtgtcagcaacatcgggataaatttagcgcaataa

SEQ ID NO: 426652 - DNA, 687 bp, Serratia marcescens
gtgaccgatatggcggccctgcgcgccgaacagctgcggcgcgcggctgaagtcattcgctacgacgatctgccggccgaaccgccgactttcatcgccggcgccgacgtgggcttcgagcaagaaggggcggtgacgcgcgccgccatcgccattctgcgctatccgtcgctggagctggtggagtatcaggtggcgcgcatcgccaccgtcatgccctacatcccgggcttcctgtcgtttcgcgaatacccggcgctgttggccgcctgggggcagctgcagcagaaaccggggctgatcttcgtcgatgggcatggcatttcgcatccgcggcgtctcggcgtcgccagccatttcggcctgctggtcgatgtgccgaccatcggcgtggccaagaagcgcctgtgcggcaaattcgcgccgctggacgccgccgtcggcgcgctggcgccgctggaagataagggtgaaccgctgggctgggtgtggcgcagcaaggcgcgttgcaacccgctgttcatctctaccggccatcgcgtgagcgccgacagcgcgctggcatgggtgcaacgctgcatggcgggctaccgattaccggagccgacccgctgggccgacgccatcgcgtcgcgccgtccggcgtttcagcgttggttgcagcagcatccggaggtgtcgccatga

SEQ ID NO: 426653 - DNA, 1065 bp, Serratia marcescens
atgactgagttgaagaacgatcgctacctgcgcgcgctgttgcgccagccggtggatgtgacccccgtatggatgatgcgccaggccggtcgttatttaccggagtacaaggcgacccgcgcccaggccggtgatttcatgtcgctgtgcaagaacgcggagctggcctgcgaggtcacgctgcagccgctgcgccgctatgcgctggacgccgccatcctgttctccgacattctcaccattcccgacgctatggggctcggcctgtactttgaagccggcgaaggcccgcgtttcagctcccccgttacctgccgcgccgacgtcgacaagctgccggtgttcgatccggaagtggagctgggctatgtgatgaacgcggtgcgcaccattcgccgcgagctgaagggcgaagtgccgctgatcggcttctccggcagcccgtggacgctggcgacttatatggtcgaaggcggcagcagcaaagccttcaccaagctgaagaagatgatgtatgccgaaccggccacgctgcatctgttgctggacaagctggcggacagcgtgatcctgtacctcaatgcccagatcaaagccggcgcgcagtcggtgatggtgttcgacacctggggcggcgtgctgaccgggcgcgactaccgcgagttctctttgcactacatgcacaagatcgtcgacgggctgctgcgtgaaaacgacggccgccgcgtgccggtgacgctgttcaccaaaggcggcgggcagtggctggaggcgatggccgccaccggctgcgatgcgctggggctggattggaccaccgacatcgccgacgcgcgtcggcgcgtcggcgacaaagtggcgctgcagggcaatatggatccgtcgatgctgtatgcctccccggcgcgcatcgcggaagaagtggagaccattctggccggtttcggccacggcaacggccatgtgttcaacctgggccacggcatccatcaggatgtgccgccggagcacgccggcgccttcgtcgaggcggtacacgcgcactcggcgaaataccaccgttaa

SEQ ID NO: 426654 - DNA, 795 bp, Serratia marcescens
gtgaagctgaggttgtgcaacaacgatatggaacttgcattaacgggcaatgaaaacggctggtggatcgtcagccatgaaagcaaactttggttaccgaacggtgaattgccgtcggggacggccgccaccctcgggctgcagggccgtatggcgcgcaccatcggtgagtgggcgggtgcgccggtttggctggtgcgccaggcgatgccgcgggagatgggctcggtgcgtcagctgttggatctggatcgcggtctgtttcagcttgccgggcgcggcgtgcagctggcggatttctaccgttcacatcgctattgcggctactgcggccatgagatgcacctcagccgcagcgagagcgcctgcctgtgtggccactgcaaagagcgctactatccgcagattgcaccctgcgtgatcgtcgccattcggcgcgaggatcagatcctgctggcgcaacacgtgcgccatcgcggcggtatccacacggtgctggccggcttcgtcgaagtgggcgaaacgctggagcaggcggtagcgcgcgaagtgatggaagagagcaatatcgaaatcaagaacctgcgctacgtcacttcacaaccctggccgttcccgcactcgctgatgatggcctttatggccgattaccatcagggggaaattcgtcacgatcccaaggagctgctcaacgctggctggtatcgctacgaccaattgccgctgttgccgccgcccggcaccgtggcgcgccggttgattgaggacaccgtggcgctgtgccgggcagaataa

SEQ ID NO: 426655 - DNA, 492 bp, Serratia marcescens
atgctcaaccgtttggaaaggctgactcagcgcgttggcggtagtaatgaattagttgatcaatggcttcaggcccgcaagcagttgctggtcgcctactgcacgctggtaggcctcaaaccgaataaagaaaagcatacgccgctgaatgaaaaagcgctggagaacttttgccacaacctggtggattacctctccgcagggcattttcatatctatgacagaattatcaaacaagtggaaggcgcagccagtccgaaaatgtcgctggcggtgaacatctaccccaagctgtgggccaataccgaacagatcatggcgttccacgatcgctataccgaagtggatatcgatcaggaggtttgtctggaattccaccaggccttgtcggatatcggcgaaacgctggcggcgcgctttgcgctggaagataagctgatcctgctggaggcggaagccgcgcagcaaccgcagccggatccggcgcgttaa

SEQ ID NO: 426656 - DNA, 1944 bp, Serratia marcescens
atgtctaacgttaatccaccgcgcgcccgtaaagcgcaacgcgaagccgcccagcagtttatcgacaccctgcaaggcatggctttcccgaactcacgccgtatctatctgcaaggctcgcgcagcgatatccaggtgccgatgcgcgaaattcagctcagcccgaccctgctcggcggcagcaaagacaacccgcagtatgaacccaacgaggcgatcccggtgtatgacaccgccggcccctacggcgatccgcaggccaagctcgacgtgcacgccggtctcgccaaactgcgcgccggctggatcgacgcgcgcggcgataccgccaccctcagcggcgccagctccggcttcacccaacagcggctggcggacgaggggctggatcatctgcgcttcgaacatctgccgctgccgcgcaaggcgctgccgggcaggcgcgtgacccagctgcactatgcccgcgccggcatcgtcaccccggagatggagttcatcgccatccgtgaaaacatggggcgcgagcgcattcgcggcgaggtgctgcgccaccagcacccgggccaaagctggggcgccaacctgccggacaacatcacgccggagttcgtgcgccatgaagtggccgccggccgcgccatcattcccgccaacatcaatcacccggaggcggagccgatgatcatcggccgcaatttcctggtgaaggtgaacgccaatatcggcaactcggcggtcacgtcgtcgatcgaagaagaggtggagaagctggtgtggtccacccgctggggcgcggacaccgtgatggatctctctaccggccgctatattcacgaaacccgcgagtggattctgcgcaacagcccggtgcccatcggcaccgtgccgatctaccaggcgctggagaaggtcaacggcgtggcggaaaacctcacctgggagatgttccgcgatacgctgctggaacaggcggagcaaggagtcgactacttcaccatccacgccggcgtgctgctgcgctacgtgccaatgaccgccaaacgcctgaccggcatcgtgtcgcgcggcggctcgatcatggccaaatggtgtctgtcgcaccatcaggaaaactttctctatcagcatttccgtgaaatctgtgagatctgcgccgcctacgacgtttcgctgtcgctcggcgacggcctgcgccccggctcgattcaggacgccaacgacgaagcccagttcgccgagctgcatacgctgggcgagctgaccaaaatcgcttgggaatacgacgtgcaggtgatgatcgaaggcccgggccacgtgccgatgcagatgatccgccgcaacatgaccgaagagctggaacactgccacgaagcgccgttctacaccctcggcccgctgaccaccgatatcgccccgggctatgaccatttcacctccggcatcggcgcggcaatgatcggctggttcggctgcgccatgttgtgttatgtcacgccgaaagaacacctcggcctgccgaacaaagaggacgtcaagcagggcctgatcacctacaagatcgccgctcacgccgccgatctggccaaaggccatccgggtgcgcagatccgcgataacgccatgtccaaggcgcgtttcgaattccgctgggaagatcagttcaatctggcgctcgatccggccaccgcccgcgcctatcacgacgaaaccctgccgcaggagtccggcaaggtcgcccacttctgctcgatgtgcgggccgaaattctgctcgatgaaaatttcgcaggaggtgcgcgactacgccgcggcccaggaggccgccaagccgatcgaagtgcagctgaccggcatggagaaaatgtccgccgagttccgcgcccgcggcagcgagctgtatcacagcgccggcaccctgcaagaggagacaagcaatgactga

SEQ ID NO: 426657 - DNA, 651 bp, Serratia marcescens
atgactgatatcacgacccccttcccggctacgccccacaagctggggctttacccggtcgtcgacagcgtggaatggatcgctcgcctgctggaggccggcgtcaccaccatccagctgcgcatcaaggatctgcctgacgagcaggtcgaaacggatatcgccgccgccatcgcgctaggccagcgttatcaggcgcggctgttcatcaacgactactggcggctggcgatcaagcacggcgcttacggcgtgcatctgggccaggaggatctcgataccaccgatctggcggccattcaccgcgccggtctgcggctaggcgtgtccacccatgacgacgccgagctggcgcgcgcgctggcggtgaaaccttcctacatcgcgctggggcacatcttccccacccaaaccaaagacatgccttcggcgccgcaggggctggcggagttgaaacgccacatcgccggcctggcggattacccgacggtggcgatcggcgggatcagcatcgatcgcgtaccggcagtgctggcgtgcggcgtcggcagcgtggcggtggtcagcgccatcacccaggcgccggactggcgcgcggcgacggccgagctattgcggctgatcgaaggcgaggatccgaacgatgcttaa

SEQ ID NO: 426658 - DNA, 750 bp, Serratia marcescens
atgcttaacgatcaggaattcctgcgctacagccgccagctgctgctggaggacgtcggcccggaaggccaggagaggctcaagcgcgccacggtgctgatcgtcggtttgggcgggctcggttccccggcttcgctgtatctggccgccgccggcgtcggcacgctgctgctggccgacgacgaccagctgcatgtcaccaacctgcagcggcaaatcctctaccgcagcgccgataccgccaccggcaaggcggcgctggcgcaacgccacctgcaggcgctgaacccgttggtggaatccatcccgctggcgcagcggctgcaggggcaagcgctgcgcgacgcggtcgcccgcgccgatctggtgctggactgctgcgacaatatggcgacccgtcatgaggtcaatgccgcctgcatcgccgccgccaagccgctgatcagcggcagcgcggtcggcttcagcggccagctgctggtgctcgagccgccctatgcgcacggctgctacgcctgcctgtacccggagcaggaagagccgcagcgcaactgccgcaccgccggggtgctcggcccggtggtgggcgtgatcggcactctgcaagcgctggaagccatcaagatgctggccggtatgccttcctccctcaacggcaagctgcggctgttcgacggcaagcagcagagctggagcacgctgcaactgagccaggcccgcgcctgcccggtatgcggaggcgcggcatga

SEQ ID NO: 426659 - DNA, 201 bp, Serratia marcescens
atgaagatccgtctgaacgaccaaccgctggagctggcgcagccgctcagcgtcgccgccctgctgacccagctggaacgccaccagccgggcactgcgctggcgatcaaccaaaccatcatcccgcgcgccgactgggccgaccatcaggtgcaggacggtgacgacattttgctgtttcaagcgatcgccggaggctga

SEQ ID NO: 426660 - DNA, 780 bp, Serratia marcescens
atgctgaaaatcgccgataccacttttacctcgcgcctgttcaccggcaccggcaagttcgccactccggcgttgatgctggaggcgctggcggcctccggctcacagctggtgaccatggccatgaagcgcgtcgatctgcgcggcggcaacgacgccattttggcgccgctgcagcagctgggcgtaaggctattgcccaacacctccggcgccaaaaccgccgccgaagcggtgttcgccgcccggctggcgcgcgaagcgctcggcacccactgggtgaagctggagatccatcccgatgtgaaatacctgctgccggatccgatagaaacgttgaaggcggcggaaacgctggtgaaagacggttttgtggtgctgccctactgcggcgccgatccggtgctgtgcaaacggctggaagaggtgggttgcgcggcggtgatgccgctcggcgcccctatcggctccaaccgcggtctgcgcacccgtgacttcctcgagatcatcatcgagcaggccaaggtgccggtggtggtcgacgccggcatcggcgcgccgagccacgcgctggaagcgatggagctgggcgccgacgcggtgctggtgaataccgccatcgccgtggcgcgcgacccggtgcaaatggcacgggcgtttcgcctggcgctggaggccggcgagctggcgcgcagcgccggattgggtgcctgccagcgcggtgcggccgcctccagcccgctgaccgccttcctcagccaaccagaggaggcgcagtga

SEQ ID NO: 426661 - DNA, 1134 bp, Serratia marcescens
atggccgacgatttcagtagccgctggcaacagctggattgggacgacattacgctacgcatcaacggcaaaaccgcacgcgacgtggaacgcgcgttgaccgccgacaagctgacgcgcgacgactttatggcgctgatctcccccgccgccgcgccgtatctggaaccgctggcgcagcgcgcgcagcagctgacccgtcagcgcttcggcaacgtcgtcagcttctatgtgccgctgtacctttctaacctgtgcgccaacgactgcacctactgcggcttttcgatgagcaaccgcatcaagcgcaaaacgctggacgcggcggagatcgcacgcgagtgcgaagccatcaaggcgctggggttcgagcacctgttgctggtcaccggcgaacatcagagcaaggttggcatggactatttccgtcagcacattccggcgatccgccgccacttcagctcgctgatgatggaagtgcagccgctggcgcaggacgagtacgccgaactgaaaacgctgggcctggacggcgtgctggtctatcaggaaacctaccacccggccacctatctgcagcaccatctgcgcgggcagaagcaggattttcattggcgcctggccacgccggatcgcctggggcgcgccgggatcgacaagatcggcctcggtgcgttgatcggcctgtccaacagctggcgcactgactgctacctgctggcggaacatctgttctacctgcagcaaacctactggcagagccgctactcgatctcgttcccgcgtctgcgcccctgcgccggcggcattgagccggcgtcgatcatgagcgagcctcagttggtgcagctgatctgcgccttccggctgttcgcaccggacgttgagctgtcgctgtctacgcgtgagtcgccgtacttccgcgatcacatgatcccggtggcgatcaacagcgtcagcgccggatccaagacgcagcccggcggctatgccgacgatgtgccgccggagttggaacagttcgagccgcacgacggccgcacgccacagcaggtcgccgaggccatcagcaacgccgggctgcagccggtgtggaaagactgggacggttatctgggacgcagcacgcaataa

SEQ ID NO: 426662 - DNA, 780 bp, Serratia marcescens
atgaagaaaacgccaaattacatcgatgcaatcagcgcgttgctcactctgaaaggagttggcgacagaaagcatgcctccacgatggccaacatactgaaccttcagtacaacagcgccaaacagaagctggatggcaaaagaggcatcaccctcgatgaagtcaaaaaggtatttcagtacttcaacgagccgtttgccggccaaaggacgcataacgccgtctttatcatgaacagcattcacaagcgctgcaatattgaggttgacgagcgcccggtcacgcaagcggacaacgacgaaacctacgcctgcaaaaaagacgatcttttcatcatcaacaccaatcgggaacatgccgccgaggctccgctgtacaaagtcaacaagatagactttctgccggccccgcgtatcgcgatcctggacaatgatggggatattctcgaactgttgaagaagatcgccagccgctacggcatcgagactgagacctttcagacggcggacgccatgctggccgcgctggaacagcagtcctttgaggcgtttattctggactggctgttggatttcggcgagacctccgaacgcgtcgtgaagaaaattaaagacgccctcgatccgcacgcccgcatcatcattctgaccggccagctgaatcactacgagaaaaacatcggcgatatgatcctgcactatgacgtacatctggtggaaaaaccgaccaagccgctgattatctcctcgctgctgctgtcgaacctattctttaattag

SEQ ID NO: 426663 - DNA, 1275 bp, Serratia marcescens
atgagcaaaaaactgatcggtactcttatcgcgttggttgccatcttctccttattgattttgttgattgccattaacttcggcggcgtaaaagaacgctataagcagatcgagcccaatctggacaactactcggtggccgagatcctctttctggcgtttgaaagaaccaaaaccgcgctgctgctcagtgaaaataacgactacgacgccttccagatcaaaaagaaaatcttcaactcgaagattcagatcctggagagccgttcgaccttcagcgactccttttattacgacgaagagttcatcaagaatgttgcgctgctgaagcagcagtaccgcacgttggacgatctctccaccggcttgctggtggggcagaaaaacaaggcggacattctctcttatatggatgatatcgagggcacgctggtcgatatccaggaaattatttatcggatacagattaaaaactttaccgaagtgaaaggcatcatccaggagaattcgagtaaagccgagatgttcgccctcttttcgttgattttggtgtttctgatgatgttcctggtgctgagaaatgccttctcgttaaaagagatcatcaagaacaagaacatctttatctcttccatttaccacgagatcgccggctcgactcaggccatcgtcattgccgcggatatcatggagcacgagctggcgcaggaagagttgaaaaaagaagcccgcctgatctcctatcacggcaataagatcgccgaacaaacgcgcgaggtgatggattattcgcggcttgagatgggggaagtcaaaatcaatatttccaccttccggctgaatgaggtggtggacgatgccgtaaccggcatcggcgccgggcgcggcaatcgcctcgtgattcaccgttcgtcttatgccggcctgattggttctgataaatacaagctctaccgaatattggccaacctgctcagcaacgcggataaatttacccaccgcggcgcgataacccttaacgtgaaggtatgtcacggcaatctgtatttgcgagtaaaagacaccggcatcgggtttaacgtcaaaaatctggatcggttgtataaggcgttcaatcagggggtggaaagggaaacgcggcaggggttggggctggggctgaccattatcaaaaattacgtcacgacgatgaaaggtaccattaaagccaaatccgtcgaaggagtgggctcatcgtttttgatccgcatcccggtcaaactaattaaagaatag

SEQ ID NO: 426664 - DNA, 465 bp, Serratia marcescens
atgaaaatcaacggattgatgacgttactgctgctttcgctgttcagcgcgccgctgtatgcggccgttgactatttttacctgaagccgctcgacggcgagaagatcaagataacccggcagatgctggaggcgatgccgtcgcacacgattaaaacctcgaccaatttcaccccggaagatacgttcaccggcgttgagcttgcggagctggtgaaagcctatcatctgaagggccagtcggtgcgcgctttcgcctgggatgattactcctattcgatgccgattgacgagatgactaaataccgcgtgatcgtcgcctatcagcgcggcggcaagccgatcgacgtgggggaactggggccgttcgccattatttatccgcgcgatagctacgccgagctgaataacctggatgtgaacgcgaaaaccgtctggcaagttaaacggttggagctgaaataa
